United States Patent Application Publication US 2026/0055430 A1 - sequence listing, part 6

SEQ ID NO: 19986 - DNA, 260 bp, Unknown
  Description of Unknown: LeftRegion for integrase B6987 sequence
agaattgctagacaccggaattttgacaaaagaagaatttgaaactcaaaagcaacgacttttacaataaaaaaagcttcatactctcaaagtttgacgactcagagcatgaagctagtgacaagaaagatttttcaaaagagtctatcttttgaagtcttttcttgtacccattttatcaaaaaagaggtacaaaaacaatgattgcaacaaataaagtagctatctatattagagtatcaacaacaaatcaagcagag

SEQ ID NO: 19987 - DNA, 260 bp, Unknown
  Description of Unknown: LeftRegion for integrase B6988 sequence
ttatgggattctatgttcaataagcatcctcataaaaattactatatttattaaaaaaagaaccggccacaaaggaccggctccaagaatggtattaaccactccctagacaagaatgattatactatttttggagcacctttgcaaacggtgttatttttttaccgtttttttcataaatttacaaaaggagtttcaaaatgaaaataggagctttatatattagagtatctacagatgatcagttggaatactcacct

SEQ ID NO: 19988 - DNA, 260 bp, Unknown
  Description of Unknown: LeftRegion for integrase B6989 sequence
ttagttgataacggcgtactcactgaggaagaatttcaagcacagaaagctaaattattatcacaataaaaaaagccctacactcaccgtcgccaaacttcgagtgtagagcaagcatcacagaaaaaatcgtgtaaactgagagcagtcttacaagtctttttctgtacccattttatcaaaaacgaggtacaaacacaatggcaacacataaagtcgctatctatgtccgagtatcgaccacatcgcaagttgatgaa

SEQ ID NO: 19989 - DNA, 260 bp, Unknown
  Description of Unknown: LeftRegion for integrase B6990 sequence
aaaatcattttaccattttgttatgccacaaaccccataaaatcaatactttaataccatctataacacaataacataattatttctaacttaatagaagaaatataatatatatagatatatagagaaaaatataaaatatataaggagttaggattttttttgttattctgttattttgttaaaaacggaggcaaaaaatgattgataaagaaatagtagctctgtacgttcgagtatctacccaggagcaagcgcga

SEQ ID NO: 19990 - DNA, 260 bp, Unknown
  Description of Unknown: LeftRegion for integrase B6991 sequence
ctaccaacctctttacgagggaaatatgtgggttgatgtttttacaaaacgcatcaaattcgctacaagtcacattaaataaaaaaagccttgcgttccaagattgccgtctggggaacacaaggctaggtagcaagaaatcaggcattaaaaagccctttttcttgtacccattttatcaaaaaagaggtacaaacacaatggcaacacataaagtcgctatctatgtccgagtgtcgaccacatcgcaagttgacgag

SEQ ID NO: 19991 - DNA, 260 bp, Unknown
  Description of Unknown: LeftRegion for integrase B6992 sequence
attggttgataacggcgtactcactgaggaagaatttcaagcacagaaaactaaattattatcacaataaaaaagccctacactcaccgtcgccaaacttagagtgtagagctagcaccacagaaaaaacgtgtaaactggaaaacagccttacatgttcttttctgtacccattttatcaaaaacgaggtacaaacacaatgacaacgcataaagttgctatctatgtccgagtatcgaccacgtcgcaagctgacgag

SEQ ID NO: 19992 - DNA, 260 bp, Unknown
  Description of Unknown: LeftRegion for integrase B6993 sequence
ttatgggattctatgttcaataagcatcctcataaaaattactatatttattaaaaaaagaaccggccacaaaggaccggctccaagaatggtattaaccactccctagacaagaatgattatactatttttggagcacctttgcaaacggtgttatttttttaccgtttttttcataaatttacaaaaggagtttcaaaatgaagataggagctttatatattagagtatctacagatgatcagttggaatattcacct

SEQ ID NO: 19993 - DNA, 260 bp, Unknown
  Description of Unknown: LeftRegion for integrase B6994 sequence
ccagcaaatcttaagcgataaactggataaaataattaaacatcttgaaaacaaaaaagccctacactcaccgtcgccaaacttagagtgtagagcaagcatcacagaaaataaaaacgctagataaccagcttaaacataatcgaggttatgcgttcttttttctgtacccattttatcaaaaacgaggtacaaacacaatgacaacacataaagttgctatctatgtccgagtgtcaaccacatcacaggttgacgag

SEQ ID NO: 19994 - DNA, 260 bp, Unknown
  Description of Unknown: LeftRegion for integrase B6995 sequence
ccacctttcatcagtattttacaacgaacaatagtaaaaaatcaactgtttccattttggaaacaactcaaaaaagccccacactcactgtcgccaaacttagagtgtagagctagcagcacagaaaaaacgtgtaaactggaaacagccttacaagtctttttctgtacccattttatcaaaaaagaggtacaaacacaatggcaacacataaagtcgctatctatgtccgagtatctaccacatcgcaggttgacgag

SEQ ID NO: 19995 - DNA, 260 bp, Unknown
  Description of Unknown: LeftRegion for integrase B6996 sequence
gacggcaatgcactagctagccaaaagcttaacggatcaatggaagttaaagttaaataagacaataaaaaagccctataacctccctcgccaaagttagattatagagcttatgaatcacagaaagagcgatgtaaactggaaacagccttacacgttcttttctgtacccattttatcaaaaacgaggtacaaatacaatgacaatgcataaagttgctatctatgtccgagtgtcaaccacgtcgcaagttgacgag

SEQ ID NO: 19996 - DNA, 260 bp, Unknown
  Description of Unknown: LeftRegion for integrase B6997 sequence
tagttgataatggcgtactcactgaggaagaatttcaagcacagaaaactaaattattgtcacaataaaaaaaagccctacactcaccgtcgccaaactttgagtgtagagcaagcatcacagagaaaaacgtgtaaactgagagcagttttacaagtctttttctgtacccattttatcaaaaaagaggtacaaacacaatggcaacacataaagtcgctatctatgtccgagtatcgaccacatcgcaggttgacgag

SEQ ID NO: 19997 - DNA, 260 bp, Unknown
  Description of Unknown: LeftRegion for integrase B6998 sequence
ctagccaaaaacttaacggctcaatggaagttaaagtaaaataagacaataaaaaagccctacactcaccatcgccaaacttagagtgtagagcttatgcatcacagaaaacagaaaagctagataaccagttaaaacataatcgaggttatgctttcttttttctgtacccattttatcaaaaacgaggtacaaacacaatggcaatgcacaaagtagctatctatgtccgagtgtcaaccacatcgcaggttgacgag

SEQ ID NO: 19998 - DNA, 260 bp, Unknown
  Description of Unknown: LeftRegion for integrase B6999 sequence
agttgataatggcgttctaactgaggaagaatttcaagcacagaaagctaaattattatcacaataaaaaaagccctacactcaccgtcgccaaacttcgagtgtagagcttatgcatcacagaaaaaatcgtgtaaactgagagcagtcttacaagtctttttctgtacccattttatcaaaaacgaggtacaaaaacaatggcaacacataaagtagctatctatgtccgagtatcgactacatcgcaggttgatgag

SEQ ID NO: 19999 - DNA, 260 bp, Unknown
  Description of Unknown: LeftRegion for integrase B7000 sequence
ttatgggattctatgttcaataagcatcctcataaaaattactatatttattaaaaaaagaaccggccacaaaggaccggctccaagaatggtattaaccactccctagacaagaatgattatactatttttggagcgcctttgcaaacgttgttatttttttaccgtttttttcataaatttacaaaaggagtttcaaaatgaaaataggagctttatatattagagtatctacagatgatcagttggaatattcacct

SEQ ID NO: 20000 - DNA, 260 bp, Unknown
  Description of Unknown: LeftRegion for integrase B7001 sequence
gcagggtgtttctccgtgtaaagtttgcaatccatacatcccagatatgaaatggttttttgaaggaagagtattaacgaaatttatagacagtttttttgttgacaaagacgatgtaatggacgaaggcagcgaagaagaccaagatttacaatgacgtgttggcgtgattgtttaaacaattgaagagggtagacaatatggacaaaaaaattggtgcagcctatatccgcgtatcgacagacgatcagcttgaatac

SEQ ID NO: 20001 - DNA, 260 bp, Unknown
  Description of Unknown: LeftRegion for integrase B7002 sequence
caaagccgatagctgcgtccgaagaagatgaaaaataaaaaacgccccggtgctggaacaccaaagcgtttaatagaacagcttacccttggaggataatccgcccgacaatcggattatatcacctccaaggtaggcttggcaagtcataccttggaggtgcggtcgctcctccgtgaaaagaaggagcgtggattgaaatgcaggatttattacctaccgcgatttacgttcgagtgtccagcgagatgcaggccggc

SEQ ID NO: 20002 - DNA, 260 bp, Unknown
  Description of Unknown: LeftRegion for integrase B7003 sequence
ataataaagagtatagtccgatggtaattactccggatacaccggcccgtattattggaaaagctatgaaagtaagttttgatctataaaaaaagcacattcccggtcgccaaactagaaaatgtgctcaaaaattttgaaacctagggtataggtctctttcttgtaccctattttaacaaaaatatggggggtttactatgaaatttgctatttatgtacgtgtatctacacttgaacaagctgaggaaggatactca

SEQ ID NO: 20003 - DNA, 260 bp, Unknown
  Description of Unknown: LeftRegion for integrase B7004 sequence
agttgataatggcgttctaactgaggaagaatttcaagcacagaaagctaaattattatcacaataaaaaaagccctacactcaccgtcgccaaacttcgagtgtagagcttatgcatcacagaaaaaatcgtgtaaactgagagcagtcttacaagtctttttctgtacccattttatcaaaaacgaggtacaaaaacaatggcaacacataaagtagctatctatgtccgagtatcaaccacatcgcaggttgacgag

SEQ ID NO: 20004 - DNA, 260 bp, Unknown
  Description of Unknown: LeftRegion for integrase B7005 sequence
tcaattggtaaattttgacaaattcacacaagaagaagctgacaatgctgtcaaaaatctgaaataaaacaaaaagccccacactcaccgtcgccaaacttagagtgtagagcagtatcacagaaaaaaccgtgtaaactggaactagtcttacatgttcttttctgtacccattttatcagaattgaggtacaaatacaatgactatgcataaagttgctatctatgtacgagtgagcaccacgaatcaagtcgaggaa

SEQ ID NO: 20005 - DNA, 260 bp, Unknown
  Description of Unknown: LeftRegion for integrase B7006 sequence
accgggaagaattagagggggataaagaatatactgaggtcagcgaagataattcctatcgagcttctcaggcgtaagagggcgttggaggtgatactacgaaagcggtaatctatgccagatattcaagccataatcaacgagaggaatctatagagggacagcttcgggagtgtcacgactttgctctcaaaaacggaatgacaatcattggtgagtattgtgatagagcgatctcagggaagacagataaccgtccg

SEQ ID NO: 20006 - DNA, 260 bp, Unknown
  Description of Unknown: LeftRegion for integrase B7007 sequence
agccgatagctgcgtccgaagaagatgaaaaataaaaaacgctccggtgctaccaacaccgaagcgtttaaaaagaacagcttaccacagaggtggcaatccgcccgacaatcggattatatcacctccaaggtaggcttggcaagtcataccttggaggtgcggtcgctcctccgtgaaaagaaggagcgtggattgaaatgcaggatttattacctaccgcgatttacgttcgagtgtccagcgagatgcaggccggc

SEQ ID NO: 20007 - DNA, 260 bp, Unknown
  Description of Unknown: LeftRegion for integrase B7008 sequence
gattactaatttatcaatcgcttaaccatatcggtgacttcaccgtaatgttaaaaaaagaaccggccacaaaggaccggctccaagaatggtattaaccactccctagacaagaatgattatactatttttggagcacctttgcaaacggtgttatttttttaccgtttttttcataaatttacaaaaggagtttcgaaatgaagataggagctttatatattagagtatctacagatgatcagttggaatattcacct

SEQ ID NO: 20008 - DNA, 260 bp, Unknown
  Description of Unknown: LeftRegion for integrase B7009 sequence
aatgcactagctagccaaaagcttaacggatcaatggaaatcaaagttaaataagacaacaaaaaagccctataatctccctcgccaaagtttgattatagagcaagcatcacagaaaaaatccataaccagcaaaaaaatgaattgaggttatgtgttcttttctgtacccattttatcaaaaacgaggtacaaacacaatggcaacacataaagtcgctatctatgtccgagtatctaccacgtcgcaggctgacgag

SEQ ID NO: 20009 - DNA, 260 bp, Unknown
  Description of Unknown: LeftRegion for integrase B7010 sequence
tgtatagcgagacatctttaaccaatcacgataaaaatgttttggaaaatctattaagagagaatctatatttgttagaacgtatagaaaaataaaaaagccgctctcctcgaccaaaatttgagcggcttagcaaaaaataacctaaggcataggctttttttctatgcctattttatcaaaaaataggagtgattaccatgagaaccgcaatttatgtgcgagtttcaacgcttgaacaagctcaagaaggatattct

SEQ ID NO: 20010 - DNA, 260 bp, Unknown
  Description of Unknown: LeftRegion for integrase B7011 sequence
acaagctggacgaatacttaggctattttagcccagaggctgttagtctagccaatcaactttacaaataaaaaagccccacgctctcaaactttggcgagtctgagcgtgaggcaacgaggcaagaaaacatttcaaaaggtcaatcctcttgaggcgttttcttgtacctattttatcaaatttgaggtacaaaaacaatgaaaacaacaaacaaggtcgctatatacatcagagtttcgaccacttcgcaggtcgaa

SEQ ID NO: 20011 - DNA, 260 bp, Unknown
  Description of Unknown: LeftRegion for integrase B7012 sequence
aatgcactagctagccaaaagcttaacggatcaatggaaatcaaagttaaataagacaacaaaaaagccctataatctccctcgccaaagtttgattatagagcaagcatcacagaaaaaatccataaccagcaaaaaaatgaattgaggttatgtgttcttttctgtacccattttatcaaaaacgaggtacaaatacaatgacaatgcataaagttgctatctatgtccgagtgtcaaccacgtcgcaagttgatgag

SEQ ID NO: 20012 - DNA, 260 bp, Unknown
  Description of Unknown: LeftRegion for integrase B7013 sequence
agttgataatggcgttctaactgaggaagaatttcaagcacagaaagctaaattattatcacaataaaaaaagccctacactcaccgtcgccaaacttcgagtgtagagcttatgcatcacagaaaaaatcgtgtaaactgagagcagtcttacaagtctttttctgtacccattttatcaaaaacgaggtacaaaaacaatggcaacacataaagtagctatctatgtccgagtatcgaccacgtcgcaagctgatgag

SEQ ID NO: 20013 - DNA, 260 bp, Unknown
  Description of Unknown: LeftRegion for integrase B7014 sequence
ttatgggattctatgttcaataagcatcctcataaaaattactatgtttattaaaaaaagaaccggccacaaaggaccggctccaagaatggtattaaccactccctagacaagaatgattatactatttttggagcacctttgcaaacggtgttatttttttaccgtttttttcataaatttacaaaaggagtttcgaaatgaagataggagctttatatattagagtatctacagatgatcagttggaatattcacct

SEQ ID NO: 20014 - DNA, 260 bp, Unknown
  Description of Unknown: LeftRegion for integrase B7015 sequence
ttagttgataatggcgtactcactgaggaagaatttcaagcacagaaaactaaattattgtcacaataaaaaaagccctacactcaccgtcgccaaactttgagtgtagagcaagcatcacagagaaaaacgtgtaaactgagagcagttttacaagtctttttctgtacccattttatcaaaaaagaggtacaaacacaatggcaacacataaagtcgctatctatgtccgagtatcgaccacatcgcaggttgacgag

SEQ ID NO: 20015 - DNA, 260 bp, Unknown
  Description of Unknown: LeftRegion for integrase B7016 sequence
cgacggttcagctattgcaagtcagaaacttaacggagaaatgaaagttaaggttaaataaaacaacaaaaaaagccctacactcaccgtcgccaaacatagagtgtagagctaacatcacagaaaaaaccgtgtaaactggaactagtcttacatgttcttttctgtacccattttatcaaaaacgaggtacaaatacaatgacaatgcataaagttgctatctatgtacgagtgagcaccactaatcaagctgaggaa

SEQ ID NO: 20016 - DNA, 260 bp, Unknown
  Description of Unknown: LeftRegion for integrase B7017 sequence
tcaattggtaaattttgacaaattcacacaagaagaagctgacaatgctgtcaaaaatctgaaataaagcaaaaaagccctacactcaccgtcgccaaacttagagtgtagagcagcaccacagaaaaaacgtgtaaactggaactagtcttacatgttcttttctgtacccattttatcagaattgaggtacaaatacaatggcaatgcataaagttgctatctatgtacgagttagcaccacgaatcaagccgaggaa

SEQ ID NO: 20017 - DNA, 260 bp, Unknown
  Description of Unknown: LeftRegion for integrase B7018 sequence
accgtgaagaattggagggggataaagaagttcctacgaacggagaagatagtccccatagaattgctcatgcgtaaaaaggcgttggaggtgatactacgaaagcggtaatctatgccagatattcgagccatagccaaagggaagaatccatagagggacagcttcgggagtgtcacgactttgcgctgaaaaacggaatgaccatcatcggtgagtactgcgataaggcaatctcaggaaagaccgacaatcgaccg

SEQ ID NO: 20018 - DNA, 260 bp, Unknown
  Description of Unknown: LeftRegion for integrase B7019 sequence
ataataaagaatatagtccaatggtaattactccggatacaccggcccgtattattggaaaagctatgaaagtaagttttgatctataaaaaaagcacattcccggtcgccaaactagaaaatgtgctcaaaaattttgaaacctagggtataggtctctttcttgtaccctattttaacaaaaatatggggggtttactatgaaatttgctatttatgtacgtgtatctacacttgaacaagctgaggaaggatactca

SEQ ID NO: 20019 - DNA, 260 bp, Unknown
  Description of Unknown: LeftRegion for integrase B7020 sequence
gacgacggcaatgcactagctagccaaaagcttaacggatcaatggaagttaaagttaaataagacaataaaaaaaccctacactcaccgtcgccaaacttagagtgtagagctagcatcacagaaaaaacgtgtaaactggaaacagccttacaagtctttttctgtacccattttatcaaaaaagaggtgcaaacacaatggcaacacataaagtcgctatctatgtccgagtatctaccacatcgcaggttgacgag

SEQ ID NO: 20020 - DNA, 260 bp, Unknown
  Description of Unknown: LeftRegion for integrase B7021 sequence
cagtgctattgcaagtcaaaaacttaatggagaaatgaaagtcaaggttaaataagacaataaaaaaagccctataatctccctcgccaaagtttgattatagagcagcaccacagaaaaaatccataaccactgaaaaatgaattgaggttatgtgttcttttctgtacccattttatcagaattgaggtacaaacacaatgacaacacataaagttgctatctatgtccgagtgtcaaccacatcacaagctgacgag

SEQ ID NO: 20021 - DNA, 260 bp, Unknown
  Description of Unknown: LeftRegion for integrase B7022 sequence
ctctagctagccaaaagctcaacggatcaatggaagttaaagtaaaataagacaacaaaaaagccctataatctccctcgccaaagtttgattatagagcaagcatcacagaaaataaaaacactatcacggtgaagcaacctaacaagattgtgttcttttttctgtacccattttaacagaattgaggtacaaacacaatggcaacacataaagtcgctatctatgtccgagtatcgaccacatcgcaagttgacgag

SEQ ID NO: 20022 - DNA, 260 bp, Unknown
  Description of Unknown: LeftRegion for integrase B7023 sequence
tacatttattttgtgaaataaaaagaacttttctttaatttaaaagaaaaattcttctctgtacctaaccatctttgccaatgggtaaattcgattactaaaagatatctcccacaactgtggaaggcattgaatataacattggctagcactagtatatcattttttagataagccttacaaaaatggaggaaattcatatgccgaaagttgcaatctatgcacgtgtctctacactcaaccaagctgaagaaggttac

SEQ ID NO: 20023 - DNA, 260 bp, Unknown
  Description of Unknown: LeftRegion for integrase B7024 sequence
taaccataaaactttgcctctttggcatttataaccaccccctaactttattctattcctacatatatattatgtgctctgcataatcaattaacagatgccaagcaacatatatagcaaaaatcaacacatttttatctctgaaacatattatgacttatagcaaattcacttagattaagcgatagaaagtgattattatggaaaaaaaacttaagaccgctgcggcatatatcagagtatctacagaccgacaaacc

SEQ ID NO: 20024 - DNA, 260 bp, Unknown
  Description of Unknown: LeftRegion for integrase B7025 sequence
cttcgtttttctacttaatgttcttaaagatattctttttttatctcgcatttcacgtattttaatttctatcatatcctttttcctttcgttcattttagtctccccaaaattggcgtttttatatgatagaaatctgcttatttatttataactaaaaagtaacttattaaaaaaaaattttaaaaaaattatattttatgagtaaatccaaaatttattgtttaaaatatttatatactataacatttagcaaaggg

SEQ ID NO: 20025 - DNA, 260 bp, Unknown
  Description of Unknown: LeftRegion for integrase B7026 sequence
aaccataaaactttgcctctttgacaatttataaccaccccttaactttattctattcctacatatatattatgtgctctgcaaaatcaattaacagatgccaagcaacatatatagcaaaaatcaacacatttttatctctgaaacatattatgacttatagcaaattcacttagattaagcgatagaaagtgattattatggaaaaagaacttaaaaccgctgcggcatatatcagagtatctacagaccgacaaacc

SEQ ID NO: 20026 - DNA, 260 bp, Unknown
  Description of Unknown: LeftRegion for integrase B7027 sequence
ttgtgagttataagaacgcacttaatttataataaaaaatcgcccttcggtgttggtagcaccaaaggacgataatcattacacagggtgcaatgatacatcaaaatgcaagtaatattgtatcatacccttgtaaatttttcaatataatttacaagggatttttgcacccttttttagataagagaggagcaaaataaatggatgatttaaaaatcgcagctgcttacatcagagttagcacggatgatcagacagag

SEQ ID NO: 20027 - DNA, 260 bp, Unknown
  Description of Unknown: LeftRegion for integrase B7028 sequence
tcgcgcatccaggacaaaggttgtcaagtcgtcgatgtcaagatggccgtcagcgccaacacgcgcgacagcgacatgatgctgtactcgtttaccgtcttatataggtaaagaaaaaaagaagccccacggggtcacagcgttgcagcgctacccgtggggctttccacagaacctctgaaaggaggccgtttcatattatgccaaaaacagcggtgatatacgcccgcttttcatgcaacaagcagcgcgaggcctcg

SEQ ID NO: 20028 - DNA, 260 bp, Unknown
  Description of Unknown: LeftRegion for integrase B7029 sequence
taaccataaaactttgcctctttggcatttataaccaccccctaactttattctattcctacatatatattatgtgctctgcataatcaattaacagatgccaagcaacatatatagcaaaaatcaacacatttttatctctgaaacatattatgacttatagcaaattcacttagattaagcgatagaaagtgattattatgggaaaaaaacttaagaccgctgcggcatatatcagagtatctacagaccgacaaacc

SEQ ID NO: 20029 - DNA, 260 bp, Unknown
  Description of Unknown: LeftRegion for integrase B7030 sequence
aaacgcccagcaggtcatggccatgctgggcgaaattgaacagtataatagacaacagaatgcaaagcctgctgatgaaaaagttatatctatccctgagcagataaaggaatacaaaagcctgctcgattgcggagctataacgcaggaagagtacgatattaagaaaaaagagttattgaagtcttaaggagaacactatgagcaatgcagttatatatgcaagatactcgtcggacaagcagtctgaggatagcatt

SEQ ID NO: 20030 - DNA, 260 bp, Unknown; identical to SEQ ID NO: 18683
  Description of Unknown: LeftRegion for integrase B7031 sequence

SEQ ID NO: 20031 - DNA, 260 bp, Unknown
  Description of Unknown: LeftRegion for integrase B7032 sequence
aaccataaaactttgcctctttgacaatttataaccaccccttaactttattctattcctacatatatattatgtgctctgcaaaatcaattaacagatgccaagcaacatatatagcaaaaatcaacacatttttatctctgaaacatattatgacttatagcaaattcacttagattaagcgatagaaagtgattattatggaaaaagaacttaaaaccgctgcggcatatatcagagtatcaacagaccgacaaacc

SEQ ID NO: 20032 - DNA, 260 bp, Unknown
  Description of Unknown: LeftRegion for integrase B7033 sequence
gaacatatgtttatttaaggagataaaaaaagaactctctctaaggaaaagttcttctttgtaccttaccatctttgccaatgggtaaatccaattactaaaagatgtctcccacaactgtggaagacattgaatataacattggctagcactagtatatcattttttagataagccttacaaaaatggaggaaattcatatgccgaaagttgcaatctatgcacgtgtctctacactcaaccaagctgaagaaggttac

SEQ ID NO: 20033 - DNA, 260 bp, Unknown
  Description of Unknown: LeftRegion for integrase B7034 sequence
attctggagaagtgcaaggcagccatgaccgaagtcgccattgtggaatatcaaccggcggcataacacaaaaaaaccgccccacggcggcaaccgtgaagcggcaagaggaaaaactattgcgataatagacttcccaaagcaaggtctattatagcatatttcctctgaaaaatcaagtcttaggaggaaatttacacatgaatgcagtgatctacgcccgttacagctgcgaccggcagaccgagcagtccattgag

SEQ ID NO: 20034 - DNA, 260 bp, Unknown
  Description of Unknown: LeftRegion for integrase B7035 sequence
tagggcgcttggaaaaaatagtaataaaaaggttctgcaaatggacctagacgggaatgtggtaaaagagtggaatagcatgacggatgctagtaaaactctgaaaattaacctttcttgtatttcaatgtgctgcaaaggtacaagaaaaaaggctggcggttttgcttggaagtattctgaatgcgggggtggctcaaatgattaggaaagtcgccatatacgtacgagtgagcaccacgaatcaagccgaggaagga

SEQ ID NO: 20035 - DNA, 260 bp, Unknown
  Description of Unknown: LeftRegion for integrase B7036 sequence
tatttttacgaattgggtatcaaactataataaaaaatcgcccttcggtgttggtagcaccaaaggacgataatcattacacagggtgcaatgatactatttcatagcaagtaatattgtatcatacccttgtaaatttttcaatataatttacaagggatttttgcaccctttttttagataagaaaggagcaaaataaatggatgatttaaaaatcgcagctgcttacatcagagttagcacagatgatcagacagag

SEQ ID NO: 20036 - DNA, 260 bp, Unknown
  Description of Unknown: LeftRegion for integrase B7037 sequence
ggagaatgaaatcgaaccgttgaaaataaaaaactcccctatcctgcgccaacaggataaaggagctaccgggcgaaccggtacaaatgtagcctctaaactacagacatattgtaccaaacccgcccgagaaatgcaagtttaattttacgggcggtatttttgcgcccatttttaagtatattttcgtgaggtgcaatatgaaaacagcagcgtgttatatcagagtatcaaccgacgaccaaaccgaatacagcccc

SEQ ID NO: 20037 - DNA, 260 bp, Unknown
  Description of Unknown: LeftRegion for integrase B7038 sequence
aatattgtatatagaatttactatattgtcaagaaaaaaatcgccctctagtattggcgtactagagagcgacaccattacacagggtgcaatgatactatttcatagcaagtaatattgtatcatacccttgtaaatttttcaatataatttacaagggatttttgcacccttttttagataagaaaggagcaaaataaatggatgatttaaaaatcgcagctgcttacatcagagttagcacagatgatcagacagag

SEQ ID NO: 20038 - DNA, 260 bp, Unknown
  Description of Unknown: LeftRegion for integrase B7039 sequence
aaggttgaccaaataatagaaagtaacaaataaaaaaatcgcccttcggtgttggtagcaccaaaggacgataatcattacatagggtgcaatgatactatttcatagcaagtaatattgtatcatacccttgtaaatttttcaatataatttacaagggatttttgcacccttttttagataagaaaggagcaaaataaatggatgatttaaaaatcgcagctgcttacatcagagttagcacagatgatcagacagag

SEQ ID NO: 20039 - DNA, 260 bp, Unknown
  Description of Unknown: LeftRegion for integrase B7040 sequence
agaaggttgaccaaataatagaaagtaacaaataaaaaaatcgccctctagtattggcgtactagagagcgacaccattacacagggtgcaatgatactaacacttagcaagtaatattgtatcatacccttgtaaatttttcaatataatttacaagggatttttgcacccttttttagataagaaaggagcaaaataaatggatgatttaaaaattgcagctgcttacatcagagttagcacagatgatcagacagag

SEQ ID NO: 20040 - DNA, 260 bp, Unknown
  Description of Unknown: LeftRegion for integrase B7041 sequence
aaacgcccagcaggtcatggccatgctgggcgaaattgaacagtataataaacagcagaatgcaaatcctgctgatgaaaaagttatatctatccctgagcagataaaggaatacaaaagcctgctcgattgcggagctataacgcaggaagagtacgatattaagaaaaaagagttattgaagtcttaaggagaacactatgagcaatgcagttatatatgcaagatactcgtcggacaagcagtctgaggatagcatt

SEQ ID NO: 20041 - DNA, 260 bp, Unknown
  Description of Unknown: LeftRegion for integrase B7042 sequence
caaatacaaagaccacaatctttctggtaactacgaaggacatcgggaatgccacatcactcccgactggttactaatatataagattgagcacgacatattgaccttgtcattaaccagaaccggaacccatagcgatttattctaaactacccccggacctttaaagttcggggaattttctatcataggtggtaaatatggatcagtcaaataaagaaaatatcaatcagcttcgtgtaggatgtctctacatacgt

SEQ ID NO: 20042 - DNA, 260 bp, Unknown
  Description of Unknown: LeftRegion for integrase B7043 sequence
gaaggttgaccaaataatagaaagtaacaaataaaaaaaatcgccctctagtattggcgtactagagagcgacaccattacacagggtgcaatgatactaacacttagcaagtaatattgtatcatacccttgtaaatttttcaatataatttacaagggatttttgcacccttttttagataagaaaggagcaaaataaatggatgatttaaaaattgcagctgcttacatcagagttagcacagatgatcagacagag

SEQ ID NO: 20043 - DNA, 260 bp, Unknown
  Description of Unknown: LeftRegion for integrase B7044 sequence
tgccctttgcttttaataataaaattaggtaaataaaaaatcgccctctggtgctggaacactagagagcgacaccattacacagggtgcaatgatactatttcatagcaattaatattgtatcatacccttgtaaatttttcaatataatttacaagggatttttgcacccttttttagataagagaggagcaaaataaatggatgatttaaaaatggcagctgcttacatcagagttagcacagatgatcagacagag

SEQ ID NO: 20044 - DNA, 260 bp, Unknown
  Description of Unknown: LeftRegion for integrase B7045 sequence
cctatttttacgaattgggtatcaaaatataataaaaaaatcgccctctggtgctggaacactagagagcgacaccattacacagggtgcaatgatactaacacttagcaagtaatattgtatcatacccttgtaaatttttcaatataatttacaagggatttttgcacccttttttagataagaaaggagcaaaataaatggatgatttaaaaatcgcagctgcttacatcagagttagcacagatgatcagacagag

SEQ ID NO: 20045 - DNA, 260 bp, Unknown
  Description of Unknown: LeftRegion for integrase B7046 sequence
gctcggtattcaagaaaatgctgataggtttggaaatgtcatggggctttattcagtgcaagcaagatcagaacaagaaaaactcctagaatatttccacaagctcaacgacgtaggtcaaagcgaagccgtcaagcgcgttggcgagcttacgcagatacccgaatacaaattaccagacgatgaaagcgagggaagcgatgaataacgccgtaatttacgcccgttacagctccgataaacagacagaggacagcata

SEQ ID NO: 20046 - DNA, 260 bp, Unknown; identical to SEQ ID NO: 20032
  Description of Unknown: LeftRegion for integrase B7047 sequence

SEQ ID NO: 20047 - DNA, 260 bp, Unknown
  Description of Unknown: LeftRegion for integrase B7048 sequence
tagggtgcttggaaaaaatagtaataaaaaggttctgcaaatggacctagatgggaatgtggtaaaagagtggaatagcatgacggatgccagtaaaactctgaaaatcaacctttcttgtatttcaatgtgctgcaaaggtacaagaaaaaaagctggcggttttgcttggaagtattataaatgcgggggtgactcgaatgattaggaaagtcgccatatatgcacgagtgagcaccacgaatcaagctgaggaaggt

SEQ ID NO: 20048 - DNA, 260 bp, Unknown
  Description of Unknown: LeftRegion for integrase B7049 sequence
tacaacacttgctgaagaaagtggtattgtaaacaaatctatgaaagtaaacaactaaaataaaaagcccctgctctcctcgaccaaaatttgagcatgggacttaaaccaatttgaaaagcaacctaaaacactaagggtataggtcttttttctataccctattttaccataaaacttacaaaatagggaggctaacgatgaataaagttgctatttatgtgcgcgtgagtacaaaaggacaagcagaagagggttat

SEQ ID NO: 20049 - DNA, 260 bp, Unknown
  Description of Unknown: LeftRegion for integrase B7050 sequence
atcatcaaggcaaagaacgagcttgcgaagtggcaggagctgaagaagggtctgctccagcagatgttcgtatagtcacaacagcccgtcgtcctctcgggcggcgggctttataattaaatgcgtatttgcgcaattaaccaaccaaaggagaaagcaatgaatgcatataagcagaaattacgggagggggtaagagcttggcacgcaagaagaagttcgagctgaacgacaacaatctcgccatcgcctactaccga

SEQ ID NO: 20050 - DNA, 260 bp, Unknown
  Description of Unknown: LeftRegion for integrase B7051 sequence
gcgcgagtccaagaggccggatgccaggtagtcgacgtgaagatggcgacttgcgccaacactgggaacgacgacacgatgatgtactgcttcaccgtgctctaccgttagggaaagaagaagccccacggggtcatagcgctgcaacgctgcccgcggggctttcctaaagaacctctgaaaggaggccgtttccaattatgccaaaaactgcggtgatatacgcccgcttttcatgcaacaagcagcgcgaggcctca

SEQ ID NO: 20051 - DNA, 260 bp, Unknown
  Description of Unknown: LeftRegion for integrase B7052 sequence
aaccataaaactttgcctctttgacaatttataaccaccccttaactttattctattcctacatatatattatgtgctctgcaaaatcaattaacagatgccaggcaacatatatagcaaaaatcaacatatttttatctctgaaacatattatgacttatagcaaattcacttagattaagcgatagaaagtgattattatggaaaaaaaacttaaaaccgctgcggcatatatcagagtatctacagaccgacaaacc

SEQ ID NO: 20052 - DNA, 260 bp, Unknown
  Description of Unknown: LeftRegion for integrase B7053 sequence
aaccataaaactttgcctctttgacaatttataaccaccccttaactttattctattcctacatatatattatgtgttctgcaaaatcaattaacagatgccaagcaacatatatagcaaaaatcaacacatttttatctctgaaacatattataacttatagcaaattcacttagattaagcgatagaaagtgattattatggaaaaagaacttaaaaccgctgcggcatatatcagagtatctacagaccgacaaacc

SEQ ID NO: 20053 - DNA, 260 bp, Unknown
  Description of Unknown: LeftRegion for integrase B7054 sequence
taaccataaaactttgcctctttggcatttataaccaccccttaattttattctattcctacatatatattatgtgctctgcaaaatcaattaacagatgccaagcaacatatatagcaaaaatcaacacatttttatctctgaaacatattatgacttatagcaaattcacttagattaagcgatagaaagtgattattatggaaaaagaacttaaaaccgttgcggcatatatcagagtatctacagaccgacaaacc

SEQ ID NO: 20054 - DNA, 260 bp, Unknown
  Description of Unknown: LeftRegion for integrase B7055 sequence
attctggagaagtgcaaggcagccatgaccgaagtcgccattgtggaatatcaaccggcggcataacacaaaaaaaccgccccacggcggcaaccgtgaagcggcaagaggaaaaactattgcgataatagccattccacaacaaggtctattatagcatatttcctcgtaaaaatcaagtcttaggaggaaatttacacatgaatgcagtgatctacgcccgttacagctgcgaccggcagaccgagcagtccattgag

SEQ ID NO: 20055 - DNA, 260 bp, Unknown
  Description of Unknown: LeftRegion for integrase B7056 sequence
catcatgatgatcattgaagccagaagcggtgaggtcattgaaaaatgggtttccttcttcggctccgcgacgttctattgctgaaaaaaccgccccggtgctaccaacaccgaagcggttcaggcgcccggcagtgctaccaacaccgctgagcaatgcagttcgcaacccaccacaataggggcattctgcgcctttcatgatagcagatttgccccggaaaggcaaggacaaaatggctcaatccagatctgtcacc

SEQ ID NO: 20056 - DNA, 260 bp, Unknown
  Description of Unknown: LeftRegion for integrase B7057 sequence
aaccataaaactttgcccctttgacaatttataaccaccccttaactttattctattcctacatatatattatgtgctatgcaaaatcaattagcagatgccaagcaacatatatagcaaaaatcaacacatttttatctctgaaacatattatgacttatagcaaattcacttagattaagcgatagaaagtgattattatggaaaaagaacttaaaaccgctgcggcatatatcagagtatctacagaccgacaaacc

SEQ ID NO: 20057 - DNA, 260 bp, Unknown
  Description of Unknown: LeftRegion for integrase B7058 sequence
taaccataaaactttgcctcttaggcatttataaccaccccttaactttattctattcctacatatatattatgtgctctgcaaaatcaattaacagatgccaagcaacatatatagcaaaaatcaacacatttttatctctgaaacatattatgacttatagcaaatacacttagattaagcgatagaaagtgattattatggaaaaagaacttaaaaccgctgcggcatatatcagagtatctacagaccgacaaacc

SEQ ID NO: 20058 - DNA, 260 bp, Unknown
  Description of Unknown: LeftRegion for integrase B7059 sequence
aaccataaaactttgcctctttgacaatttataaccaccccttaactttattctattcctacatatatattatgtgttctgcaaaatcaattaacagatgccaagcaacatatatagcaaaaatcaacacatttttatctctgaaacatattatgacttatagcaaattcacttagattaagcgatagaaagtgattattatggaaaaagaacttaaaaccgctgcggcatatatcagagtatctacagaccgacaaacc

SEQ ID NO: 20059 - DNA, 260 bp, Unknown
  Description of Unknown: LeftRegion for integrase B7060 sequence
acggtgaagtatattcatttgttagtggactttctgactgtgaagtatacctttcaacttctttcaatacggcggctgtggctgatataaatggttacttctatgttcttacacttggttctgattatgaggataataccaaagacttcttgtcaatcgccgacacagttcgtccgaaataacacttaggagatgtcactatgagcaatgcagttatatatgctagatactcttcggataagcaatccgaagaaagtatc

SEQ ID NO: 20060 - DNA, 260 bp, Unknown; identical to SEQ ID NO: 20025
  Description of Unknown: LeftRegion for integrase B7061 sequence

SEQ ID NO: 20061 - DNA, 260 bp, Unknown
  Description of Unknown: LeftRegion for integrase B7062 sequence
cctatttttacgaattgggtatcaaaatataataaaaaaatcgccctctagtattggcgtactagagagcgacaccattacacagggtgcaatgatactatttcatagcaagtaatattgtatcatacccttgtaaatttttcaatataatttacaagggatttttgcacccttttttagataagaaaggagcaaaataaatggatgacttaaaaattgcagctgcctacatcagagttagcacagatgatcagacagag

SEQ ID NO: 20062 - DNA, 260 bp, Unknown
  Description of Unknown: LeftRegion for integrase B7063 sequence
aaccataaaactttgcctctttgacaatttataaccaccccttaactttattctattcctacatacatattatgtgctctgcaaaatcaattaacagatgccaagcaacatatatagcaaaaatcaacacatttttatctctgaaacatattatgacttatagcaaattcacttagattaagcgatagaaagtgattattatggaaaaagaacttaaaaccgctgcggcatacatcagagtatctacagaccgacaaacc

SEQ ID NO: 20063 - DNA, 260 bp, Unknown
  Description of Unknown: LeftRegion for integrase B7064 sequence
catcatgatgatcattgaagccagaagcggcgaggtcattgaaaaatgggtttccttcttcggctccgcgacgttctattgctgaaaaaaccgccccggtgctaccaacaccgaagcggttcaggcgcccggcagtgctaccaacaccgctgagcaatgcagttcgcaacccaccacaataggggcattctgcgcctttcatgatagcagatttgccccggaaaggcaaggacaaaatggctcaatccagatctgtcacc

SEQ ID NO: 20064 - DNA, 260 bp, Unknown; identical to SEQ ID NO: 20031
  Description of Unknown: LeftRegion for integrase B7065 sequence

SEQ ID NO: 20065 - DNA, 260 bp, Unknown
  Description of Unknown: LeftRegion for integrase B7066 sequence
ttgtgagttataagaacgcacttaatttataataaaaaatcgccctctggtacggcaataccaaaggacgataatcattacacagggtgcaatgatactatttcatagcaagtaatattgtatcatacccttgtaaatttttcaatataatttacaagggatttttgcacccttttttagataagaaaggagcaaaataaatggatgatttaaaaatcgcagctgcttacatcagagttagcacagatgatcagacagag

SEQ ID NO: 20066 - DNA, 260 bp, Unknown
  Description of Unknown: LeftRegion for integrase B7067 sequence
taggacgcttgggaaaaatagtaataaaaaggtgcttcaaatggacctggatgggaatgtggtaaaagagtggaacagtatgacggatgctagtaaaactctgaaaattaacctttcttgtatttcaatgtgctgcaaaggtacaagaaaaaaggccggtgggtttgcttggaagtattctgaatgtagaggtgactcgaatgattaggaaagtcgccatatatgcacgagttagcaccatgaatcaagctgaggaagga

SEQ ID NO: 20067 - DNA, 260 bp, Unknown
  Description of Unknown: LeftRegion for integrase B7068 sequence
aaggttgaccaaataatagaaagtaacaaataaaaaaaatcgccctctagtattggcgtactagagagcgacaccattacacatggtgcaatgatactatttcatagcaagtaatattgtatcatacccttgtaaatttttcaatataatttacaagggatttttgcaccctttttttagataagaaaggagcaaaataaatggatgatttaaaaatcgcagctgcttacatcagagttagcacagatgatcagacagag

SEQ ID NO: 20068 - DNA, 260 bp, Unknown
  Description of Unknown: LeftRegion for integrase B7069 sequence
agaaggttgaccaaataatagaaagtaacaaataaaaaaaatcgccctctagtgctggaacactagagagcgacaccattacacagggtgcaatgatacatcaaaatgcaagtaatattgtatcatacccttgtaaatttttcaatataatttacaagggatttttgcacccttttttagataaggaaggagcaaaataaatggatgatttaaaaatcgcagctgcttacatcagagttagcacagatgatcagacagag

SEQ ID NO: 20069 - DNA, 260 bp, Unknown
  Description of Unknown: LeftRegion for integrase B7070 sequence
cgcatgtttattttataaaataaaaagaactttccttaatttaaagaaaagttcttctctgtacctaaccatctttgccaatgggtaaatccaattactaaaagatgtctcccacaactgtggaagacattgaatataacattggctagcactagtatatcattttttagataagccttacaaaaatggaggaaattcatatgcctaaagttgcaatctatgctcgcgtctctactcttaatcaagctgaagaaggttac

SEQ ID NO: 20070 - DNA, 260 bp, Unknown
  Description of Unknown: LeftRegion for integrase B7071 sequence
aacaggcagcttgcatatccgctcccgtatgagaacttcccacacaaggtcccgtgtgcttttgtaatctttataattcatatataatcaccctatttaattgtagggtgcagagcgttaaaattcagcaggtaagttttggaaattaaaaagtcccgctcggccaaaacgagcgggaataattaaaggtggtgaactatatgaaaacagcggcgtgttatatcagggtatcgactgacgaccaaaccgaatacagcccg

SEQ ID NO: 20071 - DNA, 260 bp, Unknown; identical to SEQ ID NO: 20069
  Description of Unknown: LeftRegion for integrase B7072 sequence

SEQ ID NO: 20072 - DNA, 260 bp, Unknown; identical to SEQ ID NO: 20025
  Description of Unknown: LeftRegion for integrase B7073 sequence

SEQ ID NO: 20073 - DNA, 260 bp, Unknown; identical to SEQ ID NO: 20036
  Description of Unknown: LeftRegion for integrase B7074 sequence

SEQ ID NO: 20074 - DNA, 260 bp, Unknown
  Description of Unknown: LeftRegion for integrase B7075 sequence
acggtgaagtatattcatttgttagtggactttctgactgtgaagtatacctttcaacttctttcaatacggcggctgtggctgatataaatggttacttctatgttcttacacttggttctgattatgaggataataccaaagacttcttgtcaatcgccgacacagttcgtccgaaataacacttaggagatgtcactatgagcaatgcagttatatatgctagatactcttcggataagcaatccgaagaaagtatt

SEQ ID NO: 20075 - DNA, 260 bp, Unknown
  Description of Unknown: LeftRegion for integrase B7076 sequence
ctatttgctggggtattctgataaaatcacgcggctgtccggggatcacaccgaccccacatccggtccctgtgttgaagttactgctgcggagctggagctgctgaaggctttccggcacgccggagctgagacccaggcagcgatcagagcgatcctgcacatttaacgggaggaccccgggaagggaggacggtgccatgcgcggcgtcatttacgcgagatattcaccaggcccgcaccagacggagcagtccatt

SEQ ID NO: 20076 - DNA, 260 bp, Unknown
  Description of Unknown: LeftRegion for integrase B7077 sequence
gcgcgagtccaagaggccggatgccaggtagtcgacgtgaagatggcgacttgcgccaacactgggaacgacgacacgatgatgtactgcttcaccgtgctctaccgttagggaaagaagaagccccacggggtcatagcgctgcaacgctgcccgcggggctttcctaaagaacctctgaaaggaggccgtttccaattatgccaaaaactgcggtgatatacgcccgcttttcatgcaacaagcagcgcgaggcctct

SEQ ID NO: 20077 - DNA, 260 bp, Unknown
  Description of Unknown: LeftRegion for integrase B7078 sequence
cctatttttacgaattgggtatcaaaatataataaaaaaatcgccctctggtgctggaacactagagagcgacaccattacacagggtgcaatgatactatttcatagcaagtaatattgtatcatacccttgtaaatttttcaatataatttacaagggatttttgcacccttttttagataagagaggagcaaaataaatggataatttaaaaatcgcagctgcttacatcagagttagcacggatgatcagacagag

SEQ ID NO: 20078 - DNA, 260 bp, Unknown
  Description of Unknown: LeftRegion for integrase B7079 sequence
caccctatttttacgaattggtattaatataataaaaaaatcgccctctggtgctggaacactagagagcgacatcattacacagggtgcaatgatactatttcatagcaagtaatattgtatcatacccttgtaaatttttcaatataatttacaagggatttttgcacccttttttagataagaaaggagcaaaataaatggatgacttaaaaattgcagctgcttacatcagagttagcacagatgatcagacagag

SEQ ID NO: 20079 - DNA, 260 bp, Unknown
  Description of Unknown: LeftRegion for integrase B7080 sequence
agaaggttgaccaaataatagaaagtaacaaataaaaaaatcgccctctagtattggcgtactagagagcgacaccattacacagggtgcaatgatactatttcatagcaagtaatattgtatcatacccttgtaaatttttcaatataatttacaagggatttttgcacccttttttagataagaaaggagcaaaataaatggatgatttaaaaatcgcagctgcttacatcagagttagcacggatgatcagacagag

SEQ ID NO: 20080 - DNA, 260 bp, Unknown
  Description of Unknown: LeftRegion for integrase B7081 sequence
aaccataaaactttgcctctttgacaatttataaccaccccttaactttattctattcctacatacatattatgtgctctgcaaaatcaattaacagatgccaagcaacatatatagcaaaaatcaacacatttttatctctgaaacatattatgacttatagcaaattcacttagattaagcgatagaaagtgattattatggaaaaagaacttaaaaccgctgcggcatatatcagagtatctacagaccgacaaacc

SEQ ID NO: 20081 - DNA, 260 bp, Unknown; identical to SEQ ID NO: 20032
  Description of Unknown: LeftRegion for integrase B7082 sequence

SEQ ID NO: 20082 - DNA, 260 bp, Unknown
  Description of Unknown: LeftRegion for integrase B7083 sequence
agaaggttgaccaaataatagaaagtaacaaataaaaaaaatcgccctctagtgctggaacactagagagcgacaccattacacagggtgcaatgatacatcaaaatgcaagtaatattgtatcatacccttgtaaatttttcaatataatttacaagggatttttgcacccttttttagataagagaggagcaaaataaatggatgatttaaaaatcgcagctgcttacatcagagttagcacagatgatcagacagag

SEQ ID NO: 20083 - DNA, 260 bp, Unknown
  Description of Unknown: LeftRegion for integrase B7084 sequence
gcctgagcatcctcattcaattaataactttgtatatgaacacagatatgtcatggaacaatatttaggaagatatttatccaaaaatgaggtagttcatcatataaatggcgataaagcagataatcgtttagaaaatttgctattattatctcccgctgaacatgctaaactacacagtcaactaaggaaagaaggtgatgctaaatgaatacaggtgcaacttcaaaagtagctgctctctatattcgtgtcaggtc

SEQ ID NO: 20084 - DNA, 260 bp, Unknown
  Description of Unknown: LeftRegion for integrase B7085 sequence
ccttaattcttcaacaacacttatcgaaagaataaaaccaactgtttctaaaatggaaatagttgcaaacaaaaaagccccacgctcagaagtttggcgaccgagagcgtgaggctagtggcaagaaaaacttttcaaaagagatttccttttgagatgttttcttgtacccattttatcaagaaatgaggtaaaaatcaatgcaaaataaagtagcaatctacgtcagggtgtctactacctcacaagttgaggagggg

SEQ ID NO: 20085 - DNA, 260 bp, Unknown; identical to SEQ ID NO: 20059
  Description of Unknown: LeftRegion for integrase B7086 sequence

SEQ ID NO: 20086 - DNA, 260 bp, Unknown; identical to SEQ ID NO: 20034
  Description of Unknown: LeftRegion for integrase B7087 sequence

SEQ ID NO: 20087 - DNA, 260 bp, Unknown
  Description of Unknown: LeftRegion for integrase B7088 sequence
cgcgcatccaggacaaaggttgtcaagtcgtcgatgtcaagatggccgtcagcgccaacacgcgcgacagcgacatgatgctgtactcgtttaccgtcttatataggtaaagaaaagaagaagccccacggggtcatagcgctgcaacgctgcccgcggggcttttccaaagaacctctgaaaggaggccgtttccaattatgccaaaaactgcggtgatatacgcccgcttttcgtgcaataagcagcgcgaggcctct

SEQ ID NO: 20088 - DNA, 260 bp, Unknown
  Description of Unknown: LeftRegion for integrase B7089 sequence
cacccgtgacctcgtcctccgctgcttcgcccgggctcatctgaacgctgagaaggtaaagacagaaaagggaaagcggagccagttcgagaagttccagagctccctggagccgtacttcttccggatgtcaaaagagaacgcggagctggtgcaggtgctccacgatcaggaggttgcaaagttaggaggctgataccatgcgtggcgttatttatgcgagatattcaccaggcccgcaccagacggagcagtccatc

SEQ ID NO: 20089 - DNA, 260 bp, Unknown
  Description of Unknown: LeftRegion for integrase B7090 sequence
aaaactttgcctctttgacaatttataaccaccccttaactttattgtattcctacatatatattatgtgctctacaaaatcaattaacagatgccaagcaacatatatagctatagcaaaaatcaacacatttttatctctgaaacatattatgacttataacaaatttacttagattaagcgatagaaagtgattattatggaaaaagaacttaaaaccgctgcggcatatatcagagtatctacagaccgacaaacc

SEQ ID NO: 20090 - DNA, 260 bp, Unknown; identical to SEQ ID NO: 20032
  Description of Unknown: LeftRegion for integrase B7091 sequence

SEQ ID NO: 20091 - DNA, 260 bp, Unknown
  Description of Unknown: LeftRegion for integrase B7092 sequence
ttgtggactataaaaaagcacttaatttataataaaaaaatcgccctctagtattggcgtactagagagcgacaccattacacagggtgcaatgatactatttcatagcaagtaatattgtatcatacccttgtaaatttttcaatataatttacaagggatttttgcacccttttttagataagaaaggagcaaaataaatggatgatttaaaaatcgcagctgcttacatcagagttagcacagatgatcagacagag

SEQ ID NO: 20092 - DNA, 260 bp, Unknown
  Description of Unknown: LeftRegion for integrase B7093 sequence
cgtgtgcaggagagcggctgccaggtcgtcgacgtgaagatgtcggcatgctccaacacgcgcgacacggacatgatcctctacagcttcaccgtgctctaccgctaggaaaagaaaaagcccacgcgggtcaaagcgttcgcaccgctcgccgcgtgggtcatgcaaaacctgcccatgaaaggaggtcgctccatattatgccaaaaactgcggtgatatacgcccgcttttcgtgcaacaagcagcgcgaggcctcc

SEQ ID NO: 20093 - DNA, 260 bp, Unknown
  Description of Unknown: LeftRegion for integrase B7094 sequence
aaaactttgcctctttggcaatttataaccaccccttaactttattctattcctacatatatattatgtgctctgcaaaatcaattaacagatgccaagcaacatatatagctatagcaaaaatcaacacatttttatctctgaaacatattatgacttatagcaaattcacttagattaagcgatagaaagtgattattatggaaaaagaacttaaaaccgctgcggcatatatcagagtatctacagaccgacaaacc

SEQ ID NO: 20094 - DNA, 260 bp, Unknown
  Description of Unknown: LeftRegion for integrase B7095 sequence
aagaggacaggcaacagctagattaatttataataaaaaatcgccctctggtgctggaacactagagagcgacaccattacacagggtgcaatgatactatttcatagcaattaatattgtatcatacccttgtaaatttttcaatataatttacaagggatttttgcacccttttttagataagagaggagcaaaataaatggatgatttaaaaatggcagctgcttacatcagagttagcacagatgatcagacagag

SEQ ID NO: 20095 - DNA, 260 bp, Unknown
  Description of Unknown: LeftRegion for integrase B7096 sequence
cttcgtttttctacttaatgttcttaaagatattctttttttatctcgcatttcacgtattttaatttctatcatatcctttttcctttcgttcattttagtctccccaaaattggcgtttttatatgatagaaatctgcttatttatttataactaaaaagtaacttattaaaaaaaaatttttaaaaaattatattttatgagtaaatccaaaatttattgtttaaaatatttatatactataacatttagcaaaggg

SEQ ID NO: 20096 - DNA, 260 bp, Unknown
  Description of Unknown: LeftRegion for integrase B7097 sequence
taggaagcttgggaaaaatagtaataaaaaggttcttcaaatggatctagatgggaatgtggtaaaagagtggaacagtatgacggatgctagtaaaactctgaaaatcaatctttcttgtatttcaatgtgctgcaaaggtacaagaaaaaaggccggcgggtttgcttggaagcattctgaatgcggaggtgactcgaatgattaggaaagtcgccatatatgcacgagtgagcaccatgaatcaagctgaggaagga

SEQ ID NO: 20097 - DNA, 260 bp, Unknown; identical to SEQ ID NO: 20034
  Description of Unknown: LeftRegion for integrase B7098 sequence

SEQ ID NO: 20098 - DNA, 260 bp, Unknown
  Description of Unknown: LeftRegion for integrase B7099 sequence
aaatatgctgaaatgtcaaatagaaaaaacgccccagtgctaccaacaccagggcaaccgatacatccggagatgcatacatattacataagcaataatattgtatcatctccggagcagccatgcaagcggaacaaaagttcgctggctgttatttttgtaccccaaaatcaatatgatatataagaggtgataaaataatgtccgaaaatgatacaaaacaactgcagaccggcgccctctacatccgcgtcagtacc

SEQ ID NO: 20099 - DNA, 260 bp, Unknown
  Description of Unknown: LeftRegion for integrase B7100 sequence
taggacgcttggaaaaaatagtaataaaaaggttctgcaaatggacctagacgggaatgtggtaaaagagtggaatagtatgacggatgctagtaaaactctgaaaattaacctttcttgtatttcaatgtgctgcaaaggtgcaagaaaaaaagctggcggttttgcttggaagtattctgaatgcgggggtgactcgaatgattaggaaagtcgccatatatgcacgagtgagcaccacgaatcaagctgaggaagga

SEQ ID NO: 20100 - DNA, 260 bp, Unknown
  Description of Unknown: LeftRegion for integrase B7101 sequence
aaacgcccagcaggtcatggtcatgctgggcgaaattgaacagtataatagacaacagaatgcaaagcctgctgatgaaaaagttatatctatccctgagcagataaaggaatacaaaagcctgctcgattgcggagctataacgcaggaagaatacgatattaagaaaaaagagttattgaagtcttaaggagaacactatgagcaatgcagttatatatgctagatactcttcggataagcaatccgaagaaagtatt

SEQ ID NO: 20101 - DNA, 260 bp, Unknown
  Description of Unknown: LeftRegion for integrase B7102 sequence
cgaacatatgtttatttaaggagataaaaaagaactctctctaaggaaaagttcttctttgtaccttaccatctttgccaatgggtaaatccaattactaaaagatgtctcccacaactgtggaagacattgaatataacattggctagcactagtatatcattttttagataagccttacaaaaatggaggaaattcatatgcctaaagttgcaatctatgctcgtgtctctactcttaatcaagctgaagaaggttac

SEQ ID NO: 20102 - DNA, 260 bp, Unknown; identical to SEQ ID NO: 20031
  Description of Unknown: LeftRegion for integrase B7103 sequence

SEQ ID NO: 20103 - DNA, 260 bp, Unknown
  Description of Unknown: LeftRegion for integrase B7104 sequence
cacccgtgacctcgtcctccgctgcttcgcccgggctcatctgaacgctgagaaggtaaagacagaaaagggaaagcggagtcagttcgagaagttccagagctccctggagccgtacttcttccggatgtcaaaagagaacgcggagctggtgcaggtgctccacgatcaggaggttgcaaagttaggaggctgataccatgcgcggcgtcatttatgcgagatattcaccaggcccgcaccagacggagcagtccatc

SEQ ID NO: 20104 - DNA, 260 bp, Unknown
  Description of Unknown: LeftRegion for integrase B7105 sequence
ttccctgttaaagacttgaagaacccttcaagcatttcgtcaatgcgtctaaaattcagcggtaacaatcaaaatcacattcttgatgaccatgattacgacattactttgcactttaattaaataagtttaaacccgtcgaaatcgacgggtttaaaaagtatctgcaaagaacacacattcgataaaggaggcaaacaatgaaagtagctgtctacattcgagtatcaacactagaacaggccgaagaaggatactcc

SEQ ID NO: 20105 - DNA, 260 bp, Unknown
  Description of Unknown: LeftRegion for integrase B7106 sequence
gaaggttgaccaaataatagaaagtaacaaataaaaaaaatcgccctctagtattggcgtactagagagcgacaccattacacagggtgcaatgatactaattcatagcaagtaatattgtatcatacccttgtaaatttttcaatataatttacaagggatttttgcacccttttttagataagaaaggagcaaaataaatggatgatttaaaaatcgcagctgcttacatcagagttagcacggatgatcagacagag

SEQ ID NO: 20106 - DNA, 260 bp, Unknown
  Description of Unknown: LeftRegion for integrase B7107 sequence
cctatttttacgaattggtattaattaaataaaaaaaaatcgtcctctggtacggcaataccaaaggacgatcatcattacacagggtgcaatgatactaacacttagcaagtaatattgtatcatacccttgtaaatttttcaatataatttacaagggatttttgcacccttttttagataagaaaggagcaaaataaatggatgatttaaaaatcgcagctgcttacatcagagttagcacagatgatcagacagag

SEQ ID NO: 20107 - DNA, 260 bp, Unknown
  Description of Unknown: LeftRegion for integrase B7108 sequence
attataactttttgcaggcgcaaaatatctcagaacagatgctgaagcttggacttatttccttgtcggagttcaacaaattaactgaaataaaccgtaaaacattctccccgttctgggttgaaattatgcccaaaattccttgatatataagggattcagagctaatatgtgacactaacgaagggaggtgaactaccgtgaagaaggtaaccaaaatcgacggtgtacaaaagaataccgccataaatagcaagctc

SEQ ID NO: 20108 - DNA, 260 bp, Unknown
  Description of Unknown: LeftRegion for integrase B7109 sequence
ctatttttacgaattacctaaaaaaatataataaaaaatcgcccttcggtgttggtagcaccaaaggacgataatcattacacagggtgcaatgatactaacacttagcaagtaatattgtatcatacccttgtaaatttttcaatataatttacaagggatttttgcacccttttttagataaggaaggagcaaaataaatggatgatttaaaaatcgcagctgcttacatcagagttagcacagatgatcagacagag

SEQ ID NO: 20109 - DNA, 260 bp, Unknown
  Description of Unknown: LeftRegion for integrase B7110 sequence
ttccaaaacactcataataaaaaccgcccctggcgccaaccaggaacggcttttccatagattttctcttaccggacgctccggaaagatacaatcagcttgaacacctgaattatatcatttccagagcgtcctgacaaggggcgttatttttgcacccaaaatcacatagattgtcactacatgaaggagatgatataatgctgataggagctgcttatatccgtgtcagcacggatgaccagctggatctgagtcct

SEQ ID NO: 20110 - DNA, 260 bp, Unknown
  Description of Unknown: LeftRegion for integrase B7111 sequence
gatatttgcatatcctgcacaatttcaataaaaaatagataaataaaaattccccaggtgctggaaacacctgagggaatgcaatacatcaagagccttaaacaaaagcctaagtctttgatataatgccctaagcaagcatattatatcataaaggctctcgatgtacaatttcaaattgtataaaggagtgatgttttatgaagactgtatgcgcttatatcagagtttctacagattcacaggaagaatactcacca

SEQ ID NO: 20111 - DNA, 260 bp, Unknown
  Description of Unknown: LeftRegion for integrase B7112 sequence
tactgaatttgtcaaacatgaaaaaccgcccctggctgcaaccaggaacggcttttgatagattttctctcgccggatgctccggaagatacaatcagcttagacacctgaattatatcatttccagagcgtcctgacaaggggcgttatttttgcacccaaaatcacatagattgtcactacatgaaggagatgatataatgctgataggagctgcttatatccgtgtcagcacggatgaccagctggatctgagtcct

SEQ ID NO: 20112 - DNA, 260 bp, Unknown
  Description of Unknown: LeftRegion for integrase B7113 sequence
tcagaattgcggcaactcttggaaagcatcataattacataaataaaaatcccccaggtgctggaaacacctgagggaacgcaatacatcaagagccttaaacaaaagcctaagtctttgatataatgccctaagcaagcatattatatcataaaggctctcgatgtacaatttcaaattgtataaaggagtgatgttttatgaagactgtatgcgcttatatcagagtttctacagattcacaggaagaatactcacca

SEQ ID NO: 20113 - DNA, 260 bp, Unknown
  Description of Unknown: LeftRegion for integrase B7114 sequence
ctgaatttgtcaaacatgaaaaaccgcccctggcggcaaccaggaacggcttttccatagattttctcttaccggacgctccggaaagatacaatcagcttgaacacctgaattatatcatttccagagcgtcctgacaaggggcgttatttttgtacccaaaatcacatagattgtcactacatgaaggagatgatataatgctgataggagctgcttatatccgtgtcagcacggatgaccagctggatctgagccct

SEQ ID NO: 20114 - DNA, 260 bp, Unknown
  Description of Unknown: LeftRegion for integrase B7115 sequence
agatccgtgccaacagacaggagttgcagggggataaaggccaaactgcgggttgagaaggtcatacccattgatctgctcagacgcaagagagccttggaggtgatattacgaaagcggtaatctatgccagatacagctcccacagccagcgggaggagtccatagaaggtcagctccgggagtgtcacgagtttgccttgaagaatggatttacgatcataaacgaatactgtgaccgggcgctctccggcaagacc

SEQ ID NO: 20115 - DNA, 260 bp, Unknown
  Description of Unknown: LeftRegion for integrase B7116 sequence
gctagccaaaagctcaacggaacaatggaagttaaggttaaataagacaacaaaaaagccctacactcaccgtcgccaaacttagagtgtagagcaagcatcacagaaaataaaaacgctagacaaccagcttaaaacataatcgaggttatgcgttcttttttctgtacccattttatcaaaaacgaggtacaaacacaatgcataaagtagctatctatgtccgagtatcaaccacatcgcaggttgatgagggctat

SEQ ID NO: 20116 - DNA, 260 bp, Unknown
  Description of Unknown: LeftRegion for integrase B7117 sequence
acaaatacaaagatcaaattcaaagtattataaaattgtatctataataaaataaaaatcccccaggtgctggaaacacctgagggaacgcaatacatcaagagccttagtcaaagactttgatataatgccctaagcaagcatattatatcataaaggctctcgatgtacaatttcaaattgtataggagtgatgttttatgaagactgtatgcgcttatatcagagtttctacagattcacaggaggaatactcacca

SEQ ID NO: 20117 - DNA, 260 bp, Unknown
  Description of Unknown: LeftRegion for integrase B7118 sequence
aatcgtcacgccctcctgatcttccagcaggcggacgagcgtcgcaagcatctgctccgccgtcggcgcgttctccttcgcaaaaagacggtcagcatccatccgcttcacctccccggtggcatataggtatgggtgcgcccgtagctttatgaatgcgcgcagcggcagccatcgccataggaaggtggaaggaagaaatgacgaatcaggcagaaaaaacaagctacatcgagaacgtggcggcgtacattcgcgtc

SEQ ID NO: 20118 - DNA, 260 bp, Unknown
  Description of Unknown: LeftRegion for integrase B7119 sequence
cttccaaaacactcataataaaaaccgcccctggcagcaaccaggaacggcttttccatagattttctcttaccgggcgctccggaagatacaatcagcttgaacacctgaattatatcatttccagagcgtcctgacaaggggtgttatttttgcacccaaaatcacatagattgtcactacatgaaggagatgatatcatgctgataggagctgcttatatccgtgtcagcacggatgaccagctggatctgagccct

SEQ ID NO: 20119 - DNA, 260 bp, Unknown
  Description of Unknown: LeftRegion for integrase B7120 sequence
cggaaaaaaagtattccttgcaattttaacacgcactgacgaagatttaggcgaaatcaatattaaaaagagcgaactactttataataactcagaccataacataacagctaaaattatagaaatcaccggtggcaaaccacctaaaaagtattatggctgtaatataaaagttacaatagaataaagaaggtgattaaatgaaatatgccgcagcatacatcagagtatctgatgaccggcaggatgaatactccccg

SEQ ID NO: 20120 - DNA, 260 bp, Unknown
  Description of Unknown: LeftRegion for integrase B7121 sequence
catctatctcataccataaacactgcttgccgttaatcggtatgtgaaccctgactgcaagtttctgacgatttgccatatttctcagctcctttttatattctatgtcacacatcagtacttgtgttctaaaaaaaacagctttcaaaatgatatgttaaagcaacagcatacagcatattaatatatgggtggataaaatgagcaaagaacttaaaaacgctgcggcatatataagagtatcaaccgaccgacaaacc

SEQ ID NO: 20121 - DNA, 260 bp, Unknown
  Description of Unknown: LeftRegion for integrase B7122 sequence
aatcgtcacgccctcctggtcttccagcaggcggacgagcgccgcaagcatttgctccgccgtcggcgcgttctccttcgcaaaaagacggtcagcatccatccgcttcacctccccggtggcatataggtatgggtgcgcccgtagctttatgaatgcgcgcagcggcagccatcgccataggaaggtggaaggaagaaatgacgaatcaggcagaaaaaacaagctacattgagaacgtggcggcgtacatccgcgtc

SEQ ID NO: 20122 - DNA, 260 bp, Unknown
  Description of Unknown: LeftRegion for integrase B7123 sequence
aaatacaaagatcaaattcaaagtattataaaattgtatctataataaaataaaaaacccccaggtgctggaaacacctgagggaacgcaatacatcaagagccttagtcaaagactttgatataatgccctaagcaagcatattatatcataaaggctctcgatgtacaatttcaaattgtataaaggagtgatgttttatgaagactgtatgcgcttatatcagagtttctacagattcacaggaagaatactcacca

SEQ ID NO: 20123 - DNA, 260 bp, Unknown
  Description of Unknown: LeftRegion for integrase B7124 sequence
atcgttttagatgctaatgcgaaagtcattgcacaggagcaaaacggtaaaatggttttagacaaataaaaaaagccccacgctctcaaactttggcgagtctgagcgtgaggcagtcaagataaggaaaggcttcaaaatgaatattttgaaaggtgtctttctatactctattttagcagaaagtgagtataaagacaatgaataaagtagcattatatgtgcgcgtgtcaactacttctcagttagaagaggggtac

SEQ ID NO: 20124 - DNA, 260 bp, Unknown
  Description of Unknown: LeftRegion for integrase B7125 sequence
cggaaaaaaagtattccttgcaattttaacacgcactgacgaagatttaggcgaaatcaatattaaaaagagcgaactactttataataactcagaccataacataacagctaaaattatagaaatcaccggtggcgaaccacctaaaaagtattatggctgtaatataaaagttacaatagaataaagaaggtgattaaatgaaatatgccgcagcatacatcagagtatctgatgaccggcaggatgaatactccccg

SEQ ID NO: 20125 - DNA, 260 bp, Unknown
  Description of Unknown: LeftRegion for integrase B7126 sequence
cggaaaaaaaatattccttgcaattttaacacgcactgacgaagatttaggcgaaatcaatattaaaaagagcgaactactttataataactcagaccataacataacagctaaaattatagaaatcaccggtggcgaaccacctaaaaagtattatggctgtaatataaaagttacaatagaataaagaaggtgattaaatgaaatatgccgcagcatacatcagagtatctgatgaccgtcaggatgaatactccccg

SEQ ID NO: 20126 - DNA, 260 bp, Unknown
  Description of Unknown: LeftRegion for integrase B7127 sequence
atttatttgtcaaatgtgaaaaaccgcccctggctgcaaccaggaacggcttttccatagattttctcttaccggacgctccggaaagatacaatcagcttgaacacctgaattatatcatttccagagcgtcctgacaaggggcgttatttttgcactcaaaatcacatagattgtcactacatgaaggagatgatataatgctgataggagctgcttatatccgtgtcagcacggatgaccagctggatctgagtcct

SEQ ID NO: 20127 - DNA, 260 bp, Unknown; identical to SEQ ID NO: 20124
  Description of Unknown: LeftRegion for integrase B7128 sequence

SEQ ID NO: 20128 - DNA, 260 bp, Unknown
  Description of Unknown: LeftRegion for integrase B7129 sequence
tctttgaatactatattcaaaacaacttcaatgaagacgaattagaatttttaaaaaatgatataaataaatgccgaaataattttaatgaattatacaattttttagaaattgaatatgcttgtaataaatgcgtttggagagaaaatgcagaagtgtttttaaaatatgacataatcaaattcaaagaaggtgattaaatgaaatatgccgcagcatacattagagtatctgatgaccggcaggatgaatactccccg

SEQ ID NO: 20129 - DNA, 260 bp, Unknown
  Description of Unknown: LeftRegion for integrase B7130 sequence
ggacgtttgtatgcccgcccgattataagaacattcctttcaaggataagcgcatagaagccttttacaaggacggatttgccgttatttccgattttctgcactcgataggatatattgtaggcatcaatatcccgaagcgctacagacggcatttcgatgtgttgagcagcgataattattaaaaagggggtataaccatgcaaaccgcagcggcatatataagagtatcaaccgatgatcagatcgagtactccccc

SEQ ID NO: 20130 - DNA, 260 bp, Unknown
  Description of Unknown: LeftRegion for integrase B7131 sequence
gcttctgctttctttaatacaatagtttttctaatatacgcttttattacatttggatatttttcatttttatttaacgatgataaaaatatttatgtactgttctttgtttatctcccagcacctataatttcaacatatatgttatatgtttttatagatgatattgttactgaaaaaaatcaaaagaaggtgattaaatgaaatatgccgcagcatacataagagtatctgatgacaggcaagacgaatactccccg

SEQ ID NO: 20131 - DNA, 260 bp, Unknown
  Description of Unknown: LeftRegion for integrase B7132 sequence
aaatatactcgtatcgattttaatttttctaacttacatttacataagctacgtttatttttcatttttatttaaaagtgaaacgaacatttactttttatttttcttttatttgccagcgccgataatttcgacatatatattatatatttttataagagatactattgcagaaaagaaaaataaaagaaggtgattaaatgaaatatgccgcagcatacatcagagtatctgatgaccgtcaggatgaatactccccg

SEQ ID NO: 20132 - DNA, 260 bp, Unknown
  Description of Unknown: LeftRegion for integrase B7133 sequence
ggacgtttgtatgcccgcccgattataagaacattcctttcaaggataagcgcatagaagccttttacaaggacggatttgccgttatttccgactttctgcactcaataggatatcttgtaggtatcaatattccgaagcgatacaggcggcatctggacgtattgagcagtgataattattaaagtggggtgatgaccatgcagaccgcagcggcatatataagagtatcaaccgatgatcagatcgagtactccccc

SEQ ID NO: 20133 - DNA, 260 bp, Unknown
  Description of Unknown: LeftRegion for integrase B7134 sequence
tctttgaatactatattcaaaacaacttcaatgaagacgaattagaatttttaaaaaatgatataaataaatgccgaaataattttaatgaattatacaattttttagaaattgaatatgcttgtaataaatgcgtttggagagaaaatgcagaagtgtttttaaaatatgacataatcaaattcaaagaaggtgattaaatgaaatatgccgcagcatacatcagagtatctgatgaccgtcaggatgaatactccccg

SEQ ID NO: 20134 - DNA, 260 bp, Unknown
  Description of Unknown: LeftRegion for integrase B7135 sequence
aaaaatactggaagcacttttgatttttctaacatatatttacataacatatgtatatttttctcttttatttgaaaaagatttgaacatttattttctctttttcttttacttgccggcgccaataatctcaacatatatattatatatttttacaaaagatactatcgcggaaaagaaaaatagaagaaggtgattaaatgaaatatgccgcagcatacatcagagtatctgatgaccggcaggatgaatactccccg

SEQ ID NO: 20135 - DNA, 260 bp, Unknown
  Description of Unknown: LeftRegion for integrase B7136 sequence
aatcgtcacgccctcctggtcttccagcaggcggacaagcgtcgcaagcatctgctctgccgtcggcgcgttctccttcgcaaaaagacggtcagcatccatccgcttcacctccccggtggcatataggtatgggtgcgcccgtagctttatgaatgcgcgcagcggcagccatcgccataggaaggtggaaggaagaaatgacgaatcaggcagaaaaaacaagctacatcgagaacgtggcggcgtacattcgcgtc

SEQ ID NO: 20136 - DNA, 260 bp, Unknown
  Description of Unknown: LeftRegion for integrase B7137 sequence
acaaataaatgcctactcaattgagtaggcatttttagttttacaacttaaaaattattaaataaaaaatcccccggctgttggagcagccgagggaaaattgaatacagttacacctgaagcataaccgcatcaacccgcaaattgattataccacgcttcaggttagtttgtcatacctaaaaggagcgtgtttttttatgcctaaaattaaagtaggtatatatatccgtgtatcgacccaagaacaagccaatgaa

SEQ ID NO: 20137 - DNA, 260 bp, Unknown; identical to SEQ ID NO: 20119
  Description of Unknown: LeftRegion for integrase B7138 sequence

SEQ ID NO: 20138 - DNA, 260 bp, Unknown; identical to SEQ ID NO: 20115
  Description of Unknown: LeftRegion for integrase B7139 sequence

SEQ ID NO: 20139 - DNA, 260 bp, Unknown
  Description of Unknown: LeftRegion for integrase B7140 sequence
ctgctttctttaatacaatagtttttctaatatacgcttttattacatttggatatttttcatttttatttaacgatgataaaaatatttatgtactgttctttgtttatctcccagcgccgataatttcgacatatatattatatatttttataagagatactattgcagaaaagaaaaaatcaaaagaaggtgattaaatgaaatatgccgcagcatacatcagagtatctgatgaccggcaggatgaatactccccg

SEQ ID NO: 20140 - DNA, 260 bp, Unknown
  Description of Unknown: LeftRegion for integrase B7141 sequence
aatcgtcacgccctcctggtcttccagcaggcggacgagcgtcgcaagcatctgctctgccgtcggcgcgttctccttcgcaaaaagacggtcagcatccatccgcttcacctccccggtggcatataggtatgggtgcgcccgtagctttatgaatgcgcgcagcggcagccatcgccataggaaggtggaaggaagaaatgacgaatcaggcagaaaaaacaagctacatcgagaacgtggcggcgtacatccgcgtg

SEQ ID NO: 20141 - DNA, 260 bp, Unknown
  Description of Unknown: LeftRegion for integrase B7142 sequence
gtatagctatcctcatgttcaaaaagcatatatttttgcgaatgaaacatctttttgcactctatcattgttatttaagcgtctttttataaaaatccccctcatcgactggacctcgatgaaggggcagggcagataattcttgtggtgcaaggtattattctgccctttcataatatcgtaatgaaagggtgatgtcaatgaaaattgctgcagcctatgtgcgcgtcagcaccgatgaccagttagaatactctccg

SEQ ID NO: 20142 - DNA, 260 bp, Unknown
  Description of Unknown: LeftRegion for integrase B7143 sequence
acggaaaaaaagtattccttgcaattttaacacgcactgacgaagatttaggcgaaatcaatattaaaaagagtgaactactttataataactcagaccataacataacagctaaaatcataaaaattacaggtggagagcctcctaaaacatattatggctgcaatattaaggtaacaatagattaggtaggtgattaaatgaaatatgccgcagcatacatcagagtatctgatgaccggcaggatgaatactccccg

SEQ ID NO: 20143 - DNA, 260 bp, Unknown
  Description of Unknown: LeftRegion for integrase B7144 sequence
aaaaatactggaagcacttttgatttttctaacatatatttacataacatatgtatatttttctcttttatttgaaaaagatttgaacatttattttctctttttcttttacttgccagcgccaataatctcaacatatatattatatatttttacaaaagatactatcgcggaaaagaaaaatagaagaaggtgattaaatgaaatatgccgcagcatacatcagagtatctgatgaccggcaggatgaatactccccg

SEQ ID NO: 20144 - DNA, 260 bp, Unknown
  Description of Unknown: LeftRegion for integrase B7145 sequence
gcaaattcaatcttgaaacaggcatctaattagttttaatatctgactgtttataataaaaaaaatcccccgtgcgccaacacgagggatcagcagtacatcaagagtctaaaccctatgatataatgccctaagcaagcatattatatcataaaggctctcgatgtacaatttcaaattgtataaaggagtgatgttttatgaagactgtatgcgcttatatcagagtttctacagattcacaggaagaatactcacca

SEQ ID NO: 20145 - DNA, 260 bp, Unknown
  Description of Unknown: LeftRegion for integrase B7146 sequence
cttccaaaacactcataataaaaaccgcccctggcggcaaccaggaacggcttttccatagattttctcttaccgggcgctccggaagatacaatcagcttgaacacctgaattatatcatttccagagcatcctgacaaggggcgttatttttgcacccaaaatcacatagattgtcactacatgaaggagatgatatcatgctgataggagctgcttatatccgtgtcagcacggatgaccagctggatctgagccct

SEQ ID NO: 20146 - DNA, 260 bp, Unknown
  Description of Unknown: LeftRegion for integrase B7147 sequence
gtgttctttggccaattgttattatcttaatcatattagctttatatttatggttattttaaaataaaaaatcccccgactgctccaacagccgagggaaaattgaatagaatacctgaagtaggtatacactcaatccgcaaattgattataccacgcttcaggttagctttgctatacccaaaggagcgtgtttttttatgcctaaagtaaaagtaggtatttatatccgggtatctacacaagagcaagccaccgaa

SEQ ID NO: 20147 - DNA, 260 bp, Unknown
  Description of Unknown: LeftRegion for integrase B7148 sequence
acggaaaagatgtattccttgcaattttaacacgcactgacgaagatttaggcgagattaacgctcaaaaaagcgaactcatttataataactccgaccataaaatcacagctaaaattgtagaaatcaccggtggcgaaccacctaaaaagtattatggctgtaatattaaggtaacaatagattaggtaggtgattaaatgaaatatgccgcagcatacatcagagtatctgatgaccggcaggatgaatactctccg

SEQ ID NO: 20148 - DNA, 260 bp, Unknown
  Description of Unknown: LeftRegion for integrase B7149 sequence
gatatttgcatatcctgcacaatttcaataaaaaatagataaataaaaatcccccaggtgctggaaacacctgagggaacgcaatacatcaagagccttaaacaaaagcctaagtctttgatataatgccctaagcaagcatattatatcataaaggctctcgatgtacaatttcaaattgtataaaggagtgatgttttatgaagactgtatgcgcttatatcagagtttctacagattcacaggaagaatactcacca

SEQ ID NO: 20149 - DNA, 260 bp, Unknown
  Description of Unknown: LeftRegion for integrase B7150 sequence
aatttatttgtcaaacataaaaaccgcccctggctgcaaccaggaacggcttttccatagattttctcttaccggacgctccggaaagatacaatcagcttgaacacctgaattatatcatttccagagcgtcctgacaaggggcgttatttttgcacccaaaatcacatagattgtcactacatgaaggagatgatataatgctgataggagctgcttatatccgtgtcagcacggatgaccagctggatctgagtcct

SEQ ID NO: 20150 - DNA, 260 bp, Unknown
  Description of Unknown: LeftRegion for integrase B7151 sequence
ctttaaaaaatatactcgtatcgattttaatttttctaacttacatttacataacttgcgtttatttttcatttttatttaaaagtgaaacgaacatttactttttatttttcttttatttgccggcgccgataatttcgacatatatattattataagagatactattgcagaaaagaaaaataaaagaaggtgattaaatgaaatatgccgcagcatacatcagagtatctgatgaccggcaggatgaatactccccg

SEQ ID NO: 20151 - DNA, 260 bp, Unknown
  Description of Unknown: LeftRegion for integrase B7152 sequence
acttccaaaacactcataataaaaaccgcccctgactgcaaccaggaacggcttttgatagattttctcttaccggacgctccggaagatacaatcagcttgaacacctgaattatatcatttccagagcgtcctgacaaggggcgttatttttgcacccaaaatcacatagattgtcactacatgaaggagatgatataatgctgataggagctgcttatatccgtgtcagcacggatgaccagctggatctgagtcct

SEQ ID NO: 20152 - DNA, 260 bp, Unknown; identical to SEQ ID NO: 20136
  Description of Unknown: LeftRegion for integrase B7153 sequence

SEQ ID NO: 20153 - DNA, 260 bp, Unknown
  Description of Unknown: LeftRegion for integrase B7154 sequence
gcagcaaggagaaaaagcaaaaagtatatagtatggatctcaatgctttcgatagccttatcgaaagggtagaagcagcaaaagaataaaaaaatcccccctcatcgactggacctcgatgaaggggcagggcagataattcttgtggtgcaaggtattattctgccctttcataatatcgtaatgaaagggtgatgtcaatgaaaattgctgcagcctatgtgcgcgtcagcaccgatgaccagttagaatactctcca

SEQ ID NO: 20154 - DNA, 260 bp, Unknown; identical to SEQ ID NO: 20119
  Description of Unknown: LeftRegion for integrase B7155 sequence

SEQ ID NO: 20155 - DNA, 260 bp, Unknown
  Description of Unknown: LeftRegion for integrase B7156 sequence
tatgtgcatgacaaagacgaggttcaacttgcgcatgaagaaaatggcgcgatggtttacgacaaataaaaaaagccccacgctctcaaactttggcgagtctgagcgtgaggcagtcaagataaggaaaggcttcaaaatgaatattttgaaaggtgtctttctatactctattttagcagaaagtgagtataaagacaatgaataaagtagcattatatgtgcgcgtgtcaactacttctcagttggaagagggctac

SEQ ID NO: 20156 - DNA, 260 bp, Unknown
  Description of Unknown: LeftRegion for integrase B7157 sequence
atttttgtagacctcatgatttatcatggggtctattttttaataaaaatcccccaggtgctggaaacacctgagggaacgcaatacatcaagagccttaaacaaaagcctaagtctttgatataatgccctaagcaagcatattatatcataaaggctctcgatgtacaatttcaaattgtataaaggagtgatgttttatgaagactgtatgcgcttatatcagagtttctacagattcacaggaagaatactcacca

SEQ ID NO: 20157 - DNA, 260 bp, Unknown
  Description of Unknown: LeftRegion for integrase B7158 sequence
aaatttacacaagaagaagctgactacgctgtccaaaatctgaaataagacaataaaaaagccctataatctccctcgccaaagttagattatagagcttatgcatcacagaaaaaaacaaggtctaaccagtaaaaacgaattgaggttatactttcttttttctgtacccattttatcaaaaacgaggtacaaacacaatgcataaagtagctatctatgtccgagtatcaaccacatcgcaggttgatgagggctat

SEQ ID NO: 20158 - DNA, 260 bp, Unknown
  Description of Unknown: LeftRegion for integrase B7159 sequence
aatcattttgttgtggtttttgttgtggctcaaacccttgtaaaatggggatttcttatataaatataacacttaacatatatattctctatattatagaaaaaaataatatatatagtatataagtatataaaaatatatgtatataagagttggcataaaaaagtgttttttgttagggtgaaaggaagtgaagaagaatgaaaagaaaaatggtggttgcaatatatattagagtgtcgacacaagagcaggcatta

SEQ ID NO: 20159 - DNA, 260 bp, Unknown; identical to SEQ ID NO: 20131
  Description of Unknown: LeftRegion for integrase B7160 sequence

SEQ ID NO: 20160 - DNA, 260 bp, Unknown
  Description of Unknown: LeftRegion for integrase B7161 sequence
actgaatttgtcaaacatgaaaaaccgcccctggcggcaaccaggaacggcttttccgtagattttctcttaccgggcgctccggaagatacaatcagcttagacacctgaattatatcatttccagagcgtcctgacaaggggcgttatttttgcacccaaaatcacatagattgtcactacatgaaggagatgatataatgctgataggagctgcttatgtacgagtcagcacggatgaccagctggatctgagtcct

SEQ ID NO: 20161 - DNA, 260 bp, Unknown
  Description of Unknown: LeftRegion for integrase B7162 sequence
aatcgtcacgccctcctggtcttccagcaggcggacgagcgtcgcaagcatctgctctgccgtcggcgcgttctccttcgcaaaaagacggtcagcatccatccgcttcacctccccggtggcatataggtatgggtgcgcccgtagctttatgaatgcgcgcagcggcagccatcgccataggaaggtggaaggaagaaatgacgaatcaggcagaaagaacaagctacatcgagaacgtggcggcgtacatccgcgtc

SEQ ID NO: 20162 - DNA, 260 bp, Unknown
  Description of Unknown: LeftRegion for integrase B7163 sequence
aatcgtcacgccctcctggtcttccagcaggcggacgagcgtcgcaagcatctgctccgccgtcggcgcgttctccttcgcaaaaagacggtcagcatccatccgcttcacctccccggtggcatataggtatgggtgcgcccgtagctttatgaatgcgcgcagcggcagccatcgccataggaaggtggaaggaagaaatgacgaatcaggcagaaaaaacaagctacattgagaacgtggcggcgtacatccgcgtc

SEQ ID NO: 20163 - DNA, 260 bp, Unknown
  Description of Unknown: LeftRegion for integrase B7164 sequence
gcagctcgaacgaaagcaacagaaacgtcttaaataaaacaaaaccgcccggtgctggtaacaccgaacggtatgttgaatagatttctcttgccggataaccggcgatgatataatccacccaagccaagtgaattatatcatctccagtgcgtcctgacaaggggcgtattttttgtactcttttttggaggtgctatatgaataaagttgcaatctatgtgcgcgtatccactcaggagcaggccaatgagggctac

SEQ ID NO: 20164 - DNA, 260 bp, Unknown
  Description of Unknown: LeftRegion for integrase B7165 sequence
aatcgtcacgccctcctggtcttccagcaggcggacgagcgtcgcaagcatttgctccgccgtcggcgcgttctccttcgtaaaaagacggtcagcatccatccgcttcacctccccggtggcatataggtatgggtgcgcccgtagctttatgaatgcgtgcagcggcagccatcgccataggaaggtggaaggaagaaatgacgaatcaggcagaaaaaacaagctacatcgagaacgtggcggcgtacatccgcgtg

SEQ ID NO: 20165 - DNA, 260 bp, Unknown
  Description of Unknown: LeftRegion for integrase B7166 sequence
acggaaaagatgtattccttgcaattttaacacgcactgacgaagatttaggcgagattaacgctcaaaaaagcgaactcatttataataactccgaccataaaatcacagctaaaattgtagaaatcaccggtggcgaaccacctaaaaagtattatggctgtaatattaaggtaacaatagattaggtaggtgattaaatgaaatatgccgcagcatacatcagagtatctgatgaccggcaggatgaatactccccg

SEQ ID NO: 20166 - DNA, 260 bp, Unknown; identical to SEQ ID NO: 20119
  Description of Unknown: LeftRegion for integrase B7167 sequence

SEQ ID NO: 20167 - DNA, 260 bp, Unknown
  Description of Unknown: LeftRegion for integrase B7168 sequence
aaaaatactggaagcacttttgatttttctaacatatatttacataacatatgtatatttttctcttttatttgaaaaagatttgaacatttattttttctttttcttttacttgccggcaccaataatctcaacatatatattatatatttttacgaaaaatactatcgcagaaaagaaaaataaaagaaggtgattaaatgaaatatgccgcagcatacatcagagtatctgatgaccggcaggatgaatactccccg

SEQ ID NO: 20168 - DNA, 260 bp, Unknown; identical to SEQ ID NO: 20155
  Description of Unknown: LeftRegion for integrase B7169 sequence

SEQ ID NO: 20169 - DNA, 260 bp, Unknown
  Description of Unknown: LeftRegion for integrase B7170 sequence
acggaaaaaaagtattccttgcaattttaacacgcactgacgaagatttaggcgaaatcaatattaaaaagagcgaactactttataataactcagaccataacataacagctaaaatcataaaaattacaggtggagagcctcctaaaacatattatggctgcaatattaaggtaacaatagattaggtaggtgattaaatgaaatatgccgcagcatacatcagagtatctgacgaccggcaggatgaatactccccg

SEQ ID NO: 20170 - DNA, 260 bp, Unknown
  Description of Unknown: LeftRegion for integrase B7171 sequence
aaatttatttgtcaaacataaaaaccgcccctggctgcaaccaggaacggcttttccatagattttctcttaccggacgctccggaagatacaatcagcttgaacacctgaattatatcatttccagagcgtcctgacaaggggcgttatttttgcacccaaaatcacatagattgtcactacatgaaggagatgatataatgctgataggagctgcttatatccgtgtcagcacggatgaccagctggatctgagtcct

SEQ ID NO: 20171 - DNA, 260 bp, Unknown; identical to SEQ ID NO: 19939
  Description of Unknown: LeftRegion for integrase B7172 sequence

SEQ ID NO: 20172 - DNA, 260 bp, Unknown
  Description of Unknown: LeftRegion for integrase B7173 sequence
tgtcctttgtttttttatgaacttttatacgaaatgcattgcggtttatttataatcagtctatacttaaataaaaatccccggcgggcaccggggacgaagcagtctctgaagtgactacctacatacatactataccacttcggagacagccttgcaatagcagggctgtatttttgtaccaaaaaggaggaatcaccatgcaaaaaagatgttttatttacatccgggtatccacccagcggcaggccgaagagggg

SEQ ID NO: 20173 - DNA, 260 bp, Unknown
  Description of Unknown: LeftRegion for integrase B7174 sequence
acggaaaaaaagtattccttgcaattttaacacgcactgacgaagatttaggcgaaatcaatattaaaaagagcgaactactttataataactcagaccataacataacagctaaaatcataaaaattacaggtggagagcctcctaaaacatattatggctgcaatattaaggtgacaatagattaggtaggtgattaaatgaaatatgccgcagcatacataagagtatctgacgacaggcaagacgaatactccccg

SEQ ID NO: 20174 - DNA, 260 bp, Unknown
  Description of Unknown: LeftRegion for integrase B7175 sequence
atggcggaggttttacaaaatcagaagtcaactacgctattaaacatttagaagacgaagattaaaataaaaaaagcccacgctcaaattttggacgaggagagcgtgagctaggaagtatacaagaaaaagccattaaatgggcgtttttcttgtacccattttatcatttttcaacgataattgaaagaggtacaaatatgaacaaagtagctatctatgtacgtgtatcaaccactaaccaagccgaagaaggctat

SEQ ID NO: 20175 - DNA, 260 bp, Unknown
  Description of Unknown: LeftRegion for integrase B7176 sequence
gatatttgcatatcctgcacaatttcaataaaaaatagataaataaaaatcccccaggtgctgaaaacacctgagggaacgcaatacatcaagagccttaaacaaaagcctaagtctttgatataatgccctaagcaagcatattatatcataaaggctctcgatgtacaatttcaaattgtataaaggagtgatgttttatgaagactgtatgcgcttatatcagagtttctacagattcacaggaagaatactcacca

SEQ ID NO: 20176 - DNA, 260 bp, Unknown
  Description of Unknown: LeftRegion for integrase B7177 sequence
acacaccatttttctgatttcaccaaaatggccataaaaacaaaaccgcccggtgctggtaacaccgaacggtatgttgaatagatttctcttgccggaataccggcgatgatataatccacccgaaccaagtgaattatatcatctccagtgcgtcctggcaaggggcgtattttttatactctttttggaggtgctatatgaaaaaagctgcaatctacgtcagagtatccacgcaggagcaggccacggagggctac

SEQ ID NO: 20177 - DNA, 260 bp, Unknown
  Description of Unknown: LeftRegion for integrase B7178 sequence
taatatcttttcaaatatgaaaaaccgcccctggcggcaaccaggaacggcttttccatagattttctcttaccgggcgctccggaagatacaatcagcttgaacacctgaattatatcatttccagagcatcctgacaaggggcgttatttttgcacccaaaatcacatagattgtcactacatgaaggagatgatatcatgctgataggagctgcttatatccgtgtcagcacggatgaccagctggatctgagccct

SEQ ID NO: 20178 - DNA, 260 bp, Unknown
  Description of Unknown: LeftRegion for integrase B7179 sequence
aaagattcatgtgtctttgagcctgtaatatttgcaaaagcaaaagaccgcccctgcgccaacaggaacggcctcttacatagattttctcttgtcaggataccctgaaaagtatgatctacatccaatccagattataccatttcagcggcatctcggcaagaggtgtattttttataccctttttcaggaggtgcaatatgaaaaaagttgcaatttatgtccgcgtgtccagccaagaacaggcgaacgaaggttat

SEQ ID NO: 20179 - DNA, 260 bp, Unknown
  Description of Unknown: LeftRegion for integrase B7180 sequence
atgtgcatgatacgaacgaggtacagcttgcacacgaagaaaatggcgtgatgatttacgacaaataaaaaagccccacgctctcaaagtttggcgacttcaagcgtgaggtttgaaaagataaagaaaggatttcaaaatgttttattttgaaagggtctttctgtactctattttaccagaaagagggtacaaagacaatgaataaagtagctgtttatgttcgagtctctactacttcccagttagaagagggatac

SEQ ID NO: 20180 - DNA, 260 bp, Unknown
  Description of Unknown: LeftRegion for integrase B7181 sequence
acttttgcttaccaagatgagaataatgattctatattgattgcatattcaacgaaaactaaagacgtaattcaaccaacattttaaataaaaaaacaccactcgccccgaccaaagtttgagtagtgtattatggctgacaacgaccacgaaggtctatttgtcatgccctattttaacataataggagctgaaataatatgaaaaccgctatttacgtaagagtttcaacaaatgaacaagctgaagaaggctattca

SEQ ID NO: 20181 - DNA, 260 bp, Unknown
  Description of Unknown: LeftRegion for integrase B7182 sequence
gttacttcatgctccaatatctaaaatcaaaacagaattaaaatgtaccgaaggatgtcaatcagaaggcggagcagaagcgacaagagtatttatccaacatccggagcaaatacaatacttcaaagattttattctacattgaagcagaaccgctctcgataaaattcgagggcggttattataaggagtgaatttatatgaaaatagcagctgcttatattcgtgtatcgacagaagaccaggtggaatattcacca

SEQ ID NO: 20182 - DNA, 260 bp, Unknown
  Description of Unknown: LeftRegion for integrase B7183 sequence
tcatggaaaagattcagggaaaataaattttaaataataaaaccgcccggtgctggaacaccgaacggtctttcgaatagatttttctctcgccggattgctccggattgatataatcacccgatacacgtgaattatatcatctccagtacgtcctggcaaggggcgtattttttatacccattttttggaggtgctatatgaaaaaagttgcaatttatgtcagagtatccacgcaggagcaggccgcggaaggttac

SEQ ID NO: 20183 - DNA, 260 bp, Unknown; identical to SEQ ID NO: 20178
  Description of Unknown: LeftRegion for integrase B7184 sequence

SEQ ID NO: 20184 - DNA, 260 bp, Unknown
  Description of Unknown: LeftRegion for integrase B7185 sequence
cggaaaagatgtattccttgcaattttaacacgcactgatgaagatttaggcgagattaacgctcaaaaaagtgaacttatttataataactccgaccataaaatcacagctaaaattgtagaaatcaccggtggcgaactacctaaaaagtattatggctgtaatataaaagttacaatagaataaagaaggtgattaaatgaaatatgccgcagcatacatcagagtatctgatgaccggcaggatgaatactccccg

SEQ ID NO: 20185 - DNA, 260 bp, Unknown; identical to SEQ ID NO: 20130
  Description of Unknown: LeftRegion for integrase B7186 sequence

SEQ ID NO: 20186 - DNA, 260 bp, Unknown; identical to SEQ ID NO: 20148
  Description of Unknown: LeftRegion for integrase B7187 sequence

SEQ ID NO: 20187 - DNA, 260 bp, Unknown
  Description of Unknown: LeftRegion for integrase B7188 sequence
aatttatttgtcaaacataaaaaccgcccctggctgcaaccaggaacggcttttccatagattttctcttaccggacgctccggaaagatacaatcagcttgaacacctgaattatatcatttccagagcgtcctgacaaggggcgttatttttgcacccaaaatcacatacactgtcactgcataaaggagatgatatcatgctgataggagctgcttacatccgtgtcagcacggatgaccagctggatctgagtcct

SEQ ID NO: 20188 - DNA, 260 bp, Unknown
  Description of Unknown: LeftRegion for integrase B7189 sequence
atcgttttagatgttaatgcgaaagttattgcacaggagcaagacggtaaaatgattttagacaaataaaaaaagccccacgctctcaaactttggcgagtctgagcgtgagggaatcgagataaggaaaggtttcaaaatgaatattttgaaaggtgtctttctatactctattttatcagaaatggaggggaaagacaatgaataaagtagcattatatgtgcgcgtgtctaccacttctcagttagaagaggggtac

SEQ ID NO: 20189 - DNA, 260 bp, Unknown
  Description of Unknown: LeftRegion for integrase B7190 sequence
ttgcggcgctgttgttttacatcgccatggatgtcagcaacgaaaacattggcctcatcagaggcggcagcgtttcgcccttggcgatgttgctttgcgttttcgcgctggcctccaccgccgccctgattatcttgcagggcagattgatagatagcaagaaggagaaaccgataaacgacaaaagggatgaatcgtaaatgtcaatcatagaagagcaagtcaaaagaaatcagtatatcgaggaagtcgccgcctat

SEQ ID NO: 20190 - DNA, 260 bp, Unknown
  Description of Unknown: LeftRegion for integrase B7191 sequence
gaaattgacggcttccgtccatgccctgagtgcatcgaataataaaaaaagccctaccctgcgccaacaggatagagccgataagcaggatatgcagtacataacccacccaacattggatattgtaccacatccctgccgataaatcaagcagggcatttttgcgcccttttttaagtacaatctatgggagtggtacaatgaaatatgcagcggcatatatccgcgtaagtgacgaccggcaggacgagtacagcccg

SEQ ID NO: 20191 - DNA, 260 bp, Unknown
  Description of Unknown: LeftRegion for integrase B7192 sequence
acgggtctactacgaccgtgaaaacaaccgcttgcagctgatcgcagagaacccaaggtatgcaccgctggtgtatacgggcgaggaactcaactatatccgcattctgggaaaagcggtaacgctgatgcgggagttgtgatatacataaaattgccctgccaaaaccggcagggcatcactatagaaaggagtgccccatgaaaatcgcagcggcgtacattcgtgtgtccacggacgaccagatcgaatactccccc

SEQ ID NO: 20192 - DNA, 260 bp, Unknown
  Description of Unknown: LeftRegion for integrase B7193 sequence
ggtctacaccggtacaacgctgcaaaaaatcgaacagattctggagaagtgcaaggcagccatgaccgaagtcgccattgtggaatatcaaccggcggcataacttgattgacttgtctactcaggtaggactgaaataagatcgcttgccccgccctgccgcccaccacggcagggcatcactatagaaaggagcacccatgaaaatcgcagctgcgtacattcgtgtgtccaccgacgaccagatcgaatactccccc

SEQ ID NO: 20193 - DNA, 260 bp, Unknown
  Description of Unknown: LeftRegion for integrase B7194 sequence
aaaataaaagccatattcttaatcatataaaaatataaaaagtcttaaaatgaagaattaatcatttaaaaaaataatttttaatattataattattaaggaggaaactatgaaaataaaagtcatttttaatgaagataattatgaagctgattattatagaaaaaaattaatatctaatataaaagaggtagaggataatgaaagattcaaagagtaagactgttattatatacaatagagtatctaccataatgcaa

SEQ ID NO: 20194 - DNA, 260 bp, Unknown
  Description of Unknown: LeftRegion for integrase B7195 sequence
aaaataaaagccatattcttaatcatataaaaatataaaaagtcttaaaataaagaattaatcatttaaaaaaataatttttaatattataattattaaggaggaaactatgaaaataaaagtcatttttaatgaagataattatgaagctgattattatagaaaaaaattaatatctaatataaaagaggtagaggataatgaaagattcaaagagtaagactgttattatatacaatagagtatctactataatgcaa

SEQ ID NO: 20195 - DNA, 260 bp, Unknown
  Description of Unknown: LeftRegion for integrase B7196 sequence
ttccaggcgttggccgggaagttagagtaagtcacaacaaaataaaaaaagccctaccctgcgccaacaggatagagccgataagcaggatatgcagtacataacccacccaacactggatattgtaccacatccctgccgataaatcaagcagggcatttttgcgcccttttttaagtacaatctatgggagtggtacaatgaaatatgcagcggcatatatccgcgtaagtgacgaccggcaagacgagtacagcccg

SEQ ID NO: 20196 - DNA, 260 bp, Unknown
  Description of Unknown: LeftRegion for integrase B7197 sequence
ttgtggcgctgatgttttacatcgccatggatgccagcaacgaagacattggcctcatcagaggcagcagcgtttcgcccttggcgatgttgctttgcgttttcgcgctggcctccaccgccgccctgattatcttgcagggcagattgatagatagtaagaaggagaaaccgataaacgacaaaagggatgaatcgtaaatgtcaatcatagaagagcaagtcaaaagaaatcagtatatcgaggaagtcgccgcctat

SEQ ID NO: 20197 - DNA, 260 bp, Unknown
  Description of Unknown: LeftRegion for integrase B7198 sequence
gatcgtacaccagaagaattagcggctttagataattaattattatggaggtcgcattgccaacaagagtgcaaattttgcctaagttcaattatctgttttaaagaaatcgaaatcgatcgggttaaaagaataatcccccaccggctgcaatcggtgggggaaacttaagttttatttttacctggaggtgctcagaaatggaaaacttaaaaatagcggcggcttacattcgagtgagtacccacgatcaggaggaa

SEQ ID NO: 20198 - DNA, 260 bp, Unknown
  Description of Unknown: LeftRegion for integrase B7199 sequence
gaaaataaaagctatattcttatcatataaaaatataaaaagtcttaaaacaaagaattaattatttaaaaaaataatttttaatattataattattaaggaggaaactatgaaaataaaagtcatttttaatgaagataattatgaagctgattattatagaaaaaaattaatatctaatataaaagaggtagaggataatgagagattcaaagagtaagactgttattatatacaatagagtatctaccataatgcaa

SEQ ID NO: 20199 - DNA, 260 bp, Unknown
  Description of Unknown: LeftRegion for integrase B7200 sequence
cgagcaggtataaaattgtttttttgacgccgacataacaaataaaaaaagccctaccctgcgccaacaggatagagccgataagcaggatatgcagtacataacccacccaacattggatattgtaccacatccctgccgataaatcaagcagggcatttttgcgcccttttttaagtacaatctatgggagtggtacaatgaaatatgcagcggcatatatccgcgtaagtgacgaccggcaggacgagtacagcccg

SEQ ID NO: 20200 - DNA, 260 bp, Unknown
  Description of Unknown: LeftRegion for integrase B7201 sequence
caggcgttgtccgggaagctggagtaaatcacaacaaaataaaaaaagccctaccctgcgccaacaggatagagccgataagcaggcgctgtgcgtacacataacccacccaacactggttattgtaccacagccctgccgaaaaatcaagcagggtatttttgcgcccttttttaagtacaatctatgggagtggtacaatgaaatatgcagcggcatatatccgcgtaagtgacgaccggcaggacgaatacagcccg

SEQ ID NO: 20201 - DNA, 260 bp, Unknown
  Description of Unknown: LeftRegion for integrase B7202 sequence
cttcgtttttctacttaatgttcttaaagatattctttttttatctcgcatttcacgtattttaatttctatcatatcctttttcctttcgttcattttagtctccccaaaattggcgtttttatatgatagaaatctgcttatttatttataactaaaaagtaacttattaaaaaaaatttttaaaaaaattatattttatgagtaaatccaaaatttattgtttaaaatatttatatactataacatttagcaaaggg

SEQ ID NO: 20202 - DNA, 260 bp, Unknown
  Description of Unknown: LeftRegion for integrase B7203 sequence
gtagttcccccaccatacggggagtaacgacgctacgggtatttttttatttagggggaaaatgaaatgccagaaaagcactatgatttacttcaaattgtttgaacatatcgacggtgtaagatcgcagaaattaaaaaaagcagaataaaagcccgtccagcaaaagccgggcgggttttgttaaaacgggtgataaaatgaatcgtgttgcgatatatgtcagagtgtctacaaacgaacaggcggcagagggatac

SEQ ID NO: 20203 - DNA, 260 bp, Unknown
  Description of Unknown: LeftRegion for integrase B7204 sequence
tcctccttatgtaaatcgcataaattcgtgggtcgattagatatctatattcttttatcatgtgtagtcctttctgggggtgcacatatatttatagctctgttactgaaaaatttcgacttaattgtctttttttataaaatgggttgttgcccccccaagggtttcagcataaatttaaaattttgcgaggagatattatgcaacaagcagccgcatacgtccgcgtgtctactgacgatcagacggagtatagtcct

SEQ ID NO: 20204 - DNA, 260 bp, Unknown
  Description of Unknown: LeftRegion for integrase B7205 sequence
ctttgtttttctacttaatgttcttaaagatattctttttttatctcgcatttcacgtattttaatttctatcatatcctttttcctttcgttcattttagtctccccaaaattggcgtttttatatgatagaaatctgcttatttatttataactaaaaagtaacttattaaaaaatttttttaaaaaaattatattttatgagtaaatccaaaatttattgtttaaaatatttatatactataacatttagcaaaggg

SEQ ID NO: 20205 - DNA, 260 bp, Unknown
  Description of Unknown: LeftRegion for integrase B7206 sequence
aagactatggcctgcgtccatgccctgagtgtatcggataataaaaaaaagccctaccctgcgccaacaggatagagccgataagcaggatatgtagtacataacccacccaacattggatattgtaccacatccctgccgataaatcaagcagggcatttttgcgcccttttttaagtacaatctatgggagtggtacaatgaaatatgcagcggcatatatccgcgtaagtgacgaccggcaagacgagtacagcccg

SEQ ID NO: 20206 - DNA, 260 bp, Unknown
  Description of Unknown: LeftRegion for integrase B7207 sequence
tacaacaaaatttggggatggggattaaaattcttaccatgaaaaaaggcttgcaaaacgcaagcccgatggacaaaccatctgcctccaagctattggattacttgtattatatgcgataatttaccgtttgtcaaccccttgttgacttttttccaaaatcttattaaataatactctctaaaagaaggtgataatgtatgtcgattattaaagcagctctttacgtcagagttagcacgatggaacaggtgaccgac

SEQ ID NO: 20207 - DNA, 260 bp, Unknown; identical to SEQ ID NO: 20197
  Description of Unknown: LeftRegion for integrase B7208 sequence

SEQ ID NO: 20208 - DNA, 260 bp, Unknown; identical to SEQ ID NO: 20196
  Description of Unknown: LeftRegion for integrase B7209 sequence

SEQ ID NO: 20209 - DNA, 260 bp, Unknown
  Description of Unknown: LeftRegion for integrase B7210 sequence
atacgaggaaatctttcaagcggttatattacatcgaatcaagtaatatcaactgttgacttagaaaaaaatattaccgatttatttattccggaacctctgaaatagaataataaataattcctatataaaaaatcccccaccggttgcaatcggtggggggaaacttaacttttatttttacctggaggtgctcagaaatggaaaacttaaaaatagcggcggcttacattcgagtgagtacccacgatcaggaggaa

SEQ ID NO: 20210 - DNA, 260 bp, Unknown
  Description of Unknown: LeftRegion for integrase B7211 sequence
aaatccacgagatactgactaaattagggataaaagcaaatatggataaataattttatttttgagtaatcctcagacaatgtctggggatttttaataggaggtaaatatggatactattattagaaatgaaaatataacacctgaagagaaaaatactatcttaagactattattacaagcagctaaagaagaattaaatgtcgaatagttcttcttttcctgctaaaatttcagctatttattgcagggaaagcaca

SEQ ID NO: 20211 - DNA, 260 bp, Unknown
  Description of Unknown: LeftRegion for integrase B7212 sequence
ctcggaatattgaactaccgcaacaaacatataactcgtgctctaatttacaaaaaaccgccccagtgttaccagcaccagagcggcccgcactccgaagagtatcgtgtgattcctgcaagaatcttttacatggtaccatcttcggagcgctgacgcaaattcagcgctatttttgtgctcatttttcggaggtggacatgaaatccgtcgcaatttactgccgtgtctccacgcaggagcaggccgcagaaggctac

SEQ ID NO: 20212 - DNA, 260 bp, Unknown; identical to SEQ ID NO: 20205
  Description of Unknown: LeftRegion for integrase B7213 sequence

SEQ ID NO: 20213 - DNA, 260 bp, Unknown
  Description of Unknown: LeftRegion for integrase B7214 sequence
gaaagtgacggcttccgtccatgccctgaatgcatcggataataaaaaaagccctaccctgcgccaacaggatagagccgataagcaggatatgtagtacataacccacccaacactggatattgtaccacatccctgccgataaatcaagcagggtatttttgcgcccttttttaagtacaatctatgggagtggtacaatgaaatatgcagcggcatatatccgcgtaagtgacgaccggcaagacgagtacagcccg

SEQ ID NO: 20214 - DNA, 260 bp, Unknown
  Description of Unknown: LeftRegion for integrase B7215 sequence
tccaggcgttggccgggaagttagagtaaatcacaacaaaataaaaaaaagccctaccctgcgccaacaggatagagccgataagcaggatatgcagtacataacccacccaacattggatattgtaccacatccctgccgataaatcaagcagggcatttttgcgcccttttttaagtacaatctatgggagtggtacaatgaaatatgcagcggcatatatccgcgtaagtgacgaccggcaggacgaatacagcccg

SEQ ID NO: 20215 - DNA, 260 bp, Unknown
  Description of Unknown: LeftRegion for integrase B7216 sequence
cgcaagactcgctaccaacgaatcttgcacccataatcagtatgggtctctcaataagactactgctccgaagaatacaatagtacgttcataaaatattgtatcatcttcggaaacagctcgcaagcggaactaatgttctatgctggctgttatttttgtacctttttatacataaaatcaacaaaggagatgatattatgccagaaaattatcgagacggcgccctttatattcgtgtaagcacagataaacaagaa

SEQ ID NO: 20216 - DNA, 260 bp, Unknown
  Description of Unknown: LeftRegion for integrase B7217 sequence
ctgtggcgctgatgttttacatcgccatggatgccagcaacgaagacattggcctcatcagaggcagcagcgtttcgcccttggcgatgttgctttgcgttttcgcgctggcttccaccgccgccctgattatcttgcagggcagattgatagatagcaagaaggagaaaccgataaacgacaaaagggatgaatcgtaaatgtcaatcatagaagagcaagtcaaaagaaatcagtatatcgaggaagtcgccgcctat

SEQ ID NO: 20217 - DNA, 260 bp, Unknown
  Description of Unknown: LeftRegion for integrase B7218 sequence
ttttctcctgtaaatagattaagtttataataaaaaagactccctgctaccaacagagagcctaaaagaatgttacctactaacctaaaaggtgtacggtaaacactaagtcgcattagtattttaccatacatcctggcatttttgtagggtgtattttttgcacccttttttaggataagaaaggatgataattaaatatgataagagcaggaatatatgctagagtaagtacaagagaacaggcagaagaaggatat

SEQ ID NO: 20218 - DNA, 260 bp, Unknown
  Description of Unknown: LeftRegion for integrase B7219 sequence
ttccaggcgttggccgggaagttagagtaaatcacaacaaaataaaaaaagccctaccctgcgccaacaggatagagccgataagcaggatatgcagtacataacccacccaacactggatattgtaccacagccctgccaaaaaatcaagcagggcatttttgcgcccttttttaagtacaatctatgggagtggtacaatgaaatatgcagcggcatatatccgcgtaagtgacgaccggcaggacgagtacagccca

SEQ ID NO: 20219 - DNA, 260 bp, Unknown
  Description of Unknown: LeftRegion for integrase B7220 sequence
aaatccacgagatactgactaaattagggataaaagcaaatatggataaataattttatttttgagtaatcctcagacaatgtctggggatttttaataggaggtaaatatggatactattattagaaatgaaaatataacacctgaagagaaaaatactatcttaagactattattacaagcagctaaagaagaattaaatgtcgaatagttcttcttttcctgctaaaatttcagctatttattgcagggaaagtaca

SEQ ID NO: 20220 - DNA, 260 bp, Unknown
  Description of Unknown: LeftRegion for integrase B7221 sequence
ttgtggcgctgatgttttacatcgccatggatgccagcaacgaagacattggcctcatcagaggcagcagcgtttcgcccttggcgatgttgctttgcgttttcgcgctggcctccaccgccgccctgattatcttgcagggcagattgatagatagcaagaaggagaaaccgataaacgacaaaagggatgaatcgtaaatgtcaatcatagaagagcaagtcaaaagaaatcagtatatcgaggaagtcgccgcctat

SEQ ID NO: 20221 - DNA, 260 bp, Unknown
  Description of Unknown: LeftRegion for integrase B7222 sequence
ccgtacattataagtataacgatcgaggcttccttttgcaagcgaatccggaatttgcccgaaaaaaatcttgcttgaggaggtgttgcgcctatgagtagttctcgtaacgaatctgtagagtacatctacactgcgttcattacgctcaagaatggcaagcagggcattcttgagctacaatctatgggagtggtacaatgaaatatgcagcggcatatatccgcgtaagtgacgaccggcaagacgagtacagcccg

SEQ ID NO: 20222 - DNA, 260 bp, Unknown
  Description of Unknown: LeftRegion for integrase B7223 sequence
caagctggattatttgtcaaatgtgaaaaaccgcccggtattggcgtaccgaacggtccaacatatatccgaagatatactcttattcgcaaaatatattgtatcatcttcgggaacagcccgcaagcggaacattcgttcaccgctggctgttatttttgtaccctaaaatacataaaatcaacaaaggagatgatattatgccaaaagattatcgtgacggcgccctttacatccgtgtcagtactgataaacaggaa

SEQ ID NO: 20223 - DNA, 260 bp, Unknown
  Description of Unknown: LeftRegion for integrase B7224 sequence
aaaataaaagccatattcttaatcatataaaaatataaaaagtcttaaaataaagaattaattatttaaaaaaataatttttaatattataattattaaggaggaaactatgaaaataaaagtcatttttaatgaagacaattatgaagctaattattatagaaaaaaattaatatctaatataaaagaggtagaggataatgagagattcaaagagtaagactgttattatatacaatagagtatctaccataatgcaa

SEQ ID NO: 20224 - DNA, 260 bp, Unknown
  Description of Unknown: LeftRegion for integrase B7225 sequence
acattattttaacagtgaataccactaagttggtacaatactactatgatggtattaaccgatgctatgggaaaagatataaagcatatcgcacaattttaccgcatcactatcatacaaaaagtcaaaatttttcattgctgtggaactttcctgataatggtggtagaatccaagcagcaatgcaaggagggtaattgatgaagatagcagcagcatatctccgtgtatcgacggaggagcaggatgagtattctctc

SEQ ID NO: 20225 - DNA, 260 bp, Unknown
  Description of Unknown: LeftRegion for integrase B7226 sequence
gattttttctaaccctttagatagcaaaaccgcccggtgctggtaacaccgaacggcttcacatagatttctcttaccggatgcccggaaagatatattcaaacctgaacactttgaattatatcattctttcgggcacctcgcaagaggtgtattttttatacccttttttaatatttttatacgaaaggatgatcgatatgagaataggtgccgcgtatatccgcgtcagcacggacgaccagctggatatcagcccg

SEQ ID NO: 20226 - DNA, 260 bp, Unknown
  Description of Unknown: LeftRegion for integrase B7227 sequence
ccgtacattataagtataacgatcgcggcttccttttgcaagcggatctggaatttgcccggaaaaaatcttgcttgaggaggtgttgcgcctatgagtagttctcgtaactcatctgtagagtacatctacactgcgttcattacgctcaagaatggcaagcagggcattcttgagctacaatctatgggagtggtacaatgaaatatgcagcggcatatatccgcgtaagtgacgaccggcaagacgaatacagcccg

SEQ ID NO: 20227 - DNA, 260 bp, Unknown
  Description of Unknown: LeftRegion for integrase B7228 sequence
catgacgtgcgatatcatcaaccgccagtacggcacgaactacaccgtcaaagaattcaaggaactgttccggcggtatttcttttctaagcaaaaatgaaaccgccccggtgctggaacaccgggacggcgaatgtagacctggatgaagtataacagagctaccctttcatggtagcacatggaggagaaaaaggcaagtgaaaacagcattgtactgccgtgtttcgacggaggaacaagcgcgaacaggggagagc

SEQ ID NO: 20228 - DNA, 260 bp, Unknown
  Description of Unknown: LeftRegion for integrase B7229 sequence
atgtgaaatgagaatgacatataacactgttcgttcaaggctgaaacgtattcccgaagaactgctgattaccaataaacagggcaatcgttcattttacctgttgaatctcaaagcagtcgatgaatcgctgaaataagatcgcttacgccgccctgccgcccaccacggcagggcatcatgatagaaaggagcgcccaatgaaaatcgcagcggcgtacatccgcgtatccaccgatgaccagatcgaatactccccc

SEQ ID NO: 20229 - DNA, 260 bp, Unknown
  Description of Unknown: LeftRegion for integrase B7230 sequence
ccatacaagttttgattgtgagactttaagatgggaacgtaaaaaatacaaagaatcattaaaagcactcactattaaagaggcgaagtctaaaggtttaacttattgttatgactgctcaagagacaattactattataagcacgtcggcatagaagattagacactatgaataacataaatttaggagaagagaataaatgagaatagcattataccctcgtgtttcaacacaagaacaagcattgaatggacactct

SEQ ID NO: 20230 - DNA, 260 bp, Unknown
  Description of Unknown: LeftRegion for integrase B7231 sequence
tacatgataatgaacaaattataaatgtaaccttttgcttttaaatatttcagaaaatgctgcatacttgacaaggctttccgctacttctatacttacatatagctagcgaatgactgctgtgcggtcggggaagagccttgggattgtgttccagggctctttttccatttcaaagaaatgtgggaggatttttaaatatggaaatgaaagtcggcgcggcctatatccgcgtatccaccgacggccagctggatctg

SEQ ID NO: 20231 - DNA, 260 bp, Unknown
  Description of Unknown: LeftRegion for integrase B7232 sequence
ttccaggcgttggccgggaagttagagtaaatcacaacaaaataaaaaaagccctaccctgcgccaacaggatagagccgataagcaggatatgcagtacataacccacccaacattggatattgtaccacatccctgccgataaatcaagcagggcatttttgcgcccttttttaagtacaatctatgggagtggtacaatgaaatatgcagcggcatatatccgcgtaagtgacgaccggcaagacgagtacagcccg

SEQ ID NO: 20232 - DNA, 260 bp, Unknown
  Description of Unknown: LeftRegion for integrase B7233 sequence
ttccaggcgttggccgggaagttagagtaaatcacaacaaaataaaaaaagccctaccctgcgccaacaggatagagccgataagcaggatatgcagtacataacccacccaacactggatattgtaccacatccctgccgataaatcaagcagggtatttttgcgcccttttttaagtacaatctatgggagtggtacaatgaaatatgcagcggcatatatccgcgtaagtgacgaccggcaggacgagtacagcccg

SEQ ID NO: 20233 - DNA, 260 bp, Unknown
  Description of Unknown: LeftRegion for integrase B7234 sequence
caggcgttggccgggaagttagagtaagtcacaacaaaataaaaaaagccctaccctgcgccaacaggatagagccgataagcaggcgctgtgcgtacacataacccacccaacactggttattgtaccacagccctgctgaaaaatcaagcagggcatttttgcgcccttttttaagtacaatctatgggagtggtacaatgaaatatgcagcggcatatatccgcgtaagtgacgaccggcaagacgagtacagcccg

SEQ ID NO: 20234 - DNA, 260 bp, Unknown
  Description of Unknown: LeftRegion for integrase B7235 sequence
ggatgaagaagagtttgaagatgactgggaagatgaagaagaatactaaaaataaaaataagttatttgaagagggattttccctcttcttttaatactggaggtaaatatggatactattattagaaatgaaaatataacacctgaagagaaaaatactatcttaagactattattacaagcagctaaagaagaattaaatgtcgaatagttcttcttttcctgctaaaatttcagctatttattgcagggaaagcaca

SEQ ID NO: 20235 - DNA, 260 bp, Unknown
  Description of Unknown: LeftRegion for integrase B7236 sequence
tatacgaggaaatctttcaagtggttatattacatcgaatcaagtaatatcaactgttgacttagaaaaaaatattaccgatttatttattccggaacctctgaaatagaataataaataattcctatataaaaaatcccccaccggttgcaatcggtgggggaaacttaagttttatttttacctggaggtgctcagaaatggaaaacttaaaaatagcggcggcttacattcgagtgagtacccacgatcaggaggaa

SEQ ID NO: 20236 - DNA, 260 bp, Unknown
  Description of Unknown: LeftRegion for integrase B7237 sequence
ccgtacattataagtataacgatcgcggcttccttttgcaagcggatctggaatttgcccggaaaaaatcttgcttgaggaggtgttgcgcctatgagtagttctcgtaactcatctgtagagtacatctacactgcgttcattacgctcaagaatggcaagcatggcattcttgagctacaatctatgggagtggtacaatgaaatatgcagcggcatatatccgcgtaagtgacgaccggcaggacgagtacagcccg

SEQ ID NO: 20237 - DNA, 260 bp, Unknown
  Description of Unknown: LeftRegion for integrase B7238 sequence
atacaccatttttacgaaaaaacacattattatctgttgatagattagaaattgaagccaatacatttgctgcgcttttgttaatagatgagaatagcattactccaggtgatacaaaagcacgtatagcatataaaaataatattcctgtcgagcttctagaattttatacggtcgccaattgaaaggtgggataaacaatgaggtgcgcaatttatgcacgtgtatcaacagaagagcaggctgtagagggatattcc

SEQ ID NO: 20238 - DNA, 260 bp, Unknown; identical to SEQ ID NO: 20235
  Description of Unknown: LeftRegion for integrase B7239 sequence

SEQ ID NO: 20239 - DNA, 260 bp, Unknown
  Description of Unknown: LeftRegion for integrase B7240 sequence
tccaggcgttggccgggaagttagagtaagtcacaacaaaataaaaaaaagccctaccctgcgccaacaggatagagccgataagcaggatatgcagtacataacccacccaacactggatattgtaccacatccctgccgataaatcaagcagggtatttttgcgcccttttttaagtaaaatctatgggagtggtacaatgaaatatgcagcggcatatatccgcgtaagtgacgaccggcaagacgagtacagcccg

SEQ ID NO: 20240 - DNA, 260 bp, Unknown
  Description of Unknown: LeftRegion for integrase B7241 sequence
caagctggattatttgtcaaatgtgaaaaaccgcccggtattggcgtaccgaacggtccaacatatatccgaagatatactcttattcgcagaatatattgtatcatcttcgggaacagcccgcaagcggaacattcgttcaccgctggctgttatttttgtaccctaaaatacataaaatcaacaaaggagatgatattatgccaaaagattatcgtgacggcgccctttacatccgtgtcagtactgataaacaggaa

SEQ ID NO: 20241 - DNA, 260 bp, Unknown
  Description of Unknown: LeftRegion for integrase B7242 sequence
aaaataaaagccatattcttaatcatataaaaatataaaaagtcttaaaataaagaattaatcatttaaaaaaataatttttaatactataattattaaggaggaaactatgaaaataaaagtcatttttaatgaagacaattatgaagctgattattatagaaaaaaattaatatcaaatataaaagaggtagaggataatgagagattcaaagagtaagactgttattatatacaatagagtatctaccataatgcaa

SEQ ID NO: 20242 - DNA, 260 bp, Unknown
  Description of Unknown: LeftRegion for integrase B7243 sequence
aaaataaaagccatattcttaatcatataaaaatataaaaagtcttaaaataaagaattaatcatttgaaaaaataatttttaatattataattattaaggaggagactatgaaaataaaagtcatttttaatgaagataattatgaagctgattattatagaaaaaaattaatatctaatataaaagaggtagaggataatgagagattcaaagagtaagactgttattatatacaatagagtatctaccataatgcaa

SEQ ID NO: 20243 - DNA, 260 bp, Unknown
  Description of Unknown: LeftRegion for integrase B7244 sequence
tcaatagctatcttcgcccggtgatttttcaccgggtctttccttgggaaagcggaagagtaaaaattttcattgacgaaacgccaatggcggcctataatggaattgcagataaagcgatgccctatccttgtgaaaccgaatgagcgtttcagcgaaatggggatcgccggacacaagagccgcctttttaggggtttttgataagctattttagacgaggggaggcgggccgtctggaaaatatggccgttgcctgt

SEQ ID NO: 20244 - DNA, 260 bp, Unknown; identical to SEQ ID NO: 20241
  Description of Unknown: LeftRegion for integrase B7245 sequence

SEQ ID NO: 20245 - DNA, 260 bp, Unknown
  Description of Unknown: LeftRegion for integrase B7246 sequence
gatgacgacgaagaagatttaaacgaataaaagaaaaccgccccagtgcgccaacaccaggacggctcagtaacattccgaagaatgatacctgttcagcaaaacatattgtatcatcttcggaaacgtcagacaagcagaacgtttgttttggcgttttttcttatattcaaaattgaaaacttaaagaaggtgatattatgtcagcacttaaaaatggtgctctctacatccgcgtcagcaccgcggatcagaccgaa

SEQ ID NO: 20246 - DNA, 260 bp, Unknown
  Description of Unknown: LeftRegion for integrase B7247 sequence
caggcgttgtccgggaagctggagtaaatcacaacaaaataaaaaaagccctaccctgcgccaacaggatagagccgataagcaggcgctgtgcgtacacataacccacccaacattggatattgtaccacatccctgccgataaatcaagcagggcatttttgcgcccttttttaagtacaatctatgggagtggtacaatgaaatatgcagcggcatatatccgcgtaagtgacgaccggcaggacgaatacagcccg

SEQ ID NO: 20247 - DNA, 260 bp, Unknown; identical to SEQ ID NO: 20210
  Description of Unknown: LeftRegion for integrase B7248 sequence

SEQ ID NO: 20248 - DNA, 260 bp, Unknown
  Description of Unknown: LeftRegion for integrase B7249 sequence
ctctcttgctaaatctattatatgtcactcaatccggaatgtcaacaagcgaaagctgctttacgaatacttgacaaggcttttaagtatgctaaaatgtaacacatagcgaatgactgctgtgcggtcagaaaagagccttgggattgtgttccagggctctttttccatttcaaagaaatgtgggaggatttttaaatatggaaatgaaaatcggcgcggcctatgtccgcgtatccaccgacggccagctggatctg

SEQ ID NO: 20249 - DNA, 260 bp, Unknown
  Description of Unknown: LeftRegion for integrase B7250 sequence
ttgacgaagaaacccagataagatttctggaagaactgacacgaagggcaggaaaccttggaaggctcaacagaaaatgcaaggaacacactaagaaaattcctactgcatttcatttcaagccagctgatttaacatttcctgatccatttgagcaggcagaatacatttatagtttgatagaaagcgaggaataacgcatggcaggggtaaagaacataacagttattccggcaaaaaaacgtgtaggtaatacagta

SEQ ID NO: 20250 - DNA, 260 bp, Unknown
  Description of Unknown: LeftRegion for integrase B7251 sequence
ttccaggcgttggccgggaagttagagtaagtcacaacaaaataaaaaaagccctaccctgcgccaacaggatagagccgataagcaggatatgcagtacataacccacccaacattggatattgtaccacatccctgccgataaatcaagcagggcatttttgcgcccttttttaagtacaatctatgggagtggtacaatgaaatatgcagcggcatatatccgcgtaagtgacgaccggcaagacgagtacagcccg

SEQ ID NO: 20251 - DNA, 260 bp, Unknown
  Description of Unknown: LeftRegion for integrase B7252 sequence
ctgtggcgctgatgttttacatcgccatggatgccagcaacgaagacattggcctcatcagaggcagcagcgtttcgcccttggcgatgttgctttgcgttttcgcgctggcctccaccgccgccctgattatcttgcagggcagattgatagatagcaagaaggagaaaccgataaacgacaaaagggatgaatcgtaaatgtcaatcatagaagaacaggtcaaaagaaatcaatacattgaggaagtcgccgcctat

SEQ ID NO: 20252 - DNA, 260 bp, Unknown
  Description of Unknown: LeftRegion for integrase B7253 sequence
cgctgaacggtgacggctacgtcaaggaactgggtgaaggcgaactgctctcccgcaatccagagtatgatcccataccgatccacgaaagcgacagcctgcagtgctggggacgtgtcatcggaaagacggagctggtgtgatatagaaacaacgccctaccggaaccggcagggcatcactatagaaaggagtgtcccatgaaaatcgcagcggcgtacattcgtgtgtccaccgacgaccagatcgaatactccccc

SEQ ID NO: 20253 - DNA, 260 bp, Unknown
  Description of Unknown: LeftRegion for integrase B7254 sequence
cgctttgcaggaccagggccgtggaacctgggggaaagacatggaaggttattccacattgattatgtataagtaaagaaaataaaacacccctgcggtgctgggaacaccacaagggcttgtgcaaagatatatcataccagatacaacataccatctgcattgctattatagcacatgcaggcgggaaataacaggaaatgaaaaggcaggtgctatatgaaatgattaaaaaaattgctgttctttatatgagaatg

SEQ ID NO: 20254 - DNA, 260 bp, Unknown
  Description of Unknown: LeftRegion for integrase B7255 sequence
acaatgaaaatccccctgtctaccaaagatatactctctttatatattttacaacacaaacacatgtttcgcaacaatcttttccaacaaaattccccctcatcgactggacctcgatgagggggcagggcagataattcttgtggtgcaagaggtattattctgccctttcataatatcgtaatgaaagggtgatgtcaatgaaaatcgctgcagcctatgtgcgcgtcagcaccgatgaccagctggaatactctccg

SEQ ID NO: 20255 - DNA, 260 bp, Unknown
  Description of Unknown: LeftRegion for integrase B7256 sequence
cgcggcctcatcaatcgccggttcggcacgaactacaccgccgatgagctgaaagagctgtacaggcggcattttctgactgtaaaataacgaaaaaaccgccccggtgctggaacaccgaggcggagattgtagacctgagcaagtgaaatgtaacagagctaccctttcatggtagcacatggaggcgaaaaaggcaagtgaagatagcattgtattgccgcgtttcgacggaagaacaggcgcggacaggggagagc

SEQ ID NO: 20256 - DNA, 260 bp, Unknown
  Description of Unknown: LeftRegion for integrase B7257 sequence
cgggaaaaacctgattataacgtccattgtgtcgtttgtgctgtacgtgattgtcgtgtctgtaatctccaaccataaagcaaaaaaggcagaagaggaactgtcaagcttgtatgatagttatagctacagctataacattgatgattaaaaaagccgccctgcaaggaattgtggggcggtacaattaaggagcgattatgaaaagagcagtgttttatggtcgttattccagcgaccggcagaccgaacaaagcatt

SEQ ID NO: 20257 - DNA, 260 bp, Unknown
  Description of Unknown: LeftRegion for integrase B7258 sequence
agaggattttgacccctttaaatagcaaaaccgcccggtattggcgtaccgaacggcttcacatagatttctcttaccggatgcccggaaagatatattcaaacctgaacactttgaattatatcattcttttgggcacctcgcaagaggtgtattttttatacccttttttaatatttttatacgaaaggatgatcgaaatgagaataggtgcagcttatatccgtgtcagcacggacgaccagctggatatcagcccg

SEQ ID NO: 20258 - DNA, 260 bp, Unknown
  Description of Unknown: LeftRegion for integrase B7259 sequence
tttcaattggtaaagctataggtggtaccgttctaacaggtggtgttggtgcgttagccggatttgtcggcaaaaaaacaaagcaaactgattttgtatgcatgaactgtggaaaacaattcaagaaataaaaaagacccgcctattacagacgggtttaaaaagcactgcaaaagaacatatgtacgaaaggagatattatgaaagtagcattatatgtaagagtttcaacacttgagcaagcagaagaaggttactca

SEQ ID NO: 20259 - DNA, 260 bp, Unknown
  Description of Unknown: LeftRegion for integrase B7260 sequence
cgctcctgcgccaacaagaacggtttcctcataatccatatgaggtcgtatataacgtatatatccgaagagatacatacaatactcacaaaaatattgtatcatcttcggagcagctatgcaagcggaacacccgttctctcgctggctgttatttttgtactcatttttacatacaacaaaacaggaaggtgatatgtatggcaaagttaagaaatggcgccctctatatccgtgtcagcaccgccgatcagacggag

SEQ ID NO: 20260 - DNA, 260 bp, Unknown
  Description of Unknown: LeftRegion for integrase B7261 sequence
cgactgtatttactaaataccaaccgtcatctttaagccttttaattacttctcttgcagaataacttttcaaacaatctcctcctgacaattattattataacaaatatttttatatttgtcaataccttttaacaaatatttttatatttgttttaaaaaatcaactgtttttttaggaataaaaaggagtgtgcaatatgaatatagccgctgcatacattcgtgtatctgacgacagacaagacgaatacagtccc

SEQ ID NO: 20261 - DNA, 260 bp, Unknown
  Description of Unknown: LeftRegion for integrase B7262 sequence
cgggaaaaacctgattataacgtccattgtgtcgtttgtgctgtacgtgattgtcgtgtctgtaatctccaaccataaagcaaaaaaggcagaagaggaactgtcaagcttgtatgatagttatagctacagctataacattgatgattaaaaaagccgccctgcaaggaattgtggggcggtacaattaaggagcgattatgaaaagagcagtgttttatggtcgttattccagcgacagacagaccgaacagagcatt

SEQ ID NO: 20262 - DNA, 260 bp, Unknown
  Description of Unknown: LeftRegion for integrase B7263 sequence
tgacattgccacaggtgtcgtggaacagattcagtaaaataaaaaaccgccccggtgcgccaacaccaggacggctcagtaacattccgaagaatgataccagttcacaaaacatattgtatcatcttcggaagcgccagacaagcagaacgtttgttttggcgttttttctcatacttaaaattgaagaaggtgatattatgtcagcacttaaaaatggtgctctctacatccgcgtcagtaccgcggatcagacagaa

SEQ ID NO: 20263 - DNA, 260 bp, Unknown
  Description of Unknown: LeftRegion for integrase B7264 sequence
aatagtcaaaattaaattatatacaaaaaccgcccggtgctggtaacaccgaacggccttgcatagatttctcttaccggatgcccggaaagatatattcaaacctgaacactttgaattatatcattctttcgggcacctcgcaagaggtgtattttttatacccttttttaatatttttatacgaaaggatgatcgaaatgagaataggtgcagcttatatccgtgtcagcacggacgaccagctggatatcagcccg

SEQ ID NO: 20264 - DNA, 260 bp, Unknown
  Description of Unknown: LeftRegion for integrase B7265 sequence
agctatttaccaaaaagaaaaaccgctccagtgtgccaacaccggagcggctctgtaacattccgaagaatgatactacatgtccaactcatattgtatcatcttcgaccccgccaatcaatcagaacatttgttttggcgtttttcttacactccccaaacggggacgaaaacaacaacagaatagaaggtgatattacatgtcagcattaaaaaatggcgctttgtatatccgtgtcagcactgccgatcagacagag

SEQ ID NO: 20265 - DNA, 260 bp, Unknown
  Description of Unknown: LeftRegion for integrase B7266 sequence
gattttttctaaccctttagatagcaaaaccgcccggtgctggtaacaccgaacggccttgcatagatttctcttaccggatgcccggaaagatatattcaaacttgaacactttgaattatatcattctttcgggcacctcgcaagaggtgtattttttatacccttttttaatatttttatacgaaaggatgatcgaaatgagaataggtgcagcttatatccgtgtcagcacggacgaccagctggatatcagcccg

SEQ ID NO: 20266 - DNA, 260 bp, Unknown
  Description of Unknown: LeftRegion for integrase B7267 sequence
tattatataacagcacgaaattataatttgattgatgaaaaaatatattgttatatggttggctgtacaccagctgaattatatggatatgcataaagcctcaccgaaatccggcagggctaaggaaaggagtctatgatgaacaacgctgcaaaaacaccctgcaaggaattgtggggcggtacaattaaggagcgattatgaaaagagcagtgttttatggtcgttattccagcgaccgacagacagaacagagcatt

SEQ ID NO: 20267 - DNA, 260 bp, Unknown; identical to SEQ ID NO: 18819
  Description of Unknown: LeftRegion for integrase B7268 sequence

SEQ ID NO: 20268 - DNA, 260 bp, Unknown
  Description of Unknown: LeftRegion for integrase B7269 sequence
ccgaggaagccgattacgctatacagaatttaaactaaaataaaaaaccgccccggtgcgccaacaccaggacggctcagtaacattccgaagaatgataccagttcgcaaaacatattgtatcatcttcggaagcgccaatcaatcagaacgtttgttttggtgtttttcttatacccaaaattaaagaaggtgatattatgtcagcacttaaaaacggtgctctctacatccgcgtcagcaccgcggatcagacagaa

SEQ ID NO: 20269 - DNA, 260 bp, Unknown
  Description of Unknown: LeftRegion for integrase B7270 sequence
ccgattacgctatacagaatttagactaaaataaaaaaccgccccggtgcgccaacaccaggacggctcagtaacattccgaagaatgataccagttcgcaaaacatattgtatcatcttcggaaacgtcagacaagcagaacgtttgttttggcgttttttcttatattcaaaattgaaaacttaaagaaggtgatattatgtcagcacttaaaaatggtgctctctacatccgcgtcagcaccgcggatcagaccgaa

SEQ ID NO: 20270 - DNA, 260 bp, Unknown
  Description of Unknown: LeftRegion for integrase B7271 sequence
cgtgaattaactgcctaaataaaaaaccggctcctgacggcaatcaggaaccggcaagtaacattccgaagaatgataccctaactcgcaaaaatattgtatcatcttcggagcagctatgcaagcgaaacacccgttctctcgctggctgttatttttgtactcatttttacatacaacaaaacaggaaggtgatatgtatggcaaagttaagaaatggcgccctctatatccgtgtcagcaccgccgatcagacggag

SEQ ID NO: 20271 - DNA, 260 bp, Unknown; identical to SEQ ID NO: 20270
  Description of Unknown: LeftRegion for integrase B7272 sequence

SEQ ID NO: 20272 - DNA, 260 bp, Unknown
  Description of Unknown: LeftRegion for integrase B7273 sequence
aatagtcaaaattaaattatatacaaaaaccgcccggtgctggtaacaccgaacggccttgcatagatttctcttaccggatacccgaaaagatatattcaaacctgaacactttgaattatatcattctttcgggcacctcgcaagaggtgtattttttatacccttttttaatatttttatacgaaaggatgatcgaaatgagaataggtgcagcttatatccgtgtcagcacggacgaccagctggatatcagcccg

SEQ ID NO: 20273 - DNA, 260 bp, Unknown
  Description of Unknown: LeftRegion for integrase B7274 sequence
gattttttctaaccctttagatagcaaaaccgcccggtgctggtaacaccgaacggcttcacatagatttctcttaccggatgcccggaaagatatattcaaacctgaacactttgaattatatcattctttcgggcacctcgcaagaggtgtattttttatacccttttttaatatttttatacgaaaggatgatcgaaatgagaataggtgcagcttatatccgtgtcagcacggacgaccagctggatatcagcccg

SEQ ID NO: 20274 - DNA, 260 bp, Unknown
  Description of Unknown: LeftRegion for integrase B7275 sequence
aatgtttactaaaaatgtaaatattaaaaaaccggcccctgcgccaacaggaaccggcaagtaacattccgaagaatgataccctaactcgcaaaaatattgtatcatcttcggaacagcttcgcaagcggaacacctgttctcttgctggctgttatttttgtactcatttttacataaaataggaaggtgatatttatatggcaaagttaagaaatggtgccctctatatccgtgtcagcaccgccgatcagacggag

SEQ ID NO: 20275 - DNA, 260 bp, Unknown
  Description of Unknown: LeftRegion for integrase B7276 sequence
cgattacgctatacagaatttagactaaaataaaaaaccgccccagtgcgccaacaccaggacggctcagtaacattccgaagaatgataccagttcgacaaaacatattgtatcatcttcggaaacgtcagacaagcagaacgtttgttttggcgttttttcttatattcaaaattgaaaacttaaagaaggtgatattatgtcagcacttaaaaatggtgctctctacatccgcgtcagcaccgcggatcagaccgaa

SEQ ID NO: 20276 - DNA, 260 bp, Unknown
  Description of Unknown: LeftRegion for integrase B7277 sequence
caagatgaaaattaaaacttataaaactttgatttcaaaatatggaattttttcaggagctagaaaacctagtttctgggaaaaattaaaaagatggttatggaggtaaaaaatgactgatacagataatactaaacaaagaatatcactagctgttactaaaataaaaattcttgccaatgagttattaaataagaaaaatgcaagcacttcaagttaaaatagcagttaaatactcaagagtttctacaaataaacaa

SEQ ID NO: 20277 - DNA, 260 bp, Unknown; identical to SEQ ID NO: 20263
  Description of Unknown: LeftRegion for integrase B7278 sequence

SEQ ID NO: 20278 - DNA, 260 bp, Unknown
  Description of Unknown: LeftRegion for integrase B7279 sequence
aaatacagggtcttttccgtatttgattttcaaaaaagaaaaaccgccttggtgttcacagcaccaagacggctcagtaacattccgaagaatgataccgtttctcaacaaaacatattgtatcatcttcggaaacgccagacaagcagaacgtttgttttggtgtttttcttatacccaaaattaaagaaggtgatattatgtcagcacttaaaaatggtgctctctacatccgcgtcagcaccgcggatcagaccgaa

SEQ ID NO: 20279 - DNA, 260 bp, Unknown
  Description of Unknown: LeftRegion for integrase B7280 sequence
caatgcgaattggtggtaaaggatagaactcaattgtatgtatcatacaaagctgacatatgaatgaaaagaatcccatcgaagcggttaatgtacctgctccggtgggattttttcttgcttttcatgtgaatgtatggtacaataaataaaaatctgccttgcattttttgcagggcggtacaattaaggagcgattcatgaaaagagcagtgttttatggtcgttattccagcgaccgacagacagaacagagcatt

SEQ ID NO: 20280 - DNA, 260 bp, Unknown
  Description of Unknown: LeftRegion for integrase B7281 sequence
attcttggaataggatttcaattacatcaagtagaagaatactgtaaaactttaatcactaaaaaattaattaaagaaaatgaagataagtttataataataggaggttaagatgaacaatacagacaatacaaaccaaagaatatcactagctgttactaaaataaaaagccttgccaatgaattattaaataagaaaaatgcaagcacttccagttaaaatagcagttaaatactcaagagtttctactaacaaacaa

SEQ ID NO: 20281 - DNA, 260 bp, Unknown
  Description of Unknown: LeftRegion for integrase B7282 sequence
ttcaattatcagctgtgtgtttatgttgccacataacagaaggatgatacatgcaaacaatggtacaggcggaattttctgattagacaaaaatgaaaccgccccggtgctggaacaccgaggcggagattgtagacctgagcaagtgaaatgtaacagagctaccctttcatggtagcacatggaggcgaaaaaggcaagtgaagacagcattgtattgccgcgtttcgacggaagaacaagcgaggacaggggagagc

SEQ ID NO: 20282 - DNA, 260 bp, Unknown
  Description of Unknown: LeftRegion for integrase B7283 sequence
aagcaatcacaatgttgtatatgcgctcgttatgcttcccaatgccgccttagctgcaattggaatttcgattttggtgataatagcattgatattattccttcaactccgaaaaagaaatgtttccggaacgacggtagatgcagccgctctcgatgatgatatccgaagcgcatttgaaaaataaagaaggtgacccaatgaaaaccgctgcggcatatatccgcgtttctaccgacgatcaggtagaatactccccc

SEQ ID NO: 20283 - DNA, 260 bp, Unknown
  Description of Unknown: LeftRegion for integrase B7284 sequence
gatactcgctagctttatccaaatgccatatttttgatttctcatcctttgaagtatctgctaaatctaaatatttgagatacaacctataatacatttcattttcgctgtcaagtatttctaaagtctttttatattttttatcaaacatataaaccactcctttcataaaggagaatgtgaattacgcgaaggaggtgatgccaactttatcccttggcaagtacatcatagatataggaagtgactccatgacaaca

SEQ ID NO: 20284 - DNA, 260 bp, Unknown
  Description of Unknown: LeftRegion for integrase B7285 sequence
ttggggcggtggaagaccagatggaagaaacggcgaaagcgaaagaagaagcatcgtcctgacaagaattttgagaaaatagcggggaagagtgcttgtcgcccccttatgggggtgtggattgaaataacagtttatcaacaatcagtgaaaaaaccgccctgcaaggaattgtggggcggtacaattaaggagcgattatgaaaagagcagttttttatggtcgttattccagcgaccgacaaacagaacagagcatt

SEQ ID NO: 20285 - DNA, 260 bp, Unknown; identical to SEQ ID NO: 20278
  Description of Unknown: LeftRegion for integrase B7286 sequence

SEQ ID NO: 20286 - DNA, 260 bp, Unknown
  Description of Unknown: LeftRegion for integrase B7287 sequence
aggaaattgccgcactctgcaatgtgtccatgcaggcggcagaaattcgctccagaaggatgcaaatcttgcttgcaagaaataaatttttgacgcatccgctggaacgacaggtgtttgaacagtttcaacagtttatcaacaatcagtaaaaaaccgccctgcaaggaattgtggggcggtacaattaaggagcgattatgaaaagagcagtgttttatggtcgttattccagcgaccgacagacagaacagagcatt

SEQ ID NO: 20287 - DNA, 260 bp, Unknown
  Description of Unknown: LeftRegion for integrase B7288 sequence
tattcttccgatgacgacgaagaagatttaaacgaataaaagaaaaccgccccagtgcgccaacaccaggacggctcagtaacattccgaagaatgatacctgttcagcaaaacatattgtatcatcttcggaaacgccagacaagcagaacgtttgttttggtgtttttcttatacccaaaattaaagaaggtgatattatgtcagcacttaaaaacggtgctctctacatccgcgtcagcaccgcggatcagacagaa

SEQ ID NO: 20288 - DNA, 260 bp, Unknown
  Description of Unknown: LeftRegion for integrase B7289 sequence
gaggattttgacccttttaaatagcaaaaccgcccggtgctggtaacaccgaacggccttgcatagatttctcttaccggatgcccggaaagatatattcaaacctgaacactttgaattatatcattctttcgggcacctcgcaagaggtgtattttttatacccttttttaatatttttatacgaaaggatgatcgaaatgagaataggtgcagcttatattcgtgtcagcacggacgaccagctggatatcagcccg

SEQ ID NO: 20289 - DNA, 260 bp, Unknown
  Description of Unknown: LeftRegion for integrase B7290 sequence
aagcaatcacaatgttgtatatgcgctcgttatgcttcccaatgccgccttagctgcaattggaatttcgattttggtgataatagcattgatattattccttcaactccgaaaaagaaatgtttccggaacgacggtagatgcagccgctctcgatgatgatatccgaagcgcatttgaaaaattaagaaggtgacccaatgaaaaccgctgcggcatatatccgcgtttctaccgacgatcaggtagaatactccccc

SEQ ID NO: 20290 - DNA, 260 bp, Unknown
  Description of Unknown: LeftRegion for integrase B7291 sequence
aggaagccgattacgctatacagaatttaaactaaaataaaaaaccgccccggtgcgccaacaccaagacggctcagtaacattccgaagaatgataccgtttctcaacaaaacatattgtatcatcttcggaaacgccagacaagcagaacgtttgttttggtgtttttcttatacccaaaattaaagaaggtgatattatgtcagcacttaaaaatggtgctctctacatccgcgtcagcaccgcggatcagaccgaa

SEQ ID NO: 20291 - DNA, 260 bp, Unknown
  Description of Unknown: LeftRegion for integrase B7292 sequence
cgggaaaaacctgattataacgtccattgtgtcgtttgtgctgtacgtgattgtcgtgtctgtaatctccaaccataaagcaaaaaaggcagaagaggaactgtcaagcttgtatgatagttatagctacagctataacattgatgattaaaaaagccgccctgcaaggaattgtggggcggtacaattaaggagcgattatgaaaagagcagtgttttatggtcgttattccagcgaccggcagaccgaacagagcatt

SEQ ID NO: 20292 - DNA, 260 bp, Unknown
  Description of Unknown: LeftRegion for integrase B7293 sequence
gattttttctaaccctttagatagcaaaaccgcccggtgctggtaacaccgaacggcttcacatagatttctcttaccggatgcccggaaagatatattcaaacctgaacattttgaattatatcattctttcgggcacctcgcaagaggtgtattttttatacccttttttaatatttttatacgaaaggatgatcgaaatgagaataggtgcagcttatatccgtgtcagcacggacgaccagctggatatcagcccg

SEQ ID NO: 20293 - DNA, 260 bp, Unknown
  Description of Unknown: LeftRegion for integrase B7294 sequence
ggagttgttttgagtgtctccctctttacgagggagtggattgaaatgtgccagacggatgcaaatcttgcttgcaagaaataaatttttaacgcatccgctggaacgacaggtatttgaacagtttcaacagtttatcaacaatcagtaaaaaaaccgccctgcaaggaattgtggggcggtacaattaaggagcgattatgaaaagagcagtgttttatggtcgttattccagcgaccgacaaacagaacagagcatt

SEQ ID NO: 20294 - DNA, 260 bp, Unknown
  Description of Unknown: LeftRegion for integrase B7295 sequence
gtagataaataaggataaaaataaaaaccggctcctgacggcaatcaggaaccggtaagtaacattccgaagaatgataccctaattcgcaaaaatattgtatcatcttcgaagcagctatgcaagcggaacacccgttctcttgccggctgttatttttgtactcatttttacatacaacaaaacaggaaggtgatattatggcaaagttaagaaatggcgccctctatatccgtgtcagcaccgccgatcagacggag

SEQ ID NO: 20295 - DNA, 260 bp, Unknown
  Description of Unknown: LeftRegion for integrase B7296 sequence
cgattacgctatacagaatttaaactaaaataaaaaaccgccccggtgcgccaacaccaggacggctcagtaacattccgaagaatgatacctgttcagcaaaacatattgtatcatcttcggagacgccaatcaatcagaacgtttgttttggcgttttttctcatacccaaaattgaaaatttaaagaaggtgatattatgtcagcactaaaaaacggtgctctctacatccgcgtcagcaccgcggatcagacagaa

SEQ ID NO: 20296 - DNA, 260 bp, Unknown
  Description of Unknown: LeftRegion for integrase B7297 sequence
aatagtcaaaattaaattatatacaaaaaccgcccggtgctggtaacaccgaacggccttgcatagatttctcttaccggatgcccggaaagatatattcaaacctgaacactttgaattatatcattcttttgggcacctcgcaagaggtgtattttttatacccttttttaatatttttatacgaaaggatgatcgaaatgagaataggtgcagcttatatccgtgtcagcacggacgaccagctggatatcagcccg

SEQ ID NO: 20297 - DNA, 260 bp, Unknown
  Description of Unknown: LeftRegion for integrase B7298 sequence
aatagtcaaaattaaattatatacaaaaaccgcccggtgctggtaacaccgaacggccttgcatagatttctcttaccggatgcccggaaagatatattcaaacctgaacactttgaattatatcattctttcgggcacctcgcaagaggtgtattttttatacccttttttaatatttttatacgaaaggatgatcaaaatgagaataggtgcagcttatatccgtgtcagcacggacgaccagctggatatcagcccg

SEQ ID NO: 20298 - DNA, 260 bp, Unknown
  Description of Unknown: LeftRegion for integrase B7299 sequence
gtcttttacgttacataaatataaaaaaccggctcctgacgggaatcaggaaccggcaagtaacacatccgaagatgcatcacaaattcagcaaaaatattgtatcatcttcggagcagctatgcaagcggaacacccgttctctcgctggctgttatttttgtactcatttttacataaaataggaaggtgatatttatatggcaaagttaagaaatggcgccctctatatccgtgtcagcactgctgatcagacggag

SEQ ID NO: 20299 - DNA, 260 bp, Unknown
  Description of Unknown: LeftRegion for integrase B7300 sequence
aaccgctcctgcgccaacaagaacggtttcctcataatccatatgaggtcgtatataacgtatatatccgaagagatacatacaatactcacaaaaatattgtatcatcttcggagcagctatgcaagcggaacacccgttctctcgctggctgttatttttgtactcatttttacataaaataggaaggtgatatttatatggcaaagttaagaaatggcgccctctatatccgtgtcagcaccgccgatcagacggag

SEQ ID NO: 20300 - DNA, 260 bp, Unknown
  Description of Unknown: LeftRegion for integrase B7301 sequence
agggattttttctttatacaaataaaaaccggctcctgactgcaatcaggaaccggcaagtaacacatccgaagatgtatcacaaaatctgcaaaaatattgtatcatcttcggaggcagtctgcaagcggaacacccgttctcttgctggctgttatttttgtactcatttttacataaaataggaaggtgatatttatatggcaaagttaagaaatggtgccctctatatccgtgtcagcaccgccgatcagacggag

SEQ ID NO: 20301 - DNA, 260 bp, Unknown; identical to SEQ ID NO: 18341
  Description of Unknown: LeftRegion for integrase B7302 sequence

SEQ ID NO: 20302 - DNA, 260 bp, Unknown
  Description of Unknown: LeftRegion for integrase B7303 sequence
aatttttacagctaaaatctaaataaataataaaaaccgtcccagtattccccaacaccaggacggctcagtaacattccgaagaatgatacctgttcagcaaaacatattgtatcatcttcggaggcgccaaacaatcagaacgtttgttttggcgtttttttcatacccaaaattgaaaatttaaagaaggtgatattatgtcagcactaaaaaatggtgctctctacatccgcgtcagcaccgcggatcagaccgaa

SEQ ID NO: 20303 - DNA, 260 bp, Unknown
  Description of Unknown: LeftRegion for integrase B7304 sequence
ggacaatgaaaatccccctgtctaccaaagatatactctctttatatattttacaacacaaacacatgtttcgcaacaatcttttccaacaaaattccccctcatcgactggacctcgatgagggggcagggcagataattcttgtggtgcaaggtattattctgccctttcataatatcgtaatgaaagggtgatgtcaatgaaaatcgctgcagcctatgtgcgcgtcagcaccgatgaccagctggaatactctccg

SEQ ID NO: 20304 - DNA, 260 bp, Unknown
  Description of Unknown: LeftRegion for integrase B7305 sequence
tcgcggaatcactgaaaaacttcgaataaaagaaaaaccgccccggtgttggcgcaccaggacggctcagtaacattccgaagaatgataccagttcaacaaaacatattgtatcatcttcggaaacgtcagacaagcagaacgtttgttttggcgttttttctcatacccaaaatcgaaaatttaaagaaggtgatattatgtcagcactaaaaaacggtgctctctacatccgcgtcagcaccgcggatcagacagaa

SEQ ID NO: 20305 - DNA, 260 bp, Unknown
  Description of Unknown: LeftRegion for integrase B7306 sequence
aaccgctcctgcgccaacaagaacggtttcctcataatccatatgaggtcgtatataacgtatatatccgaagagatacatacaatactcgcaaaaatattgtatcatcttcggagcagctatgcaagcggaacacccgttctgcttctggctgttatttttgtactcatttttacataaaataggaaggtgatatttatatgacaaagttaagaaatggtgccctctatatccgtgtcagcaccgctgatcagacggag

SEQ ID NO: 20306 - DNA, 260 bp, Unknown
  Description of Unknown: LeftRegion for integrase B7307 sequence
agaaattgccgcactctgcaatgtttccatgcaggcggcagaaatccgttccagacgaatgcaaatcttgcttgcaagaaataaatttctgacgcatccgctggaacggcaggtatttgaacagtttcaacagtttatcaacaatcagtgaaaaaaccgccctgcaaggaattgtggggcggtacaattaaggagcgattatgaaaagagcagtgttttatggtcgttattccagcgaccggcagaccgaacagagcatt

SEQ ID NO: 20307 - DNA, 260 bp, Unknown; identical to SEQ ID NO: 20295
  Description of Unknown: LeftRegion for integrase B7308 sequence

SEQ ID NO: 20308 - DNA, 260 bp, Unknown
  Description of Unknown: LeftRegion for integrase B7309 sequence
gaagaagccgattacgctatacagaatttagactaaaataaaaaaccgccccagtgcgccaacaccaggacggctcagtaacattccgaagaatgataccagttcgacaaaacatattgtatcatcttcggaaacgtcagacaagcagaacgtttgttttggcgttttttcttatacccaaaattaaagaaggtgatattatgtcagcacttaaaaatggtgctctctacatccgcgtcagcaccgcggatcagacagaa

SEQ ID NO: 20309 - DNA, 260 bp, Unknown
  Description of Unknown: LeftRegion for integrase B7310 sequence
cacaggtgttgtagaacagattcagtaaactaaaaaaccgccccggtgcgccaacaccaggacggctcagtaacattccgaagaatgataccagttcgacaaaacatattgtatcatcttcggatacgtcagacaagcagaacgtttgttttggcgttttttcttatattcaaaattgaaaacttaaagaaggtgatattatgtcagcacttaaaaatggtgctctctacatccgcgtcagcaccgcggatcagaccgaa

SEQ ID NO: 20310 - DNA, 260 bp, Unknown; identical to SEQ ID NO: 20266
  Description of Unknown: LeftRegion for integrase B7311 sequence

SEQ ID NO: 20311 - DNA, 260 bp, Unknown
  Description of Unknown: LeftRegion for integrase B7312 sequence
caaagtgtttggggcaactagcgttctccgccagacgtttagaacactagagcgcagaggctacagagtgaaagtcaaatgcgagatggtcgggtggtttgctcctggcatacccgagatattgatgatgatccccgaccctgacgagatttttagatggatggatgattgcgagcgtatgggcaaggaggtgccgtttgatgaatggaaaacttgcaactaaaactgcagtgatttacgcacgcttctcgtgctctaag

SEQ ID NO: 20312 - DNA, 260 bp, Unknown
  Description of Unknown: LeftRegion for integrase B7313 sequence
aaccgctcctgcgccaacaagaacggtttcctcataatccatatgaggtcgtatataacgtatatatccgaagagatacatacaatactcacaaaaatattgtatcatcttcggagcagctatgcaagcggaacacccgttctctcgctggctgttatttttgtactcatttttacataaaataggaaggtgatatttatatgacaaagttaagaaatggtgccctctatatccgtgtcagcaccgccgaccagacggag

SEQ ID NO: 20313 - DNA, 260 bp, Unknown; identical to SEQ ID NO: 20256
  Description of Unknown: LeftRegion for integrase B7314 sequence

SEQ ID NO: 20314 - DNA, 260 bp, Unknown
  Description of Unknown: LeftRegion for integrase B7315 sequence
aaatacagggtcttttccgtatttgattttcaaaaaagaaaaaccgccttggtgttcgcagcaccaagacggctcagtaacattccgaagaatgataccgtttctcaacaaaacatattgtatcatcttcggagacaccaatcaatcagaacgtttgttttggtgtttttcttatacccaaaattaaagaaggtgatattatgtcagcacttaaaaatggtgctctctacatccgcgtcagcaccgcggatcagacagaa

SEQ ID NO: 20315 - DNA, 260 bp, Unknown; identical to SEQ ID NO: 20309
  Description of Unknown: LeftRegion for integrase B7316 sequence

SEQ ID NO: 20316 - DNA, 260 bp, Unknown
  Description of Unknown: LeftRegion for integrase B7317 sequence
cgcagcaaggagaaaaaacaaaaggtatatagtatggatcttaatgctttcgatagccttatcgaaaaggtggaagcagaaaaagaataaaaaaatccccctcatcgactggacctcgatgaaggggcagggcagataattcttgcggtgcaaggtattattctgccctttcataatatcgcagtgaaagggtggtgtcaatgaaaatcgctgcagcctatgtacgcgtcagcaccgatgaccagctggaatactctcca

SEQ ID NO: 20317 - DNA, 260 bp, Unknown
  Description of Unknown: LeftRegion for integrase B7318 sequence
atttttacagctaaaatctaaataaataataaaaaccgccccggtattccccaacaccaggacggctcagtaacattccgaagaatgataccagttcgacaaaacatattgtatcatcttcggaaacgtcagacaagcagaacgtttgttttggcgttttttcttatattcaaaattgaaaacttaaagaaggtgatattatgtcagcactaaaaaacggtgctctctacatccgcgtcagcaccgcggatcagaccgaa

SEQ ID NO: 20318 - DNA, 260 bp, Unknown
  Description of Unknown: LeftRegion for integrase B7319 sequence
aatagctaaatactattttatcggcgacgaaatggttaaaatggcattcggctttcccgactctccatcaacattcgaaacctacgatgtggaagtaacttataataatgtcgatgatgcctgctttgtagtgccgtcaaccgccgttattaatatttcatggctttcattcctgtttataaaatatagaaggtgacccaatgaaaacagcagcggcatatatccgcgtttctaccgacgaccaggtcgaatactccccc

SEQ ID NO: 20319 - DNA, 260 bp, Unknown
  Description of Unknown: LeftRegion for integrase B7320 sequence
ttctgttgtaaatttataattaatcaacatccccatcccctttacaataatttcaatactatttttatcatattcctatcaattacataagtaaacaattcgcaacaaaaatcgtcatttttttaaagtgacgatttttgttgcgaactcttgttctttttttaaattatgaaatatagtaaggagaggaggcgatttttatgattaaaaaacgtgtagggctttacattagagtttcaactgaagaacaagccatggaa

SEQ ID NO: 20320 - DNA, 260 bp, Unknown; identical to SEQ ID NO: 20311
  Description of Unknown: LeftRegion for integrase B7321 sequence

SEQ ID NO: 20321 - DNA, 260 bp, Unknown
  Description of Unknown: LeftRegion for integrase B7322 sequence
agggattttttctttatacaaataaaaaccggctcctgactgcaatcaggaaccggcaagtaacacatccgaagatgcatcacaaattcagcaaaaatattgtatcatcttcggagcagctatgcaagcggaacacccgttctcttgcaagctgttatttttgtactcatttttacataaaataggaaggtgatatttatatggcaaagttaagaaatggcgccctctatatccgtgtcagcactgctgatcagacggag

SEQ ID NO: 20322 - DNA, 260 bp, Unknown
  Description of Unknown: LeftRegion for integrase B7323 sequence
aaccgctcctgcgccaacaagaacggtttcctcataatccatatgaggtcgtatataacgtatatatccgaagagatacatacaatactcacaaaaatattgtatcatcttcggagcagctatgcaagcggaacacccgttctctcgctggctgttatttttgtactcatttttacataaaataggaaggtgatatttatatggcaaagttaagaaatggcgccctctatatccgtgtcagcactgctgatcagacggag

SEQ ID NO: 20323 - DNA, 260 bp, Unknown
  Description of Unknown: LeftRegion for integrase B7324 sequence
atttttacagctaaaatctaaataaataataaaaaccgtcccggtattccccaacaccaggacggctcagtaacattccgaagaatgatacctgttcagcaaaacatattgtatcatcttcggaggcgccaaacaatcagaacgtttgttttggcgttttttttcatacccaaaattgaaaatttaaagaaggtgatattatgtcagcactaaaaaatggtgctctctacatccgcgtcagcaccgcggatcagaccgaa

SEQ ID NO: 20324 - DNA, 260 bp, Unknown; identical to SEQ ID NO: 18952
  Description of Unknown: LeftRegion for integrase B7325 sequence

SEQ ID NO: 20325 - DNA, 260 bp, Unknown
  Description of Unknown: LeftRegion for integrase B7326 sequence
accgtgaagaattggagggggataaagaagttcctgcgaacggagaagatagtccccatagaattgctcatgcgtaaaaaggcgttggaggtgatactacgaaagcggtaatctatgccagatattcgagccatagccagcgggaagaatccatagagggacagcttcgggagtgtcacgactttgcgctgaaaaacggaatgaccatcatcggtgagtactgcgataaggcaatctcaggaaaaaccgacaatcgaccg

SEQ ID NO: 20326 - DNA, 260 bp, Unknown; identical to SEQ ID NO: 20268
  Description of Unknown: LeftRegion for integrase B7327 sequence

SEQ ID NO: 20327 - DNA, 260 bp, Unknown; identical to SEQ ID NO: 20309
  Description of Unknown: LeftRegion for integrase B7328 sequence

SEQ ID NO: 20328 - DNA, 260 bp, Unknown
  Description of Unknown: LeftRegion for integrase B7329 sequence
atttttacagctaaaatctaaataaataataaaaaccgccccggtattccccaacaccaggacggctcagtaacattccgaagaatgatacctgttcagcaaaacatattgtatcatcttcggaggcgccaaacaatcagaacgtttgttttggcgttttttttcatacccaaaattgaaaatttaaagaaggtgatattatgtcagcactaaaaaatggtgctctctacatccgcgtcagcaccgcggatcagaccgaa

SEQ ID NO: 20329 - DNA, 260 bp, Unknown
  Description of Unknown: LeftRegion for integrase B7330 sequence
agccgattacgctatacagaatttagactaaaataaaaaccgccccggtgcgccaacaccaggacggctcagtaacattccgaagaatgataccagttcgcaaaacatattgtatcatcttcggaaacgccagacaagcagaacgtttgttttggtgtttttctcatacccaaaattgaaaatttgaagaaggtgatattatgtcagcacttaaaaacggtgctctctacatccgcgtcagcaccgcggatcagacagaa

SEQ ID NO: 20330 - DNA, 260 bp, Unknown
  Description of Unknown: LeftRegion for integrase B7331 sequence
atcgcggaattactgaaaaacttcgaataaaagaaaaaccgccccggtgttggcgcaccaggacggctcagtaacattccgaagaatgataccagttcgacaaaacatattgtatcatcttcggaaacgtcagacaagcagaacgtttgttttggcgtttttctcatacccaaaattgaaaatttgaagaaggtgatattatgtcagcacttaaaaacggtgctctctacatccgcgtcagcaccgcggatcagaccgaa

SEQ ID NO: 20331 - DNA, 260 bp, Unknown
  Description of Unknown: LeftRegion for integrase B7332 sequence
cgattacgctatacagaatttagactaaaataaaaaaccgccccggtgcgccaacaccaggacggctcagtaacattccgaagaatgataccagttcgacaaaacatattgtatcatcttcggaaacgtcagacaagcagaacgtttgttttggcgttttttcttatattcaaaattgaaaacttaaagaaggtgatattatgtcagcacttaaaaatggtgctctctacatccgcgtcagcaccgcggatcagaccgaa

SEQ ID NO: 20332 - DNA, 260 bp, Unknown; identical to SEQ ID NO: 20272
  Description of Unknown: LeftRegion for integrase B7333 sequence

SEQ ID NO: 20333 - DNA, 260 bp, Unknown
  Description of Unknown: LeftRegion for integrase B7334 sequence
cgtagataaataaggataaaaataaaaaccggctcctgacggcaatcaggaaccggcaagtaacacatccgaagatgcatcacaaattcagcaaaaatattgtatcatctttggagcagctatgcaagcggaacgcctgttctctcgctggctgttatttttgtactcatttttacataaaataggaaggtgatatttatatggcaaagttaagaaatggtgccctctatatccgtgtcagcactgccgatcagacggag

SEQ ID NO: 20334 - DNA, 260 bp, Unknown
  Description of Unknown: LeftRegion for integrase B7335 sequence
tattcttccgatgacgacgaagaagatttaaacgaataaaagaaaaccgccccagtgcgccaacaccaggacggctcagtaacattccgaagaatgatacctgttcagcaaaacatattgtatcatcttcggaaacgccagacaagcagaacgtttgttttggtgtttttcttatacccaaaattaaagaaggtgatattatgtcagcacttaaaaatggtgctctctacatccgcgtcagcaccgcggatcagacagaa

SEQ ID NO: 20335 - DNA, 260 bp, Unknown
  Description of Unknown: LeftRegion for integrase B7336 sequence
aatagtcaaaattaaattatatacaaaaaccgcccggtgctggtaacaccgaacggccttgcatagatttctcttaccggatgcccggaaagatatattcaaaatcgaacactttgaattatatcattcttttgggcacctcgcaagaggtgtattttttatacccttttttaatatttttatacgaaaggatgatcgaaatgagaataggtgcagcttatatccgtgtcagcacggacgaccagctggatatcagcccg

SEQ ID NO: 20336 - DNA, 260 bp, Unknown
  Description of Unknown: LeftRegion for integrase B7337 sequence
acctggctaaatagtcctttacttcctctctagtttcaatcctacaattatccatcgcattgcctttcaagtatcatatgatacttatatcgtatcattttgcgctataaagtcaatagataatttgttaaaacaaaaattttctgcactttataaagtgagtgcctccagttctaaaaaagcgaaagggttgatcctaaatgaaaatagctgcagcctatgtgcgcgtcagcacagatgatcagcttgaatattccccg

SEQ ID NO: 20337 - DNA, 260 bp, Unknown; identical to SEQ ID NO: 20278
  Description of Unknown: LeftRegion for integrase B7338 sequence

SEQ ID NO: 20338 - DNA, 260 bp, Unknown
  Description of Unknown: LeftRegion for integrase B7339 sequence
gtttaagtgtctcttttgccgtatttctcttagcctgttccttagtgtcaaatcctgtacctcttgtttctattatgtaataattccagctttttggatagcctttactgctatctcggtaaaaaattattgcccatattacattatgacggtagacaagcgcccaaatgcatggtatctttgcccaagaggtggtttttatgaaaatagcagcggcgtatctgcgtgtctccactgaggagcaggacgagtattcgctt

SEQ ID NO: 20339 - DNA, 260 bp, Unknown
  Description of Unknown: LeftRegion for integrase B7340 sequence
atcaaagaaaccgaaaaaaaagcaaaaacagaagtaaagaagctaaaataaaaaacgccgcccggtgctggaacaccgaacggcaaaagatacaatccacacacatacacattaaaaaggagcagattgcgtaaatatattatcacatctgcttcgtttttgcaagtttaatttactcaaaaataaagcaggtgttttttatgacaacagcagctgcatatatcagagtttcctccgagcgtcaggacgaatattctccc

SEQ ID NO: 20340 - DNA, 260 bp, Unknown
  Description of Unknown: LeftRegion for integrase B7341 sequence
aggccaacgtagccttaattcttcaacaacacttaccgaaagagtaaaaacaactgtttctaaaatagatatagttgcaaacaaaaaagcctcacgctctcaaactttggcgagtctgagcgtgaggcagcagtatagtaataggcattaaatggcccgttttactatacccattttatcaaaaagggggtataaaagcaatgaaaacaacgaataaagtagctatatatgtcagggtttcaacctcttatcaagctgaa

SEQ ID NO: 20341 - DNA, 260 bp, Unknown
  Description of Unknown: LeftRegion for integrase B7342 sequence
taacaaaacataaaaccgcataataagaaaaaccgccccggtgttaccagcaccagagcggtcagcacatccgaagatgcacacaatttttcagcaaaaatattgtatcatcttcggggcagccatgcaagcggaacctttgttcgcgctggctgttatttttatacttatttttacataattataatcgaggtgataccatgaccgaacaaaaatctgatgatctgcgcatgggagcactgtatatccgagtcagcacc

SEQ ID NO: 20342 - DNA, 260 bp, Unknown
  Description of Unknown: LeftRegion for integrase B7343 sequence
ggagcaagaacgccctgcgccgatgttctacttgagctttgcgagctttacaatatccgctctgtcgggcaacttttcggaagcaccgagacggacgagaacgagatttcagaatctgaaaaatacctgctcaaactttacagagaagcagacagtgcggcgaaaacagccgttataaaactattaaggagttggaatatgtgaacgccgtaatatacgcacgatattcttccagcaaccaaagggaagaaagtatcgaa

SEQ ID NO: 20343 - DNA, 260 bp, Unknown
  Description of Unknown: LeftRegion for integrase B7344 sequence
ttgataagaaatattgaattaatataactaaaaaccgcccggtactccaataccgaacggtcttacatacacccgaagatgtacatccatattgcaagttatattgtatcatcttcggaaacacccgtcaacggaacatattttcgttgggtgttatttttatacatttttttaatataatttacgaaggagtgatataattggaagaattaaaatatgcttacggatacattcgtgtgtcaacagggaagcaagacgaa

SEQ ID NO: 20344 - DNA, 260 bp, Unknown
  Description of Unknown: LeftRegion for integrase B7345 sequence
ataactacccgaaagagtaattcgtgatttattttcacatcaatagatgtaaaaaatgccgccggtgctggaacaccgaacggcaaaagatacaatccacacacatacacattaaaaaggagcagattgcgtaaatatattatcacatctgcttcgtttttgcaagtttaatttactcaaaaataaagcaggtgttttttatgacaacagcagctgcatatatcagagtttcctccgagcgtcaggacgaatattctccc

SEQ ID NO: 20345 - DNA, 260 bp, Unknown
  Description of Unknown: LeftRegion for integrase B7346 sequence
gatgtgggcaaaaaggtcagagagactatccaagaacttggtggtacaatgcctgagaaccttcctacgcctaaaaaaggtatcaagcaattggaacgacttgagcaaaaaaaattaaaagacaagtagccatccctgaaaggcttcaaggtattttacacccgaacttccataatctatacagaaaggacaccgatgcaatgaaagtgggagctgcatacataagagtttcatccgacgaccaaactgaatacagtccc

SEQ ID NO: 20346 - DNA, 260 bp, Unknown
  Description of Unknown: LeftRegion for integrase B7347 sequence
aattgaatatcaaggaaaaacagtcgatcaaattgctgcatatctaaatgtgattccagaacttgtaaagcttaaatttctttagcttttttattttttacttctgaacagaacatgtgttctatataataaaatgaggtgatattatcaaaaaaaatatttttaaaattgttgctgcatacataagaataagcactcatatgcaagaagaattgtcccccgatgcccaattacgtcttattagagaatattgtgatcgc

SEQ ID NO: 20347 - DNA, 260 bp, Unknown
  Description of Unknown: LeftRegion for integrase B7348 sequence
caaacaaaacttgaacaaaatacataaaagaaaaaccggctcctgcgccaacaggaaccggcgagcacatccgaagatgtacgcaatttttcagcaaaaatattgtatcatcttcggggcagccatgcaagcggaacctttgttcgcgcaggctgttatttttatacttatttttacataattataatcgaggtgataccatgaccgaacaaaaatctgatgatctgcgcatgggagcactgtatatccgtgtcagtacc

SEQ ID NO: 20348 - DNA, 260 bp, Unknown
  Description of Unknown: LeftRegion for integrase B7349 sequence
ttaataagaaatattgaattaatataactaaaaaccgcccggtactccaataccgaacggtcttacatacacccgaagatgtacatccatattgcaagttatattgtatcatcttcggaaacacccgtcaacggaacatattttcgttgggtgttatttttatacatttttttaatataatttacgaaggagtgatataattggaagaattaaaatatgcttacggatacattcgtgtgtcaacagggaagcaagacgaa

SEQ ID NO: 20349 - DNA, 260 bp, Unknown
  Description of Unknown: LeftRegion for integrase B7350 sequence
aaaacgtcgcccgcatcgaagtgaaccacggccaaaagctggacgccctttttgacggatacaaaatgctgtctgaaaaaattgaccagctctctctcgccgaagcacaggaagatgatatggcagttatgaaagccgctattaaacacctttctagcaaaatagcagagctggaaaaggcgatataaaggtgataatacatgaaacttgcagccgcctatatccgcgtcagtacggacgaccaaattgaatacagtcca

SEQ ID NO: 20350 - DNA, 260 bp, Unknown
  Description of Unknown: LeftRegion for integrase B7351 sequence
ctttgcagtcggcaatctaattttataaaagaaaaaccggctcctgcgccaacaggaaccggccagcacatccgaagatgcaccttattttcagcaaaaatattgtatcatcttcggggcagccatgcaagcggaacctttgttcgcgccggctgttatttttatacttatttttacataattataatcgaggtgataccatgaccgaacaaaaatctgatgatctgtgcatgggagcactgtatatccgtgtcagcacc

SEQ ID NO: 20351 - DNA, 260 bp, Unknown
  Description of Unknown: LeftRegion for integrase B7352 sequence
caaagaaaccgaaaaaaaagcaaaaacagaagtaaagaagctaaaataaaaaacgccgcccggtgctaccaacaccgaacggcaaaagatacaatccacacacatacacattaaaaaggagcagattgcgtaaatatattatcatatctgtttcgtttttgcaagtttaatttactcaaaaataaagcaggtgtttttttatgacaacagcagctgcatatatcagagtttcctccgagcgtcaggacgaatattctccc

SEQ ID NO: 20352 - DNA, 260 bp, Unknown
  Description of Unknown: LeftRegion for integrase B7353 sequence
acctacccgaaagactgatttgtgatttattttcgcatcaatagaagtaaaaaaacgccgcccggcgctggaacaccgaacggcaaaagatacaatccacacacatacacattaaaaaggagcagattgcgtaaatatattatcatatctgcttcgtttttgcaagtttaatttactcaaaaataaggcaggtgttttttatgacaacagcagctgcatatatcagagtttcctccgagcgtcaggacgaatattccccc

SEQ ID NO: 20353 - DNA, 260 bp, Unknown
  Description of Unknown: LeftRegion for integrase B7354 sequence
tatgcatactcacattagtctttgcggcatttatgaattttctgccctatattttagtaatagctggatctattgctatttactgtgttgggtatcgaataatcaattttgctaaacataaaagataaaaaactaaaccggtcgatttcgaccggtttaaaaagaacgcaaaaagaacatacgtacgaaaggagaataacatgaaagtcgctctttacgtgagagtttcaaccctagaacaggctgaagaaggatactca

SEQ ID NO: 20354 - DNA, 260 bp, Unknown
  Description of Unknown: LeftRegion for integrase B7355 sequence
gaggattttgacccttttaaatagcaaaaccgcccggtgctaccaacaccgaacggcttcacatagatttctctcgccggatgcccggaaagatacattcaaaatcgaacactttgaattatatcattctttcgggcacctcgcaagaggtgtattttttatacccttttttaatatttttatacgaaaggatgatcgaaatgagaataggtgcagcttatatccgtgtcagcacggatgaccagctggatatcagcccg

SEQ ID NO: 20355 - DNA, 260 bp, Unknown
  Description of Unknown: LeftRegion for integrase B7356 sequence
gtatattatagcaaatatgctttaaatgtcaagaaccgcccctgcgccaacaggaacggcttaacatacaccagaagatgtacatacattctgaacaaatatattgtatcatcttcggaaacacccgtcaacggaacatattttcgttgggtgttatttttatacatttttttaatataatctacgaaggagtgatataattggaagaattaaaatatgcttatggatacattcgtgtgtcaacagggaagcaagacgaa

SEQ ID NO: 20356 - DNA, 260 bp, Unknown
  Description of Unknown: LeftRegion for integrase B7357 sequence
caaaacgacagtgctcccttgaaaggggcactgttgctttttctctatttcaaaaacaccgcccggagcggcaactccggacggttgaaatacaatccacacacatacacattaaaaaggagcagattgcgtaaatatattatcatatctgcttcgtttttgcaagtttaatttactcaaaaataaagcaggtgttttttatgacaatagcagctgcatatatcagagtttcctccgagcgtcaggacgaatattctccc

SEQ ID NO: 20357 - DNA, 260 bp, Unknown
  Description of Unknown: LeftRegion for integrase B7358 sequence
acacctacccgaaagactgatttgtgatttattttcacaataataaaaataaaaatgccgcccggtgctggcacaccgaacggcaaaagatacaatccacacacatacacattaaaaaggagcagattgcgtaaatatattatcacatctgcttcgtttttgcaagtttaatttactcaaaaataaagcaggtgttttttatgacaacagcagctgcatatatcagagtttcctccgagcgtcaggacgaatattccccc

SEQ ID NO: 20358 - DNA, 260 bp, Unknown
  Description of Unknown: LeftRegion for integrase B7359 sequence
acacctacccgaaagactgatttgtgatttattttcacaacaataaaaataaaaacgccgcccggtgctggaacaccgaacggcaaaagatacaatccacacacatacacattaaaaaggagcagattgcgtaaatatattatcacatctgcttcgtttttgcaagtttaatttactcaaaaataaagcaggtgttttttatgacaatagcagctgcatatatcagagtttcctccgagcgtcaggatgaatattccccc

SEQ ID NO: 20359 - DNA, 260 bp, Unknown
  Description of Unknown: LeftRegion for integrase B7360 sequence
aacaatcagacttgagaaagtaaaataattcagttgcagagcttataaataaaactgccgcccggtgctggaacaccgaacggcaaaagatacaatccacacacatacacattaaaaaggagcagattgcgtaaatatattatcacatctgcttcgtttttgcaagtttaatttactcaaaaataaagcaggtgttttttatgacaacagcagctgcatatatcagagtttcctccgagcgtcaggacgaatattccccc

SEQ ID NO: 20360 - DNA, 260 bp, Unknown
  Description of Unknown: LeftRegion for integrase B7361 sequence
gaattatataaacgtggattagttaaataaaaaatcgcggatctcccatcgacaagagtattggccggcttgatttgagaacattagaaaaatataaaaaaggcttcttaatatatgaccattttgccgacatcggcaaaatggttggcgcataagaagcttgaaaattacaagaaataatctcaaaggataatgttataatgaaaacaggtgctgcatacataagggtctcgtctgatgaccaaactgaatatagtccc

SEQ ID NO: 20361 - DNA, 260 bp, Unknown
  Description of Unknown: LeftRegion for integrase B7362 sequence
acaatgtaaattagaaaaagaataaagaaaaaccgccccggtgttaccagcaccagagcggccagcacatccgaagatgcacacaatttttcaacaaaaatattgtatcatcttcggggcagccatgcaagcggaacctttgttctggctggctgttatttttgtacttatttttacataattataatcgaggtgataccatgaccgaacaaaaatctgatgatctgcgcatgggagcactgtatatccgtgtcagcacc

SEQ ID NO: 20362 - DNA, 260 bp, Unknown
  Description of Unknown: LeftRegion for integrase B7363 sequence
taactacccgaaagagtagtttgtgatttattttcacaataataaaaataaaactgccgcccggtgctggcacaccgaacggcaaaagatacaatccacacacatacacattaaaaaggagcagattgcgtaaatatattatcatatctgcttcgtttttgcaagtttaatttactcaaaaataaggcaggtgtttttttatgacaacagcagctgcatatatcagagtttcctccgagcgtcaggacgaatattcccct

SEQ ID NO: 20363 - DNA, 260 bp, Unknown; identical to SEQ ID NO: 20273
  Description of Unknown: LeftRegion for integrase B7364 sequence

SEQ ID NO: 20364 - DNA, 260 bp, Unknown
  Description of Unknown: LeftRegion for integrase B7365 sequence
ctccacgctcacaaaatcgcaagtgcaatacataacctcgaaaactaaaataaaacgccgctcggcgctggaacaccgaacggcaaaagatacaatccacacacatacacattaaaaaggagcagattgcgtaaatatattatcacatctgcttcgtttttgcaagtttaatttactcaaaaataaagcaggtgttttttatgacaacagcagctgcatatatcagagtttcctccgagcgtcaggacgaatattctccc

SEQ ID NO: 20365 - DNA, 260 bp, Unknown
  Description of Unknown: LeftRegion for integrase B7366 sequence
gttggtaaaaaagggaaacacaactggcactgtcgaaactgcggatgcgtctttaaatctaagaaataaaaaaaaacccacgctctcaaagtttggcgactccgagcgtgaggcttacgacaagaaaggattttcatggagataacctcgcatgatgtcttttcttgtacctattttatcaaaaaaggggtacaaattcaatgaaaacaacgaataaagtggctatatatgtcagggtttcaacttcttatcaggctgaa

SEQ ID NO: 20366 - DNA, 260 bp, Unknown
  Description of Unknown: LeftRegion for integrase B7367 sequence
ctttacagtcagcaatctaattttataaaagaaaaaccggctcctgcgccaacaggaaccggcgagcacatccgaagatgcaccttattttcagcaaaaatattgtatcatcttcggagcagccatgcaagcggaacctttgttcgcgctggctgttatttttgtacttatttttacataattataatcgaggtgataccatgaccgaacaaaaatctgatgatctgcgcatgggagcactgtatatccgtgtcagcacc

SEQ ID NO: 20367 - DNA, 260 bp, Unknown
  Description of Unknown: LeftRegion for integrase B7368 sequence
caacagtacgagtgaataccgaaaactaacacctgctcagctccgattaaaattagcaaacgacaaacgagcagtaaatctaaatgcaacagacctcaaacctattggtaaagcaataaaatttgatatatctgagaatgaaaccttattagacataaaaaataaagtatcttttagacctgaaaataaggagtatgacgatgaataagaaaataatagcagatatttatataagattgtcaagtaaatctcaagaagat

SEQ ID NO: 20368 - DNA, 260 bp, Unknown
  Description of Unknown: LeftRegion for integrase B7369 sequence
gaacgcaattttgcgttttggctcatatcagacgggctcaattttgagccggttaaaagttggccacaattagacaacgcataatccaattttggattttgataaaagaattgagccgaatccaattttggattgggctccatatcacgagagcgcaaaattgcgctctcctccaaatcgttgatatgtcggaggtatttatgaagatagcagtttacgttcgcgtcagcactctagagcaagcggaaagcggctactca

SEQ ID NO: 20369 - DNA, 260 bp, Unknown
  Description of Unknown: LeftRegion for integrase B7370 sequence
catggtacgcattgcaaagaggcgtgtcgaggtctatctcatcagtttattaaaacgccgtccagtgctggcacaccgaacggcaaaagatacaatccacacacatacacattaaaaaggagcagattgcgtaaatatattatcacatctgcttcgtttttgcaagtttaatttactcaaaaataaagcaggtgttttttatgacaacagcagctgcatatatcagagtttcctccgagcgtcaggacgaatattccccc

SEQ ID NO: 20370 - DNA, 260 bp, Unknown
  Description of Unknown: LeftRegion for integrase B7371 sequence
gtcggcaatctaattttataaaagaaaaaccgccctagtgttggcgcaccagagcggcaaagactacattcccgaaggttgatgcagtacgttccgaaaatattgtatcatcttcggggcagccatgcaagcggaacctttgttcgcgccggctgttatttttatacttatttttacataattataatcgaggtgataccatgaccgaacaaaaatctgatgatctgcgcatgggagcactgtatatccgtgtcagtacc

SEQ ID NO: 20371 - DNA, 260 bp, Unknown
  Description of Unknown: LeftRegion for integrase B7372 sequence
aaaaagttaagataaaatagagcaaataaaaaccgccccggtgttaccagcaccagagcggcgagcacatccgaagatgcacacaatttttcagcaaaaatattgtatcatcttcggggcagccatgcaagcggaacctttgttcgcactggctgttatttttgtacttatttttacataattataatcgaggtgataccatgaccgaacaaaaatctaatgatctgcgcatgggagcactgtatatccgtgtcagcacc

SEQ ID NO: 20372 - DNA, 260 bp, Unknown
  Description of Unknown: LeftRegion for integrase B7373 sequence
ggtcttggtcattgtcttcatcctctttccccgctctaaaggcggattcattatccataatataccacatctttacaaattttccatcaccaaattttacaaaaccataccgaattttacaaaaccctgcccgtcttttaccagtttacggtttttgtttaatatgtaaagtcgaaaagacgtttttggaggtgaaccacatgcagatcgctgcggcgtatgtccgcgtatctgacgagcgtcaggacgaatattcgccc

SEQ ID NO: 20373 - DNA, 260 bp, Unknown
  Description of Unknown: LeftRegion for integrase B7374 sequence
acacgacagcgtatggaagaaaaagcaacacgctgggcagtacaagaattgattccggcggacaaactattggcagcatttgaaatgggatatactgaaatatggcagttagctgaatatttcaatgtcacggaagattttataaaaaatacaataagaatacatagagtaaagggcaatatttagggagtgatgcttttatgaaagtcggaatatattcaagagtttctacccaagagcaagcacgagagggttattcg

SEQ ID NO: 20374 - DNA, 260 bp, Unknown; identical to SEQ ID NO: 20373
  Description of Unknown: LeftRegion for integrase B7375 sequence

SEQ ID NO: 20375 - DNA, 260 bp, Unknown
  Description of Unknown: LeftRegion for integrase B7376 sequence
tgaaaagctgtgaaaagctgcaaaaagtcgataaaatataaaaaccatcatcttttttggcagttgtattttttcagaaaatagaatagaagaatttgctgattgttaccaattagtgatataaattttaccctttaaggctgttgaaaaaatgtttaaactaaaatacctgtgcataaaaattataatgggaggaaaaaatgaaaacagcggcggcatatattcgagtgtccacagaagatcaggttgaatattccccg

SEQ ID NO: 20376 - DNA, 260 bp, Unknown
  Description of Unknown: LeftRegion for integrase B7377 sequence
tctttttatatcgatttgtcaagaaatttccgtcgacaaaaaccggctcctgcgccaacaggaaccggcatgtagcttccgaagatgctactcatttcgcaaaaatattgtatcatcttcggagcggctgcacaatcagaacgtttgtgtggtcgttatttttgtacccatttttacataattttaaccgaggtgataaaatgcaaaaaagaatggctgctttatatgtccgtgtttccacggaggatcaggcagaattg

SEQ ID NO: 20377 - DNA, 260 bp, Unknown
  Description of Unknown: LeftRegion for integrase B7378 sequence
gcaggtaatagattaatgttgttaggtttaggtttacaaggttctgttgatagtttgactccatcttatttaacagctatcttagaacaaaattggattttaatcagacaaaacgaacaaatcattgagctgttaaaagataaagaataatctaaacccgtcgaatttgacgggttttaaatttaaggagcgattttattatgaaaatagcaatctatactagagtatctactatggaacaagcagaagaaggatactct

SEQ ID NO: 20378 - DNA, 260 bp, Unknown
  Description of Unknown: LeftRegion for integrase B7379 sequence
agcaggcaatagactaatgctattaggtttaggattacaaggatctgctcaatctctaactccttcttatttagctgctatcttagaacaaaattggattttaatcagacaaaatgaacaaatcattgagctattaaaagataagaaataatctaagcccgtcgatttcgacgggttttaatttaaggagtgatttaattgtgaaagtagcaatttatactagggtatctactatcgaacaagcagaagaaggatactca

SEQ ID NO: 20379 - DNA, 260 bp, Unknown
  Description of Unknown: LeftRegion for integrase B7380 sequence
ggtgggctttgtgccgataatattacgaaatctacaaattttttagtaactaatagtacagctatgaccggaaaaatgaaaaaagccttagattatcaagaaaaagggattgatatttcgatcataacagaagatgaactttacacgcttttggcatcaaaataatttattaaaaacaagtttgaaaggaattattcaatatgaaggtcggaatatattcaagagtttctacccaagaacaagcacgagagggttattcg

SEQ ID NO: 20380 - DNA, 260 bp, Unknown
  Description of Unknown: LeftRegion for integrase B7381 sequence
tgaaaagctgtgaaaagctgcaaaaagtcgataaaatataacaaccatcatcttttttggcagttgtattttttcagaaaatagaatagaagaatttgctgattgttaccaattagtgatataaattttaccctttaaggctgttgaaaaaatgtttaaactaaaatacctgtgcataaaaattataatgggaggaaaaaatgaaaacagcggcggcatatattcgagtgtccacagaagatcaggttgaatattccccg

SEQ ID NO: 20381 - DNA, 260 bp, Unknown
  Description of Unknown: LeftRegion for integrase B7382 sequence
aactttatctttaattgaatctgaatcaaaataaataaaaaccgccccagtacgccaataccgggacggtggtggatctccgaagagatacctcatttcgcaaaaatattgtatcatcttcggaaacagcatacaagcagaacgtttgtgcgctgttatttttgtacccttttttacataattttaaccgaggtgataaaatgcaaaaaagaatggctgctttatatgtccgtgtttccacagaagatcaggcggaattg

SEQ ID NO: 20382 - DNA, 260 bp, Unknown
  Description of Unknown: LeftRegion for integrase B7383 sequence
gcaggtaatagattaatgttattaggtttaggtttacaaggttctgttgatagtttgactccatcttatttagcagctatcttagaacaaaattggattttaatcagacaaaacgaacaaatcattgagctgttaaaagataaagaataatctaaacccgtcgaatttgacgggttttaaatttaaggagcgattttattatgaaaatagcaatctatactagagtatctactatggaacaagcagaagaaggatactct

SEQ ID NO: 20383 - DNA, 260 bp, Unknown
  Description of Unknown: LeftRegion for integrase B7384 sequence
gtgtacagataggttggctgccaaaaggcgaaaatttgcagcaagatatatcaagaagattaaatgagggacagaacgtgtatgcccgtgttaataaaatttatccattggactattatccgggtaactatggtttagtaattgatgttgcaagatattctaaaagataattgaattttacaaaaggagtttttcaatatatgaaggtcggaatatattcaagagtttctacccaagagcaagcacgagagggttattcg

SEQ ID NO: 20384 - DNA, 260 bp, Unknown
  Description of Unknown: LeftRegion for integrase B7385 sequence
tggactttgtgccgataatattacgaaatctacaaattttttagtaactaatagtacagttatgaccggaaaaatgaaaaaagccttagattatcaagaaaaagggattgatatttcgatcataacagaagatgaactttacacgcttttggcatcaaaataattgattaaaaacaagtttgaaaggagtttttcaatatatgaaggtcggaatatattcaagagtttctacccaagagcaagcacgagagggttattcg

SEQ ID NO: 20385 - DNA, 260 bp, Unknown
  Description of Unknown: LeftRegion for integrase B7386 sequence
cggtggactttgtgccgacaatattacgaaatctacaaattttttagtaactaatagcactgctatgaccggaaaaatgaaaaaagctttagattatcaagaaaaagggattgatatttcgatcataacagaagatgaactttacacgcttttggcatcaaaataatttattaaaaaaagtttgaaaggaattattcaatatgaaggtcggaatatattcaagagtttctacccaagagcaagcacgagagggttattcg

SEQ ID NO: 20386 - DNA, 260 bp, Unknown
  Description of Unknown: LeftRegion for integrase B7387 sequence
ctccggagccggggcgtgtacaagatcaagggcgttgttgtcggatttggtggggacgatgagccgctgatttatgcaacggactgggcagaaaagacacggatcagaacctacaacggactggaaaaggcagtcgcaaagaacgactaaaaaaaacagccggggagcaatccccggcaaaacctaaaggaggaaggcacatgcagacggcggcggcgtatgtccgggtgtcaacggaagagcaagtggaatattcaccg

SEQ ID NO: 20387 - DNA, 260 bp, Unknown
  Description of Unknown: LeftRegion for integrase B7388 sequence
ttcatttgtatgaaaaaatgaagattgaatgtaagcctttccggcaatcttacaatcaatgtttctttttcttcaaatctgtcataagtaaaatcaagcacagcctcacctcctacaacaatgtacttattcattattatataattagaatccactatttgtccatatttttcattgaataacctataaggagtgattttatgcaaagaacagttatctacgcgcgcttttcctcagatatgcagcgtgaagaaagcata

SEQ ID NO: 20388 - DNA, 260 bp, Unknown
  Description of Unknown: LeftRegion for integrase B7389 sequence
attagttgactttttttcattatatacgtgatttatatgactaaaaagcaacaagaaaacgaagtcaaatataggctttctataatgatgcttcttgatcttaagtgtaaaggtcaaattacaaatgaggaatttcaggaaatgaaaaaaaggcgcataagaaaatacaagcctataataggctgtttggaggtgagatattgaaaaagacagtaaccgagataaatccaaaatacgcaaagccgaaaaaagaaactgca

SEQ ID NO: 20389 - DNA, 260 bp, Unknown
  Description of Unknown: LeftRegion for integrase B7390 sequence
aaaaatgcattgcataaagctaaggaataccaagaagaacaaaatatgtcaccagatgcaatctacgaccaattaacttcagactacggcgaacaatttacaccagatgaagctaattatgcaattcagcatcttaaaaaataagaaacaatctaagcctgtcgatttcgacgggttttaatttaaggagcaattttattatgaaaatagcaatctatactagagtatctactatggaacaagcagaagaaggatactct

SEQ ID NO: 20390 - DNA, 260 bp, Unknown
  Description of Unknown: LeftRegion for integrase B7391 sequence
gaatcatgattacattttttattatactcatgaatttcaggattgcaatagtaatgtcacagatcgcaaaatctgacatattagtgtcataatgattacaaaaagattacaaaaagcaacgttttattagcaaaaaaggctgttgaaaaaaatgtttaaactaaaatacctgtgcataaaaattataatgggaggaaaaaatgaaaacagcggcggcatatattcgagtgtccacagaagatcaggttgaatactccccg

SEQ ID NO: 20391 - DNA, 260 bp, Unknown
  Description of Unknown: LeftRegion for integrase B7392 sequence
agcaggcaatagactaatgctattaggtttaggattacaaggatctgctcaatctctaactccttcttatttagctgctatcttagaacaaaattgaattttaatcagacaaaatgaacaaatcattgagctattaaaagataagaaataatctaagcccgtcgatttcgacgggttttaatttaaggagtgatttaattgtgaaagtagcaatttatactagggtatctactatcgaacaagcagaagaaggatactct

SEQ ID NO: 20392 - DNA, 260 bp, Unknown
  Description of Unknown: LeftRegion for integrase B7393 sequence
gcaattgcatgggtgtcttttactttataaatatatacaaaaaccggttcctgttggcgcaggaaccggcatgtagcttccgaagatgctactcatttcgcaaaaatattgtatcatcttcgaaaacagcatacaagcagaacgtttgtgcgctgttatttttgtacccatttttacataattttaaccgaggtgataaaatgcaaaaaagaatggcagctttatacgtccgtgtttccacggaggatcaggcggaattg

SEQ ID NO: 20393 - DNA, 260 bp, Unknown
  Description of Unknown: LeftRegion for integrase B7394 sequence
ggtgggctttgtgccgataatattacgaaatctacaaattttttagtaactaatagtacaactatgaccggaaaaatgaaaaaagccttagattatcaagaaaaaggtattgatatttcgatcataacagaagatgaactttacacgcttttggcatcaaaataatttattaaaaacaattttgaaaggaattattaaatatgaaggtcggaatatattcaagagtttctacccaagagcaagcacgagagggttattcg

SEQ ID NO: 20394 - DNA, 260 bp, Unknown; identical to SEQ ID NO: 20389
  Description of Unknown: LeftRegion for integrase B7395 sequence

SEQ ID NO: 20395 - DNA, 260 bp, Unknown
  Description of Unknown: LeftRegion for integrase B7396 sequence
agggacaattaatggaaaaagctatattgtatgccataaacgaaagaatgttctcgctcggtctgatagacgagaaaacaagagatagaattaaagctgaaatcagcattagaaagtaacgaaaatgtattgagtggagttatatgaggtgttatactttatatgattccactccctgtttattaagggagaaatgcactatgaatatttattatgtcagagaaaaattaagaaattgctctatttacgacattgaacta

SEQ ID NO: 20396 - DNA, 260 bp, Unknown
  Description of Unknown: LeftRegion for integrase B7397 sequence
gaatggcaaaatgcttggggacttttcttatagagggatgcccgaaaggattataccgagcagtgaaggtgagttgatttttaaggctatgaatcactacgacacgcataagtaaaaacagccgcttccaacatggtcgaaatcgactggtttagaagcggctattttcttgattttgcccaaacaaaggagatgttattatgttaaacgcagtaatctatgctcgcttctcgtctgatatgcagcgtgaagaaagcata

SEQ ID NO: 20397 - DNA, 260 bp, Unknown
  Description of Unknown: LeftRegion for integrase B7398 sequence
gaatataattataacaatcaaggtacatatagcaaacaatatttaactttcgtagaaagatatatttaatttttttacttttatttaaaactaaattgattctatttttggaggatttatgaaaagaaatgaaataagttataaagagagaatggaaaaagccgtggaacttattaaaaagctatatttggaggttcataatgaaaatagctgtggcgtatgtgagagtgtcaactaataaacaggatattagaggtagc

SEQ ID NO: 20398 - DNA, 260 bp, Unknown
  Description of Unknown: LeftRegion for integrase B7399 sequence
agcaggcaatagactaatgctattaggtttaggattacaaggatctgctcaatctctaaccccttcttatttagctgctatcttaaaataaaattggattttaatcagacaaaatgaacaaatcattgagctattaaaagataagaaataatctaagcccgtcgatttcgacgggttttaatttaaggagtgatttaattgtgaaagtagcaatttatactagggtatctactatcgaacaagcagaagaaggatactca

SEQ ID NO: 20399 - DNA, 260 bp, Unknown; identical to SEQ ID NO: 20263
  Description of Unknown: LeftRegion for integrase B7400 sequence

SEQ ID NO: 20400 - DNA, 260 bp, Unknown
  Description of Unknown: LeftRegion for integrase B7401 sequence
cgaaatgaagagtcactatcagatgatgaacgtcagatcgtagacaactaccgcgacagttcaccgcaatggcagaagaacatagcgatgaccgcaaaagcggcggcaagtgagtcaaagaaggaataaaaaagaaaaaagccctgcgcgaccgtccaaagcagcacagggcacctaacaaaaggcaaggtgataataccatgaccaaaggtagtcgtgcggctatctacgcacgctttagctcgcacaatcagcgagac

SEQ ID NO: 20401 - DNA, 260 bp, Unknown
  Description of Unknown: LeftRegion for integrase B7402 sequence
agctggtacgctagaggctctgaaaaggtaagtataacaatacttagaaagatagcgttatactttaacgtctcgttagaggtattaataaacggaaatactataacgtcggtctattttactgagtacgagtatactaaagaagagttagagctaatcgctaattttggtaaatttttaaaagaaagtaggttaaaataatgaaaaacgacgtagctatatatttacgtaaatcacgtgaggacgacgagctaaaagag

SEQ ID NO: 20402 - DNA, 260 bp, Unknown
  Description of Unknown: LeftRegion for integrase B7403 sequence
taacatacatattggtatgccgccggacgttaaaaagcaatttgaggatttaaaaaagtcgttatacaaaaggagtgatacatatgattaaaattactctaaacggaaaagaaataaacattatggatattcagcttgataagcaaacagttgcacttataatgtcgataattgacagttgaaaaggaaacttgtaaaatgtgtcgtataaaaacgtgatatgtacggcacatttttgttttagagaggggatattgatt

SEQ ID NO: 20403 - DNA, 260 bp, Unknown
  Description of Unknown: LeftRegion for integrase B7404 sequence
gaggattttgacccttttaaatagcaaaaccgcccggtgctggtaacaccgaacggccttgcatagatttctcttaccggatgcccggaaagatatattcaaacctgaacactttgaattatatcattctttcgggcacctcgcaagaggtgtattttttatacccttttttaatatttttatacgaaaggatgatcgaaatgagaataggtgcagcttatatccgtgtcagcacggacgaccagctggatatcagcccg

SEQ ID NO: 20404 - DNA, 260 bp, Unknown
  Description of Unknown: LeftRegion for integrase B7405 sequence
ctgtttcccaaattattgcggcggcaaaattcagtgatgatgagcgagaaatagccgagctgcttgacgttgatctgaacacgttgaaaggcgccgttcaatattataagagaaaagggctgatgtaaatattaaaaaatcttgacaccccgaatgttaagtagtacaatcaaaatacagatattggagagaacaagattttgaaagccgcatcgtacgtacgcgtttcgacgcttgaacaaaaaaagaacggatattcc

SEQ ID NO: 20405 - DNA, 260 bp, Unknown
  Description of Unknown: LeftRegion for integrase B7406 sequence
tgtttcccaaattattgcggcggcaaaattcagtgatgatgagcgagaaatagccgagctgcttgacgttgatctgaacacgttgaaaggcgccgttcaatattataagagaaaagggctgatgtaaatattaaaaaatcttgacacccccgaatgttaagtagtacaatcaaaatacagatattggagagaacaagattttgaaagccgcatcgtacgtacgcgtttcgacgcttgaacaaaaaaagaacggatattcc

SEQ ID NO: 20406 - DNA, 260 bp, Unknown
  Description of Unknown: LeftRegion for integrase B7407 sequence
tccattaagcggaaagctcatttgtccattctgtggaaaaacactccgcaggcggcaggtttacaacaagaagattcaatggctgtgcagcacatacattgaaaaaagaaagaaagcctgcaagggcatccgcattgatgatgtcgctcttgcaggattaaatatcacggaacagacagtagttgaggaggtaattcaaaatggcaagaagcattactgttatacccgcaagacagatttcgactgcggaattcggaaca

SEQ ID NO: 20407 - DNA, 260 bp, Unknown
  Description of Unknown: LeftRegion for integrase B7408 sequence
ccgcggaactaaaaaacaaaagcccccgtgcgggaacacggagacttttgcagattcttacccttccagagttttcagtccctgatgaagatgataagaaacaaaaagtatgcaactgcattatatcatctcagggacgttctggcaaggggcgtcttttttgtactcttttttcgtataatttgaggagatgattttaagtggtgaaaaaagtgcttcgatgtgcaatctatattcgtgtgtctactgcagagcaggcc

SEQ ID NO: 20408 - DNA, 260 bp, Unknown
  Description of Unknown: LeftRegion for integrase B7409 sequence
gaatgatatgggatataataaaaaaagaaatagtaatcaaaaagaaaaaacaaggtaattaatttccttgtttattttttaagtattcatataattttaaatattcttccaaaaagtagtcaatccccatcagcaccattccttgtcttttttttaagtttaacatatttaatttaaaatttcaaataaaaggtggtattatgtataaaatagctatttatgtccgaaaaagtgtgaaaagcgaaaaaaactctgtttct

SEQ ID NO: 20409 - DNA, 260 bp, Unknown
  Description of Unknown: LeftRegion for integrase B7410 sequence
gaagacgacatccgaactattggggaagttgtcagcgtatatagagagaaataaaccaactgtttccattttggaaacaactcaaaaaagccccacgctcagaagtttggcgaccgagagcgtgaggctagtggtaagaaaaaagcattaaaaagctctttttcttatacccattttatcaagaaatgaggtaaaaatcaatgcaaaataaagtagcaatctatgtcagggtttcgacttcatctcaggctgaagagggt

SEQ ID NO: 20410 - DNA, 260 bp, Unknown
  Description of Unknown: LeftRegion for integrase B7411 sequence
cacacaagtttttattgtcctgaccttgaggatgaaagcgacggttatactctaccaattaaagggcttaaaattaaagaagccaagaaaaggaaaatgggttattgctattattgtaaacaagatttgcacgatacgctaacttatggttattatcaagatgattatatgaacgattacgacgacgaggtagagcgagaatgaaagtagcattatattctagagtatcaacgcaggagcaagcaattaatggctattcg

SEQ ID NO: 20411 - DNA, 260 bp, Unknown
  Description of Unknown: LeftRegion for integrase B7412 sequence
ttattgattctaacgaagatataaaagttcattcttatgaggtacttgataatattataaatagctttattgataacggattaatttcacctgatggaaaaatggataaagatacagaagaatttttaaataaaacattaatgaaagaaattatgtataaattaagcattagaaataatgacaaataatgaggtgatttcatgagaatcgcaatatatgtaaggaaatccgttgctggtgatgacaggtctataagttta

SEQ ID NO: 20412 - DNA, 260 bp, Unknown
  Description of Unknown: LeftRegion for integrase B7413 sequence
gcttattaggctatccccagatagattgggcatttcaaatacaataattaacgatatttgcaatttaaaagagaaatatcctttcgtcgatttgaaacattatggattcactaaaaattggaaaaatataatagaccatttagtttatgaatatgaaaataataaatgaggtcttttgtgttatttaaggaggttccatcatgaaaacagcagccgcctacatacgtgtatctacagatgaacaaacagaacacagccca

SEQ ID NO: 20413 - DNA, 260 bp, Unknown
  Description of Unknown: LeftRegion for integrase B7414 sequence
ctactgagtgttttttgtttcataaaatatttaataaaatcaaaaagccccctgtgttaccagcacagagagccttggcatcggtatgttaccagcataccgacatataaaccgctggaatatgcaaccaacggactaaccacccttattttagcatattctggcggtatcatcaaataaaataatcatgaggtgatactatgtcccaagatatgattgttgtgggctatgttcgtgtttccacggagcatcagcttgac

SEQ ID NO: 20414 - DNA, 260 bp, Unknown
  Description of Unknown: LeftRegion for integrase B7415 sequence
ggaatgatatgggatataataaaaaaagaaatagtaatcaaaaagaaaaaacaaggtaattaatttccttgtttattttttaagtattcatataattttaaatattcttccaaaaagtagtcaatccccatcagcaccattccttgtctttttttaagtttaacatatttaatttaaaatttcaaataaaaggtggtattatgtataaaatagctatttatgtccgaaaaagtgtgaaaagcgaaaaaaactctgtttct

SEQ ID NO: 20415 - DNA, 260 bp, Unknown
  Description of Unknown: LeftRegion for integrase B7416 sequence
gattttttctaaccctttagatagcaaaaccgcccggtgctggtaacaccgaacggcttcacatagatttctcttaccggatgcccggaaagatacattcaaaatcgaacactttgaattatatcattctttcgggcacctcgcaagaggtgtattttttatacccttttttaatatttttatacgaaaggatgatcgaaatgagaataggtgcagcttatatccgtgtcagcacggacgaccagctggatatcagcccg

SEQ ID NO: 20416 - DNA, 260 bp, Unknown
  Description of Unknown: LeftRegion for integrase B7417 sequence
tatcacccaagcagatataagcaagttggaaagtggaaacgctaacccctctttgcgcactttacaaagattagcttccggtatgggtatgaaagttaaaattgagtttcaaccaatcagacaaaattaaaacatttatcccctatccgctctcaaaatagcagaaaggggatttttatttcaaaaaaacaggtgattatatgaaaattgctgccgcatacgtcagagtgtcaaccgaagatcagacagagcttagtcct

SEQ ID NO: 20417 - DNA, 260 bp, Unknown
  Description of Unknown: LeftRegion for integrase B7418 sequence
aattctttaggagaataaaataaaaaccgccccggtgctaccaacaccgagacggtaatacatatccgaagatatgcaatctgaagccaagaatattgtatcatcttcgggacagctacacaatccagaacatttgttcatgtgctggctgttatttttgtacctatttttacataaattaaatgaggagatgatctaaaatgagcgcaagatatgcctatggttacgtccgtgtgtccactgataaacaggaagaactc

SEQ ID NO: 20418 - DNA, 260 bp, Unknown
  Description of Unknown: LeftRegion for integrase B7419 sequence
cttataacaaggtttatcataagactacatttggtctatctgacatcatgaaattatttaagtaaacaaaaaaagcccacgctcaaattttggacgaggagagcgtgagcaaggaagtatacaagaaaaacaggcattaaaaagccctttttcttgtactcattttaacattttttaacaaattttgaaagagggtacaaatgaactcaaaacgaaaagtagccatatatagccgtgtttctacactacaccaagctgaa

SEQ ID NO: 20419 - DNA, 260 bp, Unknown
  Description of Unknown: LeftRegion for integrase B7420 sequence
attaaaataaaaactgcaacaaaataccgccccagtgctaccaacactgagacggtccacatacccgaagatatgcaatctgaagccaagaatattgtatcatcttcggagcagctacacaatccagaacattcgttcatgtgctggctgttatttttgtacctatttttgcataaaactaaacaaggagatgatataaaatgagcgcaagatatgcctatggttacgtccgcgtatccacagataaacaggaagagctt

SEQ ID NO: 20420 - DNA, 260 bp, Unknown
  Description of Unknown: LeftRegion for integrase B7421 sequence
aaacaataatttttcagaacacaaaaaccgccccagtgctaccaacactgagacggtctacacatccgaagatatgctattgaaatccacgaatattgtatcatcttcggaaacagcttgcaatccagaacatttgttcatgtgctggctgttatttttgtgcctatttttacataaattaaatgaggagatgatctaaaatgagcgcaagatatgcctatggttacgtccgtgtatccactgataagcaagaagaactt

SEQ ID NO: 20421 - DNA, 260 bp, Unknown
  Description of Unknown: LeftRegion for integrase B7422 sequence
tttaacctcccccttcggggatatattatatagtatatttttatatactaaaattaaaaaagactcattgcagcgaacaatgagcctaccctcaaaaaagaggtacacaaataaaaaataatctagcacgaaaattcttttttgtgtatctcaattatagcatttatttaaagatttcgcaataattgggagtgattttaatgagtaaaataattaagaatgtaaaggataaaataataagagttgctatatatataaga

SEQ ID NO: 20422 - DNA, 260 bp, Unknown
  Description of Unknown: LeftRegion for integrase B7423 sequence
cctcctttcatcgtattttgtcgaatccggattacagttattattatactcagcaaatttcagattgcaatagatttgtcgtagaagttgcatttcgtgccgtagaagttttaaaatgtcaaaaatcaacactatgatatgtgaaaaatacacaaaaaaacttgccagttggcaagacatgtaaatacaaggaggttaaaatgaaaacagcagctgcatatatacgtgtttcaactgatgatcaaattgaatattcacca

SEQ ID NO: 20423 - DNA, 260 bp, Unknown
  Description of Unknown: LeftRegion for integrase B7424 sequence
gatgatttattgaaataaaataaaaccgccccggtgctaccaacaccagggcggcaatacatatccgaagatatgctattgaaatccacgaatattgtatcatcttcggaaacagcttgcaatccagaacattcgttcatgtgctggctgttatttttgtaccattttttgcataaaactaaacaaggagatgatctaaaatgagcgcaagatatgcctatggttacgtccgtgtatccactgataagcaggaagaactt

SEQ ID NO: 20424 - DNA, 260 bp, Unknown
  Description of Unknown: LeftRegion for integrase B7425 sequence
cttcagacaacactgataattaattttatataaaaaccggcccagtgctaccaacactgaaccggcttagttctccgaagagataccacgttttgcacgaattattgtatcatcttcggaggcagcgcacaagcagaacatttgtgtggctgttatttttgtacccaattttacatattttataaaaccgaggtgatatcatgagtgatcgtattggagctttatatatacgagtctccacagatgatcaggcggagctt

SEQ ID NO: 20425 - DNA, 260 bp, Unknown
  Description of Unknown: LeftRegion for integrase B7426 sequence
tattaaaataaaaactgcaacaaaataccgccccagtgctaccaacactgagacggtccacatacccgaagatatgcaatctgaagccaagaatattgtatcatcttcggagcagctacacaatccagaacattcgttcatgtgctggctgttatttttgtacttgtttttacataaattaaatgaggagatgatctactatgagcgtaaagtatgcctatggttacgtccgtgtatccaccgataagcaggaagaacta

SEQ ID NO: 20426 - DNA, 260 bp, Unknown
  Description of Unknown: LeftRegion for integrase B7427 sequence
gaaaaaattatccgaaaaataataaaaccgccccagtgctaccaacactgagacggtatacatacccgaagatatgcgattgaaatccacgaatattgtatcatcttcggaacagctacacaatccagaacatttgttcatgtgctggctgttatttttgtacttatttttacataaattaaatgaggagatgatctactatgagcgtaaagtatgcctatggttacgttcgcgtatccactgataagcaggaagagctt

SEQ ID NO: 20427 - DNA, 260 bp, Unknown
  Description of Unknown: LeftRegion for integrase B7428 sequence
tctcgattctttaggacaataaaataccgccccggtgctaccaacaccgggacggcaatacatatccgaagatatgctattgaaatccacgaatattgtatcatcttcggagcagctacacaatccagaacattcgttcatgtgctggctgttatttttgtacctatttttacataaattaaatgaggagatgatctaaaatgagcgcaagatatgcctatggttacgtccgtgtatccactgataagcaagaagaactt

SEQ ID NO: 20428 - DNA, 260 bp, Unknown
  Description of Unknown: LeftRegion for integrase B7429 sequence
tgtcaatatcatcagaataaaaacaataaaaaccgcccctgcgccaacaggaacggtctacatatccgaagatatgcaatctgaagccaagaatattgtatcatcttcgggacagctacacaatccagaacatttgttcatgtgctggctgttatttttgtacctatttttacataaattaaatgaggagatgatctaaaatgagcgcaagatatgcctatggttacgtccgtgtatccactgataagcaagaagaactt

SEQ ID NO: 20429 - DNA, 260 bp, Unknown
  Description of Unknown: LeftRegion for integrase B7430 sequence
ttaacctccccccttcggggatatattatatagtatatttttatatactaaaattaaaaaagactcattgcagcgaacaatgagcctaccctcaaaaaagaggtacacaaataaaaaataatctagcacgaaaattcttttttgtgtatctcaattatagcatttatttaaagatttcgcaataattgggagtgattttaatgagtaaaataattaagaatgtaaaggataaaataataagagttgctatatatataaga

SEQ ID NO: 20430 - DNA, 260 bp, Unknown
  Description of Unknown: LeftRegion for integrase B7431 sequence
ttgccagatacaagaaataaagattcaataaaataaaaaaaccggcccctgcgccaacagagaccggctaatatctccgaagagatacccgttttgcataaatattgtatcatcttcggagcaggcgcacaatcagaacatttgtgtggctgttatttttgtacccaattttacatattttataaaaccgaggtgatatcatgagtgatcgtattggagctttatatatacgagtctccacagatgatcaggctgagctt

SEQ ID NO: 20431 - DNA, 260 bp, Unknown
  Description of Unknown: LeftRegion for integrase B7432 sequence
aatcactaaacactacgccaatagtgtttaatcctcgtaatcaatacgaggtcgtatataacgcacacatctcgaagatgcgtacaatactcaccacatatattgtatcatcttcgagcagtcatcgcaatcgaaacatattttcggtggctgttatttttatacccttttttacataaaattagtaaggagtgatacacatggtaaaatatgcttatggttatatccgcgtaagtacagacaagcaagaggagctttct

SEQ ID NO: 20432 - DNA, 260 bp, Unknown
  Description of Unknown: LeftRegion for integrase B7433 sequence
agtgacgatgaataataaaacaaaaaaccgtcccactgctaccaacaccgggacggcaatacatatccgaagatatgcgatcaaaatccaagaatattgtatcatcttcggaaacagcttgcaagcggaacatttgttcatgtgctggctgttatttttgtacctatttttacataaattaaatgaggagatgatctaaaatgagcgcaagatatgcctatggttacgtccgtgtatccactgataagcaagaagaactt

SEQ ID NO: 20433 - DNA, 260 bp, Unknown
  Description of Unknown: LeftRegion for integrase B7434 sequence
aaagcagcttataacaaggtttatcataaaactacatttggtctatctgacatcatgaaattatttaagtaaacaaaaaaagcccacgctcaaattttggacgaggagagcgtgagctaataattaatagtatagtaaaagcctacttttagtagggctctttactatacccattttaacaagaaatgaggtataaatcaatgcaaacaaaacgaaaagtagctatatacagtcgtgtttctacactacaccaagccgag

SEQ ID NO: 20434 - DNA, 260 bp, Unknown
  Description of Unknown: LeftRegion for integrase B7435 sequence
ttttatttattataacaaactgcaacaaaaaaccgcccctgcgccaacagagacggtctacatatccgaagatatgcgattaaaatccaagaatattgtatcatcttcggaaacagcttgcaatccagaacatttgttcatgtgctggctgttatttttgtacctatttttacataaattaaatgaggagatgatctaaaatgagcgcaagatatgcctatggttacgtccgtgtatccactgataagcaagaagaactt

SEQ ID NO: 20435 - DNA, 260 bp, Unknown
  Description of Unknown: LeftRegion for integrase B7436 sequence
attctttaggagaataaaataaaaaaccgccccggtgctaccaacactgagacggtcaacatatccgaagatatgctattgaaatccaagaatattgtatcatcttcggtagcagcttgcaatccagaacattcgttcatgtgctggctgttatttttgtaccaatttttgcataaaactaaacaaggagatgatctaaaatgagcgcaagatatgcctatggttacgtccgtgtatccactgataagcaagaagaactt

SEQ ID NO: 20436 - DNA, 260 bp, Unknown
  Description of Unknown: LeftRegion for integrase B7437 sequence
cttgccagatacaagaaataaagattcaataaaataaaaaaaccggcccctgcgccaacagagaccggctaatatctccgaagagatacctttgagcaaaaatattgtatcatcttcggagcaggcgcacaaccagaacatttgtgtggctgttatttttgtacccaattttacatattttataaaaccgaggtgatatcatgagtgatcgcattggagctttatatatacgagtctccacagatgatcaggcagagctt

SEQ ID NO: 20437 - DNA, 156 bp, Unknown
  Description of Unknown: LeftRegion for integrase B7438 sequence
tagctcagaaatgagtgcgtgtaaaccatagctggtttgttatggatttaccgactaatattattgtaacaggagagtgcaaaggaacttttcgatgtggtcattgtttggaagctggacagatttgcaagaaacagatatgactcagcacattac

SEQ ID NO: 20438 - DNA, 260 bp, Unknown
  Description of Unknown: LeftRegion for integrase B7439 sequence
atcactaaacactacgccaatagtgtttaatcctcgtaatcaatacgaggtcgtatataacgcacacatctcgaaagatgcatacaatactcaccacatatattgtatcatcttcgaacggtcatcgcaatcgaaacatgttttcggtggctgttatttttatacccttttttacataaaattagcaaggagtgatacacatggtaaaatatgcttatggttatatccgcgtaagtacagacaagcaagaggagctttct

SEQ ID NO: 20439 - DNA, 260 bp, Unknown
  Description of Unknown: LeftRegion for integrase B7440 sequence
tattacccaagcagatataagtaagctggaaagtggcaacgccaatccttctttgcgtactttacagagattagcttccggtatgggcatgaaagttaaaattgaatttcaaccaatcggacacaattaaacatttatcccctatccgctcccaaaagagcagaaaaggggatttttattttaaaaaaacaggtgattatatgaaaattgctgctgcatacgtcagagtatcaaccgaagatcaaacagagcttagccct

SEQ ID NO: 20440 - DNA, 260 bp, Unknown
  Description of Unknown: LeftRegion for integrase B7441 sequence
aaaaaattatccgaaaaataataaaaccgccccggtgctaccaacaccgagacggtaatacatatccgaagatatgcaatctgaagccaagaatattgtatcatcttcgggacagctacacaatccagaacatttgttcatgtgctggctgttatttttgtacctatttttacataaattaaatgaggagatgatctaaaatgagcgcaagatatgcctatggttacgtccgtgtgtccactgataaacaggaagaactc

SEQ ID NO: 20441 - DNA, 260 bp, Unknown
  Description of Unknown: LeftRegion for integrase B7442 sequence
ttgccagatacaagaaataaagattcaataaaataaaaaaaccgacccctgcgccaacagagaccggctaatatctccgaagagatacccgttttgcataaatattgtatcatcttcggagcaggcgcacaatcagaacatttgtgtggctgttatttttgtacccaattttacatattttataaaaccgaggtgatatcatgagtgatcgtattggagctttatatatacgtgtctccacagatgatcaggctgagctt

SEQ ID NO: 20442 - DNA, 260 bp, Unknown
  Description of Unknown: LeftRegion for integrase B7443 sequence
gtatcacttataaaaaataaataaaagcaataaaaaaccggttcagtgctaccaacactgaaccggttcagatctccgaagagatacctcattttgcaaagatattgtatcatcttcggagcagtcatacaaccagaacgtttgtgtggctgttatttttgtacccaatttaacatattttttaaaaccgaggtgatattatgaatgatcgtacaggagcgttatatatccgcgtctcgacagaagatcaaacagagctc

SEQ ID NO: 20443 - DNA, 260 bp, Unknown
  Description of Unknown: LeftRegion for integrase B7444 sequence
tatcaattattcccaataaggaatttattgctaatccggatatcctgacaaatgccagctaacaaaaaaatcctcatgttcaccatcgccaaatttagaacatgaggaaagataaaactacaagaaaaacaggcattaaaaagccctttttcttgtactcattttaacatttttttacaaaatttgaaagagggtacaatatgaacacaaaacgaaaagtagctatatatagccgtgtttctacactacaccaagccgaa

SEQ ID NO: 20444 - DNA, 260 bp, Unknown; identical to SEQ ID NO: 20423
  Description of Unknown: LeftRegion for integrase B7445 sequence

SEQ ID NO: 20445 - DNA, 260 bp, Unknown
  Description of Unknown: LeftRegion for integrase B7446 sequence
agcgaaaacaataatttttcagaacacaaaaaccgcccctgcgccaacagagacggtctacatatccgaagatatgctattgaaatccacgaatattgtatcatcttcggaaacagcttgcaatccagaacattcgttcatgtgctggctgttatttttgtacctatttttacataaattaaatgaggagatgatctactatgagcgtaaagtatgcctatggttacgttcgcgtatccactgataagcaggaagagctt

SEQ ID NO: 20446 - DNA, 260 bp, Unknown
  Description of Unknown: LeftRegion for integrase B7447 sequence
aattgatacctagcgaatagtaaataaggctaaaaataccccctgcgttactagcacagagggcatgggtaaacataccagcaaatgccgatacgatataaaagagcacttatattgtatcatttctggcacttgctgtaaatcagtatggtgtattatttgcacacattattaatacattaaaacaaggagatgatataatgcaagaaaaaatacagcgctgcgctatctatattcgtgtatccactgctgagcaggcc

SEQ ID NO: 20447 - DNA, 260 bp, Unknown
  Description of Unknown: LeftRegion for integrase B7448 sequence
aaaataacagtgcagtaaaataaaataccgccccagcgctaccaacactgagacggtctacatatctgaagatatgcgattaaaatccatgaatattgtatcatcttcgggacagctacacaatccagaacatttgttcatgtgctggctgttatttttgtacctatttttacataaattaaatgaggagatgatctaaaatgagcgcaagatatgcctatggttacgtccgtgtatccactgataagcaagaagaactt

SEQ ID NO: 20448 - DNA, 260 bp, Unknown
  Description of Unknown: LeftRegion for integrase B7449 sequence
aggttttacaaaatcagaagccaactacgctattaaacatttagaagacgaagattaaaataaacaaaaaaacccacgctcaaattttggacgaggagagcgtgagctaataagtatgtatgagaaaaacaggcattaaaaagccctttttcttgtacctattttatcatttttaaataaattttgaaagagggtactatatgaattcaaaacgaaaagtagctatatacagtcgtgtttctacactacaccaagccgag

SEQ ID NO: 20449 - DNA, 260 bp, Unknown
  Description of Unknown: LeftRegion for integrase B7450 sequence
agcgaaaacaataatttttcagaatacaaaaaccgcccctgcgccaacagagacggtatacatatccgaagatatgcaatctgaagccaagaatattgtatcatcttcggaacagctacacaatccagaacatttgttcatgtgctggctgttatttttgtacttatttttacataaattaaatgaggagatgatctactatgagcgtaaagtatgcctatggttacgttcgcgtatccactgataagcaggaagagctt

SEQ ID NO: 20450 - DNA, 260 bp, Unknown
  Description of Unknown: LeftRegion for integrase B7451 sequence
aggttttacaaaatcagaagccaactacgctattaaacatttagaagacgaagattaaaataaacaaaaaagcccacgctcaaattttggacgaggagagcgtgagctaataagtatgtataagaaaaacaggcattaaaaagccctttttcttgtactcattttaacatttttttacaaaatttgaaagagggtacaatatgaacacgaaacgaaaagtagctatatatagccgtgtttctacactacaccaagccgag

SEQ ID NO: 20451 - DNA, 260 bp, Unknown
  Description of Unknown: LeftRegion for integrase B7452 sequence
attctttaggacaataaaacaaaaaaccgccccggtgctaccaacactgagacggtcaacatatccgaagatatgcaaatctgaagccaagaatattgtatcatcttcgggacagctacacaatccagaacatttgttcatgtgctggctgttatttttgtacctatttttacataaattaaatgaggagatgatctaaaatgagcgcaagatatgcctatggttacgtccgtgtatccactgataagcaggaagaactt

SEQ ID NO: 20452 - DNA, 260 bp, Unknown
  Description of Unknown: LeftRegion for integrase B7453 sequence
tctcgattctttaggacaataaaataccgccccggtgctaccaacaccgggacggcaatacatatccgaagatatgctattgaaatccacgaatattgtatcatcttcggagcagctacacaatccagaacatttgttcatgtgctggctgttatttttgtgcctatttttacataaattaaatgaggagatgatctaaaatgagcgcaagatatgcctatggttacgtccgtgtatccactgataagcaagaagaactt

SEQ ID NO: 20453 - DNA, 260 bp, Unknown
  Description of Unknown: LeftRegion for integrase B7454 sequence
aattctttaggagaataaaataaaaaccgccccggtgctaccaacaccgagacggtaatacatatccgaagatatgcaatctgaagccaagaatattgtatcatcttcgggacagctacacaatccagaacatttgttcatgtgctggctgttatttttgtacctatttttacataaattaaatgaggagatgatctaaaatgagcgcaagatatgcctatggttacgtccgtgtatccactgataagcaggaagaactt

SEQ ID NO: 20454 - DNA, 260 bp, Unknown; identical to SEQ ID NO: 20452
  Description of Unknown: LeftRegion for integrase B7455 sequence

SEQ ID NO: 20455 - DNA, 148 bp, Unknown
  Description of Unknown: LeftRegion for integrase B7456 sequence
cttcggagcagtcgcacaacccaaacatttgtgtggctgttatttttgtacccaattttacatatttttataaaaccgaggtgatattatgagtgatcgtattggagctttgtatatccgtgtctccacagatgatcaggcagaactt

SEQ ID NO: 20456 - DNA, 260 bp, Unknown; identical to SEQ ID NO: 20445
  Description of Unknown: LeftRegion for integrase B7457 sequence

SEQ ID NO: 20457 - DNA, 260 bp, Unknown
  Description of Unknown: LeftRegion for integrase B7458 sequence
ctcgggtgtcttttacttttatgttaatatataaaaaatcgccccagtgttggcgcaccaggacgattcaggtctccgaagagatactcgttttgcaagaattattgtatcatcttcggagcaggcgcacaaccagaacgtttgtgtggctgttatttttgtacccaaatttacatattttataaaaccgaggtgatatcatgagtgatcgtattggagctttatatatacgagtctccacagatgatcaagcggagctt

SEQ ID NO: 20458 - DNA, 260 bp, Unknown
  Description of Unknown: LeftRegion for integrase B7459 sequence
agctacaaccatagagcttggttatgaacaacaagaagatttttcttgcaaatattggagataaaaggaaaggagctaagtataatatggaaactaataaaccagtaaaaaacgaagaaataaatataataaaaagagcagtagtagaacaaattgaagaactttacaataaattaatcttaaagaaaaaggcttcataaatggaaaaagttgccatttatattagagtatcaaaaaaagaacaaactagagataaaggg

SEQ ID NO: 20459 - DNA, 260 bp, Unknown; identical to SEQ ID NO: 20433
  Description of Unknown: LeftRegion for integrase B7460 sequence

SEQ ID NO: 20460 - DNA, 260 bp, Unknown
  Description of Unknown: LeftRegion for integrase B7461 sequence
cgcgcttagggttagctagctagtaaaagagcgccgctcgcgcgacgctccactcgcactcgcttgcaggagcaagcagagagcagccttgtctattataatagcacattctgctgctcttgtcttgcgagtacatgcccgaaaaaggaaaataatgtatctttaccatgcttttactgtacatttggaggtaaataaaaatgatgagagcagctatctacatccgggtcagcactgatgagcaggccaggcacggcttt

SEQ ID NO: 20461 - DNA, 260 bp, Unknown
  Description of Unknown: LeftRegion for integrase B7462 sequence
gtatcacttataaaaaataaataaaagcaataaaaaaccgatccagtgctaccaacactgaaccggctcagatctccgaagagatacctcattttgcaaagatattgtatcatcttcggaagcagcgcacaacccaaacatttgtgtggctgttatttttgtacccatttacacataattataacaaccgaggtgatattatgagtgatcgtattggagctttgtatatccgtgtctccacagatgatcaggcggagctt

SEQ ID NO: 20462 - DNA, 260 bp, Unknown
  Description of Unknown: LeftRegion for integrase B7463 sequence
atcgacaagaattggtttaaatgaatcaaaccacaattatgataaagaaattattgaaacaagaaatttcctcgcttctgcggttggagtaagtgagagataacactcaactttttccaaaatggaaataattcaaatcccctatccgctcccaaaatagcagaaaaggggatttttatttgaaaaaaacaggtgattatatgaaaattgctgctgcatatgtcagagtatcaaccgaagatcaaacagaacttagtcct

SEQ ID NO: 20463 - DNA, 260 bp, Unknown
  Description of Unknown: LeftRegion for integrase B7464 sequence
tggcaacgtaagttttcgtaaaataaaaaaaccgcccctgtgctaccaacacaaggacggctcatatctccgaagagatacccgttttgcattaaatattgtatcatcttcggagcaggcgcacaaccagaacatttgtgtggctgttatttttgtacccaattttacatattttataaatataaaaccgaggtgatatcatgagtgatcgtattggagctttatatatacgagtctccacagatgatcaggcagagctt

SEQ ID NO: 20464 - DNA, 260 bp, Unknown
  Description of Unknown: LeftRegion for integrase B7465 sequence
ttctgatgatgcagataatattttagaataaaataaaaaccgcctcagtattggcgtactgaagcggcttaggtctccgaagagatactcgttttgcaaagatattgtatcatcttcggagcagacgcacaaccagaacatttgtgtggctgttatttttgtacccaattttacatattttataaaaccgaggtgatatcatgagtgatcgtattggagctttgtatatacgagtctccacagatgatcaggcggagctt

SEQ ID NO: 20465 - DNA, 260 bp, Unknown
  Description of Unknown: LeftRegion for integrase B7466 sequence
cctcctttcatcgtattttgtcgaatccggattacagttattattatactcggcaaatttcagattgcaatagatttgtcgtagaagttgcatttcgtgccgtagaagtttgaaaatgtcaaaaaccaacactatgatatgtgaaaaatacacaaaaaaacttgccagttagcaagacatgtaaatacaaggaggttaaaatgaaaacagcagctgcatatatacgtgtttcaactgatgatcaaattgaatattcacca

SEQ ID NO: 20466 - DNA, 260 bp, Unknown
  Description of Unknown: LeftRegion for integrase B7467 sequence
ctctcgattctttaggacaataaaacaaaaaaccgcccctgcgccaacagagacggtctacatatccgaagatatgcgattgaaatccacgaatattgtatcatcttcggaaacagcttgcaatccagaacattcgttcatgtgccggctgttatttttgtacttatttttacataaattaaatgaggagatgatctactatgagcgtaaagtatgcctatggttacgttcgcgtatccactgataagcaggaagaactc

SEQ ID NO: 20467 - DNA, 260 bp, Unknown; identical to SEQ ID NO: 20426
  Description of Unknown: LeftRegion for integrase B7468 sequence

SEQ ID NO: 20468 - DNA, 260 bp, Unknown; identical to SEQ ID NO: 20423
  Description of Unknown: LeftRegion for integrase B7469 sequence

SEQ ID NO: 20469 - DNA, 260 bp, Unknown
  Description of Unknown: LeftRegion for integrase B7470 sequence
tgtatcacttataaaaaataaataaaagcaataaaaaaccgatccagtgctaccaacactgaaccggttcagatctccgaagagatgctcattttgcaaagatattgtatcatcttcggagcaggcgcacaaccagaacgtttgtgtggctgttatttttgtacccaattttacatattttataaaaccgaggtgatatcatgagtgatcgtattggagctttatatatacgagtctccacagatgatcaggcggagctt

SEQ ID NO: 20470 - DNA, 260 bp, Unknown; identical to SEQ ID NO: 20435
  Description of Unknown: LeftRegion for integrase B7471 sequence

SEQ ID NO: 20471 - DNA, 260 bp, Unknown
  Description of Unknown: LeftRegion for integrase B7472 sequence
ccggttgggtaatgtttaatttcaaaataaaaaccgcccctgcgccaacagagacggtctacatatccgaagatatgcaatctgaagccaagaatattgtatcatcttcggaagcagcttgcaatccagaacatttgttttgcgctggctgttatttttgtacctatttttacataaattaaatgaggagatgatctaaaatgagcgcaagatatgcctatggttacgtccgtgtatccactgataagcaagaagaactt

SEQ ID NO: 20472 - DNA, 260 bp, Unknown
  Description of Unknown: LeftRegion for integrase B7473 sequence
aaccgacatgggagaaggcgtgcgcgatagtcgatgcgttcggcctaacggttgacgaatttagacagattcagaacgcagaatgacatgcagatagcataaggccccggtaccgtccgccaagacaacacaccggggcctcaatggaacgcggggccgtggccttccgcattcaacacccatagaagggcaaccaaattatgacacagaaaacagcggttatatacgcccgcttcagctgctccaagcagcgcgaggcg

SEQ ID NO: 20473 - DNA, 260 bp, Unknown
  Description of Unknown: LeftRegion for integrase B7474 sequence
atggcggaggttttacaaaatcagaagccaactacgctattaaacatttagaagacgaagattaaaataaacaaaaaaagcccacgctcaaattttggacgaggagagcgtgagctaataattggtagtatagtaaaaagcctacttttagtaggtctctttactatacccattttaacacagaaatgaggtataaatcaatgcaaacaaaacgaaaagtagctatatatagccgtgtctctacactacaccaagccgag

SEQ ID NO: 20474 - DNA, 260 bp, Unknown; identical to SEQ ID NO: 20426
  Description of Unknown: LeftRegion for integrase B7475 sequence

SEQ ID NO: 20475 - DNA, 260 bp, Unknown
  Description of Unknown: LeftRegion for integrase B7476 sequence
aagataataatttttcataataaaaaccgccccggtgctaccaacactgagacggtaatacatatccgaagatatgcaatctgaagccaagaatattgtatcatcttcgggacagctacacaatccagaacatttgttcatgtgctggctgttatttttgtacctatttttacataaattaaatgaggagatgatctaaaatgagcgcaagatatgcctatggttacgtccgtgtatccactgataagcaagaagaactt

SEQ ID NO: 20476 - DNA, 260 bp, Unknown
  Description of Unknown: LeftRegion for integrase B7477 sequence
agctattactgctaattaggcataataaaaaccgcccctgtgctaccaacacaaggacggctcatatctccgaagagatacccgttttgcattaaatattgtatcatcttcggagcaggcgcacaaccagaacatttgtgtggctgttatttttgtacccaattttacatattttataaatataaaaccgaggtgatatcatgagtgatcgtattggagctttatatatacgagtctccacagatgatcaggcagagctt

SEQ ID NO: 20477 - DNA, 260 bp, Unknown; identical to SEQ ID NO: 20476
  Description of Unknown: LeftRegion for integrase B7478 sequence

SEQ ID NO: 20478 - DNA, 260 bp, Unknown
  Description of Unknown: LeftRegion for integrase B7479 sequence
aatcactaaacactacgccaatagtgtttaatcctcgtaatcaatacgaggtcgtatataacgcacacatctcgaagatgcgtacaatactcaccacatatattgtatcatcttcgagcagtcatcgcaatcgaaacatattttcggtggctgttatttttatacctatttttacataagattagctaggagtgatacacatggtaaaatatgcctatggctacattcgtgtaagcacagacaagcaggaggagctttct

SEQ ID NO: 20479 - DNA, 260 bp, Unknown
  Description of Unknown: LeftRegion for integrase B7480 sequence
aacaaagcagcataggcgtaaaaaaataccgccccagtgctaccaacactgagacggtctacatatccgaagatatgcgattgaaatccacgaatattgtatcatcttcggaaacagcttgcaatccagaacatttgttctgtgctggctgttatttttgtacctatttttacataaattaaatgaggagatgatctaaaatgagcgcaagatatgcctatggttacgtccgtgtgtccactgataaacaggaagaactc

SEQ ID NO: 20480 - DNA, 260 bp, Unknown
  Description of Unknown: LeftRegion for integrase B7481 sequence
ttggataatgtttaatttcaaaataaaaaccgccccagtgctaccaacactgagacggtctacatatccggagatatgcctatttctaccaagaatattgtatcatcttcggaacagtcacgcaagcggaacgtttgttttgcgctggctgttatttttgtacttatttttacataaattaaatgaggagatgatctactatgagcgtaaagtatgcctatggttacgtccgcgtgtccactgataagcaggaagaactc

SEQ ID NO: 20481 - DNA, 260 bp, Unknown
  Description of Unknown: LeftRegion for integrase B7482 sequence
aagagatgcacaaagtagttattcattaaaaaccgcccctgcgccaacagagacggtctacatatccgaagatatgcgattgaaatccaagaatattgtatcatcttcgggacagctacacaatccagaacatttgttcatgtgctggctgttatttttgtacctatttttacataaattaaatgaggagatgatctaaaatgagcgcaagatatgcctatggttacgtccgtgtgtccactgataaacaggaagagctc

SEQ ID NO: 20482 - DNA, 260 bp, Unknown
  Description of Unknown: LeftRegion for integrase B7483 sequence
tctcgattctttaggagaataaaataccgccccagtgctaccaacaccgggacggcaatacatatccgaagatatgcgattgaaatccaagaatattgtatcatcttcggaaacagcttgcaatccagaacattcgttcatgtgctggctgttatttttgtacctatttttacataaattaaatgaggagatgatctactatgagcgtaaagtatgcctatggttacgttcgcgtatccactgataagcaggaagagctt

SEQ ID NO: 20483 - DNA, 260 bp, Unknown
  Description of Unknown: LeftRegion for integrase B7484 sequence
agaggatggcggaggttttacaaaatcagaagccaactacgctattaaacatttagaagacgaagattaaaataaaaaagcccacgctcaaattttggacgaggagagcgtgagctaataattggtagtatagtaaaaagcctacttttagtaggtctctttactatacccattttaacacagaaatgaggtataaatcaatgcaaacaaaacgaaaagtagctatatatagccgtgtctctacactacaccaagccgag

SEQ ID NO: 20484 - DNA, 260 bp, Unknown
  Description of Unknown: LeftRegion for integrase B7485 sequence
tttatcaattgtgatctctgaattattataataaaaaccgcccctgttggtagcagggacggctcaagaatctccgaagagatccctttcttttggcaaagatattgtatcatcttcggagcagttgcacaatcagaacgtttgtgtggctgttatttttatactttaaattacatattttataaaactgaggtgatattatgagtagtaaagtagcagctctctatatccgtgtctcgacagaggaccaaacagagtta

SEQ ID NO: 20485 - DNA, 260 bp, Unknown
  Description of Unknown: LeftRegion for integrase B7486 sequence
ttatcaattgcgatctctgaattattataataaaaaccgcccctgctggtaacagggacggatcaagaatctccgaagagatccagtactttagcaaagatattgctatcatcttcggagcagttacacaagccaaacgtttgtgtggctgttatttttatgcttaaaattacatattttataaaaccgaggtgatatttatgagcagtaaagtggcatgtctttacatccgcgtctcgacagaggaccaaacagagtta

SEQ ID NO: 20486 - DNA, 97 bp, Unknown
  Description of Unknown: LeftRegion for integrase B7487 sequence
ttaaaattacatattttataaaaccgaggtgatatttatgagcagtaaagtggcatgtctttacatccgcgtttcgacagaggaccaaacagagctt

SEQ ID NO: 20487 - DNA, 260 bp, Unknown
  Description of Unknown: LeftRegion for integrase B7488 sequence
ttatcaattgtgatctctgaattattataataaaaaccgcccctgttggtagcagggacggctcaagaatctccgaagagattcctttcttttggcaaagatattgtatcatcttcggagcagttacacaatcagaacgtttgtgtggctgttatttttatgcttaaaattacatattttataaaaccgaggtgatatttatgagtagtaaagtagcagctctctatatccgtgtctcgacagaggaccaaacagagtta

SEQ ID NO: 20488 - DNA, 260 bp, Unknown
  Description of Unknown: LeftRegion for integrase B7489 sequence
tttatcaattgtgatctctgaattattataataaaaaccgcccctgttggtagcagggacggctcaagaatctccgaagagatccagtactttagcaaagatattgtatcatcttcggagcagttacacaatcagaacgtttgtgtggctgttatttttatacttaaaattacatattttataaaaccgaggtgatatttatgagtagtaaagtagcagctctctatatccgtgtctcgacagaggaccaaacagagtta

SEQ ID NO: 20489 - DNA, 260 bp, Unknown
  Description of Unknown: LeftRegion for integrase B7490 sequence
tttatcaattgcgatctctgaattattataataaaaaccgcccccgctggtaacagggacggctcaagaatctccgaagagattccgtactttggcaaagatattgtatcatcttcggagcagttgcacaatcagaacatttgtgtggctgttatttttgcacttaaaattacatattttataaaaccgaggtgatatttatgagtagtaaagtagcagctctctatatccgtgtctcgacagaggaccaaacagagtta

SEQ ID NO: 20490 - DNA, 260 bp, Unknown
  Description of Unknown: LeftRegion for integrase B7491 sequence
tcagtgctaccaacaccgaaccgattgcaccctgaccggatgccagccaggactttactataacatctccggagatgctacagctttcaaccacgcatattgtatcatcttcggagcagccacgcaagcggaatgagatatttttccagctggctgttatttttgtacccatttttacataatttagacgaggtgatatcatggaaaatcgtgtaggtgcactctatgtgcgtgtctcgacagatgatcagacagatctc

SEQ ID NO: 20491 - DNA, 260 bp, Unknown
  Description of Unknown: LeftRegion for integrase B7492 sequence
tttatcaattgtgatctctgaattattataataaaaaccgcccctgctggtaacagggacggatcaagaatctccgaagagatccagtactttggcaaagatattgtatcatcttcggagcagttacacaatcagaacatttgtgtggctgttatttttatactttaaattacatattttataaaaccgaggtgatatttatgagtagtaaagtagcagctctctatatccgtgtctcgacagaggaccaaacagagtta

SEQ ID NO: 20492 - DNA, 260 bp, Unknown
  Description of Unknown: LeftRegion for integrase B7493 sequence
tttatcaattgtgatctctgaattattataataaaaaccgcccctgttggtagcagggacggctcaagaatctccgaagagattccgtactttggcaaagatattgtatcatcttcggagcagttgcacaatcagaacatttgtgtggctgttatttttatgcttaaaattacatattttataaaaccgaggtgatatttatgagtagtaaagtagcagctctctatatccgtgtctcgacagaggaccaaacagagtta

SEQ ID NO: 20493 - DNA, 260 bp, Unknown
  Description of Unknown: LeftRegion for integrase B7494 sequence
tttatcaattgtgatctctgaattattataataaaaaccgcccctgttggtagcagggacggctcaagaatctccgaagagattccgtactttggcaaagatattgtatcatcttcggagcagttacacaatcagaacgtttgtgtggctgttatttttatgcttaaaattacatattttataaaaccgaggtgatatttatgagtagtaaagtagcagctctctatatccgtgtctcgacagaggaccaaacagagtta

SEQ ID NO: 20494 - DNA, 260 bp, Unknown
  Description of Unknown: LeftRegion for integrase B7495 sequence
ttatcaattgcgatctctgaattattataataaaaaccgcccccgctggtaacagggacggctcaagaatctccgaagagatccctttcttttggcaaagatattgtatcatcttcggagcagttacacaagccaaacgtttgtgtggctgttatttttatgcttaaaattacatattttataaaaccgaggtgatatttatgagcagtaaagtggcatgtctttacatccgcgtctcgacagaggaccaaacagagtta

SEQ ID NO: 20495 - DNA, 260 bp, Unknown
  Description of Unknown: LeftRegion for integrase B7496 sequence
gttatagacactaatttaataggagagttgataatatggagaatttagacacaaagaaagaatatgtcctaaataaaaatggattaaaaataaaggtaacagctaataaaccaagtgatgaaactttatataaatttgctaataaatgtaaagatttatatgataaaatagagcataggaagaaaggaagtgtggcataaatgaacgtaatatatcttagaaagtctagggaggatttaaacagcgaagatacattatgg

SEQ ID NO: 20496 - DNA, 260 bp, Unknown
  Description of Unknown: LeftRegion for integrase B7497 sequence
tttatcaattgtgatctctgaattattataataaaaaacgcccctgctggtaacagggacggatcaagaatctccgaagagatccagtactttggcaaagatattatatcatcttcggagcagttacacaatcagaacgtttgtgtggctgttatttttatacttaaaattacatattttataaaaccgaggtgatatttatgagtagtaaagtagcagctctctatatccgtgtctcgacagaggaccaaacagagtta

SEQ ID NO: 20497 - DNA, 260 bp, Unknown
  Description of Unknown: LeftRegion for integrase B7498 sequence
gctttacatgatacaatacgagaaaaaaaacatataaatgttttaaatggggcatggagtaaaaaatatgaatgttgcattaactgtggttcaactacagttaaacataaaggcaatggcttatgtgttaactgctacgctacaatgttgcgccacaaaaaggaggtgatgccctatgtcgaacattagagccgcactctatgttcgcgtttaacgcaagcacgatggaacaagcgaccgacggatattccataggcgag

SEQ ID NO: 20498 - DNA, 260 bp, Unknown
  Description of Unknown: LeftRegion for integrase B7499 sequence
ttatcaattgcgatctctgaattattataataaaaaccgcccccgctggtaacagggacggctcaagaatctccgaagagatccctttcttttggcaaagatattgtatcatcttcggagcagttacacaagccaaacgtttgtgtggctgttatttttatgcttaaaattacatattttataaaaccgaggtgatatttatgagtagtaaagtagcagctctctatatccgtgtctcgacagaggaccaaacagagtta

SEQ ID NO: 20499 - DNA, 260 bp, Unknown
  Description of Unknown: LeftRegion for integrase B7500 sequence
tggcaccgaattataactcaaaaatactaaaaccgccccagtgcgccaacaccggagcggccacatatccgaggatatgcaagtactttgatcggtaatattgtatcatcttcggagcagcttcgcaatcctgaacgattgttcggctgttattttcgtacttatttttacataagttcaataaataaggagatgatcttatgccttttgaagactatattgacggggccgcatatacccgtgtaagctccggtaagcaa

SEQ ID NO: 20500 - DNA, 260 bp, Unknown
  Description of Unknown: LeftRegion for integrase B7501 sequence
aatctttaatataaaagtcaattaaatataaaaaccgccccagtacgccaataccgggacggtggtggatctccgaagagatatccaatttttaccaaagatattgtatcatcttcggagcggctacacaatcagaacgtttgtgtggctgttatttttgtacttaaaattacatattttataaaaccgaggtgatatttatgagcagtaaagtggcatgtctttacatccgcgtctcgacagaggatcaaacagaactt

SEQ ID NO: 20501 - DNA, 260 bp, Unknown
  Description of Unknown: LeftRegion for integrase B7502 sequence
tttatcaattgtgatctctgaattattataataaaaaccgcccctgctggtaacagggacggatcaagaatctccgaagagatccagtactttggcaaagatattgtatcatcttcggagcagttacacaatcagaacatttgtgtggctgttatttttatacctaaaattacatattttataaaaccgaggtgatatttatgagtagtaaagtagcagctctctatatccgtgtctcgacagaggaccaaacagagtta

SEQ ID NO: 20502 - DNA, 260 bp, Unknown
  Description of Unknown: LeftRegion for integrase B7503 sequence
agacaataacgaataaattaacattaacaaaaaccgccccagtattggcatactgagacggtgatcagaatctccgaagagattcggtactttggcaaagatattgtatcatcttcggagcagttacacaatcagaacatttgtgtggctgttatttttatacttaaaattacatattttataaaaccgaggtgatatttatgagtagtaaagtagcagctctctatatccgtgtctcgacagaggaccaaacagagtta

SEQ ID NO: 20503 - DNA, 260 bp, Unknown
  Description of Unknown: LeftRegion for integrase B7504 sequence
tttatcaattgtgatctctgaattattataataaaaaccgcccctgttggtagcagggacggctcaagaatctccgaagagattccgtactttggcaaagatattgtatcatcttcggagcagttacacaatcagaacatttgtgtggctgttatttttatacttaaaattacatattttataaaaccgaggtgatatttatgagcagtaaagtggcatgtctttacatccgcgtctcgacagaggaccaaacagaactt

SEQ ID NO: 20504 - DNA, 260 bp, Unknown; identical to SEQ ID NO: 20498
  Description of Unknown: LeftRegion for integrase B7505 sequence

SEQ ID NO: 20505 - DNA, 260 bp, Unknown
  Description of Unknown: LeftRegion for integrase B7506 sequence
tttatcaattgtgatctctgaattattataataaaaaccgcccctgttggtagcagggacggctcaagaatctccgaagagattccgtactttggcaaagatattgtatcatcttcggagcagttacacaatcagaacgtttgtgtgtctgttatttttatacttaaaattacatattttataaaaccgaggtgatatttatgagcagtaaagtggcatgtctttacatccgcgtctcgacagaggaccaaacagaactt

SEQ ID NO: 20506 - DNA, 260 bp, Unknown
  Description of Unknown: LeftRegion for integrase B7507 sequence
tttatcaattgtgatctctgaattattataataaaaaccgcccctgctggtaacagggacggatcaagaatctccgaagagatccagtactttggcaaagatattgtatcatcttcggagcagttacacaatcagaacgtttgtgtggctgttatttttatgcttaaaattacatattttataaaaccgaggtgatatttatgagtagtaaagtagcagctctctatatccgtgtctcgacagaggaccaaacagagtta

SEQ ID NO: 20507 - DNA, 260 bp, Unknown; identical to SEQ ID NO: 20498
  Description of Unknown: LeftRegion for integrase B7508 sequence

SEQ ID NO: 20508 - DNA, 260 bp, Unknown
  Description of Unknown: LeftRegion for integrase B7509 sequence
aaaaccgtccctgcgccaacaggaacggtttgcaccctgaccggataccagccaggactttactataacatctccggagatgctacaacttagagcaaagatattgtatcatcttcggaacagtcgcacaaccagaacatttgtgtggctgttatttttataccataaattacatattttataaaatcgaggtgatatttatgagtagcaaggtagcagctctctatagccgtgtctcgacagaggaccaaacagagtta

SEQ ID NO: 20509 - DNA, 260 bp, Unknown
  Description of Unknown: LeftRegion for integrase B7510 sequence
ttctttttcattatctcccacgacctttcttttatcggaaaagctgggcgcttttcaattataaaggtctggcaggtttgcaactactgttaaaaattggcaattaaaaacacccgcagtgctgggaacactccgggtgcggtgcaaagatatatcataccagatacaacataccgtctgcatttattatattatcacctgtggacgggaaattaaaggaaattgacaagaattgtggtgatattatgagaaacaaggaa

SEQ ID NO: 20510 - DNA, 260 bp, Unknown
  Description of Unknown: LeftRegion for integrase B7511 sequence
tgataattggcgtaatttgaataatctataaaataaaaaccggctcctgcgccaacagaaaccggtcagcatctccgaagagatacccttattagcaaagatattgtatcatcttcggagcagttacacaagccaaacgtttgtgtggctgttatttttatgcttaaaattacatattttataaaaccgaggtgatatttatgagtagtaaagtagcatgtctttacatccgcgtctcgacagaggaccaaacagagtta

SEQ ID NO: 20511 - DNA, 260 bp, Unknown
  Description of Unknown: LeftRegion for integrase B7512 sequence
tcgactaatcacacaaaaattcatataaaaaaccgcccctgcgctatcaacacaaggacggcaatcagaatctccgaagagatcctctcttttggcaaagatattgtatcatcttcggagcagttacacaatcagaacgtttgtgtggctgttatttttgtacttaaaattacatattttataaaaccgaggtgatatttatgagtagtaaagtagcagctctctatatccgtgtctcgacagaggaccaaacagagtta

SEQ ID NO: 20512 - DNA, 260 bp, Unknown
  Description of Unknown: LeftRegion for integrase B7513 sequence
tttatcaattgcgatctctgaattattataataaaaaccgcccctgctggtaacagggacggatcaagaatctccgaagagatccagtactttggcaaagatattgtatcatcttcggagcagttacacaatcagaacgtttgtgtggctgttatttttgtacttaaaattacatattttataaaaccgaggtgatatttatgagtagtaaagtagcagctctctatatccgtgtctcgacagaggaccaaacagagtta

SEQ ID NO: 20513 - DNA, 260 bp, Unknown
  Description of Unknown: LeftRegion for integrase B7514 sequence
ttatcaattgcgatctctgaattattataataaaaaccgcccccgctggtaacagggacggctcaagaatctccgaagagatccctttcttttggcaaagatattgtatcatcttcggagcagttacacaatcagaacatttgtgtggctgttatttttatacttaaaattacatattttataaaaccgaggtgatatttatgagcagtaaagtggcatgtctttacatccgcgtctcgacagaggaccaaacagaactt

SEQ ID NO: 20514 - DNA, 260 bp, Unknown
  Description of Unknown: LeftRegion for integrase B7515 sequence
ctgggcgcttttcaattataaaggtctggcaggtttgcaactactgttaaaaattggcaataaaaacacccgcagtgctgggaacactccgggtgcggtgcaaagatatatcataccagatacaacataccgtctgcacttattatattatcactgacagacgggaaataaaaggaaattgaaagaaagttggtgattttatgataccagccattgtgtatgcaagggcttctacggaccatcaagaatattccgtaaat

SEQ ID NO: 20515 - DNA, 260 bp, Unknown
  Description of Unknown: LeftRegion for integrase B7516 sequence
attgctcgggtgtcttttactttttaaataaaaaatcggctcagtgctgctaacaccgaaccgatcagatctccgaagagatgctcttgcgcaaacatattgtatcatcttcggaacagccatgcaagcggaatgaaatatttttccagctggctgttatttttgtacccatttttacataatttagacgaggtgatatcatggaaaatcgtgtaggtgcactctatgtgcgtgtctcgacagatgatcagacagatctc

SEQ ID NO: 20516 - DNA, 236 bp, Unknown
  Description of Unknown: LeftRegion for integrase B7517 sequence
cagtccttttttgatcttttaccttatcgactgattctattataccatgaatcgcattgcagaacaagcgttcttttctgttttttttgcaattcatctcccacctatagaggaaggagaattcttgctatatattatgttaaaattacatattttataaaaccgaggtgatatttatgagcagtaaagtggcatgtctttacatccgtgtctcgacagaggaccaaacagagtta

SEQ ID NO: 20517 - DNA, 260 bp, Unknown
  Description of Unknown: LeftRegion for integrase B7518 sequence
tttatcaattgtgatctctgaattattataataaaaaccgcccctgctggtaacagggacggatcaagaatctccgaagagatccagtactttggcaaagatattgtatcatcttcggagcagttacacaatcagaacgtttgtgtggctgttatttttatacttgaaattacatattttataaaaccgaggtgatatttatgagtagtaaagtagcagctctctatatccgtgtctcgacagaggaccaaacagagtta

SEQ ID NO: 20518 - DNA, 260 bp, Unknown
  Description of Unknown: LeftRegion for integrase B7519 sequence
ttatcaattgtgatctctgaattattataataaaaaccgcccctgttggtagcagggacggctcaagaatctccgaagagatccctttcttttggcaaagatattgtatcatcttcggagcagttacacaatcagaacgtttgtgtggctgttatttttatacttaaaattacatattttataaaaccgaggtgatatttatgagtagtaaagtagcagctctctatatccgtgtctcgacagaggaccaaacagagtta

SEQ ID NO: 20519 - DNA, 260 bp, Unknown
  Description of Unknown: LeftRegion for integrase B7520 sequence
tgtcaggtgcaagaaatagcaattaaataaaacaaaaccgcccctgctggtaacagggacggatcaagaatctccgaagagatccagtactttggcaaagatattgtatcatcttcggagcagttacacaatcagaacgtttgtgtggctgttatttttgtacttaaaattacatattttataaaaccgaggtgatatttatgagtagtaaagtggcatgtctttacatccgtgtctcgacagaggaccaaacagagtta

SEQ ID NO: 20520 - DNA, 260 bp, Unknown
  Description of Unknown: LeftRegion for integrase B7521 sequence
gctgggcgcttttcaattataaaggtctggcaggtttgcaactactgttaaaaattggcaataaaaacacccgcagtgctgggaacactccgggtgcggtgcaaagatatatcataccagatacaacataccgtctgcactattatattatcactgacagacgggaaataaaaggaaattgaaagaaagttggtgattttatgataccagccattgtgtatgcaagggcttctacggaccatcaagaatattccgtaaat

SEQ ID NO: 20521 - DNA, 260 bp, Unknown
  Description of Unknown: LeftRegion for integrase B7522 sequence
tttatcaattgtgatctctgaattattataataaaaaccgcccctgttggtaacagggacggatcaagaatctccgaagagatccagtactttggcaaagatattgtatcatcttcggagcagttgcacaatcagaacgtttgtgtggctgttatttttatacctaaaattacatattttataaaaccgaggtgatatttatgagcagtaaagtggcatgtctttacatccgcgtctcgacagaggaccaaacagaactt

SEQ ID NO: 20522 - DNA, 260 bp, Unknown
  Description of Unknown: LeftRegion for integrase B7523 sequence
tttctttttcattatctcccacgacctttcttttatcggaaaagctgggcgcttttcaattataaaggtctgtcaggtttgcaactactgttaaaaattggcaataaaaacacccgcagtgctgggaacactccgggtgcggtgcaaagatatatcataccagatacaacataccgtctgcatttattatattaccacctgtggacgggaaattaaaggaaattgacaagaattgtggtgatattatgagaaacaaggaa

SEQ ID NO: 20523 - DNA, 260 bp, Unknown
  Description of Unknown: LeftRegion for integrase B7524 sequence
ttggattgtaaccccataattcttgagcaaaaatcgtcccagtattggcgtactgagacgattagtagaatctccgaagagatcccgtactttggcaaagatattgtatcatcttcggagcagttacacaatcagaacatttgtgtggctgttatttttatacttaaaattacatattttataaaaccgaggtgatatttatgagtagtaaagtagcagctctctatatccgtgtctcgacagaggaccaaacagagtta

SEQ ID NO: 20524 - DNA, 260 bp, Unknown
  Description of Unknown: LeftRegion for integrase B7525 sequence
ttcattgataaatcagaaaataagagcctttacagacgacattctgaaaggttaataaaataaaatgccccggtcgtgctgggaacacttccggggtgtgcaaagatatatcataccagatacaacataccgtctgcgcttattatattatcacggcatgacgggaaataaaaggaaattgaaagaaagttggtgattttatgataccagccattgtgtatgcaagggcttctacggaccatcaagaatattccgtaaag

SEQ ID NO: 20525 - DNA, 260 bp, Unknown
  Description of Unknown: LeftRegion for integrase B7526 sequence
tgataattggcgtaatttgaataatctataaaataaaaaccggctcctgcgccaacagaaaccggtcagcatctccgaagagatacccttattagcaaagatattgtatcatcttcggagcagttgcacaatcagaacgtttgtgtggctgttatttttatacttaaaattacatattttataaaaccgaggtgatatttatgagcagtaaagtggcatgtctttacatccgcgtctcgacagaggaccaaacagagtta

SEQ ID NO: 20526 - DNA, 260 bp, Unknown; identical to SEQ ID NO: 20503
  Description of Unknown: LeftRegion for integrase B7527 sequence

SEQ ID NO: 20527 - DNA, 260 bp, Unknown
  Description of Unknown: LeftRegion for integrase B7528 sequence
ttatcaattgtgatctctgaattattataataaaaaccgcccctgttggtagcagggacggctcaagaatctccgaagagatccctttcttttggcaaagatattgtatcatcttcggagcagttacacaatcagaacgtttgtgtggctgttatttttgtgcttaaaattacatattttataaaaccgaggtgatatttatgagtagtaaagtagcagctctctatatccgtgtctcgacagaggaccaaacagagtta

SEQ ID NO: 20528 - DNA, 146 bp, Unknown
  Description of Unknown: LeftRegion for integrase B7529 sequence
aattcatctcccacctatagaggaaggagaattcttgctatatattatgttaaaattacatattttataaaaccgaggtgatatttatgagcagtaaagtggcatgtctttacatccgcgtctcgacagaggaccaaacagagtta

SEQ ID NO: 20529 - DNA, 260 bp, Unknown; identical to SEQ ID NO: 20503
  Description of Unknown: LeftRegion for integrase B7530 sequence

SEQ ID NO: 20530 - DNA, 109 bp, Unknown
  Description of Unknown: LeftRegion for integrase B7531 sequence
ctatatattatgttaaaattacatattttataaaaccgaggtgatatttatgagcagtaaagtggcatgtctttacatccgcgtctcgacagaggaccaaacagagtta

SEQ ID NO: 20531 - DNA, 260 bp, Unknown
  Description of Unknown: LeftRegion for integrase B7532 sequence
tttatcaattgtgatctctgaattattataataaaaaccgcccctgctggcaacagggacggatcaagaatctccgaagagatccagtactttagcaaggatattgtatcatcttcggagcagttgcacaatcagaacatttgtgtggctgttatttttataccataaattacatattttataaaaccgaggtgatatttatgagtagcaaggtagcggctctgtacatccgcgtcagcacagaggaccaaacagagtta

SEQ ID NO: 20532 - DNA, 260 bp, Unknown
  Description of Unknown: LeftRegion for integrase B7533 sequence
tgataattggcgtaatttgaataatctataaaataaaaaccggctcctgcgccaacagaaaccggtcagcatctccgaagagatacccttattagcaaagatattgtatcatcttcggagcagttacacaatcagaacgtttgtgtggctgttatttttgtacttaaaattacatattttataaaaccgaggtgatatttatgagtagtaaagtagcagctctctatatccgcgtctcgacagaggaccaaacagagtta

SEQ ID NO: 20533 - DNA, 260 bp, Unknown
  Description of Unknown: LeftRegion for integrase B7534 sequence
taaactttacaatctattaattcaataataaaatgcccccgcgctgacaacacagggacattaatcagaacctccgaagagatccttcttttagcaaaaaatattgtatcatcttcggagcagttacacaaccggaacgtttgtgtggctgttatttttatacttaaaattacatattttataaaaccgaggtgatatttatgagtagtaaagtagcagctctctatatccgtgtctcgacagaggaccaaacagagtta

SEQ ID NO: 20534 - DNA, 260 bp, Unknown
  Description of Unknown: LeftRegion for integrase B7535 sequence
ttatcaattgtgatctctgaattattataataaaaaccgcccctgttggtagcagggacggctcaagaatctccgaagagatccctttcttttggcagagatattgtatcatcttcggagcagttacacaatcagaacgtttgtgtggctgttatttttatacttaaaattacatattttataaaaccgaggtgatatttatgagtagtaaagtagcagctctctatatccgtgtctcgacagaggaccaaacagagtta

SEQ ID NO: 20535 - DNA, 260 bp, Unknown
  Description of Unknown: LeftRegion for integrase B7536 sequence
tctcacaactactttgaaatactttctagtgtcacttcacggtactaaaaacaatcagatatacactaattttgcaactagtatcatctgattcatcttcattacctacaccaaaaggataccccgcgaatgataaatagtcaacgaaatagaaaaatatttatattttttgtacctctattaagaaggagttaaaccacatgaaaagagtagcattgtatattcgtgtatcatctgacgagcaagccaagtttggtgat

SEQ ID NO: 20536 - DNA, 260 bp, Unknown
  Description of Unknown: LeftRegion for integrase B7537 sequence
tgtcaggtgcaagaaatagcaattaaataaaacaaaaccgcccctgctggtaacagggacggatcaagaatctccgaagagatccagtactttggcaaagatattgtatcatcttcggagcagttgcacaatcagaacatttgtgtggctgttatttttgtacttaaaattacatattttataaaatcgaggtgatatttatgagcagtaaagtggcatgtctttacatccgcgtctcgacagaggaccaaacagagtta

SEQ ID NO: 20537 - DNA, 260 bp, Unknown
  Description of Unknown: LeftRegion for integrase B7538 sequence
ttatcaattgtgatctctgaattattataataaaaaccgcccctgttggtagcagggacggctcaagaatctccgaagagatccctttcttttggcaaagatattgtatcatcttcggagcagttacacaatcagaacgtttgtgtggctgttatttttgtacgaaaaattacatattttataaaaccgaggtgatatttatgagtagtaaagtagcagctctctatatccgtgtctcgacagaggaccaaacagagtta

SEQ ID NO: 20538 - DNA, 260 bp, Unknown
  Description of Unknown: LeftRegion for integrase B7539 sequence
tttatcaattgtgatctctgaattattataacaaaaaccgcccctgttggtagcagggacggctcaagaatctccgaagagattccgtacttttgcaaagatattgtatcatcttcggagcagttacacaatcagaacatttgtgtggctgttatttttatgcttaaaattacatattttataaaaccgaggtgatatttatgagtagtaaagtagcagctctctatatccgtgtctcgacagaggaccaaacagagtta

SEQ ID NO: 20539 - DNA, 260 bp, Unknown
  Description of Unknown: LeftRegion for integrase B7540 sequence
ggggtcttttatttttttgaataatctataaaataaaaaccggctcctgcgccaacagaaaccggtcagcatctccgaagagatacccttattagcaaagatattgtatcatcttcggagcagttacacaatcagaacgtttgtgtggctgttatttttgtacttaaaattacatattttataaaaccgaggtgatatttatgagtagtaaagtagcagctctctatatccgtgtctcgacagaggaccaaacagagtta

SEQ ID NO: 20540 - DNA, 260 bp, Unknown; identical to SEQ ID NO: 20494
  Description of Unknown: LeftRegion for integrase B7541 sequence

SEQ ID NO: 20541 - DNA, 260 bp, Unknown
  Description of Unknown: LeftRegion for integrase B7542 sequence
tgagcagtctcttttctgctaattaaagtaaaccgcccttgcgctaccaacacaagggcgacaatcagaatctccgaagagatccagcactttagcaaagatattgtatcatcttcggagcagttacacaatcagaacatttgtgtggctgttatttttatacttaaaattacatattttataaaaccgaggtgatatttatgagcagtaaagtggcatgtctttacatccgcgtctcgacagaggaccaaacagagtta

SEQ ID NO: 20542 - DNA, 260 bp, Unknown
  Description of Unknown: LeftRegion for integrase B7543 sequence
aagaagcggagatgaatggtggtatacgactggaacagttacagttaaagacaaagaatattcattgggagtatatatgccagtgggtgaatatttcaactatgaatacattgcttttttcggcatttctgaaaacgaaataaaggatatattagattttacaactatatcttggcattttgacaaaaaggagaattgatatgaaaaaaaaaggaaaaagggtggcttgttacattcgtgtatcaacgcaagagcaaaag

SEQ ID NO: 20543 - DNA, 260 bp, Unknown; identical to SEQ ID NO: 20517
  Description of Unknown: LeftRegion for integrase B7544 sequence

SEQ ID NO: 20544 - DNA, 260 bp, Unknown; identical to SEQ ID NO: 20536
  Description of Unknown: LeftRegion for integrase B7545 sequence

SEQ ID NO: 20545 - DNA, 260 bp, Unknown; identical to SEQ ID NO: 20514
  Description of Unknown: LeftRegion for integrase B7546 sequence

SEQ ID NO: 20546 - DNA, 260 bp, Unknown
  Description of Unknown: LeftRegion for integrase B7547 sequence
ttctaaagaagttcaacaactagaaagcaaaaattaactatgaaaacaaaagcgatccctgcgccaacaggaaccgctttaacatagatcactcttatcaggtatactgaaagatataatccactccattccagattataccatttcagtggcacctgcacaagaggtgtattttttataccctttttggaggtactcttatgaaaaaagcagctatttatgtccgggtatctacccaggaacaggctcaagaaggtttt

SEQ ID NO: 20547 - DNA, 260 bp, Unknown; identical to SEQ ID NO: 20546
  Description of Unknown: LeftRegion for integrase B7548 sequence

SEQ ID NO: 20548 - DNA, 260 bp, Unknown; identical to SEQ ID NO: 20546
  Description of Unknown: LeftRegion for integrase B7549 sequence

SEQ ID NO: 20549 - DNA, 260 bp, Unknown
  Description of Unknown: LeftRegion for integrase B7550 sequence
aaaacttatatgtagtaaatgtggcagtaaactaaagcgcagaacatggaacagtggtaaaccttctcaaaagatagtatggcaatgtagcacgtatataaaagaaggaaaaaatgtctgtgaaggaacagttatagatgatgcgcttataacagcacttaatatagaagaagaaacagttataaaggagtgggtagtgaatggcgagaagcgttacctgtataccagcaaggcagacgatagcaactgaagggaataca

SEQ ID NO: 20550 - DNA, 260 bp, Unknown
  Description of Unknown: LeftRegion for integrase B7551 sequence
agaatacaaatcaaaataaatactcccctgcgccaacagaggagtaacaaagtgatacgccaatatcacatataaaaaaacttcgcctaaagtccttttacgtactttattttaccatataaagcacgtctaaggcaaatatataagataggacgtgtttttattatgccaatttgcataacaaagaaagggatggttgtatgagaaagaaaatacgtgtagcacaatatgagcgtgtttctcatgaagatcaaaaaaaa

SEQ ID NO: 20551 - DNA, 260 bp, Unknown
  Description of Unknown: LeftRegion for integrase B7552 sequence
ctgatttcgatgcgagcacgtatcaaaacaatatacctaatgatatagctgctggaatgaaagctaatataactttttacttctcttcaaaaggttctggtccatatgttgttacatttggagatggtatgtggaagtaataaatatctcttctctggtgagttcaagcgtgttcgattcacgctaagggcttcaatattatgaaaggagaaagtgaattggataaaaaagcagctatctatatccgtgtatccactcaa

SEQ ID NO: 20552 - DNA, 260 bp, Unknown
  Description of Unknown: LeftRegion for integrase B7553 sequence
acgactttgagaaccgcaaggagttggagggggataaggattcaactgcggcagtctaagatcgtaccaatcgaattacttagaagaaaagaagcattggaggtgagactatcaaagcggtaatctatgctcggtattcgagccacaatcaaagagaagaatccatcgaaggacaacttcgagagtgccatgagtttgccttgaaaaacggatttgtcgtggtgaatgaatatatagatcgtgcgatttcgggcaagacc

SEQ ID NO: 20553 - DNA, 260 bp, Unknown
  Description of Unknown: LeftRegion for integrase B7554 sequence
aaacgcaaataaattgaaaatgaagtctgtagcacagagtattgataatgacataaacaaataaaaaaatccctctgttccgctaagacagagggcgatagatacagcggtctaacgctataccttacttcgcaaataaagtatatcataagaccgccttatttgctatacattttttccaaataggaggtctttttttaatgcgagtaggattatatacaagggtatctacacaggaacaggctcaggaaggttattct

SEQ ID NO: 20554 - DNA, 260 bp, Unknown; identical to SEQ ID NO: 19972
  Description of Unknown: LeftRegion for integrase B7555 sequence

SEQ ID NO: 20555 - DNA, 260 bp, Unknown
  Description of Unknown: LeftRegion for integrase B7556 sequence
cattatgagattttaatatcataaataacaggcataaaggagtcgatttcgacgcctttagaaataaaaaaatccccctgtgccgctaacacagagggataaaagcagcggtcagtgaaccactacaaagaacatatttagtatatcataagaccgccttatttgctatacatttttttcaaataggaggtctttttttaatgcgagtaggattatatacaagggtatctacacaggaacaggctcaggaaggttattct

SEQ ID NO: 20556 - DNA, 260 bp, Unknown
  Description of Unknown: LeftRegion for integrase B7557 sequence
atggaaaaaacaaaaatgtgtaactttgcataaaaaccggcccctgcgccaacagagaccggctcgtacatccgaagatgacattcatttatgcaagaatattgtatcatcttcggggcagtcgttcaatcagaaactttgttcgactgttatttttgtacctaaaattacataatatctaaaaccgaggtgatgtttttatgaaaacaggtgctctatatatccgtgtcagtaccgatgatcaggcggagttgtctcct

SEQ ID NO: 20557 - DNA, 260 bp, Unknown
  Description of Unknown: LeftRegion for integrase B7558 sequence
tttcgatgcgagcacgtatcaaaacaatatacctaatgatatagctgctggaatgaaagctaatataactttttacttctcttcaaaaggttctggtccatatgttgttacatttggagatggtatgtggaagtaagtaataaatatctcttctctggtgagttcaagcgtgttcgattcacgctaagggcttcaatattatgaaaggagaaagtgaattggataaaaaagcagctatctatatccgtgtatccactcaa

SEQ ID NO: 20558 - DNA, 260 bp, Unknown
  Description of Unknown: LeftRegion for integrase B7559 sequence
aagattactattcaacagcaaccgatgtgagagataatatgtttgaattgaaaattattccttgcgaaacaaaagacgaattggataaaacagaaaaagaactaattgaacagtacgacgcatataacaaaggttataatagaacatcagggaatagttgaattaaaattatttcgacaacgaaaaaatgaggagaatcaatgcgagcaggactgcaaattcgtgtatccacacttgaacaagctatagaggggtactct

SEQ ID NO: 20559 - DNA, 260 bp, Unknown
  Description of Unknown: LeftRegion for integrase B7560 sequence
gttgataatatgaacgtaacttattcttttaacggaactgaaatttcgaagagcgagttgcagaaaatcgctatacacagcgaagctttccggcgtgttcaattaaggctgaaaagagaaagcgcaatgtcaagttgattgagattttcagcgggccgaggcaggacaacctcggcccgcctggtgcataggagattgatatggcaaagtctaaaatgaaaaaaatagttgctccagagcaactcactcaatcgatcgtt

SEQ ID NO: 20560 - DNA, 260 bp, Unknown
  Description of Unknown: LeftRegion for integrase B7561 sequence
acctggggaaaagacatggaaggttattccacattgattatgtataagtaaagaaaataaaacacccctgcggtgctgggaacaccacaagggcttgtgcaaagatatatcataccagatacaacataccatctgcattgctattatagcacatgcaggcgggaaataacaggaaatgaaaaggcaggtgctataatgatatgatgaaaaaaattgctgttctttatatgagaatgtccaccgatatgcaggaacattcc

SEQ ID NO: 20561 - DNA, 260 bp, Unknown
  Description of Unknown: LeftRegion for integrase B7562 sequence
taaacttatttgtagtaaatgtggcagtaaactaaagcacagaatatggaatagtggtaagccatctcaaaagatagtatggcaatgtagcaaatatattaaagaaggaaaagatgcctgtgaaggaacagttatagaggatgctcttattacagcacttaatataaaggaagaaacaattgtaaaggagtgtttagttgatggcaagaagtattacacatataccagcaaggcagactgtagtaacaactaataataac

SEQ ID NO: 20562 - DNA, 260 bp, Unknown
  Description of Unknown: LeftRegion for integrase B7563 sequence
ctattctttaaaaataaagaaaacttgatatttcttatattataccctaataaacagaaaaagtaaacttgcttgcataattttttcttccaaaatttaatgtctatgatcttattattgctaaatacattttgacatcgcgaacgtataataatataatccttataacgacgtttgttttataaaaaggagatgtttgtatgcttgagaaaatcttaagagtagcgttatatatacgtgtttccactcaggaacaagtt

SEQ ID NO: 20563 - DNA, 260 bp, Unknown
  Description of Unknown: LeftRegion for integrase B7564 sequence
ttacgagaaaagcagtttattatgcgagagtttcaaccgaggaagagaaacaaataaatgcattaaaaaaacagagagaagaacttgaagcattcattaattcgcatgaagattgggttttagtcgatcactattatgacgaggggaagtctggtactacacgcaatgggcgagagggatacaataggctatttgaagatatgctcgaaaataaattcgatatcatcgtcattaaggatcaaagccgcttgatgcgtaat

SEQ ID NO: 20564 - DNA, 260 bp, Unknown
  Description of Unknown: LeftRegion for integrase B7565 sequence
ttacgaaaaaagcagtttattatgcgagagtttcaaccgaggaagagaaacaaataaatgcattaaaaaaacagagagaagaacttgaagcattcattaattcgcatgaagattgggttttagtcgatcactattatgacgagggaaagtctggtactacacgcaatggacgagagggatacaataggctatttgaagatatgctcgaaaacaaattcgatatcatcgtcattaaggatcaaagccgcttgatgcgtaat

SEQ ID NO: 20565 - DNA, 260 bp, Unknown
  Description of Unknown: LeftRegion for integrase B7566 sequence
tatcactttctttgctaaaaaatgaataaggtgctactataacaatatattagggaattattcctaaactttttttcatattcgctattcatatttgaatagtaaacttgaaatcttataattataagtggcacctattttatataggtgtctttttttatgcgataaattcttaggtagcatcatcttttaaaggagtgatgtattatgaacgtagctatttacgttcgtgtcaggtgagttcctatgagcaagcaacg

SEQ ID NO: 20566 - DNA, 260 bp, Unknown
  Description of Unknown: LeftRegion for integrase B7567 sequence
ataagaaaaacgcattagaaagtgcaaaatcttatcaagaagatatgaatatgtctaaagatgcaatttacgatcaattaatttcaaattctggcgataaatttacagaagaagaagcgcaatatgcagtggatcatttagacgaataatttatgggtagcttgtctacccttattatttttttacttttttaaggagtgatgtattatgaacgtagctatttacgttcgtgtcaggtgagttcctatgagcaagcaacg

SEQ ID NO: 20567 - DNA, 260 bp, Unknown
  Description of Unknown: LeftRegion for integrase B7568 sequence
acatgatgttaaactggcggcggccagaaagccaccgccctgctaaaaaaacaagataaaaatacccctgcggtgctgggaacaccacaagggcttgtgcaaagatatatcataccagatacaacataccatctgcattgctattatagcacatgcaggcgggaaataacaggaaatgaaaaggcaggtgctataatgatatgatgaaaaaaattgctgttctttatatgagaatgtccaccgatatgcaggaacattcc

SEQ ID NO: 20568 - DNA, 260 bp, Unknown
  Description of Unknown: LeftRegion for integrase B7569 sequence
aggcagaaatacaaatccctaccgtaaaaatagactaacaaaaacttgtcgttttttcaacgaggttgttaaaaactataaaaataaattaaggagattgtacaacgaaatgccgacaattaaatttttcagaacaagttttcgttctattacaataaacaaagattgtcgatttgacgactcaacaaacgaggtgaaaaatgcgggcaggtttgcaaattcgcgtatcaactcttgaacaggctattgacggctattcg

SEQ ID NO: 20569 - DNA, 260 bp, Unknown; identical to SEQ ID NO: 20564
  Description of Unknown: LeftRegion for integrase B7570 sequence

SEQ ID NO: 20570 - DNA, 260 bp, Unknown
  Description of Unknown: LeftRegion for integrase B7571 sequence
gcgaaatcaataaacgaatttcttgctttccgcaaatataaaattttatataataaaggaaccgtatcaaaagcagacgcagacaagaaagcaatggcagaatacgatatgttcaataaaacgcaaagaataaattccgactttgacagagaagtcaaaaaattattagcaactcaaaagaacgattcaaagaggtaatcatgcgagcaggactgcaaattcgagtatccacacttgaacaagctatcgagggatactct

SEQ ID NO: 20571 - DNA, 260 bp, Unknown
  Description of Unknown: LeftRegion for integrase B7572 sequence
agcttgagggggataagggagcaactgcggcggtgtgataagctcattccattcgctttgatacatagaaagaagatattggaggtgagactatcaaagcagtaatttatgctcgttactcgagccataatcaacgagaagaatccatcgagggtcagcttcgagagtgccatgagttcgctctcaagaatgacttcatcgtggttgacgaatatatcgaccgggcaatctccggcaagactgataaccgacccagcttt

SEQ ID NO: 20572 - DNA, 260 bp, Unknown; identical to SEQ ID NO: 20560
  Description of Unknown: LeftRegion for integrase B7573 sequence

SEQ ID NO: 20573 - DNA, 260 bp, Unknown
  Description of Unknown: LeftRegion for integrase B7574 sequence
gttgataatatgaacgtaacttattcttttaacggaactgaaatttcgaagagcgagttgcagaaaatcgctatacacagcgaagctttccggcgtgttcagttaaggctgaaaagagaaagctccatggcgagttgatcgacatttgtggcgggccgaggcacaacaaccttggcccgcctgatatataggagattgacatggctaagtctaaaatgaaaaaaatagttgctccagagcatctcgcgcaatcgattgtt

SEQ ID NO: 20574 - DNA, 260 bp, Unknown
  Description of Unknown: LeftRegion for integrase B7575 sequence
acaaattattagaattacagtaaaatactaaaaaatccccggtgttaccagcaccagggaaaacgagaaaactatagggtgtttggaacacagtacaattctctccctcacaaagattattgtatcacaaaaatccggcaccgtataggtgttatttttgtacccatttttacgtacacttaagaaggaaaggtgatacaatgagcgtaaaatatgcatacggctacatccgggtatccactcatgatcaggaagagatc

SEQ ID NO: 20575 - DNA, 260 bp, Unknown
  Description of Unknown: LeftRegion for integrase B7576 sequence
cgggcctcccacacaaatatgcgcaagcattgcccctctcttaaacacaaaaggccgcccccgtgttggcgcacgggaacggccaaagaacgcgctgcacggcaaaaactgccatactttacgccctcacagcacaaagtatagcacaaaaacgccgcgcggcatagtacctttatacaatttcgcggggtgtttttattatgttgtacggaaaaccacaaaattatgcgtggtatcgcgcaagagttattttatacata

SEQ ID NO: 20576 - DNA, 260 bp, Unknown
  Description of Unknown: LeftRegion for integrase B7577 sequence
ggcgggcctcccacacaaaaacacgcacaactgccccctttacaaacagaaaaggccgcccccgtgttggcgcacggaaacggccaaagaacgcgctgcacggcttttgtgccatacttcacgccctcacagcagaaagtatagcacaaaaacgccgcgcggcatagtacctttgtacaatttcgcggggtgtttttattatgttgtacggtaaaccgcaaaattattcgtggtatcgtgcgcgggtggtgctttatatc

SEQ ID NO: 20577 - DNA, 260 bp, Unknown
  Description of Unknown: LeftRegion for integrase B7578 sequence
cgggcctcccacacaaatatgcgcaagcattgcccctctcttaaacacaaaaggccgcccccgtgttggcgcacgggaacggccaaagaacgcgctgcacggcaaaaactgccatactttacgccctcacagaacaaagtatagcacaaaaacgccgcgcggcatagtacctttatacaatttcgcggggtgtttttattatgttgtacggaaaaccacaaaattatgcgtggtatcgcgcaagagttattttatacata

SEQ ID NO: 20578 - DNA, 260 bp, Unknown
  Description of Unknown: LeftRegion for integrase B7579 sequence
ctggcctcccacacaaatatgcgcaagcgttgcccctctcttaaacacaaaaaggccgcccccgtgttggcgcacggaaacggccaaagaacgcgctgcacggcttttgtgccatacttcacgccctcacagcacaaagtatagcacaaaaacgccgcgcggcatagtacctttgtacaatttcgcggggtgtctttattatgttgtacggaaaaccacaaaattatgcgtggtatcgcgcaagagttattttatacata

SEQ ID NO: 20579 - DNA, 260 bp, Unknown
  Description of Unknown: LeftRegion for integrase B7580 sequence
ggcgggcctcccacacatatacacgcaccattaccccctataaaagcaaaagggccgcccccgtgttggcgcacgggaacggccaaagaacgcgctgcacggcaaaaactgccatacttcacgccccacagcagaaagtatagcacaaaaacgccgcgcggcatagtacctttgtacaatttcgcggggtgttttttgttatgttgtacggtaaaccgcaaaattattcgtggtatcgtgcgcgggtggttctttatatc

SEQ ID NO: 20580 - DNA, 260 bp, Unknown
  Description of Unknown: LeftRegion for integrase B7581 sequence
attatggagaagatattcctactgatgaaacaatggaagaggtaaaagaagtttatggtattcttccagtggataaattaaaaggagttatggagttagaaaaattaatagcataggaggacatatgaaatataaacaagaaataatagaacttttacacaaaataagagataaacaacttaaaagagaggtaaaagaaaatgaaaaagctgagagcgatagcttattgtagagtttctactgttactcaagaagaggga

SEQ ID NO: 20581 - DNA, 260 bp, Unknown
  Description of Unknown: LeftRegion for integrase B7582 sequence
ctcgtagcaatacggggtcttttacgttaaagaaaaaccgccccggcgctaccaacaccaggacggcttaatacatatccgaagatatgcaagtactttgatcgataatattgtatcatcttcggaacagccttacaatccagaacttttgttctgttttggctgttattattatacaattacataaaggagatgataccgtgtctgaaaaaatcaaacgctgcgctatttacattcgtgtatccacatcagagcagctc

SEQ ID NO: 20582 - DNA, 260 bp, Unknown; identical to SEQ ID NO: 20581
  Description of Unknown: LeftRegion for integrase B7583 sequence

SEQ ID NO: 20583 - DNA, 260 bp, Unknown
  Description of Unknown: LeftRegion for integrase B7584 sequence
tggcgggcctcccacacatatacacgcaccattgccccctataaaagcaaaagggccgcccccgtgttggcgcacggaaacggccaaagaacgcgctgcacggcttttgtgccatacttcacgccctcacagcagaaagtatagcacaaaaacgccgcgcggcatagtacctttgtacaatttcgcggggtgtttttattatgttgtacggtaaaccgcaaaattattcgtggtatcgcgcgcgggttgtgctttatatc

SEQ ID NO: 20584 - DNA, 260 bp, Unknown; identical to SEQ ID NO: 20575
  Description of Unknown: LeftRegion for integrase B7585 sequence

SEQ ID NO: 20585 - DNA, 260 bp, Unknown
  Description of Unknown: LeftRegion for integrase B7586 sequence
ggcgggcctcccacacatatacacgcaccattaccccctacaaaagcaaaagggccgcccccgtgttggcgcacgggaacggccaaagaacgcgctgcacggcaaaaactgccatacttcacgccccacagcacaaagtatagcacaaaaacgccgcgcggcatagtacctttgtacaatttcgcggggtgttttttattatgttgtacggtaaaccgcaaaattattcgtggtatcgtgcgcgggtggttctttatatc

SEQ ID NO: 20586 - DNA, 260 bp, Unknown
  Description of Unknown: LeftRegion for integrase B7587 sequence
tgaaaagaacgccagcgttaaaaatcaataaagaaaaagagcagtcaccctgctaaatgactgcccctttttgtttcaccgtgttgtcgtggtctcaacatgtaaaacggattgctctgttattatatcacagacctacgattttgcataggtctattttttatacccttttttattttttgagggagaaagaaggtaatatggctagtaatttctttgcaccgcagccggagctgtttggccggcgtgttgtgaaatat

SEQ ID NO: 20587 - DNA, 260 bp, Unknown
  Description of Unknown: LeftRegion for integrase B7588 sequence
ggtgccctttataatttttcccaatggccaaatcgcgcaagatgctgtttatgatattcatagtttgtttcctccttggttgtcaaaagcattctatggcagaaatcgtcacaaaacagcttttccagtttttatttatgtttttcggcgctttcaagcaaaaaacgccatatttcaaacatgtcatgcgaggtgtgatgatgtatcaagatatcacaacagtttgcggatatgtccgcgtatcgaccgaaaatcaattg

SEQ ID NO: 20588 - DNA, 260 bp, Unknown; identical to SEQ ID NO: 20585
  Description of Unknown: LeftRegion for integrase B7589 sequence

SEQ ID NO: 20589 - DNA, 260 bp, Unknown; identical to SEQ ID NO: 20585
  Description of Unknown: LeftRegion for integrase B7590 sequence

SEQ ID NO: 20590 - DNA, 260 bp, Unknown; identical to SEQ ID NO: 20575
  Description of Unknown: LeftRegion for integrase B7591 sequence

SEQ ID NO: 20591 - DNA, 260 bp, Unknown; identical to SEQ ID NO: 20585
  Description of Unknown: LeftRegion for integrase B7592 sequence

SEQ ID NO: 20592 - DNA, 260 bp, Unknown
  Description of Unknown: LeftRegion for integrase B7593 sequence
gcgggcctcccacacaaatatgcgcaagcattgcccctctcttaaacacaaaaggccgcccccgtgttggcgcacggaaacggccaaagaacgcgctgcacggcttttgtgccatacttcacgccctcacagcagaaagtatagcacaaaaacgccgcgcggcatagtacctttgtacaatttcgcggggtgtttttattatgttgtacggaaaaccacaaaattatgcgtggtatcgcgcaagagttattttatacata

SEQ ID NO: 20593 - DNA, 260 bp, Unknown
  Description of Unknown: LeftRegion for integrase B7594 sequence
ttatacaggtccggaaataatttgtcaaatcacataaatagaaaaaccgcccggtgttaccagcaccgaacggattttcatagattttctcttgccggatgctccggaaagatataatcagcctgaacaactgaattatatcatcttccaggcatctcggcaaggggtgtattttttatacctttttctggaggtgttatatgaaaaaagtcgctatttacgtccgggtctccacccaggaacaggccgttgaaggatat

SEQ ID NO: 20594 - DNA, 260 bp, Unknown
  Description of Unknown: LeftRegion for integrase B7595 sequence
tggcgggcctcccacacatatacacgcaccattaccccctacaaaagcaaaagggccgtccccgtgttggcgcacgggaacggccaaagaacgcgctgcacggcaaaaactgccatacttcacgccccacagcacaaagtatagcacaaaaacgccgcgcggcatagtacctttgtacaatttcgcggggtgtttttattatgttgtacggtaaaccgcaaaattattcgtggtatcgtgcgcgggtggtgctttatatc

SEQ ID NO: 20595 - DNA, 260 bp, Unknown
  Description of Unknown: LeftRegion for integrase B7596 sequence
cgggcctcccacacaaatatgcgcaagcattgcccctctcttaaacgcaaaaggccgcccccgtgttggcgcacgggaacggccaaagaacgcgctgcacggcaaaaactgccatactttacgccctcacagcacaaagtatagcacaaaaacgccgcgcggcatagtacctttatacaatttcgcggggtgtttttattatgttgtacggaaaaccacaaaattatgcgtggtatcgcgcaagagttattttatacata

SEQ ID NO: 20596 - DNA, 260 bp, Unknown
  Description of Unknown: LeftRegion for integrase B7597 sequence
tggcgggcctcccacacatatacacgcaccattgccccctataaaagcaaaagggccgcccccgtgttggcgcacggaaacggccaaagaacgcgctgcacggcttttgtgccatacttcacgccctcacagcagaaagtatagcacaaaaacgccgcgcggcatagtacctttgtacaatttcgcggggtgtttttattatgttgtacggtaaaccgcaaaattattcgtggtatcgcgcgcgggtggtgctttatatc

SEQ ID NO: 20597 - DNA, 260 bp, Unknown
  Description of Unknown: LeftRegion for integrase B7598 sequence
gatacttagaccattatgatggcgaagatcatgtagattatgatattgattaaaaaaagagaaatatgttctagtttgcgacaaggtacatatttctcactcataatcactattgaaaatgattactttattattatacatgataaagtctctattttcaatagtaaaaaataaattatttggaaatagaggtattttttatggttaaagaaataaataataatatgaatgattttacaaaaaaagttgaagaagtagct

SEQ ID NO: 20598 - DNA, 260 bp, Unknown
  Description of Unknown: LeftRegion for integrase B7599 sequence
ctgttcttattgtaggagtggtaaaacaattaaaaagagaatattaataaacaaaaagagaaatatgttactagtttgcgacaaggtacatatttctcactcataatcactattgaaaatgattactttattattatacatgataaagtctctattttcaatagtaaaaaataaattattgagaaatagaggtattttttatggataaaaaaataaataataatatgaatgattttacgaaaaaagttgaagaagtagct

SEQ ID NO: 20599 - DNA, 260 bp, Unknown
  Description of Unknown: LeftRegion for integrase B7600 sequence
gcgggcctcccacacaaatatgcgcaagcattgcccctctcttaaacacaaaaggccgctcccgtgttggcgcacgggaacggccaaagaacgcgctgcacggcaaaaactgccatacttcacgccccacagcacaaagtatagcacaaaaacgccgcgcggcatagtacctttatacaatttcgcggggtgtttttattatgttgtacggaaaaccgcaaaattatgcgtggtatcgcgcaagagttattctatacata

SEQ ID NO: 20600 - DNA, 260 bp, Unknown
  Description of Unknown: LeftRegion for integrase B7601 sequence
gcgggcctcccacacaaatatgcgcaagcattgcccctctcttaaacacaaaaggccgcccccgtgttggcgcacgggaacggccaaagaacgcgctgcacggcaaaaactgccatacttcacgccccacagcacaaagtatagcacaaaaacgccgcgcggcatagtacctttatacaatttcgcggggtgtttttattatgttgtacggaaaaccacaaaattatgcgtggtatcgcgcaagagttattttatacata

SEQ ID NO: 20601 - DNA, 260 bp, Unknown
  Description of Unknown: LeftRegion for integrase B7602 sequence
gatacttagaccattatgatggcgaagatcatgtagattatgatattgattaaaaaaagagaaatatgttctagtttgcgacaaggtacatatttctcactcataatcactattgaaaatgattactttattattatacatgataaagtctctattttcaatagtaaaaaataaattattgggaaatagaggtattttttatggataaaaaaataaataataatatgaatgattttacgaaaaaagttgaagaagtagct

SEQ ID NO: 20602 - DNA, 260 bp, Unknown
  Description of Unknown: LeftRegion for integrase B7603 sequence
agttgaattaaactatggaattgatattgcattagaattatatgaacaataaaaaaagacttactgctggaacagtaagccgaatgaaaaatcacaaattagtcgctaaactaaataaacaaaataaggttataatgtttatggatttttctatatcattataacaaattttcaataaaaagaaaagaggttataataaaatgaataaaataattagagttggaatatatataagagtatctactgaggaacaagccaaa

SEQ ID NO: 20603 - DNA, 260 bp, Unknown
  Description of Unknown: LeftRegion for integrase B7604 sequence
tggcgggcctcccacacatatacacgcaccattgccccctataaaagcaaaagggccgcccccgtgttggcgcacggaaacggccaaagaacgcgctgcacggcttttgtgccatacttcacgccctcacagcagaaagtatagcacaaaaacgccgcgcggcatagtacctttatacaatttcgcggggtgtttttattatgttgtacggaaaaccacaaaattatgcgtggtatcgcgcaagagttattttatacata

SEQ ID NO: 20604 - DNA, 260 bp, Unknown
  Description of Unknown: LeftRegion for integrase B7605 sequence
tgaggatttgaaaatctgtatttcagatactttataaaaaaaccgccccggcgcgccaacaccaggacgggatacatatccgaagatatgcgtatattaagtcaaaaatattgtatcatcttcggaacagccttacaatccagaacttttgttctgttttggctgttattattatacaattacataaaggagatgataccgtgtctgaaaaaatcaaacgctgcgctatttacattcgtgtatccacatcagagcagctc

SEQ ID NO: 20605 - DNA, 260 bp, Unknown; identical to SEQ ID NO: 20585
  Description of Unknown: LeftRegion for integrase B7606 sequence

SEQ ID NO: 20606 - DNA, 260 bp, Unknown
  Description of Unknown: LeftRegion for integrase B7607 sequence
gatacttagaccattatgatggcgaagatcatgtagattatgatatcgattaaaaaaagagaaatatgttctagtttgcgacaaggtacatatttctcactcataatcactattgaaaatgattactttattattatacatgataaagtctctattttcaatagtaaaaaataaattatttggaaatagaggtattttttatggttaaagaaataaataataatatgaatgattttacaaaaaaagttgaagaagtagct

SEQ ID NO: 20607 - DNA, 260 bp, Unknown
  Description of Unknown: LeftRegion for integrase B7608 sequence
ggcgggcctcccacacatatacacgcaccattgccccctataaaagcaaaaagggccgcccccgtgttggcgcacggaaacggccaaagaacgcgctgcacggcttttgtgccatacttcacgccctcacagcagaaagtatagcacaaaaacgccgcgcggcatagtacctttgtacaatttcgcggggtgtttttattatgttgtacggtaaaccgcaaaattatgcgtggtatcgtgcgcgggtggtgctttatatc

SEQ ID NO: 20608 - DNA, 260 bp, Unknown
  Description of Unknown: LeftRegion for integrase B7609 sequence
gatacttagaccattatgatggcgaagatcatgtagattatgatattgattaaaaaaagagaaatatgttctagtttgcgacaaggtacatatttctcactcataatcactattgaaaatgattactttattattatacatgataaagtctctattttcaatagtaaaaaataaattatttggaaatagaggtattttttatggttaaagaaataaataataatatgaatgattttacgaaaaaagttgaagaagtagct

SEQ ID NO: 20609 - DNA, 260 bp, Unknown
  Description of Unknown: LeftRegion for integrase B7610 sequence
tcgggcctcccacacaaatatgcgcaagcattgcccctctcttaaatacaaaaagccgcccccgtgttggcgcacgggaacggccaaagaacgcgctgcacggcaaaaactgccatacttcacgccccacagcacaaagtatagcacaaaaacgccgcgcggcatagtacctttatacaatttcgcggggtgtttttattatgttgtacggaaaaccacaaaattatgcgtggtatcgcgcaagagttattctatacata

SEQ ID NO: 20610 - DNA, 260 bp, Unknown
  Description of Unknown: LeftRegion for integrase B7611 sequence
ctggcctcccacacaaatatgcgcaagcactgcccctctcttaaacacaaaaaggccgcccccgtgttggcgcacggaaacggccaaagaacgcgctgcacggcttttgtgccatacttcacgccctcacagcacaaagtatagcacaaaaacgccgcgcggcatagtacctttgtacaatttcgcggggtgtttttattatgttgtacggaaagccacaaaattatgcgtggtatcgcgcaagagttattttatacata

SEQ ID NO: 20611 - DNA, 260 bp, Unknown
  Description of Unknown: LeftRegion for integrase B7612 sequence
ctggcgggcctcccacacatatacacgcaccattgccccctataaaagcaaaagggccgcccccgtgttggcgcacggaaacggccaaagaacgcgctgcacggcttttgtgccatacttcacgccctcacagcagaaagtatagcacaaaaacgccgcgcggcatagtaccttgtacaatttcgcggggtgtttttattatgttgtacggtaaaccgcaaaattattcgtggtatcgtgcgcgggtggtgctttatatc

SEQ ID NO: 20612 - DNA, 260 bp, Unknown
  Description of Unknown: LeftRegion for integrase B7613 sequence
tttgaaaatctgtatttcagatactttataaaaaaccgccccggcgctaccaacaccaggacggcaatagaccactgttccgaagattacagtagtacgttcaaaaaatattgtatcatcttcggaacagccttacaatccagaacttttgttctgttttggctgttattattatacaattacataaaggagatgataccgtgtctgaaaaaatcaaacgctgcgctatttacattcgtgtatccacatcagagcagctc

SEQ ID NO: 20613 - DNA, 260 bp, Unknown
  Description of Unknown: LeftRegion for integrase B7614 sequence
tacgggcctcccacacaaaaacacgcacaactgccccctttacaaacagaaaaggccgcccccgtgttggcgcacggaaacggccaaagaacgcgctgcacggcttttgtgccatacttcacgccctcacagcagaaagtatagcacaaaaacgccgcgcggcatagtacctttgtacaatttcgcggggtgtttttattatgttgtacggtaaaccgcaaaattatgcgtggtatcgcgcgcgggtggtgctttatatc

SEQ ID NO: 20614 - DNA, 260 bp, Unknown
  Description of Unknown: LeftRegion for integrase B7615 sequence
gtgccagaagataaaattaacgaaattctcggaacaaattctgatacagaataaacttaaaaaatcccccttcccgctaccaacaggaaaggagattcatatagcggtcataccgtggtataatccgccctcgacaagcagattataacacaagaccgctttatttgctatacccaaaatcaaataaaggaggtctgaatatgttaaaagcagcattatacgcccgtgtatcctctgaggaacaggcgaaacgggaaaac

SEQ ID NO: 20615 - DNA, 260 bp, Unknown
  Description of Unknown: LeftRegion for integrase B7616 sequence
gagaatacgcacgtggctttcgttccgtgcgagggacagaatattgagattgaaaatgaccggattcggctggtgattacggatgctcgccagattgacttccaaagctaccagccccacccagagggcgaatttaccgaggagcagcgcacctgccgtaactggatcttcgccaactacctgttagacgggatgccgctgtgagacgggcagccctctatatccgcgtttccacgctggaacaggcacaagagggctac

SEQ ID NO: 20616 - DNA, 260 bp, Unknown; identical to SEQ ID NO: 18298
  Description of Unknown: LeftRegion for integrase B7617 sequence

SEQ ID NO: 20617 - DNA, 260 bp, Unknown
  Description of Unknown: LeftRegion for integrase B7618 sequence
tccgcaatcctgattgtcatttccgctgtttttctggctccgccgttttccaaagtaaataagatttcaaagggtacccgggttgctgttataatcgttacatttatagcagcgttctgggtatcgctaaaatagattatatttccccggtgccgcgcatgacggtttccggggaaaattgtataaaaatggagatcgcaatggacaaggcagtatttatttatacccgcgtatcaacgcgtgagcaggcagacgagggc

SEQ ID NO: 20618 - DNA, 260 bp, Unknown; identical to SEQ ID NO: 20614
  Description of Unknown: LeftRegion for integrase B7619 sequence

SEQ ID NO: 20619 - DNA, 260 bp, Unknown; identical to SEQ ID NO: 18298
  Description of Unknown: LeftRegion for integrase B7620 sequence

SEQ ID NO: 20620 - DNA, 260 bp, Unknown; identical to SEQ ID NO: 20614
  Description of Unknown: LeftRegion for integrase B7621 sequence

SEQ ID NO: 20621 - DNA, 260 bp, Unknown
  Description of Unknown: LeftRegion for integrase B7622 sequence
ggcaatccgacctaaaacacaatacataaacagtctcaggtagtttcaattttaaagcaaaaaaatcccctctcctgcgccaacaggaaagaggattcatatagcggtcataccatggtataatccgccctcgacaagcagattataacacaagaccgctttatttgctatacctaaaatcaaataaaggaggtctgaatatgttaaaagcagcattatatgcccgcgtatcctctgaggagcaggcaaaacgggaaaac

SEQ ID NO: 20622 - DNA, 260 bp, Unknown
  Description of Unknown: LeftRegion for integrase B7623 sequence
gtttctcatgtggaaaacaacatcagcagcggagccctgaacaacagctcgttcatccaagcgaatcatggcggcatcgtcgagagctcgtcctctgctccatcacctgaagcggcagaactcctaaaaatctacgattctctcggaggccgagaccgcctgaagctcttgaatttcgcagtcgaaatggttgacggcaaatgaaacgagcagcagtttatatccgcgtatcgacacaggaacaggcgcaggagggctac

SEQ ID NO: 20623 - DNA, 260 bp, Unknown
  Description of Unknown: LeftRegion for integrase B7624 sequence
tctgcaatcctgattgtcgtttctgctgttttcatggctccgccgttttccaaagtaaataagatttcaaagggtacgcggattgctgttgtaatcgttacatttatagcggcattctgggtatcgctaaaatagattatatttccccggtgccgcgcatgacggttgccggggaaaattgtataaaaatggagatagcaatggacaaggcagtatttatttatacccgcgtgtctactcgtgagcaggcggacgaggga

SEQ ID NO: 20624 - DNA, 260 bp, Unknown
  Description of Unknown: LeftRegion for integrase B7625 sequence
gaaatggatgaaataacagaaggatctcaagagagtcttgaatattggctaggtcaataaaaaaagagccagtactgcgaatactgactcaaaatggattcttatccaatcaaccacgatttaataaggaaatcctctttaattttaacataaaaggacttccttatcaataaatttgtaaagaaaaggaagtgttaaaattgaatttagaactaaataaaataataaaagtagctttatatacaagagtatcaacaata

SEQ ID NO: 20625 - DNA, 260 bp, Unknown
  Description of Unknown: LeftRegion for integrase B7626 sequence
gaaaatacgcacgttgctttcgtaccatgtgagggtcagaatatcgagattgacaacgaccggattcggctggtaatcaccgatgctcgccagatagactttcagagctaccaaccccatccagagggcgagtttacagaggaacagcgcacctgccgtaactggatattcgccaactacctgttagacgggatgccgctgtgaaacgcgcagccctctacatccgcgtctctacattggaacaggcgcaagagggctac

SEQ ID NO: 20626 - DNA, 260 bp, Unknown
  Description of Unknown: LeftRegion for integrase B7627 sequence
gagaatacgcacgtggctttcgttccgtgcgaggggcaaaatattgagattgaaaatgaccggattcggctggtgattacggatgctcgccagattgacttccaaagctaccagccccacccggagggcgaatttaccgaggaacagcgcacctgccgtaactggatcttcgccaactacctgttagacgggatgccgctgtgagacgggcagccctctatatccgcgtttctacgctggaacaggcacaagagggctac

SEQ ID NO: 20627 - DNA, 260 bp, Unknown
  Description of Unknown: LeftRegion for integrase B7628 sequence
gagaatatgcacgtggctttcgttccgtgcgagggacagaatatcgagattgaaaacgaccggattcggctggtgattacggatgctcgccagattgacttccaaagctaccagccccacccagagggcgaatttaccgaggagcagcgcacctgccgtaactggatcttcgccaactatctgttagacgggatgccgctgtgagacgggcagccctctatatccgagtttccacgctggaacaggcacaagagggctac

SEQ ID NO: 20628 - DNA, 260 bp, Unknown; identical to SEQ ID NO: 20623
  Description of Unknown: LeftRegion for integrase B7629 sequence

SEQ ID NO: 20629 - DNA, 260 bp, Unknown
  Description of Unknown: LeftRegion for integrase B7630 sequence
ggtgatagccctaagcaggatttagaagaatattcttcttttgtaagcaataaaatagcaacctttaccaacgatattttgaatgtctaatataaaaacacccgcagtgctgggaacactccgggtgcggtgcaaagatatatcataccagatacaacataccgtctgcatttattatattaccacctgcggacgggaaattgaaggaaattgacaagaaatgtggtgatattgtgtataaaaaagaacttgccccggat

SEQ ID NO: 20630 - DNA, 260 bp, Unknown; identical to SEQ ID NO: 17770
  Description of Unknown: LeftRegion for integrase B7631 sequence

SEQ ID NO: 20631 - DNA, 260 bp, Unknown
  Description of Unknown: LeftRegion for integrase B7632 sequence
gagaatacgcacgtggctttcgttccgtgcgagggacagaatattgagattgaaaatgaccggattcggctggtgattacggatgctcgccagattgacttccaaagctaccagcctcacccagagggcgaatttaccgaggagcagcgcacctgccgtaactggatcttcgccaactacctgttagacgggatgccgctgtgagacgggcagccctctatatccgcgtttccacgctggaacaggcacaagagggctac

SEQ ID NO: 20632 - DNA, 260 bp, Unknown
  Description of Unknown: LeftRegion for integrase B7633 sequence
attgaaaaatgggtttccttcttcggctccgcgacgttctattgctgaaaaaaccgccccggtgctaccaacaccgaagcggttcaggcgcccggcagtgctaccaacaccgctgagcaatgcagttcgcaacccaccacaataggggcattctgcgccttttatgatagcagatttgccccggaaaggcaaggacaaaaatggctcaatccagatctgccactgaaaaaattctccgagtggcgctttatccgcgcgta

SEQ ID NO: 20633 - DNA, 260 bp, Unknown
  Description of Unknown: LeftRegion for integrase B7634 sequence
tctgcaatcttgattgtcgtttctgctgttttcatggctccgccgttttcaaaagtcgataagatttcaaagggcacccgggttgctgttataatcgttacatttatagcagcgttctgggtctcgataaaatagattatatttccccggtgctgtcagtaacagttgccggggaaaattgtataaaaatggagatagcaatggacaaggcagtatttatttatacccgcgtatcaacgcgtgagcaggcagatgagggg

SEQ ID NO: 20634 - DNA, 184 bp, Unknown
  Description of Unknown: LeftRegion for integrase B7635 sequence
aggaacaaacgcttaatcgcggtttacatcagcgcggcgttaatcgggtgattttcatcagacacgtttaaatacaccatctaaagcgatacaatcgcgctattagtttttatggtggtaaagaatgaaacgtgtaatcagctacatcagattcagttctgagcgacaagccaaaggcgactca

SEQ ID NO: 20635 - DNA, 260 bp, Unknown
  Description of Unknown: LeftRegion for integrase B7636 sequence
tctgcaatcctgattgtcatttccgctgtttttctggctccgccgttttccaaagtaaataagatttcaaatggtacacgggttgctgttataatcgttacatttatagcagcgttctgggtatcgctaaaatagattatatttccccggtgccgcgcatgacggtttccggggaaaattgtataaaaatggagatagcaatggacaaggcagtatttatttatacccgcgtatccacgcgtgagcaggcagacgagggc

SEQ ID NO: 20636 - DNA, 260 bp, Unknown
  Description of Unknown: LeftRegion for integrase B7637 sequence
aaaatgcaattgattttcaaaataaaaagaaaattgaatcaaaataaaataaaaaaaagactccgtgctggaacacgaagtcaaaaatgaaaaacctatttaagctaccaaacttaaaaatacaatatagataactacaatgtacaagatttttctattacattgtagcataaaatttaataaaaaggaagtgttgcaatgtgaaaaaaattgtaaaaaatattactgaaactattattagagttgttttatatataaga

SEQ ID NO: 20637 - DNA, 260 bp, Unknown
  Description of Unknown: LeftRegion for integrase B7638 sequence
gctgtcggatactgataactgattaaataataataaggggtcgatttcgaccccactaaaaaaatcccccttcccgctaccaacaggaaaggagattcatatagcggtcataccgtggtataatccgccctcgacaagcagattataacacaagaccgctttatttgctatacccaaaatcaaataaaggaggtctgaatatgttaaaagcagcattatacgcccgtgtatcctctgaggaacaggcgaaacgggaaaac

SEQ ID NO: 20638 - DNA, 260 bp, Unknown; identical to SEQ ID NO: 20632
  Description of Unknown: LeftRegion for integrase B7639 sequence

SEQ ID NO: 20639 - DNA, 260 bp, Unknown; identical to SEQ ID NO: 20626
  Description of Unknown: LeftRegion for integrase B7640 sequence

SEQ ID NO: 20640 - DNA, 260 bp, Unknown
  Description of Unknown: LeftRegion for integrase B7641 sequence
gagaatacgcacgttgctttcgtcccatgtgaggggcagattattgagattgacaacgaccggattcggctggtaatcaccgatgctcgtcagatagactttcagagctaccagccccatccagagggcgaatttacagaagaacagcgcacctgccgtaactggatattcgccaactacctgttagacgggatgccgctgtgaaacgcgcagccctctacatccgcgtctctacactggaacaggcgcaagagggctac

SEQ ID NO: 20641 - DNA, 260 bp, Unknown
  Description of Unknown: LeftRegion for integrase B7642 sequence
ttgaaaaatgggtttccttcttcggctccgcgacgttctattgctgaaaaaaccgccccggtgctaccaacaccgaagcggttcaggcgcccagcagtgctaccaacaccgctgagcaatgcagttttaccaccaaccataataggggcattctgcgccttttatgatagcagatttgccccggaaatgcaaggacaaaaatggctcaatccagatctgccactgaaaaaattctccgagtggcgctctatccgcgtgta

SEQ ID NO: 20642 - DNA, 260 bp, Unknown
  Description of Unknown: LeftRegion for integrase B7643 sequence
accgggaagaattagaggggaataaagaatatactgaggtcagcgaagataattcctatcgagcttctcaggcgtaagagagcattggaggtgatactacgaaagcggtaatctatgccagatattcaagccataaccaacgagaggaatccatagagggacagcttcgggagtgtcacgactttgctctcaaaaacggaatgacaatcattggtgagtattgtgatagagcgatctcagggaagactgataaccgtcca

SEQ ID NO: 20643 - DNA, 260 bp, Unknown; identical to SEQ ID NO: 20631
  Description of Unknown: LeftRegion for integrase B7644 sequence

SEQ ID NO: 20644 - DNA, 260 bp, Unknown
  Description of Unknown: LeftRegion for integrase B7645 sequence
gggaatgtagagaacaatataaacgggtcactgtctaacagccccttcattcaggcaaaccacggcggcgtggtgtacaacggagacagcacaatctcacccgaggctttagagctgctccgtatttatgagaacctcagcggacgcagccgtctaaagttgctcaattttgccgtcgagcttgaaggaggcaaagactgatgaaccgcgcagccctctacatccgtgtttccacgctggaacaggcgcaggagggctat

SEQ ID NO: 20645 - DNA, 260 bp, Unknown
  Description of Unknown: LeftRegion for integrase B7646 sequence
gggaatgtagagaacaatataaacgggtcactgtctaacagccccttcattcaggcaaaccacggcggcgtggtgtacaacggagacagcacaatctcacccgaggctttagagctgctccgtatttatgagaacctcagcggacgcagccgtctaaagttgctcaattttgccgtcgagcttgaaggaggcaaagactgatgaaccgcgcagccctttacatccgtgtttccacgctggaacaggcgcaggagggctac

SEQ ID NO: 20646 - DNA, 260 bp, Unknown
  Description of Unknown: LeftRegion for integrase B7647 sequence
gggaatgtagagaacaatataaacgggtcactgtctaacagccccttcattcaggcaaaccacggcggcgtggtgtacaacggagacagcacaatctcacccgaggctttagagctgctccgtatttatgagaacctcagcggacgcaaccgcctaaagttgctcaattttgccgtcgagcttgaaggaggcaaagactgatgaatcgcgcagccctctacatccgtgtttccacgctggaacaggcgcaggagggctat

SEQ ID NO: 20647 - DNA, 260 bp, Unknown
  Description of Unknown: LeftRegion for integrase B7648 sequence
agcaagttgttgttaataagcctaaaaatgtggaatatactggagagccttttgcggaatttgctgcaaaatatggaatgactgtcgaagaattagctcaaatgaataatttttccgatcctagtcaaatgatattgatgaaagggcaaactgtaactgtcaaataaataattaatttttaattattaggagttgatacaatgaaaaaagcaggcttatatattcgggtttccactccgcaacaagaaaaagaaggatac

SEQ ID NO: 20648 - DNA, 260 bp, Unknown
  Description of Unknown: LeftRegion for integrase B7649 sequence
gagaatacgcacgtggctttcgttccgtgcgaggggcaaaatattgagattgaaaatgaccggattcggctggtgattacggatgctcgccagattgacttccaaagctaccagccccacccggagggcgaatttaccgaggaacagcgcacctgccgtaactggatcttcgccaactacctgttagacgggatgccgctgtgagacgggcagccctctacatccgtgtttccacgctggaacaggcgcaggagggctat

SEQ ID NO: 20649 - DNA, 260 bp, Unknown
  Description of Unknown: LeftRegion for integrase B7650 sequence
gggaatgtagagaacaatataaacgggtcactgtctaacagccccttcattcaggcaaaccacggcggcgtggtgtacaacggagacagcacaatctcacccgaggctttagagctgctccgtatttatgagaacctcagcggacgcagccgtctaaagttgctcaattttgccgtcgagcttgaaggaggcaaagactgatgaaccgcgcagccctctacatccgtgtttccacgctggaacaggcgcaggagggctac

SEQ ID NO: 20650 - DNA, 260 bp, Unknown
  Description of Unknown: LeftRegion for integrase B7651 sequence
gggaatgtagagaacaatataaacgggtcactgtctaacagcccttttattcaggcaaaccacggcggcgtggtgtacaatggagacagcacgatctcacccgaggctttagagctgctccgtatttatgagaacctcagcggacgcagccgtctaaagttgctcaattttgccgtcgagcttgaaggaggcaaagactgatgaaccgcgcagccctctacatccgtgtttccacgctggaacaggcgcaggagggctat

SEQ ID NO: 20651 - DNA, 260 bp, Unknown; identical to SEQ ID NO: 20649
  Description of Unknown: LeftRegion for integrase B7652 sequence

SEQ ID NO: 20652 - DNA, 260 bp, Unknown
  Description of Unknown: LeftRegion for integrase B7653 sequence
gacaacacccacatcgctttcgtcccctgcgaggagcaagacatcgaagtggaaaacgacaagattcggctcgtgattactggcgctcgccagattgatttccagaattacaagccgaatccagagggcgaatatacccacgaacagcgtacctgccgaaactggatcttcgccaactatttgctggacgggatgccgctttgaaccgcgcagccctctacatccgcgtctctacgcttgaacaggcgcaggagggctat

SEQ ID NO: 20653 - DNA, 260 bp, Unknown
  Description of Unknown: LeftRegion for integrase B7654 sequence
tttgataaaagagaaagataagcaacgtataattaaaaacatagaacaactattaagcgagatacttagcgataaatatgaagccaagataactataagattctctgattgatgatgctcattgtttgatttgcatataacctctacaatacaatatagatgaggtatatataccatcaacatcacagaggagaatcatcatggcaccatataatgtattaaataaaaataagatactgagagctggtttatttgagcgt

SEQ ID NO: 20654 - DNA, 260 bp, Unknown
  Description of Unknown: LeftRegion for integrase B7655 sequence
gacaatacccacgttgccttcgtcccttgcgctggtcagaatatcgagattgagaatgaccggattcgccttgtgattactgatgctcgccaaattgatttccagagctacaagccgaatcctgcgggcgaatacacagatgagcaacgcacctgccgcaactggatattcgccaactacttattagacgggatgccgctttgaaccgcgcagccctctacatccgtgtttccacactggaacaggcgcaggagggctat

SEQ ID NO: 20655 - DNA, 260 bp, Unknown
  Description of Unknown: LeftRegion for integrase B7656 sequence
tttgataaaagagaaagataagcaacgtataattaaaaacatagaacaactattaagcgaaatacttagcgataaatatgaagccaaaataacaataagattctctgattaatgatactcattatttgatttgcatataatctctacaatacaatatagatgaggtatatataccatcaacatcatagaggagaattatcatggcaccatataatgtattgaataagaataaaatactaagagctggtttatttgagcgt

SEQ ID NO: 20656 - DNA, 260 bp, Unknown
  Description of Unknown: LeftRegion for integrase B7657 sequence
gggaatgtagaaaacaacataaacggcaatctctccaacagccccttcattcaggcaaaccacggtggagtggtctacaatggggacagcacgatctcaccagaggctttagagctgctccgcatttacgaaaatctcagcggacgcagccgcctaaagctgcttaactttgccatagagcttgaaggaggcaaagactgatgaaccgcgcagccctctacatccgtgtttccacgctggaacaggcgcaggagggctac

SEQ ID NO: 20657 - DNA, 260 bp, Unknown; identical to SEQ ID NO: 20653
  Description of Unknown: LeftRegion for integrase B7658 sequence

SEQ ID NO: 20658 - DNA, 260 bp, Unknown; identical to SEQ ID NO: 20646
  Description of Unknown: LeftRegion for integrase B7659 sequence

SEQ ID NO: 20659 - DNA, 260 bp, Unknown
  Description of Unknown: LeftRegion for integrase B7660 sequence
ccgaatccatgtagcgtacaccacgaatggattcatcgaatcccagaagtttcagtttttcactctgcactttctttctcctttcttttctgtgttttattctgtgctacgatgacataataatacagattttgtaacttgtcaataaaaaatggtaaaattatataaaaaactataaatatataattggagtgtttgtattgaaaagagtaggcatatactgcagggtatcaaccgatggacagcgagagaatacatct

SEQ ID NO: 20660 - DNA, 260 bp, Unknown
  Description of Unknown: LeftRegion for integrase B7661 sequence
gataacacgcacgtagcctttgtaccctgcgaagggcagaatatcgagatagagaatgacaagattcggcttaccatcactgacgctcgccagattgactttcagggatataagccgaatcccgtcggcgaatacacccacgagcagcgcacctgccgcaactggatattcgcgaactatcttctggacgggatgccgttgtgaaccgcgcagccctctacatccgtgtttccacgctggaacaggcgcaggagggctat

SEQ ID NO: 20661 - DNA, 260 bp, Unknown
  Description of Unknown: LeftRegion for integrase B7662 sequence
agccaaacaaaattaaagattacctaataagtaaaatgaaataaaaaaaagaaacgcctagaggtgcaactctaagcgttgaatatgaaaaacccagactactaaatcaaatgaaactaggactactaatttcaataggcttttcgtgtaatattatatcacggaaagcgggtaaaacgcaataacagggagtgatataattggaaaaaataataaaaaaaattataagagttgttttatatatccgtgtatctagtgag

SEQ ID NO: 20662 - DNA, 260 bp, Unknown
  Description of Unknown: LeftRegion for integrase B7663 sequence
gataatactcacatcgctttcgtcccctgcgaggggcaagacattgaagtggaaaacgacaagattcggctcataattactggcgctcgccagattgatttccagaattacaagccgaacccggaaggcgaatatacccacgaacagcgtacctgccgaaactggatcttcgccaactatttgctggacgggatgccgctttgaaccgcgcagccctctacatccgcgtctctacgcttgaacaggcgcaggagggctat

SEQ ID NO: 20663 - DNA, 260 bp, Unknown; identical to SEQ ID NO: 20649
  Description of Unknown: LeftRegion for integrase B7664 sequence

SEQ ID NO: 20664 - DNA, 260 bp, Unknown
  Description of Unknown: LeftRegion for integrase B7665 sequence
gggaatgtagagaacaatataaacgggtcactgtctaacagccccttcattcaggcaaaccacggcggcgtggtgtacaacggagacagcacgatctcacccgaggctttagagctgctccgtatttatgagaacctcagcggacgcaaccgcctaaagttgctcaattttgccgtcgagcttgaaggaggcaaagactgatgaaccgcgcagccctctacatccgtgtttccacgctggaacaggcgcaggagggctat

SEQ ID NO: 20665 - DNA, 260 bp, Unknown
  Description of Unknown: LeftRegion for integrase B7666 sequence
gacaacacccacgttgccttcgtaccttgcgctgggcagaatatcgagattgagaatgaccggattcgccttgtgattactgatgctcgccaaattgatttccagagctacaagccgaatcctgcgggcgaatatacggatgagcagcgcacctgccgcaactggatattcgccaactacctgttagacgggatgccgctttgaaccgcgcagccctctacatccgtgtttccacgctggaacaggcgcaggagggctat

SEQ ID NO: 20666 - DNA, 260 bp, Unknown
  Description of Unknown: LeftRegion for integrase B7667 sequence
gggaatgtagagaacaatataaacgggtcactgtctaacagccccttcattcaggcaaaccacggcggcgtggtgtacaacggagacagcacgatctcacccgaggctttagagctgctccgtatttatgagaacctcagcggacgcaaccgtctaaagttgctcaattttgccgtcgagcttgaaggaggcaaagactgatgaaccgcgcagccctctacatccgtgtttccacgctggaacaggcgcaggagggctat

SEQ ID NO: 20667 - DNA, 260 bp, Unknown
  Description of Unknown: LeftRegion for integrase B7668 sequence
gggaatgtagagaacaatataaacgggtcactgtctaacagccccttcattcaggcaaaccacggcggcgtggtgtacaacggagacagcacaatctcacccgaggctttagagctgctccgtatttatgagaacctcagcggacgcaaccgcctaaagttgctcaattttgccgtcgagcttgaaggaggcaaagactgatgaaccgcgcagccctctacatccgtgtttccacgctggaacaggcgcaggagggctat

SEQ ID NO: 20668 - DNA, 260 bp, Unknown; identical to SEQ ID NO: 20649
  Description of Unknown: LeftRegion for integrase B7669 sequence

SEQ ID NO: 20669 - DNA, 260 bp, Unknown; identical to SEQ ID NO: 20649
  Description of Unknown: LeftRegion for integrase B7670 sequence

SEQ ID NO: 20670 - DNA, 260 bp, Unknown
  Description of Unknown: LeftRegion for integrase B7671 sequence
cattgggagttaatttttctcaggtattgcaggaagcattaatagctaaaatcgaagctaaagtctaaataataaaaatcccctgtgcaaccaacacaggggaaagaaaggttatgcggtatatgaatactacgaacaacttaagtatatcatatgaccgcttatttttctatatattttaaaataaaggaggtctttgtatgccccaaaaaacactagtattcggatatgttcgtgtttcgactgaaaatcagcttgaa

SEQ ID NO: 20671 - DNA, 260 bp, Unknown
  Description of Unknown: LeftRegion for integrase B7672 sequence
gggaatgtagagaacaatataaacgggtcactgtctaacagccccttcattcaggcaaatcacggcggcgtggtgtacaacggagacagcacaatctcacccgaggctttagagctgctccgtatttatgagaacctcagcggacgcaaccgcctaaagttgctcaattttgccgtcgagcttgaaggaggcaaagactgatgaatcgcgcagccctctacatccgtgtttccacgctggaacaggcgcaggagggctat

SEQ ID NO: 20672 - DNA, 260 bp, Unknown
  Description of Unknown: LeftRegion for integrase B7673 sequence
aagtaatatgtatagaattaaaaaaaaccgcccggtgctaccaacaccgaacggctttgcatagattttctcttgccggacgcaccggaatgaataatctacctcaacaatagaattatatcatttccaacgcgtcctgacaaggggcgtattttttatacccatttttcgtatacatgtaaaaaacaggagatgatatcatgatgaaaggcgcctgctacgtccgcgtatccaccgaaaaccaattagagaactacagc

SEQ ID NO: 20673 - DNA, 260 bp, Unknown
  Description of Unknown: LeftRegion for integrase B7674 sequence
gataaccctaaacaggatttagaaaactattcttcttttgtaagtcagaaaataacagcctttacagacgacattctgaaagactaataaaacaaaatgccccggtcgtgttgggaacacttccggggcgtgcaaagatatgtcataccagatacaacaataccgtctgcaattttgattatatcaccagcaggcgggaaatgaaaggaaatgcaggtgatacaatagtgaaaaagattgatttaagcccggaacttgtc

SEQ ID NO: 20674 - DNA, 260 bp, Unknown
  Description of Unknown: LeftRegion for integrase B7675 sequence
taagtaatatgtatagaattaaaaaaaccgcccggtgctaccaacaccgaacggctttacatagattttctcttgccggacgcaccggaatgaataatctacctcaacaatagaattatatcatttccaaagcgtcctgacaaggggcgtattttttatacccatttttcgtatacatgtaaaaaacaggagatgatatcatgataaaaggcgcctgctacgtccgcgtatctaccgaaaaccaattagagaactacagc

SEQ ID NO: 20675 - DNA, 260 bp, Unknown
  Description of Unknown: LeftRegion for integrase B7676 sequence
gataaccctaaacaggatttagaaaactattcttcttttgtaagtcagaaaataacagcctttacagacgacattctgaaagactaataaaacaaaatgccccggtcgtgctgggaacacttccggggcgtgcaaagatatgtcataccagatacaacaataccgtctgcaattttgattatatcaccagcaggcgggaaatgaaaggaaatgcaggtgatacaatagtgaaaaagattgatttaagcccggaacttgtc

SEQ ID NO: 20676 - DNA, 260 bp, Unknown
  Description of Unknown: LeftRegion for integrase B7677 sequence
ccgcttgtttgtttctttgttttcatagaaatgatgggatccattgacgcgaataagcttaaaccccttggattccaaaagctgcatcatttctttgggcttcatcggcatctcttgatctccccctctctgtgtttacattgtagcacgtattatacgtattgtcaataggcttttaaaaaataaataaggaggaaacgatgaaacgcgcgaaagcatatatgcgtatgtcaacagacaagcaggaacactccatcgaa

SEQ ID NO: 20677 - DNA, 260 bp, Unknown
  Description of Unknown: LeftRegion for integrase B7678 sequence
gataaccctaaacaggatttagaaaactattcttcttttgtaagtcagaaaataacagcctttacagacgacattctgaaagactaataaaacaaaatgccccggtcgtgctgggaacacttccgaggcatgcaaagatatgtcataccagatacaacaataccgtctgcaattttgattatatcaccagcaggtgggaaatgaaaggaaatgcaggtgatacaatagtgaaaaagattgatttaagcccggaacttgtc

SEQ ID NO: 20678 - DNA, 260 bp, Unknown
  Description of Unknown: LeftRegion for integrase B7679 sequence
gataaccctaaacaggatttagaaaactattcttcttttgtaagtcagaaaataacagcctttacagacgacattctgaaagactaataaaacaaaatgccccggtcgtgctgggaacacttcctgggcgtgcaaagatatgtcataccagatacaacaataccgtctgcaattttgattatatcaccagcaggcgggaaatgaaaggaaatgcaggtgatacaatagtgaaaaagattgatttaagcccggaacttgtc

SEQ ID NO: 20679 - DNA, 260 bp, Unknown; identical to SEQ ID NO: 20675
  Description of Unknown: LeftRegion for integrase B7680 sequence

SEQ ID NO: 20680 - DNA, 260 bp, Unknown
  Description of Unknown: LeftRegion for integrase B7681 sequence
agcgtcacacgttttataaaataaaaaccgccccagtgctaccaacaccgggacggcaatacatatccgaagatatgcgattgaaatccacgaatattgtatcatcttcggagcagtcacgcaagcggaacatttgttttgcgctggctgttatttttgtgccaattttaaatatattttacaaaaggagagtgatgcaaatgccagaaaaaatactgcggtgtgccatatacatccgcgtctccacatttgagcagagc

SEQ ID NO: 20681 - DNA, 260 bp, Unknown; identical to SEQ ID NO: 20675
  Description of Unknown: LeftRegion for integrase B7682 sequence

SEQ ID NO: 20682 - DNA, 260 bp, Unknown
  Description of Unknown: LeftRegion for integrase B7683 sequence
gataaccctaaacaggatttagaaaactattcttcttttgtaagtcagaaaataacagcctttacagacgacattctgaaagactaataaaacaaaatgccccggtcgtgctgggaacacttccgaggcatgcaaagatatgtcataccagatacaacaataccgtctgcaattttgattatatcaccagcaggcgggaaatgaaaggaaatgcaggtgatacaatagtgaaaaagattgatttaagcccggaacttgtc

SEQ ID NO: 20683 - DNA, 260 bp, Unknown
  Description of Unknown: LeftRegion for integrase B7684 sequence
ctttggcacggataatctgggcgatttcgagctacaattcaaaccgcttatctcagttaacaaagctgccaagtttaaagttaatattcagtaacacaaaaaaagaacctatccactcggtcaagggataggctcttttagtaataagtttgatgagatttattaagttgtattgtcattatacaacgggaaggaacgttatgacaaattatagaaaattaagagtagcaacctataccagggtttcgactttagaacaa

SEQ ID NO: 20684 - DNA, 260 bp, Unknown; identical to SEQ ID NO: 20675
  Description of Unknown: LeftRegion for integrase B7685 sequence

SEQ ID NO: 20685 - DNA, 260 bp, Unknown
  Description of Unknown: LeftRegion for integrase B7686 sequence
agtaggcgcaagattaaatctaataattcaatatcatcgcaattttgtaatttttcaattattttttctattagtgtttttttcgacataatcaaaccccttttcttcggtaaattctactttattttacaataatagaaatgtgaaaattatcgaaatttggcgataatttaaaaaaattataaggacggtaataaaaaatgaaaggtaattatattgaaacggttgccgcttatgtaagagtgtcaactcaggagcaa

SEQ ID NO: 20686 - DNA, 260 bp, Unknown
  Description of Unknown: LeftRegion for integrase B7687 sequence
ttttggtacggacaatctgggcgattttgaattacagttcaagccgcttatttcagttaacaaggccgctaagtttaaagttaatattcagtaacacaaaaaaagaacctatccactcggtcaagggataggctcttttagtaataagtttgatgagatttattaagttgtactgtcattgtacaacggaaagggacattatgacaagttacagaaaattaagagtagcaacctataccagagtttcaactttagaacag

SEQ ID NO: 20687 - DNA, 260 bp, Unknown; identical to SEQ ID NO: 20675
  Description of Unknown: LeftRegion for integrase B7688 sequence

SEQ ID NO: 20688 - DNA, 260 bp, Unknown
  Description of Unknown: LeftRegion for integrase B7689 sequence
tgaaacaagaacaataatttatcaaaggaaagccgcccggtactaccaataccgaacggcttaatatacacccgaagatgtacagttatctatcaaatatattgtatcatcttcgaaacagccttgcaatcgaaacatatattcgatggctgttatttttatacttatttttaatataattaacgaaggagtgatataaaatgcctgaaaaaattttgagatgtgctatctatatccgtgtatctaccttcgagcaaagt

SEQ ID NO: 20689 - DNA, 260 bp, Unknown; identical to SEQ ID NO: 20675
  Description of Unknown: LeftRegion for integrase B7690 sequence

SEQ ID NO: 20690 - DNA, 260 bp, Unknown; identical to SEQ ID NO: 20675
  Description of Unknown: LeftRegion for integrase B7691 sequence

SEQ ID NO: 20691 - DNA, 260 bp, Unknown; identical to SEQ ID NO: 20675
  Description of Unknown: LeftRegion for integrase B7692 sequence

SEQ ID NO: 20692 - DNA, 260 bp, Unknown
  Description of Unknown: LeftRegion for integrase B7693 sequence
gataaccctaaacaggatttagaaaaatattcttcattgataaatcagaaaataagagcctttacagacgacattctgaaaggttaataaaataaaatgccccggtcgtgctgggaacacttccggggtgtgcaaagatatgtcataccagatacaacaataccgtctgcaattctgattatatcaccagcaggcgggaaatgaaaggaaatgcaggtgatacaatagtgaaaaagattgttttaagcccggaacttgtc

SEQ ID NO: 20693 - DNA, 260 bp, Unknown; identical to SEQ ID NO: 20675
  Description of Unknown: LeftRegion for integrase B7694 sequence

SEQ ID NO: 20694 - DNA, 260 bp, Unknown
  Description of Unknown: LeftRegion for integrase B7695 sequence
gataaccctaaacaggatttagaaaactattcttcttttgtaagtcagaaaataacagcctttacagacgacattctgaaagactaataaaacaaaatgccccggtcgtgccgggaacacttccggggcgtgcaaagatatgtcataccagatacaacaataccgtctgcaattttgattatatcaccagcaggcgggaaatgaaaggaaatgcaggtgatacaatagtgaaaaagattgatttaagcccggaacttgtc

SEQ ID NO: 20695 - DNA, 260 bp, Unknown; identical to SEQ ID NO: 20675
  Description of Unknown: LeftRegion for integrase B7696 sequence

SEQ ID NO: 20696 - DNA, 260 bp, Unknown
  Description of Unknown: LeftRegion for integrase B7697 sequence
gataaccctaaacaggatttagaaaactattcttcttttgtaagtcagaaaataacagcctttacagacgacattctgaaagactaataaaacaaaatgccccggtcgtgcttggaacacttccggggcgtgcaaagatatgtcataccagatacaacaataccgtctgcaattttgattatatcaccagcaggcgggaaatgaaaggaaatgcaggtgatacaatagtgaaaaagattgatttaagcccggaacttgtc

SEQ ID NO: 20697 - DNA, 260 bp, Unknown
  Description of Unknown: LeftRegion for integrase B7698 sequence
gataaccctaaacaggatttagaaaactattcttcttttgtaagtcagaaaataacagcctttacagacgacattctgaaagactaataaaacaaaatgccccggtcgtgctgggaacacttccggggcgtgcaaagatatgtcataccagatacaacaataccgtctgcaattttgattatatcaccagcaggcgggaaatgaaaggaaatgcaggtggtacaatagtgaaaaagattgatttaagcccggaacttgtc

SEQ ID NO: 20698 - DNA, 260 bp, Unknown; identical to SEQ ID NO: 20675
  Description of Unknown: LeftRegion for integrase B7699 sequence

SEQ ID NO: 20699 - DNA, 260 bp, Unknown; identical to SEQ ID NO: 20675
  Description of Unknown: LeftRegion for integrase B7700 sequence

SEQ ID NO: 20700 - DNA, 260 bp, Unknown
  Description of Unknown: LeftRegion for integrase B7701 sequence
aatcagaataaacaacaaaaaacgacaaaaaccgtccagtgttaccagcactgaacggcttaatatacatccgaagatgtacgacatgattgacaaatatattgtatcatcttcggacagctatcgcaatcggaacatgtattcgatggctgttatttttatacttatttttaatataattaacgaaggagtgatataaaatgcctgaaaaaattttgagatgtgctatctatatccgtgtatctaccttcgagcagagt

SEQ ID NO: 20701 - DNA, 260 bp, Unknown; identical to SEQ ID NO: 20675
  Description of Unknown: LeftRegion for integrase B7702 sequence

SEQ ID NO: 20702 - DNA, 260 bp, Unknown; identical to SEQ ID NO: 20682
  Description of Unknown: LeftRegion for integrase B7703 sequence

SEQ ID NO: 20703 - DNA, 260 bp, Unknown; identical to SEQ ID NO: 20675
  Description of Unknown: LeftRegion for integrase B7704 sequence

SEQ ID NO: 20704 - DNA, 260 bp, Unknown; identical to SEQ ID NO: 20675
  Description of Unknown: LeftRegion for integrase B7705 sequence

SEQ ID NO: 20705 - DNA, 260 bp, Unknown
  Description of Unknown: LeftRegion for integrase B7706 sequence
taatcagaataaacaacaaaaaacgacaaaaaccgtccagtgttaccagcactgaacggcttaatatacacccgaagatgtacgaaatgattgcaaatatattgtatcatcttcggacagctatcgcaatcggaacatgtattcgatggctgttatttttatactcatttttaatataattaacgaaggagtgatataaaatgcctgaaaaaattttgagatgtgctatctatatccgtgtatctaccttcgagcagagt

SEQ ID NO: 20706 - DNA, 260 bp, Unknown
  Description of Unknown: LeftRegion for integrase B7707 sequence
ttagaaaaaattttcaaaaaatttatgacttatatattgaacaaataatattatttaacatataatgtaaattatataatttaaaaaataattattataggagttaattatgaaagtaaaagtaatttttaataacgataaactagaatctgattattataaaaagaagttaatctataacataaaagaggtaaaagattatggaactggttactaaaaatagagttattatttataacagagtttctactataatgcaa

SEQ ID NO: 20707 - DNA, 260 bp, Unknown; identical to SEQ ID NO: 20682
  Description of Unknown: LeftRegion for integrase B7708 sequence

SEQ ID NO: 20708 - DNA, 260 bp, Unknown; identical to SEQ ID NO: 20675
  Description of Unknown: LeftRegion for integrase B7709 sequence

SEQ ID NO: 20709 - DNA, 260 bp, Unknown
  Description of Unknown: LeftRegion for integrase B7710 sequence
tgatggaggatgatgacgaagaataaatataaaaaccgctcctgcgccaacaggaacggcttaatatacacccgaagatgtacgaaatgattgcaaatatattgtatcatcttcgaaacagccttgcaatcgaaacatatattcgatggctgttatttttatacttatttttaatataattaacgaaggagtgatataaaatgcctgaaaaaattttgagatgtgctatctatatccgtgtatctaccttcgagcaaagt

SEQ ID NO: 20710 - DNA, 260 bp, Unknown
  Description of Unknown: LeftRegion for integrase B7711 sequence
ttcaaccacaagcatcgctggttcccaaaaaagatgcttttgtcctagaacttcaaaggctccttgcctgctaccagctggcagatcaaagagacagggaaattgtgtggtctgtgctcaacaaatatgtgccacatatcatttaaaatcaaaggacagctccatgcaggggctgtctttatgtacttgggagaaatatcatggcaagaagaaaaacagctttaaagaacgtatctgcgtccgctcgtgtaaccaaagta

SEQ ID NO: 20711 - DNA, 260 bp, Unknown; identical to SEQ ID NO: 20675
  Description of Unknown: LeftRegion for integrase B7712 sequence

SEQ ID NO: 20712 - DNA, 260 bp, Unknown
  Description of Unknown: LeftRegion for integrase B7713 sequence
aagtgaaaaagccttagaagtaacaggaatgacattggatattataaacagctaccaaaagcctaaagaagcactctgggaaatggattaaaggaggtagggaacatgattataagagataaaaaacctttaacagaaaaagaattactggaattacaaaatagtataaaaaaactatatgatatgcaagaaggaaaataatgaaggaaacaaaaaaagcaatagcttattttagagtaagtacagatatgcaaagagat

SEQ ID NO: 20713 - DNA, 260 bp, Unknown
  Description of Unknown: LeftRegion for integrase B7714 sequence
aatttgtaatcctccgcaataaaaatgaaaaaccgcccagtgttaccagcactgaacggcttaacatacatccgaagatgtacgacatgtttgcaaatatattgtatcatcttcgaaacagccttgcaatcgaaacatatattcgatggctgttatttttatacttatttttaatataattaacgaaggagtgatataaaatgcctgaaaaaattttgagatgtgctatctatatccgtgtatctaccttcgagcaaagt

SEQ ID NO: 20714 - DNA, 260 bp, Unknown; identical to SEQ ID NO: 20675
  Description of Unknown: LeftRegion for integrase B7715 sequence

SEQ ID NO: 20715 - DNA, 260 bp, Unknown
  Description of Unknown: LeftRegion for integrase B7716 sequence
acttatagcgtcacacgttttataaaataaaaaccgcccctgcgccaacagagacggtatacatatccgaagatatgcgattaaaatccaagaatattgtatcatcttcggggcagtcacgcaagcggaacatatgttttgcgctggctgttatttttgtaccaattttaaatatattttacaaaaggagagtgatgcaaatgccagaaaaaatactgcggtgtgccatatacatccgcgtctccacatttgagcagagc

SEQ ID NO: 20716 - DNA, 260 bp, Unknown
  Description of Unknown: LeftRegion for integrase B7717 sequence
agttgtaaaaagatacttataaatagaaaaaccgcccggtactggtaataccggacggcttaacatacatccgaagatgtacgacatgattgacaactatattgtatcatcttcggacagctatcgcaatcggaacatatattcgatagctgttatttttatacttatttttaatataattaacgaaggagtgatataaaatgcctgaaaaaattttgagatgtgctatctatatccgtgtatctaccttcgagcagagt

SEQ ID NO: 20717 - DNA, 260 bp, Unknown
  Description of Unknown: LeftRegion for integrase B7718 sequence
actggaaaaggacaaatatactttatgaacaagtttaaaacagcagcataataaatcaatcctcagtattaatttactggggattttttaataggaggaaaatttatgattataagagataaaaaacctttaacagaaaaagaattgctggaattacaaaatagtataaaaaaactatatgatatgcaagaaggggaacaatgaaagaaacaaaaaaggcaatagcatattttagagtaagtacagatatgcaaagagac

SEQ ID NO: 20718 - DNA, 260 bp, Unknown; identical to SEQ ID NO: 20675
  Description of Unknown: LeftRegion for integrase B7719 sequence

SEQ ID NO: 20719 - DNA, 260 bp, Unknown
  Description of Unknown: LeftRegion for integrase B7720 sequence
ctggaaaaggacaaatatactttatgaacaagtttaaaacagcagcataataaatcaatcctcagtattaatttactgggggatttttttataggaggaaaatttatgattataagagataaaaagcctttaacagaaaaagaattgcaggaaatacaaaacagtataaaaaaactatatgatatgcaggaagcagaataatgaaggaaacaaaaaaggcaatagcttattttagagtaagcacagatatgcaaagagac

SEQ ID NO: 20720 - DNA, 260 bp, Unknown
  Description of Unknown: LeftRegion for integrase B7721 sequence
aatcagaataaacaacaaaaaacgacaaaaaccgtccagtgttaccagcactgaacggcttaatatacatccgaagatgtacgacatgattgacaaatatattgtatcatcttcggacagctatcgcaatcggaacatatattcgatggctgttatttttatacttatttttaatataattaacgaaggagtgatataaaatgcctgaaaaaattttgagatgtgctatctatatccgtgtatctaccttcgagcagagt

SEQ ID NO: 20721 - DNA, 260 bp, Unknown
  Description of Unknown: LeftRegion for integrase B7722 sequence
gataaccctaaacaggatttagaaaactattcttcttttgtaagtcagaaaataacagcctttacagacgacattctaaaagactaataaaacaaaatgccccggtcgtgctgggaacacttccggggcgtgcaaagatatgtcataccagatacaacaataccgtctgcaattttgattatatcaccagcaggcgggaaatgaaaggaaatgcaggtgatacaatagtgaaaaagattgatttaagcccggaacttgtc

SEQ ID NO: 20722 - DNA, 260 bp, Unknown
  Description of Unknown: LeftRegion for integrase B7723 sequence
gacaatctgggcgatttcgaattacagttcaagccgcttatctcagttaacaaagctgccaagtttaaagtcaacattcagtaacacaaaaaagaacctatccactcggtcaagggataggctcttttaataataaaattgatgagattatatattgatatgttaagttgtattgtcattatacaacgggaaggaatattatggcaaattatagaaaattaagagtagcaacctataccagggtttcaacgctggagcag

SEQ ID NO: 20723 - DNA, 260 bp, Unknown; identical to SEQ ID NO: 20675
  Description of Unknown: LeftRegion for integrase B7724 sequence

SEQ ID NO: 20724 - DNA, 260 bp, Unknown; identical to SEQ ID NO: 20675
  Description of Unknown: LeftRegion for integrase B7725 sequence

SEQ ID NO: 20725 - DNA, 260 bp, Unknown; identical to SEQ ID NO: 20675
  Description of Unknown: LeftRegion for integrase B7726 sequence

SEQ ID NO: 20726 - DNA, 260 bp, Unknown; identical to SEQ ID NO: 20675
  Description of Unknown: LeftRegion for integrase B7727 sequence

SEQ ID NO: 20727 - DNA, 260 bp, Unknown; identical to SEQ ID NO: 20675
  Description of Unknown: LeftRegion for integrase B7728 sequence

SEQ ID NO: 20728 - DNA, 260 bp, Unknown; identical to SEQ ID NO: 20675
  Description of Unknown: LeftRegion for integrase B7729 sequence

SEQ ID NO: 20729 - DNA, 260 bp, Unknown
  Description of Unknown: LeftRegion for integrase B7730 sequence
gataaccctaaacaggatttagaaaactattcttcttttgtaagtcagaaaataacagcctttacagacgacattctgaaagactaataaaacaaaatgccccggtcgtgctgggaacacttccggggcgcgcaaagatatgtcataccagatacaacaataccgtctgcaattttgattatatcaccagcaggcgggaaatgaaaggaaatgcaggtgatacaatagtgaaaaagattgatttaagcccggaacttgtc

SEQ ID NO: 20730 - DNA, 260 bp, Unknown
  Description of Unknown: LeftRegion for integrase B7731 sequence
attatcttgctataaaatgcaatattgaaatctaaacatagaaaaagacagtccctgacaagaactgcctttccccatcatttcctatgtagcacataacttcatagaatacagattcgcaacctttattctaccacgaagttgtgctgctgcatagctttatttttttacgctttttttacggcagaaagaaggtttttatgaatagtacatacttcagaccgcaaccggaactcttcggcctgcgtgttgttaaatat

SEQ ID NO: 20731 - DNA, 260 bp, Unknown
  Description of Unknown: LeftRegion for integrase B7732 sequence
gatctgctgaaataataaaaaaccgcccctgcgccaacaggaacggttgatgcatatccgaagatatacaaacgagctaccaactcacaaatattgtatcatcttcgggcagccactgcaagcggaacactcgttcctcgctggctgtattttttatacccatttttgtgcgacgtcgcacatatacttaggaaggtgatatgatgacgaacaaaattatccgctgcgctctctatatccgtgtcagcaccgctgagcag

SEQ ID NO: 20732 - DNA, 260 bp, Unknown
  Description of Unknown: LeftRegion for integrase B7733 sequence
actttggtattcgacgttatcgaaattttaaaaaataaaaaagacacccggttttccgaatgcctttcattgctacctatgcagcacacgccgcatagaatagtccatcgcaacttctattctatcacaaaaagcgtgctgctgcatagctttattttttatactcttttttgacattttgatagaaagaaggttttattatgagtagttcatatttccgtccacagccggaactgtacggcttgcgtgtggtaaaatac

SEQ ID NO: 20733 - DNA, 260 bp, Unknown
  Description of Unknown: LeftRegion for integrase B7734 sequence
aaaaggaatagtaacagcatatattgatccctatgaaccttttgctgtatatattgatggtaaagcaagaatacagaaaacaggtccagcaattttaataataaatcaagattaggaggaggtagggaagatgactaataagaaagtgattgttaacataataaaagaaataagattaaaacagttagcgaggttaaaaaatgaagaaacaattgaaagctttgatatatgctagagtaagtactgtaatgcaagaagaa

SEQ ID NO: 20734 - DNA, 260 bp, Unknown
  Description of Unknown: LeftRegion for integrase B7735 sequence
tgaataaatatgatgttgaaaaaagactatgcgatgaactaaatatcgaatatataaatttaaaccttcgcactggacctagctatatatttaccgaagaagaatatcagaaattgaaatccgactacgccaaattgtttttacagttagaaaatattgatgaaaacaactagtatttatattgaaaggagcaattttatatgaaacgtgcagcattgtatatacgtgtatccacaatggaacaagccaaggaaggatac

SEQ ID NO: 20735 - DNA, 182 bp, Unknown
  Description of Unknown: LeftRegion for integrase B7736 sequence
accaactcacgaatattgtatcatcttcgggcagccactgcaagcggaacactcgttcctcgctggctgtattttttatacccatttttgtgcgacgtcgcacatatacttaggaaggtgatatgatgacgaacaaaattatccgctgcgctctctacatccgtgtcagcaccgctgagcag

SEQ ID NO: 20736 - DNA, 260 bp, Unknown
  Description of Unknown: LeftRegion for integrase B7737 sequence
tattatcttgctataaaatgcaatattgaaatctaaacatagaaaaagacagtccctgacaagaactgcctttccccatcatttcctatgtagcacataacttcatagaatacagattcgcaacctttattctaccacgaagttgtgctgctgcatagctttatttttttacgcttttttacggcagaaagaaggtttttatgaatagtacatacttcagaccgcaaccggaactcttcggcctgcgtgttgttaaatat

SEQ ID NO: 20737 - DNA, 260 bp, Unknown
  Description of Unknown: LeftRegion for integrase B7738 sequence
tattatcttgctataaaatgcaatattgaaatctaaacatagaaaaagacagtccctgacaagaactgcctttccccatcgtttcctatgcagtacataacttcatagaatacagattcgcaacctttattctaccacgaagttgtgctgctgcatagctttatttttttacgcttttttacggcagaaagaaggtttttatgaatagtacatacttcagaccgcaaccggaactcttcggcctgcgtgttgttaaatat

SEQ ID NO: 20738 - DNA, 260 bp, Unknown
  Description of Unknown: LeftRegion for integrase B7739 sequence
ggctcaggaggagtaaatatgatagtagaaatttacaagggaatagacagtgaaaagccagttgatattataattgttttaggataggaggtaagaaaatgattataagaagtaaagaagtattgaatgataaaactttaaaggagattcaagataatataaagaaattatatgataaacaaaaaggagaataactttagatgagagaggtcaagaaagcaatagcttattttagagtaagtacagatatgcaaaaagag

SEQ ID NO: 20739 - DNA, 260 bp, Unknown
  Description of Unknown: LeftRegion for integrase B7740 sequence
aaagatttaaatattaaaaaaaccgcccctgcgccaacaggaacggttgatacatatccgaagatatgcaattgagctaccaactcacaaatattgtatcatcttcgggcagccactgcaagcggaacactcgttcctcgctggctgtattttttatacccatttttgtgcgacgtcgcacatatacttaggaaggtgatatgatgacgaacaaaattatccgctgcgctctctatatccgtgtcagcaccgctgagcag

SEQ ID NO: 20740 - DNA, 260 bp, Unknown
  Description of Unknown: LeftRegion for integrase B7741 sequence
atacgccgctcagcttgcggaatcaataaaagaaaccgcccctgcgccaacaggaacggtttactgaatactatacagtgccaagacacgtacaatactccctgaacaagaatattgtatcacatttccttggcacctgtacaggtgtattttttatacccatttttgtgcgacgtcgcacatatacttaggaaggtgatatgatgacgaacaaaattatccgctgcgctctctatatccgtgtcagcaccgctgagcag

SEQ ID NO: 20741 - DNA, 260 bp, Unknown
  Description of Unknown: LeftRegion for integrase B7742 sequence
attatcttgctataaaatgcaatattgaaatctaagcatagaaaaagacagtccctgacaagaactgcctttccccatcgtttcctatgtagcacataacttcatagaatacagattcgcaacctttattctaccacgaagttgtgctgctgcatagctttatttttttacgctttttttacggcagaaagaaggtttttatgaatagtacatacttcagaccgcaaccggaactcttcggcctgcgtgttgttaaatat

SEQ ID NO: 20742 - DNA, 260 bp, Unknown
  Description of Unknown: LeftRegion for integrase B7743 sequence
agcattagggattccgtcttcccttaataaattcaagtaaaataaaaacggccatctcgccaaagacagccgtttccactgtgtcctatgcagcacataacttcatagaatactgattcgcaacctttattctaccacgaagttgtgctgctgcatagctttatttttttacgcttttttacggcagaaagaaggtttttatgaatagtacatacttcagaccgcaaccggaactcttcggcctgcgtgttgttaaatat

SEQ ID NO: 20743 - DNA, 260 bp, Unknown
  Description of Unknown: LeftRegion for integrase B7744 sequence
tgaataaatatgatgttgaaaaaagactatgcgatgaactaaatatcgaatatataaatttaaaccttcgcactggacctagctatatatttaccgaagaagaatatcaggaattgaaatccgactacgccaaattgtttttacagttagaaaatattgatgaaaacaactagtatttatattgaaaggagcaattttatatgaaacgtgcagcattgtatatacgtgtatccacaatggaacaagccaaggaaggatac

SEQ ID NO: 20744 - DNA, 260 bp, Unknown
  Description of Unknown: LeftRegion for integrase B7745 sequence
ccaacaggaacggttacgcccagtccgcacagcagacaatggacgatttaactctaacatctccggagatgctacagctttacaccaaagatattgtatcatcttcgggcagccactgcaagcggaacactcgttcctcgctggctgtattttttatacccatttttgtgcgacatcgcacatatacttaggaaggtgatatgatgacgaacaaaattatccgctgcgctctctatatccgtgtcagcaccgctgagcag

SEQ ID NO: 20745 - DNA, 260 bp, Unknown
  Description of Unknown: LeftRegion for integrase B7746 sequence
attttcttgctcaaaaatgcaatatagaaatctaagcatagaaaaagacagtccctgacaagaactgcctttccccatcgtttcctatgcagtacataacttcatagaatacagattcgcaacctttattctaccacgaagttgtgctgctgcatagctttatttttttacgctttttttacggcagaaagaaggtttttatgaatagtacatacttcagaccgcaaccggaactcttcggcctgcgtgttgttaaatat

SEQ ID NO: 20746 - DNA, 260 bp, Unknown
  Description of Unknown: LeftRegion for integrase B7747 sequence
ttgatatcaacggaatggtaaagaaaaaccgccccagtgctaccaacactgagacggtctacatacccgaagatatgcgattaaaatccaagaatattgtatcatcttcggagcagtcatgcaagcggaacgtttgttttgcgctggctgttatttttgtgccaattttaaatatattttacaaaaggagagtgatgcaaatgccagaaaaaatactgcggtgtgccatatacatccgcgtctccacatttgagcagagc

SEQ ID NO: 20747 - DNA, 260 bp, Unknown
  Description of Unknown: LeftRegion for integrase B7748 sequence
ttatcttgctataaaatgcaatattgaaatctaaacatagaaaaagacagtccctgacaagaactgcctttccccatcatttcctatgtagcacataacttcatagaatacagattcgcaacctttattctaccacgaagttgtgctgctgcatagctttattttttttacgctttttttacggcagaaagaaggtttttatgaatagtacatacttcagaccgcaaccggaactcttcggcctgcgtgttgttaaatat

SEQ ID NO: 20748 - DNA, 260 bp, Unknown
  Description of Unknown: LeftRegion for integrase B7749 sequence
attatcttgccataaaatgcaatattgaaatctaaacatagaaaaagacagtccctgacaagaactgcctttccccatcgtttcctatgcagcgcattacttcatagaatactgattcgcaacctttattctaccacgaagttgtgctgctgcatagctttatttttttacgcttttttacagtagaaagaaggttttttatgaacagtacatacttcagaccgcaaccggaactcttcggcctgcgtgttgttaaatat

SEQ ID NO: 20749 - DNA, 260 bp, Unknown
  Description of Unknown: LeftRegion for integrase B7750 sequence
tcaaaggacggcatttgaatgaataagaaaagtaaataaaaaagagcagcctccacgccaatgaaaaccgctctttgataacatatatctatcgcacaagtacgattgataaaatgtcacccgcaagtctcattttaccataaaaccgtgcttgtgcataggttttatttttttacccttttttgattggagttgataaaatgagacgcaaaacaaccgctcctgtcgagaaaatcctgctccgtgtggcaatctatatc

SEQ ID NO: 20750 - DNA, 260 bp, Unknown; identical to SEQ ID NO: 20748
  Description of Unknown: LeftRegion for integrase B7751 sequence

SEQ ID NO: 20751 - DNA, 260 bp, Unknown
  Description of Unknown: LeftRegion for integrase B7752 sequence
tgaataaatatgatgttgaaaaaagactatgcgatgaactaaatatcgaatatataaatttaaaccttcgcactggacctagctatatatttaccgaagaagaatatcaggagttgaaagccgactacgccaaattgtttttacagttagaaaatattgatgaaaacaactagtatttatattgaaaggagcaattttatatgaaacgtgcagcattgtatatacgtgtatccacaatggaacaagccaaggaaggatac

SEQ ID NO: 20752 - DNA, 260 bp, Unknown
  Description of Unknown: LeftRegion for integrase B7753 sequence
attcattaaattcttttggataataaaataaaaaccgcccctgcgccaacaggaacggtctacatatccgaagatatgcgattgaaatccaagaatattgtatcatcttcggagcagtcatgcaagcggaacgtttgttttgcgctggctgttatttttatacccatttttaaatactatttacaagggagtgatgcaaaatgcaagagaaaatactaagatgcgccatctatatccgtgtctcaacgtttgagcaaagt

SEQ ID NO: 20753 - DNA, 260 bp, Unknown
  Description of Unknown: LeftRegion for integrase B7754 sequence
attatcttgctataaaatgcaatattgaaatctaaacatagaaaaagacagtccctgacaagaactgcctttccccatcgtttcctatgtagcacataacttcatagaatacagattcgcaacctttattctaccacgaagttgtgctgctgcatagctttatttttttacgctttttttacggcagaaagaaggtttttatgaatagtacatacttcagaccgcaaccggaactcttcggcctgcgtgttgttaaatat

SEQ ID NO: 20754 - DNA, 260 bp, Unknown
  Description of Unknown: LeftRegion for integrase B7755 sequence
gcattagggattccgtcttcccttaataaattcaagtaaaataaaaacggccatctcgcccaagacagccgtttccactgtgtcctatgcagcacataacttcatagaatactgattcgcaacctttattctaccacgaagttgtgctgctgcatagctttatttttttacgctttttttacggcagaaagaaggtttttatgaatagtacatacttcagaccgcaaccggaactcttcggcctgcgtgttgttaaatat

SEQ ID NO: 20755 - DNA, 260 bp, Unknown
  Description of Unknown: LeftRegion for integrase B7756 sequence
gccacccgactggataatttacaaaaaaaaccgtcccggcggcaaccggaacggctcaagtaacattccgaagaatgatacccttattccttaaacattgtatcatcttcggacagcctacgcaagcggaacactcgttctccacaggctgttatttttgtacccttttttacataatatgaaccaaaggagctgatacaatgaagtcaaaaactctccggtgcgcgatctatatccgagtatctacaacagaacagatg

SEQ ID NO: 20756 - DNA, 260 bp, Unknown
  Description of Unknown: LeftRegion for integrase B7757 sequence
ggcatttgccacccaccacaataaaataaaaaccgcccctgcgccaacagagacggtctacatacccgaagatatgcgattaaaatccatgaatattgtatcatcttcggagcagctacgcaagcggaacatttgttttgcgctggctgttatttttgtatcaattttaaatatattttataaaaggagagtgatacaagatgcaagagaaaatattgagatgtgccatctatatccgcgtctccacatttgagcagagc

SEQ ID NO: 20757 - DNA, 260 bp, Unknown
  Description of Unknown: LeftRegion for integrase B7758 sequence
caaatgtacccaaaaagtcaaccgtccgatgcgccaacaccggacggccacaggagtatatcccgaaggacatacaatagtttatcaccagaaatattgtatcatcttcgggcagccggcacaatccagaacatgagttctcagtctggctgttatttttgtatctatttttcatacaattacaaaagggagatgatatcatgtctgaaaagctcaagcgctgcgctctctacataagagtctccacagcggagcagtgt

SEQ ID NO: 20758 - DNA, 260 bp, Unknown
  Description of Unknown: LeftRegion for integrase B7759 sequence
tattatcttgctataaaatgcaatattgaaatctaaacatagaaaaagacagtccctgacaagaactgcctttccccatcatttcctatgtagcacataacttcatagaatacagattcgcaacctttattctaccacgaagttgtgctgctgcatagctttatttttttacgcttttttacagcagaaagaaggtttttatgaatagtacatacttcagaccgcaaccggaactcttcggcctgcgtgttgttaaatat

SEQ ID NO: 20759 - DNA, 260 bp, Unknown
  Description of Unknown: LeftRegion for integrase B7760 sequence
tattatcttgctataaaatgcaatattgaaatctaagcatagaaaaagacagtccctgacaagaactgcctttccccatcgtttcctatgcagcacataacttcatagaatactgattcgcaacctttattctaccacgaagttgtgctgctgcatagctttattttttttcgcttttttacggcagaaagaaggtttttatgaatagtacatacttcagaccgcaaccggaactcttcggcctgcgtgttgttaaatat

SEQ ID NO: 20760 - DNA, 260 bp, Unknown
  Description of Unknown: LeftRegion for integrase B7761 sequence
tgtatggaaaatgaaatagataatttatcggtgaagtctttataggaattgtaataaaattcatataatattttttaataaatattagttgcaaaaagttttaatgagcgttacaataagggtgaggtgaagatatgaacggtgaaatttatgcaagatattcaatctaaaatcagcgataagagtctattaacgataagttgagaaaatgtactgcttttgcactgcataacgatattcaaatagtcggtgaatatatc

SEQ ID NO: 20761 - DNA, 260 bp, Unknown
  Description of Unknown: LeftRegion for integrase B7762 sequence
ggcttaggaggaataaatatgatagtagaaatttacaagggaatagacagtgaaaagccagttgatattataattgttttaggataggaggtaagaagatgattataagaagtaaagaagtattgaatgataaaactttaaaggagattcaagataatataaagaaattatatgataaacaaaaaggagaataactttagatgagagaggtcaagaaagcaatagcttattttagagtaagtacagatatgcaaaaagag

SEQ ID NO: 20762 - DNA, 260 bp, Unknown; identical to SEQ ID NO: 20748
  Description of Unknown: LeftRegion for integrase B7763 sequence

SEQ ID NO: 20763 - DNA, 260 bp, Unknown
  Description of Unknown: LeftRegion for integrase B7764 sequence
gcattagggattccgtcttcccttaataaattcaagtaaaataaaaacggccatctcgccaaagacagccgtttccactgtgtcctatgcagcacataacttcatagaatactgattcgcaacctttattctaccacgaagttgtgctgctgcatagctttatttttttacgctttttttacggcagaaagaaggtttttatgaatagtacatacttcagaccgcaaccggaactcttcggcctgcgtgttgttaaatat

SEQ ID NO: 20764 - DNA, 260 bp, Unknown
  Description of Unknown: LeftRegion for integrase B7765 sequence
tattatcttgctataaaatgcaatattgaaatctaagcatagaaaaagacagtccctgacaagaactgcctttccccatcgtttcctatgtagcacataacttcatagaatacagattcgcaacctttattctaccacgaagttgtgctgctgcatagctttatttttttacgcttttttacggcagaaagaaggtttttatgaatagtacatacttcagaccgcaaccggaactcttcggcctgcgtgttgttaaatat

SEQ ID NO: 20765 - DNA, 260 bp, Unknown
  Description of Unknown: LeftRegion for integrase B7766 sequence
tgcggcatttgccacccaccacaataaaataaaaaccgcccctgcgccaacagagacggtatacatacccgaagatatgcgattaaaatccatgaatattgtatcatcttcggaaacagcttgcaagcggaacgtttgttttgcgcggctgttatttttatacctatttttaaatactatttacaaaggagtgatacaagatgcaagagaaaatattgagatgtgccatctatatccgcgtctccacatttgagcagagc

SEQ ID NO: 20766 - DNA, 260 bp, Unknown
  Description of Unknown: LeftRegion for integrase B7767 sequence
gaaccgctcctgcgccaacaggaacggcaaacaattacacatatccgaagatatgcaatgaggcaaacagattgcctactacctaatcaacaaaaatattgtatcatcttcgggcagcctacgcaagcggaacactcgttcttgctggctgttatttttatacccttttttacataatatgaaccaaaggagctgatacaatgaagtcaaaaactctccggtgcgcgatctatatccgagtgtctacaacagaacagatg

SEQ ID NO: 20767 - DNA, 260 bp, Unknown
  Description of Unknown: LeftRegion for integrase B7768 sequence
gcattagggattccgtcttcccttaataaattcaagtaaaataaaaacggccatctcgcccaagacagccgtttccactgtgtcctatgcagcacataacttcatagaatactgattcacaacctttattctaccacgaagttgtgctgctgcatagctttatttttttacgctttttttacggcagaaagaaggtttttatgaatagtacatacttcagaccgcaaccggaactcttcggcctgcgtgttgttaaatat

SEQ ID NO: 20768 - DNA, 260 bp, Unknown
  Description of Unknown: LeftRegion for integrase B7769 sequence
agcattagggattccgtcttcccttaataaattcaagtaaaataaaaacggccatctcgcccaagacagccgtttccactgtgtcctatgcagcacataacttcatagaatactgattcgcaacctttattctaccacgaagttgtgctgctgcatagctttatttttttacgcttttttacggcagaaagaaggtttttatgaatagtacatacttcagaccgcaaccggaactcttcggcctgcgtgttgttaaatat

SEQ ID NO: 20769 - DNA, 260 bp, Unknown
  Description of Unknown: LeftRegion for integrase B7770 sequence
tgaataaatatgatgttgaaaaaagactatgcgatgaactaaatatcgaatatataaatttaaaccttcgcactggacctagctatatatttaccgaagaagaatatcaggagttaaaatccgactacgccaaattgtttttacagttagaaaatattgatgaaaacaactagtatttattttgaaaggagcaattttatatgaaacgtgcagcattgtatatacgtgtatccacaatggaacaagccaaggaaggatac

SEQ ID NO: 20770 - DNA, 260 bp, Unknown
  Description of Unknown: LeftRegion for integrase B7771 sequence
atggaagaaaacctgctgaccccaaaggaatacaggcaaatcgaaggaattctggggcgaaaattctcgccggtatgggcgggtttacccgatacaataaaggataaatctgcgcgacagcccttgataatccgtccatatgacggtaatatgcatcacgatccgatggattgatacaatgtcagaagggacggattgatatgaacgagaagacaatgacgcttacccgcatggaagcaccggcgcagctgcctgtgcga

SEQ ID NO: 20771 - DNA, 260 bp, Unknown; identical to SEQ ID NO: 20730
  Description of Unknown: LeftRegion for integrase B7772 sequence

SEQ ID NO: 20772 - DNA, 260 bp, Unknown; identical to SEQ ID NO: 20736
  Description of Unknown: LeftRegion for integrase B7773 sequence

SEQ ID NO: 20773 - DNA, 260 bp, Unknown; identical to SEQ ID NO: 20730
  Description of Unknown: LeftRegion for integrase B7774 sequence

SEQ ID NO: 20774 - DNA, 260 bp, Unknown
  Description of Unknown: LeftRegion for integrase B7775 sequence
attatcttgccataaaatgcaatattgaaatctaaacatagaaaaagacagtccctgacaagaactgcctttccccatcgtttcctatgcagcgcattacttcatagaatactgattcgcaacctttattctaccacgaagttgtgttgctgcatagctttatttttttacgcttttttacagtagaaagaaggttttttatgaacagtacatacttcagaccgcaaccggaactcttcggcctgcgtgttgttaaatat

SEQ ID NO: 20775 - DNA, 260 bp, Unknown
  Description of Unknown: LeftRegion for integrase B7776 sequence
ggcataaagaaaacacagaagaaccaagagttgctttgagaaggcatactacaataatgaaaggtacaacagaacctttgtggatatttgaaataggagaataacatatttaataaaggaggtaggaaagatgattaataagaaagcgattgttaatataataaaagaaataagactaaaacagctagcgaggttaaaaaatgaagaaacaattgaaagctctgatatatgctagagtaagtactgtaatgcaagaagaa

SEQ ID NO: 20776 - DNA, 260 bp, Unknown
  Description of Unknown: LeftRegion for integrase B7777 sequence
ggtgtcttttgctatatacacaaataaaccgccccagtgctaccaacactgagacggtctacatatccgaagatatgctattgaaatccacgaatattgtatcatcttcggagcagtcatgcaagcggaacatcagttcgcacgttggctgttatttttatactcatttttaaatactatttacaagggagtgatgcaaaatgcaagagaaaatactaagatgcgccatctatatccgcgtctccacatttgagcagagc

SEQ ID NO: 20777 - DNA, 260 bp, Unknown
  Description of Unknown: LeftRegion for integrase B7778 sequence
attatcttgccataaaatgcaatattgaaatctaaacatagaaaaagacagtccctgacaagaactgcctttccccatcgtttcctatgcagcacattacttcatagaatactgattcgcaacctttattctaccacgaagttgtgctgctgcatagctttatttttttacgcttttttacagtagaaagaaggttttttatgaatagtacatacttcagaccgcaaccggaactctttggcctgcgtgtctgcaaatat

SEQ ID NO: 20778 - DNA, 260 bp, Unknown
  Description of Unknown: LeftRegion for integrase B7779 sequence
tgaataaatatgatgttgaaaaaagactatgcgatgaactaaatatcgaatatataaatttaaaccttcgcactggacctagctatatatttaccgaacaagaatatcaggagttgaaatccgactacgccaaattgtttttacagttagaaaatattgatgaaaacaactagtgtttatattgaaaggagcaattttatatgaaacgtgcagcattgtatatacgtgtatccacaatggaacaagccaaggaaggatac

SEQ ID NO: 20779 - DNA, 260 bp, Unknown
  Description of Unknown: LeftRegion for integrase B7780 sequence
tattatcttgctataaaatgcaatgttgaaatctaaacatagaaaaagacagtccctgacaagaactgcctttccccatcatttcctatgtagcacataacttcatagaatacagattcgcaacctttattctaccacgaagttgtgctgctgcatagctttatttttttacgcttttttacggcagaaagaaggtttttatgaatagtacatacttcagaccgcaaccggaactcttcggcctgcgtgttgttaaatat

SEQ ID NO: 20780 - DNA, 260 bp, Unknown
  Description of Unknown: LeftRegion for integrase B7781 sequence
accgggaagaattagagggggataaagaaagtcctgctcacggagaagattgcccccataaaattgctcaagcgtaaaaaggtgttggaggtgatactacgaaagcggtaatttatgccagatattcaagtcatagtcagcgtgaggagtccatcgagggacagcttcgtgagtgtcacgacttcgcactgaaaaacggaatgacgatcatcggtgaatactgcgacagagctatctcaggaaaaaccgataaccgtcca

SEQ ID NO: 20781 - DNA, 260 bp, Unknown
  Description of Unknown: LeftRegion for integrase B7782 sequence
atggtttagattaaataaaaaaccgcccctgcgccaacaggaacggttgatgcatatccgaagatatacaaacgagctaccaactcacgaatattgtatcatcttcgggcagccactgcaagcggaacactcgttcctcgctggctgtattttttatacccatttttgtgcgacgtcgcacatatacttaggaaggtgatatgatgacgaacaaaattatccgctgcgctctctacatccgtgtcagcaccgctgagcag

SEQ ID NO: 20782 - DNA, 260 bp, Unknown; identical to SEQ ID NO: 20742
  Description of Unknown: LeftRegion for integrase B7783 sequence

SEQ ID NO: 20783 - DNA, 260 bp, Unknown; identical to SEQ ID NO: 20730
  Description of Unknown: LeftRegion for integrase B7784 sequence

SEQ ID NO: 20784 - DNA, 260 bp, Unknown; identical to SEQ ID NO: 20755
  Description of Unknown: LeftRegion for integrase B7785 sequence

SEQ ID NO: 20785 - DNA, 260 bp, Unknown
  Description of Unknown: LeftRegion for integrase B7786 sequence
tattttcttgctcaaaaatgcaatatagaaatctaaacatagaaaaagacagtccctgacaagaactgccttcccccatcgtttcctatgcagcacataactccatagaatactgattcgcaacctttattctaccacgaagttgtgctgctgcatagctttatttttttacgcttttttacggcagaaagaaggtttttatgaatagtacatacttcagaccgcaaccggaactcttcggcctgcgtgttgttaaatat

SEQ ID NO: 20786 - DNA, 260 bp, Unknown; identical to SEQ ID NO: 20768
  Description of Unknown: LeftRegion for integrase B7787 sequence

SEQ ID NO: 20787 - DNA, 260 bp, Unknown
  Description of Unknown: LeftRegion for integrase B7788 sequence
attcgttgaattctttagggcaataaaataaaaaccgcccctgcgccaacagagacggtatacatatccgaagatatgcgattgaaatccacgaatattgtatcatcttcggggcagtcacgcaagcggaacatatgttttgtgctggctgttatttttgtaccaattttaaatatattttacaaaggagagtgatgcaaatgccagaaaaaatactgcggtgtgccatatatatccgcgtctccacatttgagcagagc

SEQ ID NO: 20788 - DNA, 260 bp, Unknown; identical to SEQ ID NO: 20748
  Description of Unknown: LeftRegion for integrase B7789 sequence

SEQ ID NO: 20789 - DNA, 260 bp, Unknown
  Description of Unknown: LeftRegion for integrase B7790 sequence
tcccttaattctttaggacaataaaataaaaaccgcccctgcgccaacagagacggtctacatatccgaagatatgcacttgaaatccaagagtattgtatcatcttcggagcagtcatgcaagcggaacgtttgttttgcgctggctgttatttttgcaccaattttaaatatattttacaaaaggagagtgatacggaatgccagaaaaaatactacggtgcgccatatatatccgagtatccacatttgagcagagt

SEQ ID NO: 20790 - DNA, 260 bp, Unknown
  Description of Unknown: LeftRegion for integrase B7791 sequence
attatcttgctataaaatgcaatattgaaatctaaacatagaaaaagacagtccctgacaagaactgcctttccccatcatttcctatgtagcacataacttcatagaatactgattcgcaacctttattctaccacgaagttgtgctgctgcatagctttatttttttacgctttttttacggcagaaagaaggtttttatgaatagtacatacttcagaccgcaaccggaactcttcggcctgcgtgttgttaaatat

SEQ ID NO: 20791 - DNA, 260 bp, Unknown
  Description of Unknown: LeftRegion for integrase B7792 sequence
tgtggcatttgccacccaccacaataaaataaaaaccgcccctgcgccaacagagacggtctacatacccgaagatatgcgattaaaatccatgaatattgtatcatcttcggaaacagcttgcaagcggaacgtttgttttgcgcggctgttatttttatacctatttttaaatactatttacaaaggagtgatacaagatgcaagagaaaatattgagatgcgccatctatatccgcgtctccacatttgagcagagc

SEQ ID NO: 20792 - DNA, 260 bp, Unknown; identical to SEQ ID NO: 20675
  Description of Unknown: LeftRegion for integrase B7793 sequence

SEQ ID NO: 20793 - DNA, 260 bp, Unknown; identical to SEQ ID NO: 20761
  Description of Unknown: LeftRegion for integrase B7794 sequence

SEQ ID NO: 20794 - DNA, 260 bp, Unknown
  Description of Unknown: LeftRegion for integrase B7795 sequence
attctttaggacaataaaacaaaaaaccgccccggtgctaccaacactgagacggtaatacatatccgaagatatgctattgaaatccacgaatattgtatcatcttcggagcagtcacgcaagcgaaacatcagttcgaacgctggctgttatttttgtaccaattttaaatatattttacaaaaggagagtgatgcaaatgccagaaaaaatactgcggtgtgccatatacatccgcgtctccacatttgagcagagc

SEQ ID NO: 20795 - DNA, 260 bp, Unknown; identical to SEQ ID NO: 20754
  Description of Unknown: LeftRegion for integrase B7796 sequence

SEQ ID NO: 20796 - DNA, 260 bp, Unknown
  Description of Unknown: LeftRegion for integrase B7797 sequence
ttctttaggacaataaaacaaaaaaccgtcccagtgctaccaacaccgggacggcaatacatatccgaagatatgcgatcaaaatccaagaatattgtatcatcttcggaaacagcttgcaagcggaacatttgttcatgtgctggctgttatttttgtaccaattttaaatatattttacaaaaggagagtgatacggaatgccagaaaaaatactacggtgcgccatatatatccgagtatccacatttgagcagagt

SEQ ID NO: 20797 - DNA, 260 bp, Unknown
  Description of Unknown: LeftRegion for integrase B7798 sequence
actgaaataataaaaaagaaaaccgcccctgcgccaacaggaacggttgatgcatatccgaagatatacaaacgagctaccaactcacgaatattgtatcatcttcgggcagccactgcaagcggaacactcgttcctcgctggctgtattttttatacccatttttgtgcgacgtcgcacatatacttaggaaggtgatatgatgacgaacaaaattgtccgctgcgctctctacatccgtgtcagcaccgctgagcag

SEQ ID NO: 20798 - DNA, 260 bp, Unknown
  Description of Unknown: LeftRegion for integrase B7799 sequence
gccacccgactggataatttacaaaaaaaaccgtcccggcggcaaccggaacggctcaagtaacattccgaagaatgatacccttattccttaaacattgtatcatcttcggacagcctacgcaagcggaacactcgttctccgccggctgttatttttatacctttttttacataatatgaaccaaaggagctgatacaatgaaatcaaaaactctccggtgcgcgatctatatccgagtatctacgacagaacagatg

SEQ ID NO: 20799 - DNA, 260 bp, Unknown; identical to SEQ ID NO: 20766
  Description of Unknown: LeftRegion for integrase B7800 sequence

SEQ ID NO: 20800 - DNA, 260 bp, Unknown; identical to SEQ ID NO: 20768
  Description of Unknown: LeftRegion for integrase B7801 sequence

SEQ ID NO: 20801 - DNA, 260 bp, Unknown; identical to SEQ ID NO: 20742
  Description of Unknown: LeftRegion for integrase B7802 sequence

SEQ ID NO: 20802 - DNA, 260 bp, Unknown
  Description of Unknown: LeftRegion for integrase B7803 sequence
agcgtcacacgttttataaaataaaaaccgccccagtgctaccaacaccgggacggcaatacatatccgaagatatgcgattgaaatccaagaatattgtatcatcttcggagcagtcatgcaagcggaacatcagttcgcacgttggctgttatttttatactcatttttaaatactatttacaagggagtgatgcaaaatgcaagagaaaatactaagatgcgccatctatatccgtgtctcaacgtttgagcaaagt

SEQ ID NO: 20803 - DNA, 260 bp, Unknown
  Description of Unknown: LeftRegion for integrase B7804 sequence
cagcaagatttaactattcaataaaaataaaaaccgcccctgcgccaacagagacggtctacacatccgaagatatgcgattaaaatccaagaatattgtatcatcttcggagcagtcatgcaagcggaacatcagttcgcacgttggctgttatttttatactcatttttaaatactatttacaagggagtgatgcaaaatgcaagagaaaatactaagatgcgccatctatatccgtgtctcaacgtttgagcaaagt

SEQ ID NO: 20804 - DNA, 260 bp, Unknown
  Description of Unknown: LeftRegion for integrase B7805 sequence
tttaggacaataaaacaaaataaaaaaccgccccagtgctaccaacacagagacggtctacatacccgaagatatgcgattaaaatccatgaatattgtatcatcttcggagcagtcacgcaagcggaacgtttgttttgcgctggctgttatttttataccaattttaaatatattttacaaaaggagagtgatacggaatgccagaaaaaatactacggtgcgccatatatatccgagtatccacatttgagcagagt

SEQ ID NO: 20805 - DNA, 260 bp, Unknown; identical to SEQ ID NO: 20748
  Description of Unknown: LeftRegion for integrase B7806 sequence

SEQ ID NO: 20806 - DNA, 260 bp, Unknown
  Description of Unknown: LeftRegion for integrase B7807 sequence
ctcgattctttaggataataaaacaaaaaccgccccagtgttaccagcactgagacggtctacatacccgaagatatgcgattaaaatccatgaatattgtatcatcttcggaaacagcttgcaagcggaacgtttgttttgcgctggctgttatttttatacctatttttaaatactatttacaaaggagtgatacaagatgcaagagaaaatattgagatgtgccatctatatccgcgtctccacatttgagcagagc

SEQ ID NO: 20807 - DNA, 260 bp, Unknown
  Description of Unknown: LeftRegion for integrase B7808 sequence
agacacgctaccaacgagccttgcacccgtaatcaatacgggtatctcaccataagactatcgctccgaagaatgcaatagtaagctcaagaatattgtatcatcttcggagcagctacgcaagcggaacgtttgttttgcgctggctgttatttttgtaccaattttaaatatattttacaaaaggagagtgatacggaatgccagaaaaaatactacggtgcgccatatatatccgagtatccacatttgagcagagt

SEQ ID NO: 20808 - DNA, 260 bp, Unknown
  Description of Unknown: LeftRegion for integrase B7809 sequence
tattttcttgctcaaaaatgcaatatagaaatctaagcatagaaaaagacagtccctgacaagaactgcctttccccatcgtttcctatgcagtacataacttcatagaatacagattcgcaacctttattctaccacgaagttgtgctgctgcatagctttatttttttacgcttttttacggcagaaagaaggtttttatgaatagtacatacttcagaccgcaaccggaactcttcggcctgcgtgttgttaaatat

SEQ ID NO: 20809 - DNA, 260 bp, Unknown; identical to SEQ ID NO: 20754
  Description of Unknown: LeftRegion for integrase B7810 sequence

SEQ ID NO: 20810 - DNA, 260 bp, Unknown; identical to SEQ ID NO: 19979
  Description of Unknown: LeftRegion for integrase B7811 sequence

SEQ ID NO: 20811 - DNA, 260 bp, Unknown
  Description of Unknown: LeftRegion for integrase B7812 sequence
tgccacccgactggataatttacaaaaaaaccgtcccggcggcaaccggaacggctcaagtaacattccgaagaatgatacccttattccttaaacattgtatcatcttcggacagcctacgcaagcggaacactcgttctccacaggctgttatttttgtacccttttttacataatatgaaccaaaggagctgatacaatgaagtcaaaaactctccggtgcgcgatctatatccgagtatctacaacagaacagatg

SEQ ID NO: 20812 - DNA, 260 bp, Unknown; identical to SEQ ID NO: 20747
  Description of Unknown: LeftRegion for integrase B7813 sequence

SEQ ID NO: 20813 - DNA, 260 bp, Unknown
  Description of Unknown: LeftRegion for integrase B7814 sequence
aactgcaaaataataaaagaaaccgcccctgcgccaacaggaacggttgatacatatccgaagatatgcaattgagctaccaactcacaaatattgtatcatcttcgggcagccactgcaagcggaacactcgttcctcgctggctgtattttttatacccatttttgtgcgacgtcgcacatatacttaggaaggtgatatgatgacgaacaaaattatccgctgcgctctctacatccgtgtcagcaccgctgagcag

SEQ ID NO: 20814 - DNA, 260 bp, Unknown; identical to SEQ ID NO: 20763
  Description of Unknown: LeftRegion for integrase B7815 sequence

SEQ ID NO: 20815 - DNA, 260 bp, Unknown; identical to SEQ ID NO: 20808
  Description of Unknown: LeftRegion for integrase B7816 sequence

SEQ ID NO: 20816 - DNA, 260 bp, Unknown; identical to SEQ ID NO: 20763
  Description of Unknown: LeftRegion for integrase B7817 sequence

SEQ ID NO: 20817 - DNA, 260 bp, Unknown
  Description of Unknown: LeftRegion for integrase B7818 sequence
ctctcgattctttaggacaataaaataaaaaaccgcccctgcgccaacagagacggtatacatatccgaagatatgctattgaaatccacgaatattgtatcatcttcggaaacagcttgcaagcggaacatatgttttgcgctggctgttatttttataccaattttaaatatattttataaaaggagagtgatacggaatgccagaaaaaatactacggtgtgccatatatatccgcgtatctacgtttgagcagagc

SEQ ID NO: 20818 - DNA, 260 bp, Unknown
  Description of Unknown: LeftRegion for integrase B7819 sequence
attatcttgccataaaatgcaatattgaaatctaaacatagaaaaagacagtccctgacaagaactgcctttccccatcgtttcctatgcagcgcattacttcatagaatactgattcacaacctttattctaccacgaagttgtgctgctgcatagctttatttttttacgcttttttacagtagaaagaaggttttttatgaacagtacatacttcagaccgcaaccggaactcttcggcctgcgtgttgttaaatat

SEQ ID NO: 20819 - DNA, 260 bp, Unknown; identical to SEQ ID NO: 20808
  Description of Unknown: LeftRegion for integrase B7820 sequence

SEQ ID NO: 20820 - DNA, 260 bp, Unknown
  Description of Unknown: LeftRegion for integrase B7821 sequence
tattatcttgctataaaatgcaatattgacatctaaacatagaaaaagacagtccctgacaagaactgcctttccccatcgtttcctatgcagtacataacttcatagaatacagattcgcaacctttattctaccacgaagttgtgctgctgcatagctttatttttttacgcttttttacggcagaaagaaggtttttatgaatagtacatacttcagaccgcagcctgaactctttggcctgcgtgtctgcaaatat

SEQ ID NO: 20821 - DNA, 260 bp, Unknown
  Description of Unknown: LeftRegion for integrase B7822 sequence
caagaagtgttatagataatagtttattgtagcaaaagaaaaacgcccggtttcccgaacgtttctcctttacctgctatgcagcacacgccgcatagaatagtccatcgcaacttctattctatcacaaaaagcgtgctgctgcatagctttattttttatactcttttttaacattttgatagaaagaaggttctattatgaatagttcatatttccgttcacagccggaactgtacggcttgcgtgtagcaaaatac

SEQ ID NO: 20822 - DNA, 260 bp, Unknown; identical to SEQ ID NO: 20736
  Description of Unknown: LeftRegion for integrase B7823 sequence

SEQ ID NO: 20823 - DNA, 260 bp, Unknown; identical to SEQ ID NO: 20736
  Description of Unknown: LeftRegion for integrase B7824 sequence

SEQ ID NO: 20824 - DNA, 260 bp, Unknown; identical to SEQ ID NO: 20736
  Description of Unknown: LeftRegion for integrase B7825 sequence

SEQ ID NO: 20825 - DNA, 260 bp, Unknown
  Description of Unknown: LeftRegion for integrase B7826 sequence
aatactcgatttattataaaatgtaagaaccgctccggcggcaaccggaacggctcaagtaacattccgaagaatgataccacgattcacaaaattattgtatcatcttcgggcagcctacgcaagcggaacactcgttctccgccggctgttatttttatacctttttttacataatatgaaccaaaggagctgatacaatgaaatcaaaaactctccggtgcgcgatctatatccgagtatctacgacagaacagatg

SEQ ID NO: 20826 - DNA, 260 bp, Unknown; identical to SEQ ID NO: 20736
  Description of Unknown: LeftRegion for integrase B7827 sequence

SEQ ID NO: 20827 - DNA, 260 bp, Unknown
  Description of Unknown: LeftRegion for integrase B7828 sequence
tttatattatttcgaacaccgtgattaatgcaaaaaagaaaaacgcccggtttcccaagcgtttctccttgacctgctatgcagcacacgccgcatagaatagtccatcgcaacttctattctatcacaaaaagcgtgctgctgcatagctttattttttatactcttttttaacattttgatagaaagaaggttttattatgagtagttcatatttccgtccacagccagaactgtacggcttgcgtgtagtaaaatac

SEQ ID NO: 20828 - DNA, 260 bp, Unknown; identical to SEQ ID NO: 20768
  Description of Unknown: LeftRegion for integrase B7829 sequence

SEQ ID NO: 20829 - DNA, 260 bp, Unknown; identical to SEQ ID NO: 20768
  Description of Unknown: LeftRegion for integrase B7830 sequence

SEQ ID NO: 20830 - DNA, 260 bp, Unknown
  Description of Unknown: LeftRegion for integrase B7831 sequence
ggcttaggaggaataaatatgatagtagaaatttacaagggaatagacagtgaaaagccagttgatattataattgttttaggataggaggtaagaaaatgattataagaagtaaagaagtattgaatgataaaactttaaaggagattcaagataatataaagaaattatatgataaacaaaaaggagaataactttagatgagagaggtcaagaaagcaatagcttattttagagtaagtacagatatgcaaaaagag

SEQ ID NO: 20831 - DNA, 260 bp, Unknown
  Description of Unknown: LeftRegion for integrase B7832 sequence
aaaagaaccgctcctgcgccaacaggaacggtcataggacgaaacatacgccaatatgtttctattaagttctccgaagagatacccaattccaaataatattgtatcatctccggagcagccatgcaagagaacaaaagttctcaggctgttatttttatactcatttttacgtatattgaagagaaaggtgatataatatgccaagtaaaattgaacgctgcgccatttacatccgtgtgtctaccgctgaacagatg

SEQ ID NO: 20832 - DNA, 260 bp, Unknown
  Description of Unknown: LeftRegion for integrase B7833 sequence
tattgatttaaaagaattgtaacattaaaacaaaagccccggtgctaccaacaccaggactctttgataagtactatacagtgctgaagcacgtacaataatcatcggcaatgatattgtaccacaaatttccagcacctgtataggtgttatttttgtacccatttttgcgtaacataaaaaaggaaaggtgatatgatatgacgactaaagttgaacgctgtgcaatctatatccgtgtatccactaccgagcaaatg

SEQ ID NO: 20833 - DNA, 260 bp, Unknown
  Description of Unknown: LeftRegion for integrase B7834 sequence
tgtaggatgcacatatctcgtcaaaatatgaaaaaggacagccgcgtcaacgactgccccttctcatgtgtctatgctccacagctttacgccaagaacagacacggatcacaccctctattctagcataaagctgtgttgctgcatagctttattttttatacccttttcagggttctgtgttagaaagaaggttttttatgaatacatattttcatccgcagccggaactgtacggcctgcgtgtagttaaatacata

SEQ ID NO: 20834 - DNA, 260 bp, Unknown
  Description of Unknown: LeftRegion for integrase B7835 sequence
aagtatctgcaatagatctgaaatagcaaaaagccccaggagctaccaactcccagagcttttcacatagatttctcttgccggacgcaccggaagatacaatcattctcgcaaattgattatatcatttccaaagcgtcctgacaaggggcgtattttttatacccaaaattaatacacttaaccaaggagatgatattatgacaaagccccagaccgcccttctgcgtgtagcgctctacatccgtgtatcctcagac

SEQ ID NO: 20835 - DNA, 260 bp, Unknown
  Description of Unknown: LeftRegion for integrase B7836 sequence
aaaccgctcctgcgccaacaggaacggtcgagcgatggaaacatacgccaatatgtttctctattaagtactccgaagagatacccaatctccaaataatattgtatcatcttcggagcagccacgcaagagaacaaaagttctcaggctgttatttttatactcatttttacgtatattgaagagaaaggtgatataatatgccaagtaaaattgaacgctgcgccatttacatccgtgtgtctaccgctgaacagatg

SEQ ID NO: 20836 - DNA, 260 bp, Unknown
  Description of Unknown: LeftRegion for integrase B7837 sequence
ttaaggaacgtcatttgaacgaatagaaatgtaaataaaaaaaagagcagcctccacgccaatggaaaccgctctttgacaacatatacctccgtataagcacggcgataaaatgtcaccccgcaagtctcattttatcataaaaccgtgcttgtgcataggttttatttttatacctttttttgaatggagttgataaaatgcgacgtaaaacaaccgctcatgttgagaaaatcctgctccgtgtggcaatctatatc

SEQ ID NO: 20837 - DNA, 260 bp, Unknown
  Description of Unknown: LeftRegion for integrase B7838 sequence
tcaaggaacgtcatttgaacgaatagaaatgtaaataaaaaaagagcagcctccacgccaatggaaaccgctctttagataacatatacctccgtataggcacggcgataaaatgtcaccccgcaagtctcattttatcataaaaccgtgcttgtgcataggttttatttttatacctttttttgaatggagttgataaaatgcgacgtaaaacaaccgctcctgttgagaaaatcctgctccgtgtggcaatttatatc

SEQ ID NO: 20838 - DNA, 260 bp, Unknown
  Description of Unknown: LeftRegion for integrase B7839 sequence
aaaaccgctcctgcgccaacaggaacggtcgagcgatgaaacatacaccaatatgtttctctattaagtactccgaagagatacccaatttccaaataatattgtatcatcttcggagcagccgcgcaagagaacaaaagttctctggctgttatttttatactcatttttacgtatattgaagagaaaggtgatataatatgccaagtaaaattgaacgctgcgccatttacatccgtgtgtctaccgctgaacagatg

SEQ ID NO: 20839 - DNA, 260 bp, Unknown
  Description of Unknown: LeftRegion for integrase B7840 sequence
aaagaaccgctcctgcgccaacaggaacggtcaagcgatgaaacatacgccaatatgtttctaattaagttctccgaagagatactcaaactgcaaatatattgtatcatcttcggacagccatcgcaagagaacaaaagttctcaggctgttatttttatactcatttttacgtatattgaagagaaaggtgatataatatgccaagtaaaattgaacgctgcgccatttacatccgtgtgtctaccgctgaacagatg

SEQ ID NO: 20840 - DNA, 260 bp, Unknown
  Description of Unknown: LeftRegion for integrase B7841 sequence
caagaaccgcccctgcgccaacaggaacggctctgggatatatccgaagatatacacctaatcaacgaaaatattgtatcatcttcggaacagtcacgcaagccggaacactcgttccatgctggctgttatttttgtatcctcgtccctatgcatgtgccgaggattgaaacatacaaatgaataaaggagatgataacatgtcggaaaagatcaaacgctgtgcgatctatatccgtgtctcaacttcagagcagatg

SEQ ID NO: 20841 - DNA, 260 bp, Unknown
  Description of Unknown: LeftRegion for integrase B7842 sequence
gtaggatgcacatatctcgtcaaaaatatgaaaaaggacagccgcgtcaacgactgccccttctcatgtgtctatgctccgcagctttacgccaagaacagacacggatcacaccctctattctagcataaagctgtgttgctgcatagctttattttttatacccttttcagggttctatgtcagaaagaaggttttttatgaatacatattttcatccgcagccggaactgtacggcctgcgtgtagttaaatacata

SEQ ID NO: 20842 - DNA, 260 bp, Unknown
  Description of Unknown: LeftRegion for integrase B7843 sequence
taaataaaagaaccgctcctgcgccaacaggaacggtcgagcgatgaaacatactctgtttctattaagttctccgaagagatacccaattccaaataatattgtatcatctccggagcagccacgcaagagaacaaaagttctctggctgttatttttatactcatttttacgtatattgaagagaaaggtgatataatatgccaagtaaaattgaacgctgcgccatttacatccgtgtgtccaccgctgaacagatg

SEQ ID NO: 20843 - DNA, 260 bp, Unknown
  Description of Unknown: LeftRegion for integrase B7844 sequence
ccattgcgtcatcctcctagttttgattatgtacacgcttcaggcactctatacaaataaaaaaggaagccgtgaccagcgacttcccttgcgaaacattgaaacaaaatatatcgcggaagaccgcccacgatgatattatgtccttttacattctatcatatcaagccttctttcgctaccagaaagaaggtttttatatgtctttttttactccaaacccacaacttttcgggcttcgtgtagttaaatatatcaga

SEQ ID NO: 20844 - DNA, 260 bp, Unknown
  Description of Unknown: LeftRegion for integrase B7845 sequence
actgtttaagaattaatggtttagattaaataaaaaatccccggtgttaccagcaccggggcatgagaaaactatacggtaccgaagcacgtacaatacccccacaaccaaggatattgtaccacaaatttccagcaccgtataggtgttatttttatacccatttttgcgtaacataaaaaaaggaaaggtgatatgatatgacgactaaagttgaacgctgtgcaatctatatccgcgtatccactactgagcaaatg

SEQ ID NO: 20845 - DNA, 260 bp, Unknown
  Description of Unknown: LeftRegion for integrase B7846 sequence
tcaaaaagaagtcaaagatttaagaaaatatctagctgaactggaaaaagaaataaacttaaaaaatgaacaagaaataaataaagataacttagaattatttgataaataaggaggatgttatgaaaaaagaaaatatcaaagctgccatattaaaaattaaggaattaaaagcaaaatgtaaaaaaggagcttaataaatgaaagttgttacataccttagagtttctacagaaatgcaaaaagatagaggttctctt

SEQ ID NO: 20846 - DNA, 260 bp, Unknown
  Description of Unknown: LeftRegion for integrase B7847 sequence
cccgcactgatttgatgtcgttatcgaatttttgcaataaaaaaagagcagcctccacgccaatggaaaccgctctttgacaacatatacctccgtataagcacggcgataaaatgtcacccgcaagtctcattttatcataaaaccgtgcttatgcataggttttatttttatacctttttttgaatggagttgataaaatgcgacgcaaaacaaccgctcctgttgagaaaatcctgctccgtgtggcaatctatatc

SEQ ID NO: 20847 - DNA, 260 bp, Unknown
  Description of Unknown: LeftRegion for integrase B7848 sequence
caaggaacgtcatttgaacgaatagaaatgtaaataaaaaaagagcagcctccacgccaatggaaaccgctctttagataacatatacctccgtataggcacggcgataaaatgtcaccccgcaagtctcattttatcataaaaccgtgcttgtgcataggttttatttttataccttttttttgaatggagttgataaaatgcgacgtaaaacaaccgctcctgttgagaaaatcctgctccgtgtggcaatctatatc

SEQ ID NO: 20848 - DNA, 260 bp, Unknown
  Description of Unknown: LeftRegion for integrase B7849 sequence
tatataaacattttttcaaaataaaaccgctcctgcgccaacaggaacggctcaagactaatgccccgaaggatacaccagtacgttcaaaatatagtgtatcatcttcgggcagccaccgcaagcagaactcatgttcttctgctggctgttatttttatactcatttttacgtatattgaagagaaaggtgatataatatgccaagtaaaattgaacgctgcgccatttacatccgtgtgtctaccgctgaacaaatg

SEQ ID NO: 20849 - DNA, 260 bp, Unknown
  Description of Unknown: LeftRegion for integrase B7850 sequence
atgaggatgatgaataaatgtaattaataaaaatccccggtgttaccagcaccagggacaatgagaaaactataaggtgtttggaacacaatacaattctctccctcacaaagattattgtatcacaaaaatccggcaccgtataggtgttatttttgtacccatttttacgtacactaaaggaggaaaggtgatataatatggcaaccaaaattgaacgctgcgcaatctatatccgcgtatctactacagaacagatg

SEQ ID NO: 20850 - DNA, 260 bp, Unknown
  Description of Unknown: LeftRegion for integrase B7851 sequence
tcgtcaaggaacgtcatttgaacgaatagaaatgtaaataaaaaaagagcagcctccacgccaatggaaaccgctctttgacaacatatacctccgtataagcacggcgataaaatgtcacccgcaagtctcattttatcataaaaccgtgcttatgcataggttttatttttataccttttttgaatggagttgataaaatgcgacgcaaaacaaccgctcctattgagaaaatcctgctccgtgtggcaatctatatc

SEQ ID NO: 20851 - DNA, 260 bp, Unknown
  Description of Unknown: LeftRegion for integrase B7852 sequence
ttcacactgatttgatgtcgttatcgaatttttgtaataaaaaagagcagcctccacgccaatggaaaccgctctttgataacatatatctatcgtacaagcacgattgataaaatgtcacccgcaagtctcattttatcataaaaccgtgcttgtgcataggttttatttttataccttttttgaatggagttgataaaatgcgacgtaaaacaaccgctcctgtcgagaaaatcctgctccgtgtggcaatctatatc

SEQ ID NO: 20852 - DNA, 260 bp, Unknown
  Description of Unknown: LeftRegion for integrase B7853 sequence
gtcaaggaacgtcatttgaacgaatagaaatgtaaataaaaaagagcagcctccacgccaatggaaactgctctttagataacatatacctccgtataagcacggcgataaaatgtcaccccgcaagtctcattttatcataaaaccgtgcttatgcataggttttatttttataccttttttggaatggagttgataaaatgcgacgtaaaacaaccgctcctgttgagaaaatcctgctccgtgtggcaatctatatc

SEQ ID NO: 20853 - DNA, 260 bp, Unknown; identical to SEQ ID NO: 20843
  Description of Unknown: LeftRegion for integrase B7854 sequence

SEQ ID NO: 20854 - DNA, 260 bp, Unknown
  Description of Unknown: LeftRegion for integrase B7855 sequence
aaagaaccgcccctgcgccaacaggaacggctctggaatatatccgaagatatacacctaatcaacgaaaatattgtatcatcttcggaacagtcacgcaagccggaacactcgttccatgctggctgttatttttgtatcctcgtccctatgcatggggcgaggattgaaacatacaaatgaataaaggagatgataacatgtcggaaaagatcaaacgctgtgcgatctatatccgtgtctcaacttcagagcagatg

SEQ ID NO: 20855 - DNA, 260 bp, Unknown; identical to SEQ ID NO: 20843
  Description of Unknown: LeftRegion for integrase B7856 sequence

SEQ ID NO: 20856 - DNA, 260 bp, Unknown
  Description of Unknown: LeftRegion for integrase B7857 sequence
acaaagaatcgaactaagtcatgatgtaataaaaagatcccggtgctaccaacaccgagatctttcgataaatactatactgtgcagggcacgtacaatactccatcagcaagaatattgtatcacaaaaatccggcaccgtataggtgttatttttgtacccatttttgcgtaacataaaaaaggaaaggtgatatgatatgacgactaaagttgaacgctgcgccatctatatccgtgtgtctactaccgaacaaatg

SEQ ID NO: 20857 - DNA, 260 bp, Unknown
  Description of Unknown: LeftRegion for integrase B7858 sequence
ccgcactgatttgatgtcgttatcgaatttttgtaataaaaaaagagcagcctccacgccaatggaaaccgctctttgacaacacatatctatcgtacaagcacgattgataaaatgtcacccgcaagtctcattttatcataaaaccgtgcttgtgcataggttttatttttataccttttttgaatggagttgataaaatgcgacgtaaaacaaccgctcctgttgagaaaatcctgctccgtgtggcaatctatatc

SEQ ID NO: 20858 - DNA, 260 bp, Unknown
  Description of Unknown: LeftRegion for integrase B7859 sequence
cgcactgatttgatgtcgttatcgaatttttgcaataaaaaaagagcagcctccacgccaatggaaaccgctctttagataacatatacctccgtataagcacggtgataaaatgtcaccccacaagtctcattttatcataaaaccgtgcttgtgcataggttttatttttatacatttttttgaatggagttgataaaatgcgacgtaaaacaaccgctcctgttgagaaaatcctgctccgtgtggcaatctatatc

SEQ ID NO: 20859 - DNA, 260 bp, Unknown
  Description of Unknown: LeftRegion for integrase B7860 sequence
aaaccgctcctgcgccaacaggaacggtcgagcgatggaaacatacgccaatatgtttctctattaagtactccgaagagatacccaatttccaaataatattgtatcatcttcggaacagccacgcaagagaacaaaagttctcaggctgttatttttatactcatttttacgtatattgaagagaaaggtgatataatatgccgagtaaaattgaacgctgcgccatttacatccgtgtgtctaccgctgaacagatg

SEQ ID NO: 20860 - DNA, 260 bp, Unknown
  Description of Unknown: LeftRegion for integrase B7861 sequence
aagttaaagaaaaataatttgaaataaaataaaaagccccggtgctaccaacaccaggactctttgataagtactatacaatgctgaagcacgtacaataatcatcggcaatgatattgtaccacaaatttccagcacctgtataggtgttatttttgtacccatttttgcgtaacataaaaaaggaaaggtgatatgatatgacaactaaagttgaacgctgtgcaatctatatccgtgtatccactaccgagcaaatg

SEQ ID NO: 20861 - DNA, 260 bp, Unknown
  Description of Unknown: LeftRegion for integrase B7862 sequence
tataaatataaccttataagaaaaaaaatcgccaccccgttggctcagggtggctcgcatatccgaagatatactaatatctgattgaacttcattgtatcatcttcggagcagtcttgcaagcggaacatacgttccttgctggctgttatttttgtactcatttttgcgtaacattaaagaaggaaaggtgatatgatatgacgactaaaattgaacgctgcgccatctatatccgtgtgtctactaccgaacaaatg

SEQ ID NO: 20862 - DNA, 260 bp, Unknown
  Description of Unknown: LeftRegion for integrase B7863 sequence
agcaccttttgttttacataaaaaataaccgccccagtgttgacgcaccgagacggtaagaaatctccgaagagatacctatatttggcagatatattgtatcaccttcggagcagctacgcaagcggaacactcgttccatgctggctgttatttttgtacccatttttacataccatacaaaaggaaggtgatgctgcatgtcagaaaaaataaaacgctgcgcaatctatatccgtgtcagcacatcagagcaaatg

SEQ ID NO: 20863 - DNA, 260 bp, Unknown
  Description of Unknown: LeftRegion for integrase B7864 sequence
caacaccgagacggtaacgcgccctctccgcacagcagagataggacgacttaaccataacacctccggagatgctacagcgtttcaaccaaaaatattgtatcaccttcggagcagctacgcaagcggaacactcgttccatgctggctgttatttttatacccacttttacataatattcaagggaaggtgatacagcatgtcagaaaaaataaaacgctgcgcaatctatatccgtgtcagcacatcagagcaaatg

SEQ ID NO: 20864 - DNA, 260 bp, Unknown
  Description of Unknown: LeftRegion for integrase B7865 sequence
actttttaaattaaattcaaaagaaccgctcctgctaccaacaggaacggctcaagactaatgccccgaaggatacaccagtacgttcaaaatatagtgtatcatcttcgggcagccaccgcaagcagaactcatgttcttctgctggctgttatttttatactcatttttacgtatattgaagagaaaggtgatataatatgccaagtaaaattgaacgctgcgccatttacatccgtgtgtctaccgctgaacagatg

SEQ ID NO: 20865 - DNA, 260 bp, Unknown
  Description of Unknown: LeftRegion for integrase B7866 sequence
ttgatcagacagaataatataaataaaagaaccgctcctgcgccaacaggaacggctcaagactaatgccccgaaggatacaccagtacgttcaaaatatagtgtatcatcttcggagcagccgcgcaagagaacaaaagttctctggctgttatttttatactcatttttacgtatattgaagagaaaggtgatataatatgccaagtaaaattgaacgctgcgccatttacatccgtgtgtctaccgctgaacagatg

SEQ ID NO: 20866 - DNA, 260 bp, Unknown
  Description of Unknown: LeftRegion for integrase B7867 sequence
taaaaaaccgctcctgcgccaacaggaacggtcgagcgatgaaacatacgccaatatgtttctactaagttctccgaagagatacccaatttgcaaatatattgtatcatcttcgggcagccaccgcaagagaacaaaagttctcaggctgttatttttatactcatttttacgtatattgaagagaaaggtgatataatatgccaagtaaaattgaacgctgcgccatttacatccgtgtgtctaccgctgaacaaatg

SEQ ID NO: 20867 - DNA, 260 bp, Unknown
  Description of Unknown: LeftRegion for integrase B7868 sequence
aaaagaaccgctcctgcgccaacaggaacggtcgagcgatgaaacatacgccaatatgtttctattaagttctccgaagagatacccaattccaaataatattgtatcatctccggagcagccacgcaagagaacaaaagttctcgggctgttatttttatactcatttttacgtatattgaagagaaaggtgatataatatgccaagtaaaattgaacgctgcgccatttacatccgtgtgtctaccgctgaacagatg

SEQ ID NO: 20868 - DNA, 260 bp, Unknown
  Description of Unknown: LeftRegion for integrase B7869 sequence
ccattgcgtcatcctcctagttttgattgtgtacacgcttcaggcactctatacaaataaaaaaggaagccgtgaccagcgacttcccttgtgaaacattaaaacaaaatatatcgcggaagaccgcccacgatgatattatgtccttttacattctatcatatcaagtcttctttcgctaccagaaagaaggtttttatatgtctttttttactccaaacccacaacttttcgggcttcgtgtagttaaatatatcaga

SEQ ID NO: 20869 - DNA, 260 bp, Unknown
  Description of Unknown: LeftRegion for integrase B7870 sequence
gactgatctattttatcgttaaagttattttatggtaaaaaagacgatccccactgcaatgggaaccgccttttgaaccttcattcatacttttgcaaaaagcatggtagaatgtcctcacaataatcattctatcataaaaccgtgctttttgcattggttttattttttataccattttttagattggagttgatagaatgaaacgacaaacagctaaactaaatgataaactgctgctccgggtagctatttacatc

SEQ ID NO: 20870 - DNA, 260 bp, Unknown
  Description of Unknown: LeftRegion for integrase B7871 sequence
ataaaaccgctcctgcgccaacaggaacggtcataggacgaaacatacgccaatatgtttctattaagttctccgaagagataccttaactccaaacaacattgtatcatcttcgggcagccaccgcaagagaacaaaagttctcaggctgttatttttatactcatttttacgtatattgaagagaaaggtgatataatatgccaagtaaaattgaacgctgcgccatttacatccgtgtgtctaccgctgaacagatg

SEQ ID NO: 20871 - DNA, 260 bp, Unknown
  Description of Unknown: LeftRegion for integrase B7872 sequence
tattgatttaaaagaattgtaacattaaaacaaaagccccggtgctaccaacaccaggactctttgataagtactatacagtgctgaagcacgtacaataatcatcggcaatgatattgtaccacaaatttccagcacctgtataggtgttatttttgtacccatttttgcgtaacataaaaaaggaaaggtgatatgatatgacgactaaagttgaacgctgtgcaatctatatccgtgtatctaccacagaacagatg

SEQ ID NO: 20872 - DNA, 260 bp, Unknown
  Description of Unknown: LeftRegion for integrase B7873 sequence
agaaaaccgctcctgcgccaacaggaacggtcgagcgatgaaacatacgccaatatgtttctctattaagtactccgaagagatacccaaatgcaataatattgtatcatttccggagcagccacgcaagagaacaaaagttctcaggctgttatttttatactcatttttacgtatattgaagagaaaggtgatataatatgccaagtaaaattgaacgctgcgccatttacatccgtgtgtccaccgctgaacagatg

SEQ ID NO: 20873 - DNA, 260 bp, Unknown
  Description of Unknown: LeftRegion for integrase B7874 sequence
tgccatgttagtatcttcatgttggtattatgtgcatatggtggcatttttattaatttttattattttgtagcattaaaaaaggggctgccctgcaagcaaccccaatcagcttatttaagaagaccgattcctgtataaactgtatttctattttatcataatatcggtacttctgcaatatgaagggagtattttttatgtcttattttaatttcaaccccgatttagtaggtgtacgcgttgttaaatacattcga

SEQ ID NO: 20874 - DNA, 260 bp, Unknown
  Description of Unknown: LeftRegion for integrase B7875 sequence
tatataaacattttttcaaaataaaaccgctcctgcgccaacaggaacagctcaagactaatgccccgaaggatacaccagtacgttcaaaatatagtgtatcatcttcgggcagccaccgcaagcagaactcatgttcttctgctggctgttatttttatactcatttttacgtatattgaagagaaaggtgatataatatgccaagtaaaattgaacgctgcgccatttacatccgtgtgtctactgcagaacagatg

SEQ ID NO: 20875 - DNA, 260 bp, Unknown
  Description of Unknown: LeftRegion for integrase B7876 sequence
gtaggatgcacatatctcgtcaaaatatgaaaaaggacagccgcgtcaacgactgccccttctcatgtgtctatgctccacagctttatgctcagaacagacacggatcacaccctctattctagcataaagttgtgttgctgcatagctttattttttataccctttttcagggttctatgttagaaagaaggttttttatgaatacatattttcatccgcagccggaactgtacggcctgcgtgtagttaaatacata

SEQ ID NO: 20876 - DNA, 260 bp, Unknown
  Description of Unknown: LeftRegion for integrase B7877 sequence
cggaagcaccttttgttttacataaaaaataaccgccccagtgttgacgcaccgagacggtaagaaatctccgaagagatacctatatttggcagatatattgtatcatcttcggagcagccttgcaagagaacgaaagttcgctggctgttatttttgtacctaattttacataccatacaaaaggaaggtgatacatcatgtcagaaaaaataaaacgctgcgcaatctatatccgtgtcagcacatcagagcaaatg

SEQ ID NO: 20877 - DNA, 260 bp, Unknown
  Description of Unknown: LeftRegion for integrase B7878 sequence
atttttcagatttatttgaatagacgaaaaaagccctaggagctaccaactcccagagcttttcacatagattctcttgccggatcattccggaaagatatgtctttctcgcaaattgattatatcatttccagaatgtcctgacaagaggtgtattttttatacgcaaaattaatacactagaccaaggagatgatattatggcaaaaactcagaccgcccttcagcgcgtagccctctacatccgtgtatcctccgat

SEQ ID NO: 20878 - DNA, 260 bp, Unknown
  Description of Unknown: LeftRegion for integrase B7879 sequence
tgaacaagcacttaaagaaagccaaaaagtttggaacaatcctaacgcacatgtaggtggtccacgttgggttggaaaaaacgaaggatatgaaagttgggctaaaagacaacaagaatttcaaaacttaatagctgaataattatatgggtagcaagcctacccttattattttttactttttttgaggaagtggaagaatgaaagtagcaatttatacgagagtaagtactgcagaacaaaatttaaacggattttca

SEQ ID NO: 20879 - DNA, 260 bp, Unknown
  Description of Unknown: LeftRegion for integrase B7880 sequence
gcactgatttgatgtcgttatcgaatttttgtaataaaaaaaagagcagcctccacgccaatggaaaccgctctttagataacatatacctccgtataagcacggtgataaaatgtcaccccacaagtctcattttatcataaaaccgtgcttgtgcataggttttatttttatacatttttttgaatggagttgataaaatgcgacgtaaaacaaccgctcctgttgagaaaatcctgctccgtgtggcaatctatatc

SEQ ID NO: 20880 - DNA, 260 bp, Unknown
  Description of Unknown: LeftRegion for integrase B7881 sequence
gaaccgctcctgcgccaacaggaacggtcgagcgatggaaacatacgccaatatgtttctctattaagtactccgaagagatacccaatttccaaataatattgtatcatcttcggaacagccacgcaagagaacaaaagttctctggctgttatttttatactcatttttacgtatattgaagagaaaggtgatataatatgccaagtaaaattgaacgctgcgccatttacatccgtgtgtctaccgctgaacagatg

SEQ ID NO: 20881 - DNA, 260 bp, Unknown
  Description of Unknown: LeftRegion for integrase B7882 sequence
tcaaggaacgtcatttgaacgaatagaaatgtaaataaaaaaagagcagcctccacgccaatggaaaccgctctttagataacatatacctccgtataggcacggcgataaaatgtcaccccgcaagtctcattttatcataaaaccgtgcttgtgcataggttttatttttatacctttttttgaatggagttgataaaatgcgacgtaaaacaaccgctcctgttgagaaaatcctgctccgtgtggcaatctatatc

SEQ ID NO: 20882 - DNA, 260 bp, Unknown
  Description of Unknown: LeftRegion for integrase B7883 sequence
aaagaaccgctcctgcgccaacaggaacggtcgagcgatgaaacatacgccaatatgtttctaattaagttctccgaagagatactcaaactgcaaatatattgtatcatcttcggacagcaatcgcaagagaacaaaagttctcaggctgttatttttatactcatttttacgtatattgaagagaaaggtgatataatatgccaagtaaaattgaacgctgcgccatttacatccgtgtgtctaccgctgaacagatg

SEQ ID NO: 20883 - DNA, 260 bp, Unknown
  Description of Unknown: LeftRegion for integrase B7884 sequence
tccattgcgtcatcctcctagttttgattatgtacacgcttcaggcactctatacaaataaaaaaggaagccgtgaccagcgacttcccttgcaaaatgttaaacaaaatatatcgcggaagaccgcccacgatgatattatgtccttttacattctatcatatcaagccttctttcgctaccagaaagaaggtttttatatgtctttttttactccaaacccacaacttttcgggcttcgtgtagttaaatatatcaga

SEQ ID NO: 20884 - DNA, 260 bp, Unknown; identical to SEQ ID NO: 20843
  Description of Unknown: LeftRegion for integrase B7885 sequence

SEQ ID NO: 20885 - DNA, 260 bp, Unknown
  Description of Unknown: LeftRegion for integrase B7886 sequence
tatataaacattttttcaaaataaaaccgctcctgcgccaacaggaacggctcaagactaatgccccgaaggatacaccagtacgttcaaaatatagtgtatcatcttcgggcagccaccgcaagcagaactcatgttcttctgctggctgttatttttatactcatttttacgtatattgaagagaaaggtgatataatatgccaagtaaaattgaacgctgcgccatttacatccgtgtgtctactgcagaacagatg

SEQ ID NO: 20886 - DNA, 260 bp, Unknown
  Description of Unknown: LeftRegion for integrase B7887 sequence
aactgtttaagaatcaatggcttagattaatataaaaatccccggtgttatcagcaccggggaatgagaaaactatacggtgccgaagcacgtacaataccctcacaaccaaggatattgtaccacaaatttccagcaccgtataggtgttatttttatacccatttttgcgtaacataaaaaaggaaaggtgatatgatatgacgactaaagttgaacgctgcgccatctatatccgtgtgtctactaccgaacaaatg

SEQ ID NO: 20887 - DNA, 260 bp, Unknown
  Description of Unknown: LeftRegion for integrase B7888 sequence
agaaaaccgctcctgcgccaacaggaacggtcgagcgatgaaacatacgccaatatgtttctctattaagtactccgaagagatacccaaatgcaataatattgtatcatctccggagcagccacgcaagagaacaaaagttctcaggctgttatttttatactcatttttacgtatattgaagagaaaggtgatataatatgccaagtaaaattgaacgctgcgccatttacatccgtgtgtccaccgctgaacagatg

SEQ ID NO: 20888 - DNA, 260 bp, Unknown
  Description of Unknown: LeftRegion for integrase B7889 sequence
gtcaaagaacgtcatttgaacgaatagaaatgtaaataaaaaagagcagcctccacgccaatggaaaccgctctttagataacatatacctccgtataagcacggcgataaaatgtcaccccgcaagtctcattttatcataaaaccgtgcttgtgcataggttttatttttatacctttttttgaatggagttgataaaatgcgacgtaaaacaaccgctcctgttgagaaaatcctgctccgtgtggcaatctatatc

SEQ ID NO: 20889 - DNA, 260 bp, Unknown
  Description of Unknown: LeftRegion for integrase B7890 sequence
tataaaagctttaaattctatatttggttttgtcaaattatgtgaaatgaaaaatatagactcaagaaatttataccaattttaattaaatataaggaggtaaactatgattaataatataataagaaaagctgatgcaactttagaagatcaagaaaaaatccttagtttgcttcttagtatggcaaatgaggaaataaatgaataatgtagctatttattgcagagaaagtacagagaagcaaaatattgacacactt

SEQ ID NO: 20890 - DNA, 260 bp, Unknown
  Description of Unknown: LeftRegion for integrase B7891 sequence
tcccgcactgatttgatgtcgttatcgaatttttgcaataaaaaaagagcagcctccacgccaatggaaaccgctctttgacaacatatacctccgtataagcacggcgataaaatgtcacccgcaagtctcattttatcataaaaccgtgcttgtgcataggttttatttttataccttttttgaatggagttgataaaatgcgacgtaaaacaaccgctcctgttgagaaaatcctgctccgtgtggcaatttatatc

SEQ ID NO: 20891 - DNA, 260 bp, Unknown
  Description of Unknown: LeftRegion for integrase B7892 sequence
aacaccgagacgccatcgtgactcggactttcgctatattgcaataacctacttcacgataatattttacatccgaagatgctcttttattttgcacatatattgtaacatcttcggatacacccgtcaacggaacatattttcgttgggtgttatttttatacatttttttaatataatttacaaaggggatagatactatggctaacaaaatactaagatgtgctatttatatacgcgtgtctactttcgagcaaagt

SEQ ID NO: 20892 - DNA, 260 bp, Unknown; identical to SEQ ID NO: 20888
  Description of Unknown: LeftRegion for integrase B7893 sequence

SEQ ID NO: 20893 - DNA, 260 bp, Unknown
  Description of Unknown: LeftRegion for integrase B7894 sequence
tatggatttgcaataataattttgaaaacaaaaccgcccggtacgccaataccgaacggtcttacatacatccgaagatgtatatccatattgcagatatattgtatcatctttggacagctattacaatcggaacatattttcgatagctgttatttttatacccttttttaatatattttaacaaggagatggttgttatgactaataagcttttaagatgtgctatttatatacgtgtatctacttttgagcaaagc

SEQ ID NO: 20894 - DNA, 260 bp, Unknown
  Description of Unknown: LeftRegion for integrase B7895 sequence
aagttaaagaaaaataatttgaaataaaataaaaagccccggtgctaccaacaccaggactctttgataagtactatacagtgctgaagcacgtacaataatcatcggcaatgatattgtaccacaaatttccagcacctgtataggtgttatttttgtacccatttttgcgtaacataaaaaaggaaaggtgatatgatatgacgactaaagttgaacgctgtgcaatctatatccgtgtatccactaccgagcaaatg

SEQ ID NO: 20895 - DNA, 260 bp, Unknown
  Description of Unknown: LeftRegion for integrase B7896 sequence
gactgatctattttatcgttaaagttattttatggtaaaaaagacgatccccactgcaatgggaaccgccttttgaaccttcattcatacttttgcaaaaagcatggtagaatgtcctcacaataatcattctatcataaaaccgtgctttttgcattggttttattttttataccattttttagattggagttgatagaatgaaacgacaaacagctaaactaaatgataaactgctgctccgggttgctatttacatt

SEQ ID NO: 20896 - DNA, 260 bp, Unknown
  Description of Unknown: LeftRegion for integrase B7897 sequence
actttttaaattaaattcaaaagaaccgctcctgctaccaacaggaacggctcaagactaatgccccgaaggatacaccagtacgttcaaaatatagtgtatcatcttcgggcagccaccgcaagcagaactcatgttcttctgctggctgttatttttatactcatttttacgtatattgaagagaaaggtgatataatatgccgagtaaaattgaacgctgcgccatttacatccgtgtgtctaccgctgaacagatg

SEQ ID NO: 20897 - DNA, 260 bp, Unknown
  Description of Unknown: LeftRegion for integrase B7898 sequence
gtacaaggctggtaaataaataaaaaccgctcctgcgccaacaggaacggctcaagactaatgccccgaaggatacaccagtacgttcaaaatatagtgtatcatcttcgggcagccaccgcaagcagaactcatgttcttctgctggctgttatttttatactcatttttacgtacattgaagagaaaggtgatataatatgccaagtaaaattgaacgctgcgccatttacatccgtgtgtctaccgctgaacagatg

SEQ ID NO: 20898 - DNA, 260 bp, Unknown
  Description of Unknown: LeftRegion for integrase B7899 sequence
cccgcactgatttgatgtcgttatcgaatttttgcaataaaaaagagcagcctccacgccaatggaaaccgctctttagataacatatacctccgtataggcacggcgataaaatgtcaccccgcaagtctcattttatcataaaaccgtgcttgtgcataggttttatttttataccttttttgaatggagttgataaaatgcgacgtaaaacaaccgctcctgttgagaaaatcctgctccgtgtggcaatctatatc

SEQ ID NO: 20899 - DNA, 260 bp, Unknown
  Description of Unknown: LeftRegion for integrase B7900 sequence
cattgcgtcatcctcctagttttgattatgtacacgcttcaggcactctatacaaataaaaaaaggaagccgtgaccagcgacttcccttgcgaaacattgaaacaaaatatatcgcggaagaccgcccacgatgatattatgtccttttacattctatcatatcaagccttctttcgctaccagaaagaaggtttttatatgtctttttttactccaaacccacaacttttcgggcttcgtgtagttaaatatatcaga

SEQ ID NO: 20900 - DNA, 260 bp, Unknown
  Description of Unknown: LeftRegion for integrase B7901 sequence
cgtcaagaaacgtcatttgaacgaatagaaatgtaaataaaaaaagagcagcctccacgccaatggaaaccgctctttgacaacatatacctccgtataagcacggcgataaaatgtcacccgcaagtctcattttatcataaaaccgtgcttatgcataggttttatttttatacctttttttgaatggagttgataaaatgcgacgcaaaacaacctctcctgttgagaaaatcctgctccgtgtggcaatctatatc

SEQ ID NO: 20901 - DNA, 260 bp, Unknown
  Description of Unknown: LeftRegion for integrase B7902 sequence
aaaaccgctcctgctaccaacaggaacggtcataggacgaaacatacgccaatatgtttctaattaagttctccgaagagatactcaaactgcaaataatattgtatcatctccggagcagccacgcaagagaacaaaagttctctggctgttatttttatactcatttttacgtatattgaagagaaaggtgatatgatatgccaagtaaaattgaacgctgcgccatttacatccgtgtgtctactgcagaacagatg

SEQ ID NO: 20902 - DNA, 260 bp, Unknown
  Description of Unknown: LeftRegion for integrase B7903 sequence
ccattgcgtcatcctcctagttttgattatgtacacgcttcaggcactctatacaaataaaaaaaggaagccgtgaccagcgacttcccttgcaaaatgttaaacaaaatatatcgcggaagaccgcccacgatgatattatgtccttttacattctatcatatcaagccttctttcgctaccagaaagaaggtttttatatgtctttttttactccaaacccacaacttttcgggcttcgtgtagttaaatatatcaga

SEQ ID NO: 20903 - DNA, 260 bp, Unknown
  Description of Unknown: LeftRegion for integrase B7904 sequence
gtaggatgcacatatctcgtcaaaaatatgaaaaaggacagccgcgtcaacgactgccccttctcatgtgtctatgctccacagctttacgccaagaacagacacggatcacaccctctattctagcataaagctgtgttgctgcatagctttattttttatacccttttcagggttctatgttagaaagaaggttttttatgaatacatattttcattcgcagccggaactgtacggcctgcgtgtagttaaatacata

SEQ ID NO: 20904 - DNA, 260 bp, Unknown
  Description of Unknown: LeftRegion for integrase B7905 sequence
ccattgcgtcatcctcctagtttagattatgtacacgcttcaggcactctattcaaataaaaaaggaagccgtgaccagcgacttcccttgtgaaacattaaaacaaaatatatcgcggaagaccgcccacgatgatattatgtccttttacattctatcatatcaagccttctttcgctaccagaaagaaggtttttatatgtctttttttactccaaacccacaacttttcgggcttcgtgtagttaaatatatcaga

SEQ ID NO: 20905 - DNA, 260 bp, Unknown
  Description of Unknown: LeftRegion for integrase B7906 sequence
ccgcatcgtatgaaatcaaagaaaaatagacattaaaaaagacgacctccactgcaatggaaatcgccttttaaagaatcattctcacctcgcaaaatgcacggtgataaaatgaaccctcacaagcctcattttatcataaaaccgtgcttttgcataggttttatttttatacctttttacagattggagttgataaaatgagacggaaaactgctgccaccgttgaaaaaatcctcctccgtgttgcaatttatatt

SEQ ID NO: 20906 - DNA, 260 bp, Unknown
  Description of Unknown: LeftRegion for integrase B7907 sequence
aaagaaccgctcctgcgccaacaggaacggtcgagcgatgaaacatacaccaatatgtttctctattaagtactccgaagagatacccaaatgcaataatattgtatcatctccggagcagccacgcaagagaacaaaagttctcgggctgttatttttatactcatttttacgtatattgaagagaaaggtgatataatatgccaagtaaaattgaacgctgcgccatttacatccgtgtgtctaccgctgaacagatg

SEQ ID NO: 20907 - DNA, 260 bp, Unknown
  Description of Unknown: LeftRegion for integrase B7908 sequence
gtttcagcaattcatcaatgctaatcatttcacatcctcctttttggggtctcactgcccgcacatatatattatcactttttctgtgtttttgcaaggtactttctgtatttcttctgtaaaaatgcaataatcttttaaatggccttgtggtgcgggttttcgtataattgaaggactattagggaggatgatggagattgaaaaaggtagcgttatatgtccgtgtctcaacagccaggcaggaccaggagggatac

SEQ ID NO: 20908 - DNA, 260 bp, Unknown
  Description of Unknown: LeftRegion for integrase B7909 sequence
atgtaatccaccacaataaaataaaaattccccggtgtctaccaaacaccagggaaaatcccgagtaatatatacggcgaaggattcgctcgatacagtactccctcaacaagaatattgtatcacaaaaatccagcaccgtataggtgttatttttgtacccatttttgcgtaacataaaaaaggaaaggtgatatgatatgacgactaaagttgaacgctgtgcaatctatatccgtgtatccactaccgagcaaatg

SEQ ID NO: 20909 - DNA, 260 bp, Unknown; identical to SEQ ID NO: 20885
  Description of Unknown: LeftRegion for integrase B7910 sequence

SEQ ID NO: 20910 - DNA, 260 bp, Unknown
  Description of Unknown: LeftRegion for integrase B7911 sequence
tatataaacattttttcaaaacaaaaccgctcctgcgccaacaggaacggctcaagactaatgccccgaaggatacaccagtacgttcaaaatatagtgtatcatcttcgggcagccaccgcaagcagaactcatgttcttctgctggctgttatttttatactcatttttacgtatattgaagagaaaggtgatataatatgccaagtaaaattgaacgctgcgccatttacatccgtgtgtctactgcagaacagatg

SEQ ID NO: 20911 - DNA, 260 bp, Unknown; identical to SEQ ID NO: 20883
  Description of Unknown: LeftRegion for integrase B7912 sequence

SEQ ID NO: 20912 - DNA, 260 bp, Unknown
  Description of Unknown: LeftRegion for integrase B7913 sequence
tatataaacattttttcaaaataaaaccgctcctgcgccaacaggaacggctcaagactaatgccccgaaggatacaccagtacgttcaaaatatagtgtatcatcttcgggcagccaccgcaagcagaactcatgttcttctgctggctgttatttttatactcatttttacgtatattgaagagaaaggtgatataatatgccaagtaaaattgaacgctgtgccatttacatccgtgtgtctaccgctgaacagatg

SEQ ID NO: 20913 - DNA, 260 bp, Unknown
  Description of Unknown: LeftRegion for integrase B7914 sequence
cagatttactgaaataaaaaagaaaaccgctcctgcgccaacaggaacggctcaagactaatgccccgaaggatacaccagtacgttcaaaatatagtgtatcatcttcgagcagccaccgcaagcagaactcatgttcttctgctggctgttatttttatactcatttttacgtacattgaagagaaaggtgatataatatgccaagtaaaattgaacgctgcgccatttacatccgtgtgtctaccgctgaacagatg

SEQ ID NO: 20914 - DNA, 260 bp, Unknown
  Description of Unknown: LeftRegion for integrase B7915 sequence
gatattacatataattctttcgatgaataaaaaagaaaagagggcagccctcgcaaggctgtccccttctcgcactatctatgcagccacggcttacgtgaatacaaagaatagcagcttcgcaacctctattctatcacaaagccgtgctgctgcatagctttattttttatacatttttttagaatgggggcgaatttatggcattttatacacagtcctgtccggaactgtacggaatgcgcgttgcgaaatacatc

SEQ ID NO: 20915 - DNA, 260 bp, Unknown
  Description of Unknown: LeftRegion for integrase B7916 sequence
ccgcatcgtatgaaatcaaagaaaaatagacattaaaaaagacgacctccactgcaatggaaatcgccttttaaagaatcattctcacctcgcaaaatgcacggtgataaaatgaaccctcacaagcctcattttatcataaaaccgtgcttttgcataggttttatttttatacctttttacagattggagttgataaaatgaggcgaaaagctgctgcaatcgtcgaaaaaatcctcctccgtgtcgcaatttatatc

SEQ ID NO: 20916 - DNA, 260 bp, Unknown
  Description of Unknown: LeftRegion for integrase B7917 sequence
ccattgcgtcatcctcctagttttgattatgtacacgcttcaggcactctattcaaataaaaaaggaagccgtgaccagcgacttcccttgtgaaacattaaaacaaaatatatcgcggaagaccgcccacgatgatattatgtccttttacattctatcatatcaagccttctttcgctactagaaagaaggtttttatatgtctttttttactccaaacccacaacttttcgggcttcgtgtagttaaatatatcaga

SEQ ID NO: 20917 - DNA, 260 bp, Unknown
  Description of Unknown: LeftRegion for integrase B7918 sequence
aatttatctaaataaacttatacgaataaaaagccccaggagctaccaactcccagagcttttcacatagattttctcttgccggacgcaccggaagatatatctttctcgcaaattgattatatcatttctggagcgtcctgacaagaggtgtattttttatacgcaaaattaatacactagaccaaggagatgatattatggcaaaaactcagaccgcccttcagcgcgtagccctctacatccgtgtatcctcagac

SEQ ID NO: 20918 - DNA, 260 bp, Unknown
  Description of Unknown: LeftRegion for integrase B7919 sequence
ttcggtctggctgttcaggttctttttttcgcttgtaactgctgccatgttatttcctcccttcgttctgtgatgtttatatgatcccttgcgaaacattgaaacaaaatatatcgcggaagaccgcccacgatgatattatgtccttttacattctatcatatcaagccttctttcgctaccagaaagaaggtttttatatgtctttttttactccaaacccacaacttttcgggcttcgtgtagttaaatatatcaga

SEQ ID NO: 20919 - DNA, 260 bp, Unknown; identical to SEQ ID NO: 20885
  Description of Unknown: LeftRegion for integrase B7920 sequence

SEQ ID NO: 20920 - DNA, 260 bp, Unknown
  Description of Unknown: LeftRegion for integrase B7921 sequence
tccattgcgtcatcctcctagttttgattatgtacacgcttcaggcactctatacaaataaaaaaggaagccgtgaccagcgacttcccttgcaaaatgttaaacaaaatatatcgcggaagaccgcccacgatgatattatgtccttttacattctatcatatcaagccttcttccgctactagaaagaaggtttttatatgtctttttttactccaaacccacaacttttcgggcttcgtgtagttaaatatatcaga

SEQ ID NO: 20921 - DNA, 260 bp, Unknown
  Description of Unknown: LeftRegion for integrase B7922 sequence
gtcaaggaacgtcatttgaacgaatagaaatgtaaataaaaaaagagcagcctccacgccaatgggaaccgctctttgacaacatatacctccgtataagcacggcgataaaatgtcaccccgcaagtctcattttatcataaaaccgtgcttgtgcataggttttatttttatacctttttttgaatggagttgataaaatgcgacgtaaaacaaccgctcctgttgagaaaatcctgctccgtgtggcaatctatatc

SEQ ID NO: 20922 - DNA, 260 bp, Unknown
  Description of Unknown: LeftRegion for integrase B7923 sequence
cgtcaaggaacgtcatttgaacgaatagaaatgtaaataaaaaaagagcagcctccacgccaatggaaaccgctctttgacaacatatacctccgtataagcacggcgataaaatgtcacccgcaagtctcattttatcataaaaccgtgcttatgcataggttttatttttatacctttttttgaatggagttgataaaatgcgacgcaaaacaaccgctcctgtcgagaaaatcctgctccgtgtggcaatctatatc

SEQ ID NO: 20923 - DNA, 260 bp, Unknown
  Description of Unknown: LeftRegion for integrase B7924 sequence
tgtaggatgcacatatcttgtcaaaatatgaaaaaggacagccgcgtcaacgactgccccttctcatgtgtctatgctccacagctttacgctcagaacagacacggatcgcaccctctattctagcataaagctgtgttgctgcatagctttattttttatacccttttcagggttctatgttagaaagaaggttttttatgaatacatattttcatccgcagccggaactgtacggcctacgcgtagttaaatacata

SEQ ID NO: 20924 - DNA, 260 bp, Unknown
  Description of Unknown: LeftRegion for integrase B7925 sequence
aaaccgctcctgcgccaacaggaacggtcgagcgatggaaacatacgccaatatgtttctctattaagtactccgaagagatacccaatctccaaataatattgtatcatcttcggagcagccacgcaagagaacaaaagttctcaggctgttatttttatactcatttttacgtatattgaagagaaaggtgatataatatgccaagtaaaattgaacgctgtgccatttacatccgtgtgtccaccgctgaacagatg

SEQ ID NO: 20925 - DNA, 260 bp, Unknown
  Description of Unknown: LeftRegion for integrase B7926 sequence
aaagaaccgctcctgcgccaacaggaacggtcataggaagaaacatactccaatatgtttctattaagttctccgaagagataccttaactccaaacaacattgtatcatcttcggacagccatcgcaagagaacaaaagttctcaggctgttatttttatactcatttttacgtatattgaagagaaaggtgatataatatgccaagtaaaattgaacgctgcgccatttacatccgtgtgtctaccgctgaacagatg

SEQ ID NO: 20926 - DNA, 260 bp, Unknown
  Description of Unknown: LeftRegion for integrase B7927 sequence
gcgagtacaaaataaaaaaccgcccctgcgccaacaggaacggttgatacatatccgaagatatgcaactgagctaccaactcataagtattgtatcatcttcgggcagccactgcaagcggaacactcgttcctcgctggctgtattttttatacccatttttgtgcgacatcgcacatatacttaggaaggtgatattatgacgaacaaatttacccgctgcgctctctatatccgtgtcagcaccgctgagcagtgt

SEQ ID NO: 20927 - DNA, 260 bp, Unknown
  Description of Unknown: LeftRegion for integrase B7928 sequence
tccattgcgtcatcctcctagtttagattatgtacacgcttcaggcactctattcaaataaaaaaggaagccgtgaccagcgacttcccttgcaaaatgttaaacaaaatatatcgcggaagaccgcccacgatgatattatgtccttttacattctatcatatcaagccttctttcgctaccagaaagaaggtttttatatgtctttttttactccaaacccacaacttttcgggcttcgtgtagttaaatatatcaga

SEQ ID NO: 20928 - DNA, 260 bp, Unknown
  Description of Unknown: LeftRegion for integrase B7929 sequence
ataaaaccgctcctgcgccaacaggaacggtcataggacgaaacatacgccaatatgtttctttcagtactccgaagagatacactgatttccgaataatattgtatcatctccggagcagccacgcaagagaacaaaagttctcgggctgttatttttgtacttatttttacgtatattgaagagaaaggtgatataatatgccaagtaaaattgaacgctgcgccatttacatccgtgtgtccaccgctgaacagatg

SEQ ID NO: 20929 - DNA, 260 bp, Unknown
  Description of Unknown: LeftRegion for integrase B7930 sequence
cccgcactgatttgatgtcgttatcgaatttttgcaataaaaaaagagcagcctccacgccaatggaaaccgctctttgacaacatatacctccgtataagcacggcgataaaatgtcacccgcaagtctcattttatcataaaaccgtgcttgtgcataggttttatttttatacctttttttgaatggagttgataaaatgcgacgtaaaacaaccgctcctgttgagaaaatcctgctccgtgtggcaatttatatc

SEQ ID NO: 20930 - DNA, 260 bp, Unknown
  Description of Unknown: LeftRegion for integrase B7931 sequence
cagacagaataatataaataaaagaaccgctcctgcgccaacaggaacggctcaagactaatgccccgaaggatacaccagtacgttcaaaatatagtgtatcatcttcgggcagccaccgcaagcagaactcatgttcttctgctggctgttatttttatactcatttttacgtatattgaagagaaaggtgatataatatgccaagtaaaattgaacgctgcgccatttacatccgtgtgtctaccgctgaacagatg

SEQ ID NO: 20931 - DNA, 260 bp, Unknown; identical to SEQ ID NO: 20883
  Description of Unknown: LeftRegion for integrase B7932 sequence

SEQ ID NO: 20932 - DNA, 260 bp, Unknown; identical to SEQ ID NO: 20929
  Description of Unknown: LeftRegion for integrase B7933 sequence

SEQ ID NO: 20933 - DNA, 260 bp, Unknown
  Description of Unknown: LeftRegion for integrase B7934 sequence
cagatttactgaaataaaaaagaaaaccgctcctgcgccaacaggaacggctcaagactaatgccccgaaggatacaccagtacgttcaaaatatagtgtatcatcttcgggcagccaccgcaagcagaactcatgttcttctgctggctgttatttttatactcatttttacgtatattgaagagaaaggtgatataatatgccaagtaaaattgaacgctgcgccatttacatccgtgtgtctaccgctgaacaaatg

SEQ ID NO: 20934 - DNA, 260 bp, Unknown; identical to SEQ ID NO: 20883
  Description of Unknown: LeftRegion for integrase B7935 sequence

SEQ ID NO: 20935 - DNA, 260 bp, Unknown; identical to SEQ ID NO: 20894
  Description of Unknown: LeftRegion for integrase B7936 sequence

SEQ ID NO: 20936 - DNA, 260 bp, Unknown
  Description of Unknown: LeftRegion for integrase B7937 sequence
gcactgatttgatgtcgttatcgaatttttgcaataaaaaaaagagcagcctccacgccaatggaaaccgctctttgacaacatatatctatcgtacaagcacgattgataaaatgtcacccgcaagtctcattttatcataaaaccgtgcttgtgcataggttttatttttatacctttttttgaatggagttgataaaatgcgacgtaaaacaaccgctcctgttgagaaaatcctgctccgtgtggcaatctatatc

SEQ ID NO: 20937 - DNA, 260 bp, Unknown
  Description of Unknown: LeftRegion for integrase B7938 sequence
gtcaaggaacgtcatttgaacgaatagaaatgtaaataaaaaaagagcagcctccacgccaatggaaaccgctctttagataacatatacctccgtataggcacggcgataaaatgtcaccccgcaagtctcattttatcataaaaccgtgcttgtgcataggttttatttttataccttttttgaatggagttgataaaatgcgacgtaaaacaaccgctcctgttgagaaaatcctgctccgtgtggcaatctatatc

SEQ ID NO: 20938 - DNA, 260 bp, Unknown
  Description of Unknown: LeftRegion for integrase B7939 sequence
agaaatggaaaataatccggacaaaaaccaacatgctggaggtggtccaggaatgtcgttaacacaccctaatcaatcatatgatagttttagaaaagaagtaggaaaagcaagaagtgaagcaatagttgttcaacaataaaatttcgggtagcccgcctacccttattatttttttgccaattttgaggagggagcacatgaaagtagcaatttacactagagtttcaagcgctgaacaggcaaatgaagggtattct

SEQ ID NO: 20939 - DNA, 260 bp, Unknown
  Description of Unknown: LeftRegion for integrase B7940 sequence
cagatttactgaaataaaaaagaaaaccgctcctgcgccaacaggaacggctcaagactaatgccccgaaggatacaccagtacgttcaaaatatagtgtatcatcttcgggcagccaccgcaagcagaactcatgttcttctgctggctgttatttttatactcatttttacgtatattgaagagaaaggtgatataatatgccaagtaaaattgaacgctgcgccatttacatccgtgtgtctaccgctgaacagatg

SEQ ID NO: 20940 - DNA, 260 bp, Unknown
  Description of Unknown: LeftRegion for integrase B7941 sequence
cgcactgatttgatgtcgttatcgaatttttgtaataaaaaaagagcagcctccacgccaatggaaaccgctctttgataacatatatctatcgcacaagcacgattgataaaatgtcacccgcaagtctcattttatcataaaaccgtgcttgtgcataggttttatttttatacctttttttgaatggagttgataaaatgcgacgtaaaacaaccgctcctgtcgagaaaatcctgctccgtgtggcaatctatatc

SEQ ID NO: 20941 - DNA, 260 bp, Unknown
  Description of Unknown: LeftRegion for integrase B7942 sequence
tagaaaaagagcaaaagaaaaaattagacaaataaaaaaccgcccctgctgccaacagagacggcttaatgaatactatacagtgccaaggcacgtacaataatccctagacaagaatattgtaccacaattttccagcatctgtatagatgttatttttgtacccttttttgcgtacattttaggaaaggtgatataatatgacagacaaaattgaacgctgtgcaatctatatccgtgtatctactaccgaacaaatg

SEQ ID NO: 20942 - DNA, 260 bp, Unknown
  Description of Unknown: LeftRegion for integrase B7943 sequence
gtaggatgcacatatctcgtcaaaaatatgaaaaaggacagtcgcgtcaacgactgccccctctcatgtgtctatgctccacagctttacgccaagaacagacacggatcacaccctctattctagcataaagctgtgttgctgcatagctttattttttatacccttttcagggttctatgttagaaagaaggttttttatgaatacatattttcatccgcagccggaactgtacggcctgcgtgtagttaaatacata

SEQ ID NO: 20943 - DNA, 260 bp, Unknown
  Description of Unknown: LeftRegion for integrase B7944 sequence
gtattacagatttactgaagtaaataaagaaccgctcctgcaccaacaggaacggctcaagactaatgccccgaaggatacaccagtacgttcaaaatatagtgtatcatcttcggagcagccgcgcaagagaacaaaagttctctggctgttatttttatactcatttttacgtatattgaagagaaaggtgatataatatgccaagtaaaattgaacgctgcgccatttacatccgtgtgtctactgctgaacagatg

SEQ ID NO: 20944 - DNA, 260 bp, Unknown
  Description of Unknown: LeftRegion for integrase B7945 sequence
atccaaaaagaacagagaaatttagagaaaaaataaaaagtcgctcctgcgtcaacaggaacgacctagtgaatactatacagtgccaaaacacgtataataccctcacaaccaaggatattgtaccacaaatttccggcaccgtataggtgttatttttgtactcatttttgtatatattttgggaaaggtgatatgatatgccaaacaaaattgaacgctgcgccatctacattcgtgtatccactaccgaacagatg

SEQ ID NO: 20945 - DNA, 260 bp, Unknown
  Description of Unknown: LeftRegion for integrase B7946 sequence
ctgaagtctttgcatgagccaaaataaaaggcgtctcctgccgcaaacagaaaacgccttgcgatgtctctgtctcgtaacttctgcaaaaggcacggacagaacgatcctacaagcatcattctaccataaaaccgtgttttttgcataggttttattttttataccctttttcgggtatttatggaagaaggtgcaatatgaatacatattttcatccgcagccggaactgtacggcttgcgtgtagttaaatacata

SEQ ID NO: 20946 - DNA, 260 bp, Unknown
  Description of Unknown: LeftRegion for integrase B7947 sequence
aaagaaccgctcctgcgccaacaggaacggtcataggacgaaacatacgccaatatgtttctttcagtactccgaagagatatactgatttccgaataatattgtatcatctccggagcaaccacgcaagagaacaaaagttctcgggctgttatttttgtacttatttttacgtatattgaagagaaaggtgatataatatgccaagtaaaattgaacgctgcgccatttacatccgtgtgtctaccgctgaacagatg

SEQ ID NO: 20947 - DNA, 260 bp, Unknown; identical to SEQ ID NO: 20843
  Description of Unknown: LeftRegion for integrase B7948 sequence

SEQ ID NO: 20948 - DNA, 260 bp, Unknown
  Description of Unknown: LeftRegion for integrase B7949 sequence
taggatgcacatatctcgtcaaaatatgaaaaaggacagccgcgtcaacgactgccccttctcatgtgtctatgctccacagtttttacgctcagaacagacacggatcgcaccctctattctagcataaagctgtgttgctgcatagctttattttttatacccttttcagggttctatgttagaaagaaggtttttttatgaatacatattttcatccgcagccggaacttttcggtctgcgtgtagttaaatacata

SEQ ID NO: 20949 - DNA, 260 bp, Unknown
  Description of Unknown: LeftRegion for integrase B7950 sequence
tattttcttgctcaaaaatgcaatatagaaatctaaacatagaaaaagacagtccctgacaagaactgcctttccccatcgtactctatgcagcacacggcttcaaagaatacagcttcgcaacctttattctaccacgaagctgtgttgttgcatagctttattttttacgcttttttatggcagaaagaaggttaatcatgagtacatactttcatccgcagccggaactcttcggcctgcgtgtcgttaaatatata

SEQ ID NO: 20950 - DNA, 260 bp, Unknown; identical to SEQ ID NO: 20868
  Description of Unknown: LeftRegion for integrase B7951 sequence

SEQ ID NO: 20951 - DNA, 260 bp, Unknown
  Description of Unknown: LeftRegion for integrase B7952 sequence
aattggaaatctaaaaactaataaagtaaaaagccccaggagctaccaactccaagagcttttcacatagattctcttgccggatcattccggaaagatatgtctttctcgcaaattgattatatcatttccagaatgtcttgacaagaggtgtattttttatacgccaaattaatacactagaccaaggagatgatatcatggcacaaccacagaccgcccttcagcgcgtagccctctacatccgtgtatcctcagat

SEQ ID NO: 20952 - DNA, 260 bp, Unknown; identical to SEQ ID NO: 20843
  Description of Unknown: LeftRegion for integrase B7953 sequence

SEQ ID NO: 20953 - DNA, 260 bp, Unknown
  Description of Unknown: LeftRegion for integrase B7954 sequence
attcaaaatcttgaataattaataaaataaaaaccgcccggtacgccaataccgaacggtcttgcatacatccgaagatgcatatccatattgcagatatattgtatcatctttggacagctattacaatcggaacatattttcgatagctgttatttttatacccttttttaatatattttaacaaggagatggttgttatgactaataagcttttaagatgtgctatttatatacgtgtatctacttttgagcaaagc

SEQ ID NO: 20954 - DNA, 260 bp, Unknown
  Description of Unknown: LeftRegion for integrase B7955 sequence
tccattgcgtcatcctcctagttttgattatgtacacgcttcaggcactctatacaaataaaaaaggaagccgtgaccagcgacttcccttgcgaaatgttaaacaaaatatatcgcggaagaccgcccacgatgatattatgtccttttacattctatcatatcaagccttctttcgctaccagaaagaaggtttttatatgtctttttttactccaaacccacaacttttcgggcttcgtgtagttaaatatatcaga

SEQ ID NO: 20955 - DNA, 260 bp, Unknown
  Description of Unknown: LeftRegion for integrase B7956 sequence
tgaacaggcacgtaaagatagcgagaaagtttggaacgatccaaatgcccatgtaggtggcccacgttgggttggtaaaaacgaaggatatgaaagttgggcaaaaagacaacaagaagttcaaaatacaacagctgaataattatatgggtagcaagcctacccttattattttttactttttttgaggaagtggaagaatgaaagtagcaatttatacgagagtaagtactgcagaacaaaatttaaacggattttca

SEQ ID NO: 20956 - DNA, 260 bp, Unknown
  Description of Unknown: LeftRegion for integrase B7957 sequence
actgtttaagaatcaatggcttagattaatataaaaatccccggtgttatcagcaccggggcacgagaaaactatacggtgccgaagcacgtacaataccctcacaaccaaggctattgtaccacaaatttccagcaccgtataggtgttatttttgtacccatttttgcgtaacattaaagatggaaaggtgatatgatatgacgactaaaattgaacgctgcgccatctatatccgtgtgtctactaccgaacaaatg

SEQ ID NO: 20957 - DNA, 260 bp, Unknown; identical to SEQ ID NO: 20832
  Description of Unknown: LeftRegion for integrase B7958 sequence

SEQ ID NO: 20958 - DNA, 260 bp, Unknown
  Description of Unknown: LeftRegion for integrase B7959 sequence
aaaaaaccgctcctgcgccaacaggaacggtcgagcgatgaaacatactccaatatgtttctgttaagttctccgaagagataccttaactccaaacaacattgtatcatcttcggacagccatcgcaagagaacaaaagttctcaggctgttatttttatactcatttttacgtatattgaagagaaaggtgatataatatgccaagtaaaattgaacgctgcgccatttacatccgtgtgtctaccgctgaacaaatg

SEQ ID NO: 20959 - DNA, 260 bp, Unknown; identical to SEQ ID NO: 20883
  Description of Unknown: LeftRegion for integrase B7960 sequence

SEQ ID NO: 20960 - DNA, 260 bp, Unknown
  Description of Unknown: LeftRegion for integrase B7961 sequence
attgatttaaaagaattgtaacattaaaacaaaagccccggtgctaccaacaccaggactctttgataagtactatacagtgctgaagcacgtacaataatcatcggcaatgatattgtaccacaaatttccagcacctgtataggtgttatttttgtacccatttttgcgtaacataaaaaaaggaaaggtgatatgatatgacgactaaaattgaacgctgtgcaatctatatccgtgtatccactaccgagcaaatg

SEQ ID NO: 20961 - DNA, 260 bp, Unknown; identical to SEQ ID NO: 20885
  Description of Unknown: LeftRegion for integrase B7962 sequence

SEQ ID NO: 20962 - DNA, 260 bp, Unknown
  Description of Unknown: LeftRegion for integrase B7963 sequence
ctgccatgttagtatcttcatgttggtattatgtgcatatggtggcatttttattaatttttattattttgtagcattaaaaaaggggctgccctgcaagcaaccccaatcagttcatttagaagaccgattctgtataaactgtatttctattttatcataaagtcggtacttctgcaatatggaagggagtattttttatgtcttattttaattttaaccccgatttagtaggtgtacgcgttgttaaatacattcga

SEQ ID NO: 20963 - DNA, 260 bp, Unknown
  Description of Unknown: LeftRegion for integrase B7964 sequence
ctgaagtctttgcatgagccaaaataaaaggcgtctcctgccgcaaacagaaaacgccttgcgatgtctctgtctcgtaacttctgcaaaaggcacggacagaacgatcctacaagcatcattctaccataaaaccgtgttttttgcataggttttattttttataccctttttcgggtatttatgtaagaaggtgcaatatgaatacatattttcatccgcagccggaactgtacggcttgcgtgtagttaaatacata

SEQ ID NO: 20964 - DNA, 260 bp, Unknown; identical to SEQ ID NO: 20864
  Description of Unknown: LeftRegion for integrase B7965 sequence

SEQ ID NO: 20965 - DNA, 260 bp, Unknown; identical to SEQ ID NO: 20902
  Description of Unknown: LeftRegion for integrase B7966 sequence

SEQ ID NO: 20966 - DNA, 260 bp, Unknown
  Description of Unknown: LeftRegion for integrase B7967 sequence
aaagagcttgcagaacaaagcggtataaactattctcaactgttggagtgtgctcttttagattatctcggacaacagcgcaaataagtttgagtttgagtttgagagccttgttattttactcttaaaccacaaaaagggggtgatgccttatgtcgagtattagagcagctatctatactcgcgtctaagtcagcacgatggaacaagcgaccgacggatattccataggcgagcaaaaggataaattactgcactac

SEQ ID NO: 20967 - DNA, 260 bp, Unknown
  Description of Unknown: LeftRegion for integrase B7968 sequence
gactgatctattttattgttaaagttattttatggtaaaaaagacgatccccactgcaatgggaaccgccttttgaaccttcattcatgcttttgcaaaaagcatggtagaatgtcctcacaataatcattctatcataaaaccgtgctttttgcattggttttattttttataccattttttagattggagttgatagaatgaaacgacaaacagctaaacaaaatgataaactgctgctccgggtggctatttacatt

SEQ ID NO: 20968 - DNA, 260 bp, Unknown
  Description of Unknown: LeftRegion for integrase B7969 sequence
aaaaaaccgctcctgcgccaacaggaacggtcgagcgatgaaacatacgccaatatgtttctctattaagtactccgaagagatacccaaatgcaataatattgtatcatctccggagcagccacgcaagagaacaaaagttctcaggctgttatttttatactcatttttacgtatattgaagagaaaggtgatataatatgccaagtaaaattgaacgctgcgccatttacatccgtgtgtctaccgctgaacagatg

SEQ ID NO: 20969 - DNA, 260 bp, Unknown
  Description of Unknown: LeftRegion for integrase B7970 sequence
attgctaatcttgattaactaaataaaaaccgcccggtgctaccaacaccgaacggctttcacatagattttctcttaccagatcgctctgatagatatactctatctcaacaatagaattatatcatttccagaatgtcctgacaagaggtgtattttttataccccaaattaatacactagaccaaggagatgatattatggcaaaacctcagaccgcccttcagcgcgtagccctctacatccgtgtatcctcagac

SEQ ID NO: 20970 - DNA, 260 bp, Unknown
  Description of Unknown: LeftRegion for integrase B7971 sequence
aaataatcaaccttcaaatactcaagaaacaccgcctacaactcacgatgaatcacaaatggaacaagtaccacaagaccattctggtggccacccatcaattttcggaacagatacgccaccaaaaaataattaaataaatttatatgggtagcatgcctacccttattattttttactttttttgaggaagtggaagaatgaaagtagcaatttatacgagagtaagtactgcagaacaaaatttaaacggattttca

SEQ ID NO: 20971 - DNA, 260 bp, Unknown; identical to SEQ ID NO: 20843
  Description of Unknown: LeftRegion for integrase B7972 sequence

SEQ ID NO: 20972 - DNA, 260 bp, Unknown
  Description of Unknown: LeftRegion for integrase B7973 sequence
tataaaagctttaaatgctatattcggttttgttaaattttcagaaaagaaaaatatagattcaaaaaatttatgccaattttagttaaaatatagggaggaaactatgagtaataatataataagaaaagctgatgtaactttagaagaacaaaaaaaaatccttagtttgcttcttagcatggcaaatgaggaaataagtgaataatgtagctatttattgtagagaaagcacagagaagcaaaatattgatacgctt

SEQ ID NO: 20973 - DNA, 260 bp, Unknown
  Description of Unknown: LeftRegion for integrase B7974 sequence
ccgcactgatttgatgtcgttatcgaatttttgtaataaaaaaagagcagcctccacgccaatggaaaccgctctttgataacatatatctatcgcacaagcacgattgataaaatgtcacccgcaagtctcattttatcataaaaccgtgcttgtgcataggttttatttttataccttttttgaatggagttgataaaatgcgacgtaaaacaaccgctcctgtcgagaaaatcctgctccgtgtggcaatctatatc

SEQ ID NO: 20974 - DNA, 260 bp, Unknown
  Description of Unknown: LeftRegion for integrase B7975 sequence
accataaccaaaacatttgttgatagtgagggacttcccattctttaatgtaaaaacgccccactgcttaaaacagtagggcgatgatatatacaaaaccgagaggccttatatacatccttagacaagattattatatcagacctcccggtaaaactcaataccgggtatttttatacctttttttaggaggaactgatatgaaacatgttggactttatatccgcgtcagcacagaggaacagactgaaaactattcg

SEQ ID NO: 20975 - DNA, 260 bp, Unknown
  Description of Unknown: LeftRegion for integrase B7976 sequence
tagaaaaagagcaaaagaaaaaattagacaaataaaaaaccgcccctgctaccaacagagacggcttaatgaatactatacagtgccaaggcacgtacaataatccctagacaagaatattgtaccacaattttccagcatctgtatagatgttatttttgtacccttttttgcgtacattttaggaaaggtgatataatatgacaaacaaaattgaacgctgtgcaatctatatccgtgtatctactaccgaacaaatg

SEQ ID NO: 20976 - DNA, 260 bp, Unknown; identical to SEQ ID NO: 20912
  Description of Unknown: LeftRegion for integrase B7977 sequence

SEQ ID NO: 20977 - DNA, 260 bp, Unknown
  Description of Unknown: LeftRegion for integrase B7978 sequence
cggacgacttcggttgtccgctttttattttgcatataaaaaggcgaccactgcgccaacagtgaccgccctgtgagattcactcacctccgtaaaagcacggtgataaaatgaaaccctcgacaagtctcattttatcacgaaaccgtgcttttgcataggttttatttttttacctttttatgattggagttgatgaaatgagacgaaaaaacgctcctcgtcttgaaaaaatcctcctccgtgtcgcaatttatatc

SEQ ID NO: 20978 - DNA, 260 bp, Unknown
  Description of Unknown: LeftRegion for integrase B7979 sequence
aaaaccgctcctgcgccaacaggaacggtcgagcgatgaaacatacaccaatatgtttctctattaagtactccgaagagatacccaattttcaaataatattgtatcatcttcggacagccatcgcaagagaacaaaagttctctggctgttatttttatactcatttttacgtatattgaagagaaaggtgatataatatgccaagtaaaattgaacgctgcgccatttacatccgtgtgtctaccgctgaacagatg

SEQ ID NO: 20979 - DNA, 260 bp, Unknown
  Description of Unknown: LeftRegion for integrase B7980 sequence
ataccggctttccgaaaaaatgcggcaaaatctaactcaataaaaaaaccgcccccggtgctaccaacaccaaggacggcaaaccgtcaaccgctcgtgggagctgccaacgtactctataaaagcaatcatattgtaccgcaggcagcccatattgtcaagagggctgcttttttgcgcccatttttaggaggtacgatatgaatgtcttttgctatgtccgggtttctacggagaatcagctggaaaattacagcatt

SEQ ID NO: 20980 - DNA, 260 bp, Unknown
  Description of Unknown: LeftRegion for integrase B7981 sequence
aataaaaccgctcctgcgccaacaggaacggtcgagcgatgaaacatacgccaatatgtttctattaagttctccgaagagatacctaaatgcaaattatattgtatcatcttcggagcagccacgcaagagaacaaaagttctcgggctgttatttttatactcatttttacgtatattgaagagaaaggtgatataatatgccaagtaaaattgaacgctgcgccatttacatccgtgtgtctaccgctgaacagatg

SEQ ID NO: 20981 - DNA, 260 bp, Unknown; identical to SEQ ID NO: 20864
  Description of Unknown: LeftRegion for integrase B7982 sequence

SEQ ID NO: 20982 - DNA, 260 bp, Unknown
  Description of Unknown: LeftRegion for integrase B7983 sequence
agaaaaccgctcctgcgccaacaggaacggtcgagcgatgaaacatacgccaatatgtttctctattaagtactccgaagagatacccaaatgcaataatattgtatcatctccggagcagccacgcaagagaacaaaagttctcaggctgttatttttatactcatttttacgtatattgaagagaaaggtgatataatatgccaagtaaaattaaacgctgcgccatttacatccgtgtgtctaccgctgaacagatg

SEQ ID NO: 20983 - DNA, 260 bp, Unknown
  Description of Unknown: LeftRegion for integrase B7984 sequence
caatcaagaaaaataacgaataaaaattccccggtgtctaccaaacaccagggaaaatcccgagtaatatatacggcgaaggattcgctcgatacagtactctcctcacaaagattattgtatcacaaaaatccggcaccgtataggtgttatttttgtacccatttttgcgtaacataaaaaaggaaaggtgatatgatatgacaactaaagttgaacgctgtgcaatctatatccgtgtatccactaccgaacaaatg

SEQ ID NO: 20984 - DNA, 260 bp, Unknown
  Description of Unknown: LeftRegion for integrase B7985 sequence
tttaaatactatattcggttttgttaaattttcagaaaagaaaaatatagattcaaaaaatttatgccaattttaattaaactataaattaataaggagaccaactatgagtaataatataataagaaaagctgatgcaactttagaagatcaagaaaaaatccttagtttgcttcttagtatggcaaatgaggaaataagtgaataatgtagctatttattgtagagaaagtacagagaagcaaaatatcgatacactt

SEQ ID NO: 20985 - DNA, 260 bp, Unknown; identical to SEQ ID NO: 20879
  Description of Unknown: LeftRegion for integrase B7986 sequence

SEQ ID NO: 20986 - DNA, 260 bp, Unknown
  Description of Unknown: LeftRegion for integrase B7987 sequence
cggtgttaccagcaccgagcagtcctacgtcctctccgctcagcggagataggacgatttcagtataacatccctgggaatgctacaacattaaaccaaaaatattgtatcatttccgggaacagcttgcaagaggtcaaatcctctggctgttatttttatgcccttttttactgtttaagggagaatggagtgacacaatgagaagaaaaacaactgctgccaatcaaaaaatcttacttcgcgccgctatttacatc

SEQ ID NO: 20987 - DNA, 260 bp, Unknown; identical to SEQ ID NO: 20843
  Description of Unknown: LeftRegion for integrase B7988 sequence

SEQ ID NO: 20988 - DNA, 260 bp, Unknown
  Description of Unknown: LeftRegion for integrase B7989 sequence
acggctctggaatacctccgaagagatacattagcagacaaaagccgtctactaaaaccatatctttcgaaaaatattgtatcatcttcggtcagctatcgcaatcagaacatttgtttttgatagctgttatttttgtatcctcgtccctatgcatggggcgcggattgaaacatacaaatgaataaggagatgataacatgtcggaaaagatcaaacgctgcgcgatctatatccgtgtctcaacttcggaacagatg

SEQ ID NO: 20989 - DNA, 260 bp, Unknown
  Description of Unknown: LeftRegion for integrase B7990 sequence
cattgcgtcatcctcctagttttgattatgtacacgcttcaggcactctatacaaataaaaaaaggaagccgtgaccagcgacttcctttgcgaaacattgaaacaaaatatatcgcggaagaccgcccacgatgatattatgtccttttacattctatcatatcaagccttctttcgctaccagaaagaaggtttttatatgtctttttttactccaaacccacaacttttcgggcttcgtgtagttaaatatatcaga

SEQ ID NO: 20990 - DNA, 260 bp, Unknown
  Description of Unknown: LeftRegion for integrase B7991 sequence
tataaaagctttaaatgctatattcggttttgttaaattttcagaaaagaaaaatatagattcaaaaaatttatgccaattttagttaaaatacagggaggaaactatgagtaataatataataagaaaagctgatgcaactttagaagaacaaaaaaaaatccttagtttgcttcttagcatggcaaatgaggaaataagtgaataatgtagctatttattgtagagaaagcacagagaaacaaaatattgatacgctt

SEQ ID NO: 20991 - DNA, 260 bp, Unknown
  Description of Unknown: LeftRegion for integrase B7992 sequence
aaaaaaccgctcctgcgccaacaggaacggtcataggatgaaacatacgccaatatgtttctttcagtactccgaagagatacactgatttccaacaaatattgtatcatctccggagcagccgcgcaagagaacaaaagttctcgggctgttatttttatactcatttttacgtatattgaagagaaaggtgatataatatgccaagtaaaattgaacgctgtgccatttacatccgtgtgtctaccgctgaacagatg

SEQ ID NO: 20992 - DNA, 260 bp, Unknown
  Description of Unknown: LeftRegion for integrase B7993 sequence
ttttctcatttttataaattagtttacgaaaaatcgaacactagggatggtgttctaaagccttgtaggataaaaaatgctagtgaaaagtatggacacttaatatccagaggtatgctcttaccctcaacagtcatgaattgttattttaagtatagcatacctctttttaaaaagtcaatgaaatggaggaaaaatagatgaaacgtgttgctttatatatgagagtttctactcaagagcaggcagaaaatggaaac

SEQ ID NO: 20993 - DNA, 260 bp, Unknown
  Description of Unknown: LeftRegion for integrase B7994 sequence
gtaggatgcacatatctcgtcaaaaatatgaaaaaggacagccgcgtcaacgactgccccttctcatgtgtctatgctccacagctttacgccaagaacagacacggatcacaccctctattctagcataaagctgtgttgctgcatagctttattttttatacccttttcagggttctatgttagaaagaaggttttttatgaatacatattttcatccgcagccggaactgtacggcctgcgtgtagttaaatacata

SEQ ID NO: 20994 - DNA, 260 bp, Unknown
  Description of Unknown: LeftRegion for integrase B7995 sequence
tagtaataaataatccaataataaaaaaatccccggtgttaccaaacaccagggaaaatcccgagtaatatatacggcgaaggattcgctcgatacagtactccctcaacaagaatattgtatcacaaaaatccggcaccgtataggtgttatttttgtacccatttttgcgtaacataaaaaaggaaaggtgatatgatatgacgactaaagttgaacgctgtgcaatctatatccgtgtatccactaccgagcaaatg

SEQ ID NO: 20995 - DNA, 260 bp, Unknown
  Description of Unknown: LeftRegion for integrase B7996 sequence
cgcactgatttgatgtcgttatcgaatttttgtaataaaaaaaagagcagcctccacgccaatggaaaccgctctttgataacatatatctatcgtacaagcacgattgataaaatgtcacccgcaagtctcattttatcataaaaccgtgcttgtgcataggttttatttttataccttttttgaatggagttgataaaatgcgacgtaaaacaaccgctcctgtcgagaaaatcctgctccgtgtggcaatctatatc

SEQ ID NO: 20996 - DNA, 260 bp, Unknown
  Description of Unknown: LeftRegion for integrase B7997 sequence
ctgaagtctttgcatgagccaaaataaaaggcgtctcctgccgcaaacagaaaacgccttgcgatgtctctgtctcgtaacttctgcaaaaggcacggacagaacgatcctacaagcatcattctaccataaaaccgtgttttttgcataggatttattttttataccctttttcgggtatttatgtaagaaggtgcaatatgaatacatattttcatccgcagccggaactgtacggcttgcgtgtagttaaatacata

SEQ ID NO: 20997 - DNA, 260 bp, Unknown
  Description of Unknown: LeftRegion for integrase B7998 sequence
aactgtttaagaattaatggtttagattaaataaaaaatccccggtgttaccagcaccggggcatgagaaaactatacggtaccgaagcacgtacaatacccccacaaccaaggatattgtaccacaaatttccagcaccgtataggtgttatttttatacccatttttgcgtaacataaaaaaggaaaggtgatatgatatgacgactaaagttgaacgctgtgcaatctatatccgcgtatccactactgagcaaatg

SEQ ID NO: 20998 - DNA, 260 bp, Unknown
  Description of Unknown: LeftRegion for integrase B7999 sequence
gtcaaagaacgtcatttgaacgaatagaaatgtaaataaaaaagagcagcctccacgccaatggaaaccgctctttagataacatatacctccgtataggcacggcgataaaatgtcaccccgcaagtctcattttatcataaaaccgtgcttgtgcataggttttatttttatacctttttttgaatggagttgataaaatgcgacgtaaaacaaccgctcctgttgagaaaatcctgctccgtgtggcaatctacatc

SEQ ID NO: 20999 - DNA, 260 bp, Unknown
  Description of Unknown: LeftRegion for integrase B8000 sequence
cgcactgatttgatgtcgttatcgaatttttgtaataaaaaaagagcagcctccacgccaatggaaaccgctctttagataacatatacctccgtataagcacggtgataaaatgtcaccccacaagtctcattttatcataaaaccgtgcttgtgcataggttttatttttatacctttttttgaatggagttgataaaatgcgacgtaaaacaaccgctcctgttgagaaaatcctgctccgtgtggcaatctatatc

SEQ ID NO: 21000 - DNA, 260 bp, Unknown
  Description of Unknown: LeftRegion for integrase B8001 sequence
aaaaaaccgctcctgcgccaacaggaacggtcataggacgaaacatacgccaatatgtttctttcagtactccgaagagatacactgatttccgaataatattgtatcatctccggagcagccacgcaagagaacaaaagttctcgggctgttatttttatactcatttttacgtatattgaagagaaaggtgatataatatgccaagtaaaattgaacgctgcgccatttacatccgtgtgtctaccgctgaacagatg

SEQ ID NO: 21001 - DNA, 260 bp, Unknown; identical to SEQ ID NO: 20993
  Description of Unknown: LeftRegion for integrase B8002 sequence

SEQ ID NO: 21002 - DNA, 260 bp, Unknown
  Description of Unknown: LeftRegion for integrase B8003 sequence
aaaagaaccgctcctgcgccaacaggaacggtcgagcgatgaaacatactccaatatgtttctattaagttctccgaagagatacccaattccaaataatattgtatcatctccggagcagccgcgcaagagaacaaaagttctctggctgttatttttatactcatttttacgtatattgaagagaaaggtgatataatatgccaagtaaaattgaacgctgcgccatttacatccgtgtgtctaccgctgaacagatg

SEQ ID NO: 21003 - DNA, 260 bp, Unknown
  Description of Unknown: LeftRegion for integrase B8004 sequence
tattgatttaaaagaattgtaacattaaaacaaaagccccggtgctaccaacaccaggactctttgataagtattatacagtgctgaagcacgtacaataatcatcggcaatgatattgtaccacaaatttccagcacctgtataggtgttatttttgtacccatttttgcgtaacataaaaaaggaaaggtgatatgatatgacgactaaagttgaacgctgtgcaatctatatccgtgtatccactaccgagcaaatg

SEQ ID NO: 21004 - DNA, 260 bp, Unknown
  Description of Unknown: LeftRegion for integrase B8005 sequence
tagaaaaagagcaaaagaaaaaattagacaaataaaaaaccgcccctgctaccaacagagacggcttaatgaatactatacagtgccaaggcacgtacaataatccctagacaagaatattgtaccacaattttccagcatctgtatagatgttatttttgcacccttttttgcgtacattttaggaaaggtgatataatatgacagacaaaattgaacgctgtgcaatctatatccgtgtatctactaccgaacaaatg

SEQ ID NO: 21005 - DNA, 260 bp, Unknown
  Description of Unknown: LeftRegion for integrase B8006 sequence
ataaaaccgctcctgcgccaacaggaacggtcataggacgaaacatacgccaatatgtttctttcagtactccgaagagatacactgatttccgaataatattgtatcatctccggagcagccacgcaagagaacaaaagttctcgggctgttatttttatactcatttttacgtatattgaagagaaaggtgatataatatgccaagtaaaattgaacgctgcgccatttacatccgtgtgtctaccgctgaacagatg

SEQ ID NO: 21006 - DNA, 260 bp, Unknown
  Description of Unknown: LeftRegion for integrase B8007 sequence
atatgtactacgttaaagtctttgcatgaacaaaaataagacgatccccactgcaatgggaaccgccttttgaaccttcattcacgcttttgcaaaaagcatgatagaatgatccttaccaattaccattctatcataaaaccatgctttttgcattggttttattttttataccattttttcagattggagttgatagaatgaaacgacaaacagctaaactaaatgataaactgctgctccgtgtggctatttatatt

SEQ ID NO: 21007 - DNA, 260 bp, Unknown
  Description of Unknown: LeftRegion for integrase B8008 sequence
tcgcacaataacagtagttacaaataaaaacgccccagtgttaccagcactggggcattgagaaaactatactttgcaaggaacttgcggtataatcctctccctcacagagactattatatcacaaattcctggcaccgtgtaggtgttatttttgtacccatttttgcgtaacattaaagaaggaaaggtgatatgatatgacgactaaagttgaacgctgtgcaatctatatccgtgtatccactaccgagcaaatg

SEQ ID NO: 21008 - DNA, 260 bp, Unknown; identical to SEQ ID NO: 20885
  Description of Unknown: LeftRegion for integrase B8009 sequence

SEQ ID NO: 21009 - DNA, 260 bp, Unknown
  Description of Unknown: LeftRegion for integrase B8010 sequence
tcaaaggacggcatttgaatgaataagaaaagtaaataaaaaagagcagcctccacgccaatggaaaccgctctttgataacatatatctatcgcacaagtacgattgataaaatgtcacccgcaagtctcattttaccataaaaccgtgcttgtgcataggttttatttttttacccttttttgattggagttgataaaatgagacgcaaaacaaccgctcctgtcgagaaaatcctgctccgtgtggcaatctatatc

SEQ ID NO: 21010 - DNA, 260 bp, Unknown
  Description of Unknown: LeftRegion for integrase B8011 sequence
gcaaaaccgctcctgcgccaacaggaacggtcgagcgatgaaacatacgccaatatgtttctaattaagttctccgaagagatactcaaactgcaaatatattgtatcatcttcggacagccatcgcaagagaacaaaagttctcaggctgttatttttatactcatttttacgtatattgaagagaaaggtgatataatatgccaagtaaaattgaacgctgtgccatttacatccgtgtgtctaccgctgaacagatg

SEQ ID NO: 21011 - DNA, 260 bp, Unknown
  Description of Unknown: LeftRegion for integrase B8012 sequence
aaaaaaaccgctcctgcgccaacaggaacggtcgagcgatgaaacatacaccaatatgtttctcattaagttctccgaagagatacccaaatgcaataatattgtatcatctccggagcagccacgcaagagaacaaaagttctcgggctgttatttttatactcatttttacgtatattgaagagaaaggtgatataatatgccaagtaaaattgaacgctgcgccatttacatccgtgtgtctaccgctgaacagatg

SEQ ID NO: 21012 - DNA, 260 bp, Unknown; identical to SEQ ID NO: 20889
  Description of Unknown: LeftRegion for integrase B8013 sequence

SEQ ID NO: 21013 - DNA, 260 bp, Unknown; identical to SEQ ID NO: 21002
  Description of Unknown: LeftRegion for integrase B8014 sequence

SEQ ID NO: 21014 - DNA, 260 bp, Unknown; identical to SEQ ID NO: 20883
  Description of Unknown: LeftRegion for integrase B8015 sequence

SEQ ID NO: 21015 - DNA, 260 bp, Unknown
  Description of Unknown: LeftRegion for integrase B8016 sequence
aataatcaaccttcaaatactcaagaaacaccacctacaactcacgatgaatcacaaatggaacaagtaccacaagaccattctggtggtcacccatcaattttcggaacagatacgccaccaaaaaataattaaataaatttatatgggtagcatgcctacccttattattttttttacttttttgaggaagtggaagaatgaaagtagcaatttatacgagagtaagtactgcagaacaaaatttaaacggattttca

SEQ ID NO: 21016 - DNA, 260 bp, Unknown
  Description of Unknown: LeftRegion for integrase B8017 sequence
acaaaaccgctcctgcgccaacaggaacggtcataggacgaaacatacgccaatatgtttctttcagtactccgaagagatacactgatttccgaataatattgtatcatctccggagcagccacgcaagagaacaaaagttctcaggctgttatttttatgctcatttttacgtatattgaagagaaaggtgatataatatgccaagtaaaattgaacgctgcgccatttacatccgtgtgtctaccgctgaacagatg

SEQ ID NO: 21017 - DNA, 260 bp, Unknown; identical to SEQ ID NO: 20883
  Description of Unknown: LeftRegion for integrase B8018 sequence

SEQ ID NO: 21018 - DNA, 260 bp, Unknown
  Description of Unknown: LeftRegion for integrase B8019 sequence
attcgcagcgacgtcgcttatgattgtgatatggatggcgaaaagattgtagaaaacaaccctcttagatatagaacaaaggaaaaaagcgcagggtcgcaggttacgcgagggtatcgaccgacagcgacgagcagctgacctcgtatgaggcacaggtcgattactacactaactatatcagcaggaaccccgactggatgttcgctggcgtctataccgacgaaggcatctccggcctcaacacccggcacagggag

SEQ ID NO: 21019 - DNA, 260 bp, Unknown; identical to SEQ ID NO: 20859
  Description of Unknown: LeftRegion for integrase B8020 sequence

SEQ ID NO: 21020 - DNA, 260 bp, Unknown
  Description of Unknown: LeftRegion for integrase B8021 sequence
atccagtactaaacgtggtcctctaatacccccattttttatttctaatttcatcggttctttcatttttcacctcctccacagctttatgctcagaacagacacggatcacaccatctattctagcataaagttgtgttgctgcatagctttattttttatacccttttcagggttctatgttagaaagaaggttttttatgaatacatattttcatccgcagccggaactgtacggcctgcgtgtagttaaatacata

SEQ ID NO: 21021 - DNA, 260 bp, Unknown
  Description of Unknown: LeftRegion for integrase B8022 sequence
gcggaaacgtcagctgaagttgaataatttataataaaacaaaaagagcagccatctggtaaatggctgcccctctgttgcattctatgcagcacgcaagctacaaagaatagacaattcgcaccttctattctaccacaaagctgtgctgctgcatagctttatttttatacaattttttaagagaaagaaggtattttatgagttatatagagaatgaaagtctatgtggactccgtgttgtgaagtatattcgatgc

SEQ ID NO: 21022 - DNA, 260 bp, Unknown; identical to SEQ ID NO: 20843
  Description of Unknown: LeftRegion for integrase B8023 sequence

SEQ ID NO: 21023 - DNA, 260 bp, Unknown
  Description of Unknown: LeftRegion for integrase B8024 sequence
tcgcacaataacagtagttacaaataaaaacgccccagtgttaccagcactggggcattgagaaaactatactttgcaaggaacttgcggtataatcctctccctcacagagactattatatcacaaattcctggcaccgtgtaggtgttatttttgtacccatttttgcgtaacattaaagaaggaaaggtgatatgatatgacgactaaaattgaacgctgcgccatctatatccgtgtgtctactaccgaacaaatg

SEQ ID NO: 21024 - DNA, 260 bp, Unknown; identical to SEQ ID NO: 20846
  Description of Unknown: LeftRegion for integrase B8025 sequence

SEQ ID NO: 21025 - DNA, 260 bp, Unknown; identical to SEQ ID NO: 20912
  Description of Unknown: LeftRegion for integrase B8026 sequence

SEQ ID NO: 21026 - DNA, 260 bp, Unknown; identical to SEQ ID NO: 20843
  Description of Unknown: LeftRegion for integrase B8027 sequence

SEQ ID NO: 21027 - DNA, 260 bp, Unknown; identical to SEQ ID NO: 20881
  Description of Unknown: LeftRegion for integrase B8028 sequence

SEQ ID NO: 21028 - DNA, 260 bp, Unknown
  Description of Unknown: LeftRegion for integrase B8029 sequence
ctaaagcaaaaaaagaaccgcccctgttggcgcaaggacggatcttcataggcaataccgaagatggtatcaaccaaacttttgacttacatattgtatcatcttcaggcagctatcgcaagcggaacacacgttctatgccagctgttatttttatacccatttttgtgcgatgtcgcacatatacttaggaaggtgatatgatgaaattgcaacgatgtgcaatctacatccgtgtatcaactacagaacagatgatg

SEQ ID NO: 21029 - DNA, 260 bp, Unknown
  Description of Unknown: LeftRegion for integrase B8030 sequence
ctgccatgttagtatcttcatgttggtattgtgtgcatatggtggcatttttattaatttttattattttgtagcattaaaaaaggggctgccctgcaagcaaccccaatcagttcatttagaagaccgattctgtataaactgtatttctattttatcataaagtcggtacttctgcaatatggaagggagtattttttatgtcttattttaatttcaaccccgatttagtaggtgtacgcgttgttaaatacattcga

SEQ ID NO: 21030 - DNA, 260 bp, Unknown; identical to SEQ ID NO: 20843
  Description of Unknown: LeftRegion for integrase B8031 sequence

SEQ ID NO: 21031 - DNA, 260 bp, Unknown; identical to SEQ ID NO: 20843
  Description of Unknown: LeftRegion for integrase B8032 sequence

SEQ ID NO: 21032 - DNA, 260 bp, Unknown
  Description of Unknown: LeftRegion for integrase B8033 sequence
tctccatttttcagtccctcctgtggcatactctctatagtttgccactttcaggaaatgaataaagggcagccataaagactgccctctttgtacccgcacagcagtgtgctgcgatagatacggttcgcatccttaattctatcatattcacctgctgctgcatagtatttttgctattagaaagtaggtgtttttttatgctgtattcacagtctattcccgaattgtacgggatgcgtgtgtgtaaatatatccga

SEQ ID NO: 21033 - DNA, 260 bp, Unknown
  Description of Unknown: LeftRegion for integrase B8034 sequence
actaaagcaaaaaagaaccgcccctgttggcgcaaggacggatcttcataggcaataccgaagatggtatcaaccaaacttttgacttacatattgtatcatcttcaggcagctatcgcaagcggaacacacgttctatgccagctgttatttttatacccatttttgtgcgatgtcgcacatatacttaggaaggtgatatgatgaaattgcaacgatgtgcaatctacatccgtgtatcaactacagaacagatgatg

SEQ ID NO: 21034 - DNA, 260 bp, Unknown; identical to SEQ ID NO: 20883
  Description of Unknown: LeftRegion for integrase B8035 sequence

SEQ ID NO: 21035 - DNA, 260 bp, Unknown
  Description of Unknown: LeftRegion for integrase B8036 sequence
actaaagcaaaaaagaaccgcccctgttggcgcaaggacggatcttcataggcaataccgaagatggtatcaaccaaacttttgacttacatattgtatcatcttcaggcagctatcgcaagcggaacacacgttctatgccagctgttatttttatacccatttttgtgcgatgtcgcacatatacttaggaaggtgatatgatgaaatttcaacgatgtgcaatctacatccgtgtatcaactacagaacagatgatg

SEQ ID NO: 21036 - DNA, 260 bp, Unknown
  Description of Unknown: LeftRegion for integrase B8037 sequence
tgaaactgtaggctattattaaccaaaataaaaagacgatccccactgcaatgggaaccgcctttcgaaccttcattcatacttttgcaaaaagcatacgcatgatagaatgatccttaccagttaccattctatcataaaaccgtgctttttgcattggttttattttttataccattttttagattggagttgatagaatgaaacgacaaacagctaaactaaatgataaactgctgctccgggttgctatttacatc

SEQ ID NO: 21037 - DNA, 260 bp, Unknown
  Description of Unknown: LeftRegion for integrase B8038 sequence
gactgatctattttatcgttaaagttattttatggtaaaaaagacgatccccactgcaatgggaaccgccttttgaaccttcattcatacttttgcaaaaagcatggtagaatgtcctcacaataatcattctatcataaaaccgtgctttttgcattggttttattttttataccattttttagattggagttgatagaatgaaacgacaaacagctaaactaaatgataaactgctgctccgtgtggctatttacatc

SEQ ID NO: 21038 - DNA, 260 bp, Unknown; identical to SEQ ID NO: 20883
  Description of Unknown: LeftRegion for integrase B8039 sequence

SEQ ID NO: 21039 - DNA, 260 bp, Unknown
  Description of Unknown: LeftRegion for integrase B8040 sequence
attgtgaacgatgcacggaatgagtatctagccgccgctggtttcacggatgaagaaattgctgcgcggattgacatcggatgaaatataaaaagtgccccagggtgccggaacaccctggggctttgcataaacaactataaccacgctaatggagcatttatgctctcctattatagcgaactagggagagattgtcaatgaaagcagaaatagaccgcattatcagagttgcgctatatatccgcgtatctaccgag

SEQ ID NO: 21040 - DNA, 260 bp, Unknown
  Description of Unknown: LeftRegion for integrase B8041 sequence
ccattgcgtcatcctcctagtttagattatgtacacgcttcaggcactctatacaaataaaaaaggaagccgtgaccagcgacttcccttgcgaaacattgaaacaaaatatatcgcggaagaccgcccacgatgatattatgtccttttacattctatcatatcaagccttctttcgctaccagaaagaaggtttttatatgtctttttttactccaaacccacaacttttcgggcttcgtgtagttaaatatatcaga

SEQ ID NO: 21041 - DNA, 260 bp, Unknown
  Description of Unknown: LeftRegion for integrase B8042 sequence
aatatgaacaagaaccacttccagaagatgatgtgacagcttttcttcgcgaacgtggttttgtagaatagtatttaaaaatcccgacggtgcggggacactgccgggatttgtgcaacgtttgtgtaatcataccagatacaacataccgtctgcattgttattgtagcatatgcagacaggaaaagaaaggaaataacatgataaaaaaggaactttcttctgccggtccgcttcgtgttgcgctttatatccgcgtt

SEQ ID NO: 21042 - DNA, 260 bp, Unknown
  Description of Unknown: LeftRegion for integrase B8043 sequence
ctcccttctaccgcctaagcggttttctcgcgcaaggacggatcttcataggcaataccgaagatggtatcaaccaaacttttgacttacatattgtatcatcttcaggcagctatcgcaagcggaacacacgttctatgccagctgttatttttatacccatttttgtgcgatgtcgcacatatacttaggaaggtgatatgatgaaattgcaacgatgtgcaatctacatccgtgtatcaactacagaacagatgatg

SEQ ID NO: 21043 - DNA, 260 bp, Unknown
  Description of Unknown: LeftRegion for integrase B8044 sequence
acttccagcattgcgtgtcgtccccctatttagatgatttgcacgctttacccattttattcatactacacgaaaaaagaaagccgccgaagcgactttcaaaaaagttttatctgtaatcgaggtatcacagaataaacccaagcacgttttattctatcatattggtacttcttttactagaagaaagaaggtttattatgtcttattcacgttttaattcgcatcttgtcggtatgcgtgttgcaaaatacataaga

SEQ ID NO: 21044 - DNA, 260 bp, Unknown
  Description of Unknown: LeftRegion for integrase B8045 sequence
ttttataaaggaatataagcaataaaaaaaccgctcccaccgactgcaatcggtagaagcggaaaccattacaacgggtgcaatgatacatttcaaatgcaaaaatattgtatcatacccttgtaaatttttcaagtgaagtttacaagggatttttgcacccctttttagaatataaatattaaaaaaggagtgtttttatgaaaaaagttgcgtgttatgtaagagtttcaacagaaaatcagattgaaaattatagc

SEQ ID NO: 21045 - DNA, 260 bp, Unknown
  Description of Unknown: LeftRegion for integrase B8046 sequence
gataaccttcgagctctcagaaaccggcatgaaagcgggacggcacacaatatccgccgtgcagtatgacacagacgaccccagcggcaaaattgtgacgtacaagtcggcggtatatgaggcaaaagacatgtagccaataaaacaaaacccgccccggtgctgctaacaccggggcggtaataataggaggtgtagatatgccggatatgaaggggaaacgcatacttttatatgtgcgggtgtctaccgaggagcag

SEQ ID NO: 21046 - DNA, 260 bp, Unknown
  Description of Unknown: LeftRegion for integrase B8047 sequence
tccattgcgtcatcctcctagtttagattatgcacacgcttcaggcactctattcaaataaaaaggaagccgtgaccagcgacttcccttgcgaaacattgaaacaaaatatatcgcggaagaccgcccacgatgatattatgtccttttacattctatcatattaagccttctttcgctaccagaaagaaggtttttatatgtctttttttactccaaacccacaacttttcgggcttcgtgtagttaaatatatcaga

SEQ ID NO: 21047 - DNA, 260 bp, Unknown
  Description of Unknown: LeftRegion for integrase B8048 sequence
gactgatctattttatcgttaaagttattttatggtaaaaaagacgatccccactgcaatgggaaccgccttttgaaccttcattcatacttttgcaaaaagcatggtagaatgtcctcacaacaatcattctatcataaaaccgtgctttttgcattggttttattttttataccattttttagattggagttgatagaatgaaacgacaaacagctaaactaaatgataaactgctgctccgtgtggctatttacatc

SEQ ID NO: 21048 - DNA, 260 bp, Unknown
  Description of Unknown: LeftRegion for integrase B8049 sequence
gccatgttagtatcttcatgttggtattatgtgcatatggtggcatttttattaatttttattattttgtagcattaaaaaaggggctgccctgcaagcaaccccaatcagcttatttaagaagaccgattcctgtataaactgtatttctattttatcataaagtcggtacttctgcaatatggaagggagtattttttatgtcttattttaatttcaaccccgatttagtaggtgtacgcgttgttaaatacattcga

SEQ ID NO: 21049 - DNA, 260 bp, Unknown
  Description of Unknown: LeftRegion for integrase B8050 sequence
aatatgaacaagaaccacttccagaagatgatgtgacagcttttcttcgcgaacgtggttttgtagaatagtattttaaaatcccgacggtgcggggacactgccgggatttgtgcaacgtttgtgtaatcataccagatacaacataccgtctgcattgttattgtagcatatgcagacaggaaaaggaaggaaataacatgataaaaaaggaactttcttctgccggtccgcttcgtgttgcgctttatatccgcgtt

SEQ ID NO: 21050 - DNA, 260 bp, Unknown
  Description of Unknown: LeftRegion for integrase B8051 sequence
acctccctgtttcatctgttgcaaataagtaatctaatgttttgtctgggaatgcttttcgcttgatttctacacattcttttgacttacatattgtatcatcttcaggcagctatcgcaagcggaacacacgttctatgccagctgttatttttatacccatttttgtgcgatgtcgcacatatacttaggaaggtgatatgatgaaattgcaacgatgtgcaatctacatccgtgtatcaactacagaacagatgatg

SEQ ID NO: 21051 - DNA, 260 bp, Unknown
  Description of Unknown: LeftRegion for integrase B8052 sequence
tgaaactgtaggctattattaaccaaaataaaaagacgatccccactgcaatgggaaccgcctttcgaaccttcattcacacttttgcaaaaagcatacgcatgatagaatgatccttaccagttaccattctatcataaaaccgtgctttttgcattggttttattttttataccattttttagattggagttgatagaatgaaacgacaaacagctaaactaaatgataaactgctgctccgtgtggctatttacatc

SEQ ID NO: 21052 - DNA, 260 bp, Unknown
  Description of Unknown: LeftRegion for integrase B8053 sequence
tccattgcgtcatcctcctagttttgattatgtacacgcttcaggcactctatacaaataaaaaaggaagccgtgaccagcgacttcccttgcaaaatgttaaacaaaatatatcgcggaagaccgcccacgatgatattatgtccttttacattctatcatatcaagccttctttcgctaccagaaagaaggtttttatatgtctttttttactccaaacccacaacttttcgggcttcgtgttgcaaaatatatccgt

SEQ ID NO: 21053 - DNA, 260 bp, Unknown; identical to SEQ ID NO: 20883
  Description of Unknown: LeftRegion for integrase B8054 sequence

SEQ ID NO: 21054 - DNA, 260 bp, Unknown
  Description of Unknown: LeftRegion for integrase B8055 sequence
tccattgcgtcatcctcctagttttgattatgtacacgcttcaggcactctatacaaataaaaaaggaagccgtgaccagcgacttcccttgcaaaatgttaaacaaaatatatcgcggaagaccgcccacgatgatattatgtccttttacattctatcatatcaagccttctttcgctactagaaagaaggtttttatatgtctttttttactccaaacccacaacttttcgggcttcgtgttgcaaaatatatccgt

SEQ ID NO: 21055 - DNA, 260 bp, Unknown
  Description of Unknown: LeftRegion for integrase B8056 sequence
ctaaagcaaaaaaagaaccgcccctgttggcgcaaggacggatcttcataggcaataccgaagatggtatcaaccaaacttttgacttacatattgtatcatcttcaggcagctatcgcaagcggaacacacgttctatgccagctgttatttttatacccatttttgtgcgatgtcgcacatatacttaggaaggtgatatgatgaaatttcaacgatgtgcaatctacatccgtgtatcaactacagaacagatgatg

SEQ ID NO: 21056 - DNA, 260 bp, Unknown; identical to SEQ ID NO: 20883
  Description of Unknown: LeftRegion for integrase B8057 sequence

SEQ ID NO: 21057 - DNA, 260 bp, Unknown
  Description of Unknown: LeftRegion for integrase B8058 sequence
aatccggggaaattacatacaactcctttgatgaataaaaagaaaaaggggacagcccttccaagactgtccctttctctcactatctatgcagccacggctacacagaatagcagcttcgcaacctctattctaccacaaaagccgtgctgctgcatagctttattttttatacacttttttagaatgggggcgaatttatgttttatacacagtcctgtccggaactgaacggaatgcgtgttgcaaaatatatccgt

SEQ ID NO: 21058 - DNA, 260 bp, Unknown
  Description of Unknown: LeftRegion for integrase B8059 sequence
gccatgttagtatcttcatgttggtattatgtgcatatggtggcatttttattaatttttattattttgtagcattaaaaaaggggctgccctgcaagcaaccccaatcagcttatttaagaagaccgattcctgtataaactgtatttctattttatcatatcttcggtacttctgcaagttagagaggagtattttttatgtcttattttaatttcaaccccgatttagtaggtgtacgcgttgttaaatacattcga

SEQ ID NO: 21059 - DNA, 260 bp, Unknown; identical to SEQ ID NO: 21047
  Description of Unknown: LeftRegion for integrase B8060 sequence

SEQ ID NO: 21060 - DNA, 260 bp, Unknown
  Description of Unknown: LeftRegion for integrase B8061 sequence
ccattgcgtcatcctcctagttttgattatgtatacgcttcaggcactctattcaaataaaaaaggaagccgtgaccagcgacttcccttgtgaaacattaaaacaaaatatatcgcggaagaccgcccacgatgatattatgtccttttacattctatcatatcaagccttctttcgctaccagaaagaaggtttttatatgtctttttttactccaaacccacaacttttcgggcttcgtgttgcaaaatatatccgt

SEQ ID NO: 21061 - DNA, 260 bp, Unknown; identical to SEQ ID NO: 20843
  Description of Unknown: LeftRegion for integrase B8062 sequence

SEQ ID NO: 21062 - DNA, 260 bp, Unknown
  Description of Unknown: LeftRegion for integrase B8063 sequence
agtggtcaaacagccgtaattcttataaatggtgatgaagccacagtaaaaaaagttattaaaaccgttgatggaatagaattacatgcaatgaatccttattaccctgttaaaaaatttacttttcaagagatgaaaactatacctgtaaaaattataggtagagtaaaggaagcaaaaataaaaggagcttttgaataatggaaaataaaacaaatgtcgaagaagtagctttgtatgttcgtgttagtacagatgaa

SEQ ID NO: 21063 - DNA, 260 bp, Unknown; identical to SEQ ID NO: 20883
  Description of Unknown: LeftRegion for integrase B8064 sequence

SEQ ID NO: 21064 - DNA, 260 bp, Unknown
  Description of Unknown: LeftRegion for integrase B8065 sequence
ccattgcgtcatcctcctagttttgattatgtacacgcttcaggcactctattcaaataaaaaaggaagccgtgaccagcgacttcccttgtgaaacattaaaacaaaatatatcgcggaagaccgcccacgatgatattatgtccttttacattctatcatatcaagccttctttcgctaccagaaagaaggtttttatatgtctttttttactccaaacccacaacttttcgggcttcgtgtagttaaatatatcaga

SEQ ID NO: 21065 - DNA, 260 bp, Unknown
  Description of Unknown: LeftRegion for integrase B8066 sequence
aatcaaccttttttgatatggttaatcaataaatcttaatacacaggaaaagccgcccggcagataatcgggcggcttttcctcaaggagtcggttcatcaatggaaagaaaaccgtgaaaaagaagttccatctatattgtatcacgcctgcacagtatgtacagggcaactttaaaaaaataaggggaaaactatatcatgtcaaatacgcctaaaaccattacccgggccgcgctatatatccgcgtcagcaccgaa

SEQ ID NO: 21066 - DNA, 260 bp, Unknown
  Description of Unknown: LeftRegion for integrase B8067 sequence
aatcaaccttttttgatatggttaatcaataaatcttaatacacaggaaaagccgcccggcagataatcgggcggcttttcctcaaggagtcggttcatcaatggaaagaaaaccgtgaaaaagaagttccatctatattgtatcacgcctgcacagtatgtacagggcaactttaaaaaaataaggggaaaactatatcatgtcaaatacacctgaaaccattacccgggccgcgctatatatccgcgtcagcaccgaa

SEQ ID NO: 21067 - DNA, 260 bp, Unknown
  Description of Unknown: LeftRegion for integrase B8068 sequence
tttccattgtgatttcctcctgataatataatgcacatgcttcaggcacttgatacaaataaaaaggaagccgtgaccagcgacttcccttgcaaaatgttaaacaaaatatatcgcggaagaccgcccacgatgatattatgtccttttacattctatcatatcaagccttctttcgctactagaaagaaggtttttatatgtctttttttactccaaacccacaacttttcgggcttcgtgtagttaaatatatcaga

SEQ ID NO: 21068 - DNA, 260 bp, Unknown
  Description of Unknown: LeftRegion for integrase B8069 sequence
tcttaaaaaggatgcatgaagataagctgttaaccgaggaagaatgggaaaaaatccgggttttgaatgtcaagaccttttcccccgaactggcaaaagtatatctgtaataacactggatatataagggactatgtggtagtgtatgttgctgacagggagtgcaaccccttgaaaatactaggaaaggagaaaaaagcatggcaaaaaaagtaactgtcataaaggcagcaaaagagcagaaacatacacaggaagaa

SEQ ID NO: 21069 - DNA, 260 bp, Unknown
  Description of Unknown: LeftRegion for integrase B8070 sequence
gactgatctattttatcgttaaagttattttatggtaaaaaagacgatccccactgcaatgggaaccgccttttgaaccttcattcatacttttgcaaaaagcatggtagaatgtcctcacaataatcattctatcataaaaccgtgctttttgcattggttttattttttataccattttttagattggagttgatagaatgaaacgacaaactgctaaactaaatgataaactgctgctccgggttgctatttacatc

SEQ ID NO: 21070 - DNA, 260 bp, Unknown; identical to SEQ ID NO: 21064
  Description of Unknown: LeftRegion for integrase B8071 sequence

SEQ ID NO: 21071 - DNA, 260 bp, Unknown
  Description of Unknown: LeftRegion for integrase B8072 sequence
gactgatctattttatcgttaaagttattttatggtaaaaaagacgatccccactgcaatgggaaccgccttttgaaccttcattcatacttttgcaaaaagcatggtagaatgtcctcacaacaatcattctatcataaaaccgtgctttttgcattggttttattttttataccattttttagattggagttgatagaatgaaacgacaaacagctaaactaaatgataaactgctgctccgggttgctatttacatc

SEQ ID NO: 21072 - DNA, 260 bp, Unknown
  Description of Unknown: LeftRegion for integrase B8073 sequence
gttgctcatgaaggtggttccattgccggtaacgccagaaaagagctagaaggtaaactgggaaggagtgtaatatctccactcaatgccaatgacgcacctcttcttgatgattcagacaagtaaaatctgccccggtaataaccggggcatgactaaaagtaatccgcatttttgtttcctgtgactaataattatatatgggtgatgatatgaaagaaaaaataccgcgctgtgcaatctatgaccgcgtatcaact

SEQ ID NO: 21073 - DNA, 260 bp, Unknown
  Description of Unknown: LeftRegion for integrase B8074 sequence
atatcgctcaaaaatgtaatcaataaaaaaccgctcccaccgacggcaatcggcgagagcggaaaccattacaacgggtgcaatgatacatttcaaatgcaaaaatattgtatcatacccttgtaaatttttcaagtgaagtttacaagggatttttgcacccttttttagaatataaatattaaaaaaggagtgtttttatgaaaaaagttgcgtgttatgtaagagtttcaacagaaaatcagattgaaaattatagc

SEQ ID NO: 21074 - DNA, 260 bp, Unknown; identical to SEQ ID NO: 21071
  Description of Unknown: LeftRegion for integrase B8075 sequence

SEQ ID NO: 21075 - DNA, 260 bp, Unknown
  Description of Unknown: LeftRegion for integrase B8076 sequence
ccatagagccttcctcctgttttattatgcgcagatgcaggctccgtatacaaaataaaaaggcaagccgcgaccaacggcttgcccccatgtgtgaaatgaacaaaatataccgcggaagaccgcccacgatgatataatgtccttttacattctatcatatctggctttctttcgctataagaaagaagggtttttatatgtctttttttaccccgaatcccgccctttttgggcttcgtgtggtcaagtacattcga

SEQ ID NO: 21076 - DNA, 260 bp, Unknown
  Description of Unknown: LeftRegion for integrase B8077 sequence
ctttggaggttcttatggatcatggcctgaatctcgtcaacgttgtgatttacgcccggtattcatccgtcggccagaacgatcaatccatcgacggccagcttgccaaatgccgcgagtacgcgcagcagcgcggtttccgcgtcgtaggtgagtattgtgatcgttcgctggcctgctgatttgccgaaacgcgcccggtgttccagcggctcggttcggatagctccaaacatgcgtttgagtatgtgcttgtctgg

SEQ ID NO: 21077 - DNA, 260 bp, Unknown
  Description of Unknown: LeftRegion for integrase B8078 sequence
ttccatagagccttcctcctgttttattatgcgcagatgcaggctccgtatacaaaataaaaaggcaagccgcgaccaacggcttgcccccatgtgtgaaatgaacaaaatataccgcggaagaccgccacgatgatataatgtccttttacattctatcatatcgggctttctttcgctataagaaagagggtttttatatgtctttttttaccccgaatcccgccctttttgggcttcgtgtggtcaagtacattcga

SEQ ID NO: 21078 - DNA, 260 bp, Unknown; identical to SEQ ID NO: 21064
  Description of Unknown: LeftRegion for integrase B8079 sequence

SEQ ID NO: 21079 - DNA, 260 bp, Unknown
  Description of Unknown: LeftRegion for integrase B8080 sequence
gatcttctttaataacttattgtttatataataaaaaccgcccctgcgccaacaggaacggtcttatagatactattgcaggacatgcccgaaataatatcaggtcacctaaacctacgcatattatatcattcggcaccgcattctgcaatgggtgttctttttatgcttaaaaatactttaaggaaggaaatgataatatgcgtaaggatgttaaacgagtagctatttacatacgtgtttcaacgtatgagcaggcg

SEQ ID NO: 21080 - DNA, 260 bp, Unknown
  Description of Unknown: LeftRegion for integrase B8081 sequence
aaaattgtttttacaactctttacatagaaaaaccgccccgatgttggcgcatcaagacggtttccaagatgatctatacaggcctggaagccggtataatcttccctcgacaagaagagtataccacaattctccatggtctgtacaggtgctatttttgcactcttttttatacacttttacatggaggatgatatttatgaacaaaattcttcgcgctgcaagttatatccgtgtaagtacctctgaacaggcactc

SEQ ID NO: 21081 - DNA, 260 bp, Unknown
  Description of Unknown: LeftRegion for integrase B8082 sequence
ttattccaattacttcaaaataattaaaaaccgcccctgtgccaacaggaacggcttaatgaatactatacagtgccaaggcacgtacaatactccctgaacaagaatattgtatcacatttccttggcacctgtacaggtgtattttttatatccatttttgtgcgacatcgcacatatatttcaaggaaggtgattgcatgaaattagaacgctgtgctatttatatccgagtatctaccgcagagcagatgatgcat

SEQ ID NO: 21082 - DNA, 260 bp, Unknown
  Description of Unknown: LeftRegion for integrase B8083 sequence
aaaaaatatgggcctattttcggatctctatactgctgagtgggtggtacccatgagtaattcacacatgaaaatcttcaacaaagtatagtatttatgtccgcaatatttctctttatgagtagcttgaaatggcttgatgctgtgcttaattagagttaatatgtatacaatatgttaacagagacgaggtgagaagcatggagcgaatagttaggaaattggataaaaaaatactagcttttgctcaaagaaaacgt

SEQ ID NO: 21083 - DNA, 260 bp, Unknown
  Description of Unknown: LeftRegion for integrase B8084 sequence
caataatgaatatagctaagaatactttgtctgttattgaatacagccattttataatggatttatgttagaaataaaaatcccggcggtgcggggacactgccgggatttctgcaacgttttgtataatcataccagatacaacataccgtctgcattgttattgtagcatatgcagacaggaaaagaaaggaaatagcatgataaaaaaagaactttctacgggtccgcttcgtgttgcactttacatacgtgtttcc

SEQ ID NO: 21084 - DNA, 260 bp, Unknown
  Description of Unknown: LeftRegion for integrase B8085 sequence
accctatgaacgttttgaagtacgaattgacaaaggtataactataagtggtataggtccagcaattttaatagtaaatcaagattaataggaggaaataaaaatggttaaaattataaacgcagataaaacagacgaaaaattaatagaaatgttacaaaatgaaattatcaatctagcaagcaagaaaggattattagatgagtaagctaaaagccattgcatattatagggtatctacagaaatgcaggaggaaaaa

SEQ ID NO: 21085 - DNA, 260 bp, Unknown
  Description of Unknown: LeftRegion for integrase B8086 sequence
ggcgaataaaaaaagaaatcgccaccccgttggctcagggtggctcgcatatccgaagatatactatatctgattgttcaagtcatattgtatcatcttcgggcagctatcgcaagcggaacatctgttctttgctggctgttatttttgtactcatttttagtgcgacgtcgcacatatatactaaggaaggtgatcacatgaaattagaacgctgtgctatctatatccgagtatctactgcagagcagatgatgcac

SEQ ID NO: 21086 - DNA, 260 bp, Unknown
  Description of Unknown: LeftRegion for integrase B8087 sequence
agtatatattgatggtaaagttaggatacaagaaacaggttcagcaattttaatagtaaatcaagattaaaagaagatattaatgtaataggaggaaataaaaatggttaaaattataaatgcagataaaacagacgaaaaattaatagaaatgttacaaaatgaaattataaatctagcaagcaagaaaggattattagatgagtaagcttaaagccattgcttattatagagtatctacagaaatgcaggaagaaaaa

SEQ ID NO: 21087 - DNA, 260 bp, Unknown
  Description of Unknown: LeftRegion for integrase B8088 sequence
tggcgaataaaaaagaaatcgccacccagttggcaaagggtggctcgcatatccgaagatatactatatctgattgttcaagtcatattgtatcatcttcgggcagctatcgcaagcggaacatttgttccttgctggctgttatttttgtactcatttttagtgcgacgtcgcacatatatactaaggaaggtgatcacatgaaattagaacgctgtgctatctatatccgagtatctactgctgagcagatgatgcac

SEQ ID NO: 21088 - DNA, 260 bp, Unknown
  Description of Unknown: LeftRegion for integrase B8089 sequence
aaatacgaggtcttttgcattataatcaaaaccgcccctgtgccaacaggaacggcttaatgaatactatacagtgccgaggcacgtacaatactccctgaacaagaatattgtatcacatttccttggcacctgtacaggtgtattttttatacacaaatttgtgcgacgtcgcacatatacttaaggaaggtgatcgcatgaaattagaacgctgtgctatctatatccgagtatctaccgcagagcagatgatgcac

SEQ ID NO: 21089 - DNA, 260 bp, Unknown
  Description of Unknown: LeftRegion for integrase B8090 sequence
atgggcagtactctcaaattatattttataaaataaaaccgcccctgcgccaacaggaacggtcttatggatactattgcaggacatgcccgaaataatatcaggtctcccaaacctacgcatattatatcattcggcaccacattctgcaatgggtgttctttttatactcaaaaatactttaagagaggaatgataatatgcgtaaagatgttaaacgagtagctatttacatacgtgtttcaacgtatgagcaggca

SEQ ID NO: 21090 - DNA, 260 bp, Unknown
  Description of Unknown: LeftRegion for integrase B8091 sequence
tgcgagacacagcttataaaaatctccaccagtaaatataattgcatatatgataacaaaaaaccgccccctgcgccaacaggagacggcccgaatgtaacagcctgcggggtacgcagacaatcacactacacaatgtgattatagcacctctcaggcctgtttgccaaatgtaaattaactgaaagaggtgttttattatgaaaaaagcagcactttatattcgtgtttccacggatgaacaggccaagcatggtttt

SEQ ID NO: 21091 - DNA, 260 bp, Unknown
  Description of Unknown: LeftRegion for integrase B8092 sequence
tctggaaattatgattattatttatcttcattagaaacttcgattgcaaagtattattacataaatgcagaaaaacgctaaaaaataaatgtccgccccggtttctcgggacggactgcaaacggccaacaccacttgaactatttgctattttattatagcgcataaagtgggactattcaagaaaggattttcagcttatgaaaaaaatcgaatcttctaacagccctcttcgcgtagccctatacatccgtgtatct

SEQ ID NO: 21092 - DNA, 260 bp, Unknown
  Description of Unknown: LeftRegion for integrase B8093 sequence
aataatggatatagcaaagaacagtttacctgcaattgaatacagcaatttcatattgtctatatgttagaaaataaaaatcccggcggtgcggggacactgccgggatttctgcaacgttttgtataatcataccagatacaacataccgtctgcattgttattgtagcatatgcagacaggaaaagaaaggaaatagcatgataaaaaaagaactttctacgggtccgcttcgtgttgcgctttacatacgtgtttcc

SEQ ID NO: 21093 - DNA, 260 bp, Unknown
  Description of Unknown: LeftRegion for integrase B8094 sequence
tctagaagatggaattagacaacttgacgataatggtgatatttattaaaaaaagagaattatgttccaaagtttgcgacacggtacataattctcacaaaataaacactattgaaagtggttaccttattattatatattaagtagccttcattttcaatagtttgttaaacaaatttattaaactggaggtattttttatgaaatatgttgcatgttactgtagagtttcacatgaggaacaggtaaaatacggctat

SEQ ID NO: 21094 - DNA, 260 bp, Unknown
  Description of Unknown: LeftRegion for integrase B8095 sequence
catgaaaaaatctgttatgatctacgatctggagcatgaagacaatactggacagttttcatttgatgatatccttcaggctaatatttatgaagatttgaagatcaaaatttccgatcttctgtaatgcaaaatacgcccctaaatcaaaaggggcgtattttgtaccactcatcagtacttaaggaaggaatgacacaatggataagaaaaaaatgcgttgcgcaatttatatccgcgtatccactacagaacaggcc

SEQ ID NO: 21095 - DNA, 260 bp, Unknown
  Description of Unknown: LeftRegion for integrase B8096 sequence
tctggaaattatgattattatttatcttcattagaaacttcgattgcaaagtattattacataaatgcagaaaaacgctaaaaaataaatgtccgccccggtttctcgggacggactgcaaacggccaacaccacttgaactatttgctatttcattatagcgcataaagtgggactattcaagaaaggattttcagcttatgaaaaaaatcgaatcttctaacagccctcttcgcgtagccctatacatccgtgtatct

SEQ ID NO: 21096 - DNA, 260 bp, Unknown
  Description of Unknown: LeftRegion for integrase B8097 sequence
atttttacgatttataataaagcagtttaaaataaaaggcccctgctacaaacagagaccttctttgaaaactatacagatccagcggatcgtgtagaatcttccctcgacaagaagattatatcacaatcctccggcgcctgtataggtgctatttttgtactcttttttatacaattttacatggaggatgatattttatgagcaaaattcttcgcgccgcaagctacatccgtgtcagtaccgccgaacaggccctt

SEQ ID NO: 21097 - DNA, 260 bp, Unknown
  Description of Unknown: LeftRegion for integrase B8098 sequence
ctgaactttatggaaacataaagaaatcacagataaaaagtcgttgtgataacaaatatggtatagaaactcgctatggtaaatacgttattcaatttgagccatcacgagtgtttgaatataaagatattgattaagaagaaatagatttgggtagtccacctacccttattattttttactttttttgaggtgatttaatgaacgtagcaatatattgccgtgtcagtacactagagcaaaaagaacatggctattct

SEQ ID NO: 21098 - DNA, 260 bp, Unknown
  Description of Unknown: LeftRegion for integrase B8099 sequence
ttgaagaaatcaaagcgtttgttgaaagtcgtatgtaatattgcgcgggcgcaaataaaaaagctgcccccacgccaatgggaacagctcctcactatacctgtgatttatgatatagccaattctgaacaaattgattatatcataaatctcctgcaccgtataggtgtattttttataccctttttaggagaattattatgataaacaatgaaaatgaattgaaaccaaaactcatccgtgtagctttgtatatccgt

SEQ ID NO: 21099 - DNA, 260 bp, Unknown
  Description of Unknown: LeftRegion for integrase B8100 sequence
accaaaaaagaaccgcccctgttggcgcaaggacggatcttcataggcaataccgaagatggtatcaaccaaacttttgacttacatattgtatcatcttcggacagctatcgcaagtggaacacacgttctatgctagctgttatttttatacccatttttgtgcgacatcgcacatatatactaaggaaggtgatcacatgaaattagaacgctgtgctatctatatccgagtatctactgcagagcagatgatgcac

SEQ ID NO: 21100 - DNA, 260 bp, Unknown; identical to SEQ ID NO: 21091
  Description of Unknown: LeftRegion for integrase B8101 sequence

SEQ ID NO: 21101 - DNA, 260 bp, Unknown
  Description of Unknown: LeftRegion for integrase B8102 sequence
atgactttgagaaccgagaggagttagagggggataaagacaatactgcggcagtctaaggttattcctatagaactgctgagacgtaagaagctattggaggtgagattacgaaagcggtaatttacgctcgatattcgagccacagtcagagagaagaatccatcgaaggtcagctccgtgagtgtcacgacttcgccttgaagaatgggttcacgatcataaatgagtattgcgacagagcgatttcgggtaagacc

SEQ ID NO: 21102 - DNA, 260 bp, Unknown
  Description of Unknown: LeftRegion for integrase B8103 sequence
gaacaacaaaatttaaaagaataaataaaaaccgctcctgctaccaacaggaacggcttaatgaatactatacagtgccgaggcacgtacaatactccctgaacaagaatattgtatcacatttccttggcacctgtacaggtgtatttttgtacgcaaatttgtgcgacgtcgcacatatacttaaggaaggtgatcacatgaaattagaacgctgtgctatctatatccgagtatctactgcagagcagatgatgcac

SEQ ID NO: 21103 - DNA, 260 bp, Unknown
  Description of Unknown: LeftRegion for integrase B8104 sequence
gaacggagaatggaaacggcaagagacaggcgtctgcctatgcccggatcgattctcgccaaaaattacaacggaagaaaaatcgccgtcagggtattggaaaagggattcgagttcgacaacgaacattactcttcgttgtccggcattgcgcggaagattacgggaacgaactggaacggattcaaatttttcgaactatgaaaaatcaaatagtgcaaaagaaaataaggtgcgccatatacacgcgtaaatcggta

SEQ ID NO: 21104 - DNA, 260 bp, Unknown
  Description of Unknown: LeftRegion for integrase B8105 sequence
cgggctttccataaaacatatcgagaagaatctaataaataataaaattaaaaaccgcccctgctggcaacaggaacggctttcatgtgttttgcagttgtaagtaaacatactatacacacctcatacatatatagtatagcatatttacttacacctgcaaaggtgtattttttatacctttttttaaggagaaaactatgattgagagatgtgcgatttatataagagtctccactgcagagcagtccatgaaagga

SEQ ID NO: 21105 - DNA, 260 bp, Unknown
  Description of Unknown: LeftRegion for integrase B8106 sequence
cacttatgcaaaaaatgggatttaactaataaactgaaaaaccgcccggctggcaccggacggaattccattagactatttgctcattccgaaatgaaaagaacgatataatccaaagtcgcatttagattatatcacacttcttttctttttgaaactatgaggggtgtatttttatacccatttagggagaaaaagaaatgaaaagaaaactaaataatgataaaactatcttaagggtcgcaatttatgtccgtgtg

SEQ ID NO: 21106 - DNA, 260 bp, Unknown
  Description of Unknown: LeftRegion for integrase B8107 sequence
tactcaattaaaacaaaattttgtgtttattgcccaaaaagatgaacttattaaacagaatgataaaatcattaaacagaatgatgaaattatcaaattgttaaaacaaattgcagataataaccaatctatttgataaataaattttcgggtagctcgcctacccttattatttttttgactttttaggagatgaaacaatgaaagtagcgatttacactagggtttcgagcgctgaacaagcgaacgaaggatattca

SEQ ID NO: 21107 - DNA, 260 bp, Unknown
  Description of Unknown: LeftRegion for integrase B8108 sequence
ttcaaggctatggattactatgacacacatagcataaattaaaacagccgcttccaacatggtcgaaattgactggtttggaagcggctattttatcaattcgttgacttcacccaaacaaaggctatactgtagtcaaagaatacgtcgatgaagcgaaaagcgggcgcagtaccttaacgcgtgacgcatacaatcagatgatggctgatgctatggagaacaaattcgacgttattatcttccataaaatcgaccgc

SEQ ID NO: 21108 - DNA, 260 bp, Unknown
  Description of Unknown: LeftRegion for integrase B8109 sequence
ctccagttacactaaaagctactcaaggtgtaaatggtaaaaaattaggcgaaaagaattttgaagtaaaataaaataaaaaaagcccccacaaatttatggaagctaatttataagtgtatgatatacactattctcacaaaataattatatcatacatttattattagcacaacttttagaaaggaagtgctatttttatggataatataaaaagagctgcattgtatataagagtttcaacagacgaacaagctcga

SEQ ID NO: 21109 - DNA, 260 bp, Unknown
  Description of Unknown: LeftRegion for integrase B8110 sequence
gtgctttttaattttatataaaaagaaaccgcccggtgctaccaacaccgaacggcttcacatagattttctcttacaggctgccctgaaagatataaatcagacttagaacacctgaattatatcatctccagagcgtcctggcaaggggcgttatttttatacccattttcacgtaaactactagaggagatgatttcatgaagcagtctacttttccatccatccccctgcgcgctggtatttacatccgcgtcagc

SEQ ID NO: 21110 - DNA, 260 bp, Unknown
  Description of Unknown: LeftRegion for integrase B8111 sequence
tgatcacccagcaaactaaataacaagtttaaaatcctcagtattaatttactggggatttttattttaataaacattaggaggaattaaaatgtcaggtattgttattagaaaaagcattagtaaagaagaagaaaataaaattcttagtctacttttaaaaaaagctaaggaagaactaggggaataggaggaatcgtatggataaggttgctatatattgtcgtgaaagtacagagcgtcaagatatttcaacattg

SEQ ID NO: 21111 - DNA, 260 bp, Unknown
  Description of Unknown: LeftRegion for integrase B8112 sequence
gagaaataaaaaaagataaccccaggcacataggaatgctcagtgcttctgcacctaccccattttgggacccagcgttaatccttctcgagttatcttgactttattatatgacattataggtagtaattcaagaattataattttagggtagcccacctacccttattatttttttaccttttttaggagatgaaacaatgaaagtagcgatttacacaagagtaagtacattagagcaaagagaaaaaggccattct

SEQ ID NO: 21112 - DNA, 260 bp, Unknown
  Description of Unknown: LeftRegion for integrase B8113 sequence
acttatgcaaaaaatgggattgaactaataaactgaaaaaccgcccggctggcaccggacggaattccattagactatttgctcattccgaaatgaaaagaacgatataatccaaagtcgcatttcgattatatcacacttcttttcttttcgaaactatgaggggtgtattttttatacccatttagggagaaaaagaaatgaaaagaaaactaaataatgataaaactatcttaagagtcgcaatttatgtccgtgtg

SEQ ID NO: 21113 - DNA, 260 bp, Unknown; identical to SEQ ID NO: 21105
  Description of Unknown: LeftRegion for integrase B8114 sequence

SEQ ID NO: 21114 - DNA, 260 bp, Unknown
  Description of Unknown: LeftRegion for integrase B8115 sequence
aaattattaaaatgtaaaatgcaaaaaccgcccggtgctaccaacaccgaacggctttacatagattttctcttaccagattgctctgaaagatataaatcagacttagaacacctgaattatatcatctccagagcgtcctggcaaggggcgttatttttatacccattttcacgtaaactactagaggagatgatttcatgaagcagtctacttttccatccatccccctgcgcgctggtatttacatccgcgtcagc

SEQ ID NO: 21115 - DNA, 260 bp, Unknown
  Description of Unknown: LeftRegion for integrase B8116 sequence
cacctgctgaacaatatcgtagatcaaaagctattttagaggatataaaaaagcattcaaattaaaaaaacgccgccctctgcgcgcggatgcagagggcggtgtttccggtctttgtttttaaggatttttaagaaccttatatagtatgatagcacactcttttcagtttgtcactttaaatttgggggaaatgagctatgacaaaaatatccactgatgtgcagcgtgttgcgctgtatattcgcgtcagtaccgaa

SEQ ID NO: 21116 - DNA, 260 bp, Unknown
  Description of Unknown: LeftRegion for integrase B8117 sequence
gacaatatcttaaaaataaaagcccctgtgcgggaacacagagacttttacataattcttacccttccaggctttcagtaccaggaatgatagaacgtggaaatatgcactgctattatatcatttcaaaggcgctctggcaaggggcgtattttttgtactcttttttaatatgttgtagaacaggaagggatgatattatggcaaagcagcttatacgcgtggcattgtatacacgtgtttcttcagatgagcaagta

SEQ ID NO: 21117 - DNA, 260 bp, Unknown; identical to SEQ ID NO: 21112
  Description of Unknown: LeftRegion for integrase B8118 sequence

SEQ ID NO: 21118 - DNA, 260 bp, Unknown
  Description of Unknown: LeftRegion for integrase B8119 sequence
aagcaagtttctgtctaaaatagcaaaaccgcccggtgctaccaacaccgaacggcttcacatagattttctcttacaggctgccctgaaagatataaatcagacttcgaacacctgaattatatcatctccagagcgtcctggcaaggggcgttatttttatacccattttcacgtaaactactagaggagatgatttcatgaagcagtctacttttccatccatccccctgcgcgctggtatttacatccgcgtcagc

SEQ ID NO: 21119 - DNA, 260 bp, Unknown
  Description of Unknown: LeftRegion for integrase B8120 sequence
tccgaagctattttatgattctggcaaataatttttaataaacaaaaaccgcccctgctggcaacaggaacggctttcatgtgttttgcagttgtaagtaaacatactatacacacttcatacatatatagtatagcatatttacttacacctgcaaaggtgtttttttatactttttttaagtttttaaggagaaaactatgattgagagatgtgcaatttatataagagtctccactgcagagcagtccatgaaagga

SEQ ID NO: 21120 - DNA, 260 bp, Unknown
  Description of Unknown: LeftRegion for integrase B8121 sequence
attcattaccagatagaatggctgataaaatggatgctaaaataagtaagtttgaagctagacaaacaaaatggtttgttggagttggagtaggactaataggtgttttattaaaagttttcggtattatttaaattcaatattttctagggtagcacgcctacccttattattttttactttttttaggagatgaaacaatgaaagttgctatttacactagagtttcgagcgctgaacaagcgaacgaaggatattca

SEQ ID NO: 21121 - DNA, 260 bp, Unknown; identical to SEQ ID NO: 21120
  Description of Unknown: LeftRegion for integrase B8122 sequence

SEQ ID NO: 21122 - DNA, 260 bp, Unknown; identical to SEQ ID NO: 21105
  Description of Unknown: LeftRegion for integrase B8123 sequence

SEQ ID NO: 21123 - DNA, 260 bp, Unknown
  Description of Unknown: LeftRegion for integrase B8124 sequence
ttacaaaaaacgggaaggaaattcatgatccaatcttatcaaatccgtcttatcttatctttattcaaaaaaaaagaaaacaactcaatgacatttcgacaaaaaatgcagataaatgaatatagttgaaagcaataaatagacatgatataataggtgtgctgaaacaaagtatacctattattttttatgaggaatttatggagaaaaacaagcatataaataaaattgcagcaatttatattagagtttcaacagac

SEQ ID NO: 21124 - DNA, 260 bp, Unknown; identical to SEQ ID NO: 21112
  Description of Unknown: LeftRegion for integrase B8125 sequence

SEQ ID NO: 21125 - DNA, 260 bp, Unknown
  Description of Unknown: LeftRegion for integrase B8126 sequence
acttatgcaaaaaataggaatgaactgataaattgaaaaaccgcccggctggcaccggacggaatttcattagactatttgctcattccgaaatgaaaagaacgatataatccaaagtcgcatttagattatatcacacttcttttctttttgaaactatgaggggtgtattttttatacccatttagggagaaaaagaaatgaaaagaaaactaaataatgataaaaccatcttaagagtcgcaatttatgtccgggtg

SEQ ID NO: 21126 - DNA, 260 bp, Unknown
  Description of Unknown: LeftRegion for integrase B8127 sequence
attatatatttttgtcaaattttaaaaattaaagttcctcagtattaatttactggggatttttatttgtaaaatattaggaggaattaaaatgtcaggtgttgttattagaaaaagtattagtaaagaagaagaaaataaaattcttagtctacttttaaaaaaagctaaggaagaactaggggaataggaggaatcgtatggataaggttgctatatattgtcgtgaaagtacagaacgtcaagatatttcaacattg

SEQ ID NO: 21127 - DNA, 260 bp, Unknown; identical to SEQ ID NO: 21105
  Description of Unknown: LeftRegion for integrase B8128 sequence

SEQ ID NO: 21128 - DNA, 260 bp, Unknown
  Description of Unknown: LeftRegion for integrase B8129 sequence
caagataaaatatattttatcatcaaataacgaaaaaccgtcccggcggcaaccggaacggcttttacatagattttctgtacaggctgtaagggccaatacgatatagcttagacacctacattgtatcacacctcactgcacctgtacaggtgtatttatacccatttttaataatctgtactaaaggagttgatataatgaataaaagtgacctatcgtcggatgcatctttaagagctgccatctatatccgcgta

SEQ ID NO: 21129 - DNA, 260 bp, Unknown
  Description of Unknown: LeftRegion for integrase B8130 sequence
tccataaaacatatcgagaagaatcaaataaataataaaattaaaaaccgcccctgctggcaacaggaacggctttcatgtgttttgcagttgtaagtaaacatactatacacacttcatacatatatagtatagcatatttacttacacctgcaaaggtgtattttttataccttttttaagtttttaaggagaaaactatgattgagagatgtgcgatttatataagagtctccactgcagagcagtccatgaaagga

SEQ ID NO: 21130 - DNA, 260 bp, Unknown
  Description of Unknown: LeftRegion for integrase B8131 sequence
ccgaagctattttatgattctggcaaataatttttaataaacaaaaaccgcccctgctggcaacaggaacggctttcatgtgttttgcagttgtaagtaaacatactatacacacttcatacatatatagtatagcatatttacttacacctgcaaaggtgttttttttatactttttttaagtttttaaggagaaaactatgattgagagatgtgcaatttatataagagtctccactgcagagcagtccatgaaagga

SEQ ID NO: 21131 - DNA, 260 bp, Unknown
  Description of Unknown: LeftRegion for integrase B8132 sequence
ccgcgcgagttcgatttcgcgccgggcacgatcctgctgcgcgaatggggcgagcgcgaacatcgggtgacagtcaccgccgaggggctgtttgagtaccaggggcgcaacttcaagagcctgacggcggtggcccgccacatcacgggcgcgcactggtcggggccgctgttctttggcctgagcaagggaggtgcgcgatgagcgagattgccagcaccaaggcccgcaagcgctgcgccgtctactgccgggtgtcc

SEQ ID NO: 21132 - DNA, 260 bp, Unknown
  Description of Unknown: LeftRegion for integrase B8133 sequence
gatttataccgacaacggagatattcaacaaatacaataaagtaaaaaccgccaactactgcaatagctgacggtttcctaattccttttgttagacaaaggaactgatttaaacgcacctgtattatagcagattttctatcgtctttcaaagggtttttattttttatacccattttctaagaaaggcggtttgctatatgtctaccacgcatttttactcacattacccaaccatagaatataaaacctgtgcttta

SEQ ID NO: 21133 - DNA, 260 bp, Unknown
  Description of Unknown: LeftRegion for integrase B8134 sequence
tagcatggagggttatagtaccttgattatatataaataaaataaaaaccgccaactactgcaatagctgacggtttcctaattccttttgttagacaaaggaactgatttaaacgcacctgtattatagcagattttctattgtctttcaaagggtttttattttttatacccattttctaagaaaggcggtttgctatatgtctaccacgcatttttactcacattacccaaccatagaatataaaacctgtgcttta

SEQ ID NO: 21134 - DNA, 260 bp, Unknown
  Description of Unknown: LeftRegion for integrase B8135 sequence
atacggggtcttttacgttataataacattaaaaaccgcccctgcgccaacaggaacggttgaggagatatccgaagatatactctgtaaaattagcaaatacattgtatcatcttcggaacagtttaacaatcagaacgtttgttctgttgttggctgttatttttatacccatttttaaaaatacggaggtgcaacatatgaataatttagcaagaaacctagaaaccatgcccttgagagtggctttatacatccgc

SEQ ID NO: 21135 - DNA, 260 bp, Unknown
  Description of Unknown: LeftRegion for integrase B8136 sequence
gatttataccgacaacggagatattcaacaaatacaataaagtaaaaaccgccaactactgcaatagctgacggtttcctaattccttttgttagacaaaggaactgatttaaacgcacctgcattatagcaggttttctattgtctttcaaatggtttttattttttatacccattttctaagaaaggcggtttgctatatgtctaccacgcatttttactcacattacccaaccatagaatataaaacctgtgcttta

SEQ ID NO: 21136 - DNA, 260 bp, Unknown
  Description of Unknown: LeftRegion for integrase B8137 sequence
caaatccagcttttggattatgaaatagttagggccattcagcacttcaatgctgaacggcctttccatagatttctctttttcaagaaacggaagatataatctgtctcgcaaacaaattatatcatttctgttgcgtccttggcaaggggcgtattaattttactcttttttcatatgtttagataggagatgattgaatgaaaaataacttattaagggtagcgctttacatccgtgtatcctcagaagaacaggca

SEQ ID NO: 21137 - DNA, 260 bp, Unknown
  Description of Unknown: LeftRegion for integrase B8138 sequence
tagcatggagggttatagtaccttgattatatataaataaaataaaaaccgccaactactgcaatagctgacggtttcctaattccttttgttagacaaaggaactgatttaaacgcacctgtattatagcagattttctatcgtctttcaaagggtttttattttttatacccattttctaagaaaggcggtttgctatatgtctaccacgcatttttactcacattacccaaccatagaatataaaacctgtgcttta

SEQ ID NO: 21138 - DNA, 260 bp, Unknown
  Description of Unknown: LeftRegion for integrase B8139 sequence
aatttataccgacaacggagatattcaacagatacaataaaacaaaaaccgccaactactgcaatagctgacggtttcctaattccttttgttagacaaaggaactgatttaaacgcacctgtattatagcagattttctattgtctttcaaagggtttttattttttatacccattttctaagaaaggcggtttgctatatgtctaccacgcatttttactcacattacccaaccatagaatataaaacctgtgcttta

SEQ ID NO: 21139 - DNA, 260 bp, Unknown
  Description of Unknown: LeftRegion for integrase B8140 sequence
agcatggagggttatagtaccttgattatatataaataaaacaaaaaccgccaactactgcaaatagctgacggtttcctaattccttttgttagacaaaggaactgatttaaacgcacctgtattatagcagattttctatcgtctttcaaagggtttttattttttatacccattttctaagaaaggcggtttgctatatgtctaccacgcatttttactcacattacccaaccatagaatataaaacctgtgcttta

SEQ ID NO: 21140 - DNA, 260 bp, Unknown
  Description of Unknown: LeftRegion for integrase B8141 sequence
tatgacagttgtatgcaacgtcataatttgcggcagattcttccgtactaagcaaataaaaagctgcccccgcgccaacgggaacagctcctcactatacctgtgatttatgatatagccaattctgaacaaattgattatatcataaatctcctgcaccgtataggtgtattttttataccctttttaggagaattattatgataaacaatgaattgaaaccaaaactcatccgtgtagctctgtatatccgcgtctcc

SEQ ID NO: 21141 - DNA, 260 bp, Unknown
  Description of Unknown: LeftRegion for integrase B8142 sequence
tggacgttttcttaaacctaatgaagtagttcaccatatcaatggcaacaaacaagataatcgcattgaaaatttgagactttttacaaatagcgaacatgttgctttccatgcaatgcagaaaaggcaggtgatgcataatgacgagtataaacaaaacaattagagctgcaatttatactcgtgtttaggtaagcacgatggagcaggtgactgccggatactctctcgaggcgcaacaggaaaaactgaatggctac

SEQ ID NO: 21142 - DNA, 260 bp, Unknown
  Description of Unknown: LeftRegion for integrase B8143 sequence
gatttataccgacaacggagatattcaacaaatacaataaagtaaaaaccgccaactactgcaatagctgacggtttcctaattccttttgttagacaaaggaactgatttaaacgcacctgcattatagcagattttctattgtctttcaaatggtttttattttttatacccattttctaagaaaggcggtttgctatatgtctaccacgcatttttactcacattacccaaccatagaatataaaacctgtgcttta

SEQ ID NO: 21143 - DNA, 260 bp, Unknown
  Description of Unknown: LeftRegion for integrase B8144 sequence
aactgtaacaatatttagtaaatggcgaaagccgtccagtgcttccaacacagaacggctttcacgtagattctcttaccgagcttccctgattgatataatctgtctcgcaagcaaattatatcatttctgatgcgtccttggcaaggggcgtattaattttactctttttttcatatgtttagataggagatgattaaatgaaaaataatttattaagggtagcgctttacatccgtgtatcctcagaagaacaggcg

SEQ ID NO: 21144 - DNA, 260 bp, Unknown
  Description of Unknown: LeftRegion for integrase B8145 sequence
tagtatggagggttatagtaccttgattatatataaataaaacaaaaaccgccaactactgcaatagctgacggtttcctaattccttttgttagacaaaggaactgatttaaacgcacctgtattatagcagattttctattgtctttcaaagggtttttattttttatacccattttctaagaaaggcggtttgctatatgtctaccacacatttttactcacattacccaaccatagaatataaaacctgtgcttta

SEQ ID NO: 21145 - DNA, 260 bp, Unknown
  Description of Unknown: LeftRegion for integrase B8146 sequence
aattggaaggggataaggattcaactgcggcggtgtaaggttatcccaatagagttgattagaagaatgaaaatattggaggtgagattatcaaggcggtaatttatgctcgatactcaagccataaccagcgtgaagaatccattgagggtcaacttcgagagtgccacgactacgctataaagaatggaattgtcattgtggacgagtacattgacagagcaatctcgggcaagaccgataatcgcccaaactttcag

SEQ ID NO: 21146 - DNA, 260 bp, Unknown
  Description of Unknown: LeftRegion for integrase B8147 sequence
tagcatggagggctatagtaccttgattatatataaataaaacaaaaaccgccaactactgcaatagctgacggtttcctaattccttttgttagacaaaggaactgatttaaacgcacctgtattatagcagattttctatcgtctttcaaagggtttttattttttgtacccattttctaagaaaggcggtttgctatatgtctaccacgcatttttactcacattacccaaccatagaatataaaacctgtgcttta

SEQ ID NO: 21147 - DNA, 260 bp, Unknown; identical to SEQ ID NO: 21132
  Description of Unknown: LeftRegion for integrase B8148 sequence

SEQ ID NO: 21148 - DNA, 260 bp, Unknown
  Description of Unknown: LeftRegion for integrase B8149 sequence
tttataccgataacggagatattcaacagatacaataaaaacggaaaccgccaactactgtaatagctgacggtttcctaattccttttgttagacaaaggaactgatttaaacgcacctgtattatagcagattttctattgtctttcaaagggtttttattttttatacccatttttctaagaaaggcggtttgctatatgtctaccacacatttttactcacattacccaaccatagaatataaaacctgtgcttta

SEQ ID NO: 21149 - DNA, 260 bp, Unknown
  Description of Unknown: LeftRegion for integrase B8150 sequence
ggcggcacacagaaaatcatcaaaggagaagattaagtgatggagaaagaaaccgcagaaatgaaataccgcatcggtgagctgattttttatctatacgcggagaaaggcataatcacaccgtcagaatatgaggaattgcgtaacaagctaatagacacctatcacccggtggttggtgaactggagaggaatatgtcatgggaaataagaaagtcactaaaatagacgccacaataaaaatagcctcctttgacgga

SEQ ID NO: 21150 - DNA, 260 bp, Unknown
  Description of Unknown: LeftRegion for integrase B8151 sequence
caattctgcacaagatgctttgcgaaatattttaaaataaacaaaaaccgccaactactgtaatagctgacggtttcctaattccttttgttagacaaaggaactgatttaaacgcactcgtattatagcagattttctattgtctttcaaatggtttttattttttatacctatttttctaagaaaggcgatttgctatatgtctaccacacatttttactcacattacccaaccatagaatataaaacctgtgcttta

SEQ ID NO: 21151 - DNA, 196 bp, Unknown
  Description of Unknown: LeftRegion for integrase B8152 sequence
gttgtcagcagcccgtttcacggtctgcgtgtagttccttgtaaactgacctaaagcgaatgatatagccgtaattgatacctatatcgaccgcgctatcagcggcaagacggacaaccgccccgcctttcaaaagatgatagaggacagcgcaaagcgtcagtttcaagccgtcattgtgtaccgcctcgaccgc

SEQ ID NO: 21152 - DNA, 260 bp, Unknown
  Description of Unknown: LeftRegion for integrase B8153 sequence
tttataccgacaacggagatattcaacagatacaataaaaacaaaaaccgccaactactgcaatagctgacggtttcctaattccttttgttagacaaaggaactgatttaaacgcacctgtattatagcagattttctattgtctttcaaagggtttttattttttatacctatttttctaagaaaggcggtttgctatatgtctaccacgcatttttactcacattacccaaccatagaatataaaacctgtgcttta

SEQ ID NO: 21153 - DNA, 260 bp, Unknown; identical to SEQ ID NO: 21137
  Description of Unknown: LeftRegion for integrase B8154 sequence

SEQ ID NO: 21154 - DNA, 260 bp, Unknown
  Description of Unknown: LeftRegion for integrase B8155 sequence
atttataccgataacggagatattcaacagatacaataaaaacagaaaccgccaactactgtaatagctgacggtttcctaattccttttgttagacaaaggaactgatttaaacgcacctgtattatagcagattttctattgtctttcaaagggtttttatttttatacctatttttctaagaaaggcggtttgctatatgtctactacacatttttactcacattacccaaccatagaatataaaacctgtgcttta

SEQ ID NO: 21155 - DNA, 260 bp, Unknown
  Description of Unknown: LeftRegion for integrase B8156 sequence
cgacaataacgacttttatttttaaggcattattataaagcaaaaaccgccaactactgcaaatagctgacggtttcctaattccttttgttagacaaaggaactgatttaaacgcacctgtattatagcagattttctattgtctttcaaagggtttttattttttatacctatttttctaagaaaggcggtttgctatatgtctaccacacatttttactcacattacccaaccatagaatataaaacctgtgcttta

SEQ ID NO: 21156 - DNA, 260 bp, Unknown; identical to SEQ ID NO: 21142
  Description of Unknown: LeftRegion for integrase B8157 sequence

SEQ ID NO: 21157 - DNA, 260 bp, Unknown; identical to SEQ ID NO: 21133
  Description of Unknown: LeftRegion for integrase B8158 sequence

SEQ ID NO: 21158 - DNA, 260 bp, Unknown
  Description of Unknown: LeftRegion for integrase B8159 sequence
gcttagatacgagttaagcaatcataacaaataaaataaaataaaaaccgccaactactgcaatagctgacggtttcctaattccttttgttagacaaaggaactgatttaaacgcacctgtattatagcagattttctattgtctttcaaatggtttttattttttatacctatttttctaagaaaggcggtttgctatatgtctaccacacatttttactcacattacccaaccatagaatataaaacctgtgcttta

SEQ ID NO: 21159 - DNA, 260 bp, Unknown
  Description of Unknown: LeftRegion for integrase B8160 sequence
cgacaataacgacttttatttttaaggcattattataaagcaaaaaccgccaactactgcaaatagctgacggtttcctaattccttttgttagacaaaggaactgatttaaacgcacctgtattatagcagattttctattgtctttcaaagggtttttattttttatacctatttttctaagaaaggcggtttgctatatgtctaccacgcatttttactcacattacccaaccatagaatataaaacctgtgcttta

SEQ ID NO: 21160 - DNA, 260 bp, Unknown
  Description of Unknown: LeftRegion for integrase B8161 sequence
tagcacggagggttatagtaccttgattatatataaataaaataaaaaccgccaactactgcaatagctgacggtttcctaattccttttgttagacaaaggaactgatttaaacgcacctgtattatagcagattttctattgtctttcaaagggtttttattttttatacccattttctaagaaaggcggtttgctatatgtctaccacgcatttttactcacattacccaaccatagaatataaaacctgtgcttta

SEQ ID NO: 21161 - DNA, 260 bp, Unknown; identical to SEQ ID NO: 21139
  Description of Unknown: LeftRegion for integrase B8162 sequence

SEQ ID NO: 21162 - DNA, 260 bp, Unknown
  Description of Unknown: LeftRegion for integrase B8163 sequence
gaaatcatcagtcttttaaaacaaattgcagagaaataattgcgcgggcgcaaatgaaaaaagctgctcccgcgccaacgggaacagcttctcactataccagtgatttatgatatagccaattctgaacaaattgattatatcataaatctcctgcaccgtataggtgtattttttataccctttttaggagaattattatgataaacaatgaattgaaaccaaaactcatccgtgtagctttgtatatacgtgtttcc

SEQ ID NO: 21163 - DNA, 260 bp, Unknown
  Description of Unknown: LeftRegion for integrase B8164 sequence
tagcatggagggttatagtaccttgattatatataaataaaacaaaaaccgccaactactgcaatagctgacggtttcctaattccttttgttagacaaaggaactgatttaaacgcacctgtattatagcagattttctatcgtctttcaaagggtttttattttttatacccattttctaagaaaggcggtttgctatatgtctaccacgcatttttactcacattacccaaccatagaatataaaacctgtgcttta

SEQ ID NO: 21164 - DNA, 260 bp, Unknown
  Description of Unknown: LeftRegion for integrase B8165 sequence
tagcatggagggttatagtaccttgattatatataaataaaacaaaaaccgccaactactgcaatagctgacggtttcctaattccttttgttaggcaaaggaactgatttaaacgcacctgtattatagcagattttctatcgtctttcaaagggtttttattttttgtacccattttctaagaaaggcggtttgctatatgtctaccacgcatttttactcacattacccaaccatagaatataaaacctgtgcttta

SEQ ID NO: 21165 - DNA, 260 bp, Unknown
  Description of Unknown: LeftRegion for integrase B8166 sequence
aaattacaaaaaatggaaaaattatgacagagccgacattatcaaaccgcgattatcttaatttcatgcgaaaaaagagaaagcagatcaatgagttttcgacaaaaatttccaaagccgagggtagttgaaaaacacaaaaatgcatgttaaaataggcacatcaaaccgatgtgtctattttattttagggggcagagatgagcaaaaaaaaattaaaaacagccgcaatttatgtccgtgtttcgacagatgcacag

SEQ ID NO: 21166 - DNA, 260 bp, Unknown
  Description of Unknown: LeftRegion for integrase B8167 sequence
aaattctttattttttataattgtcaaacaattcatactttatttacaacttttgtatatattgtcaaataatgtaatattaattgacatatgttttagatgtacataccaattaagcaaggaaacgtaccaattaagcaataatatagcattttagtagaaaataagtttgttacattttacagaaagaaggcagcactatgtacaacaacacaccaaacaaaataattagagtagccacatatttacgtgtttcaagc

SEQ ID NO: 21167 - DNA, 260 bp, Unknown
  Description of Unknown: LeftRegion for integrase B8168 sequence
atttataccgacaacggagatattcaacagatacaataaaacaaaaaccgccaactactgcaatagctgacggtttcctaattccttttgttagacaaaggaactgatttaaacgcacctgtattatagcagattttctattgtctttcaaagggtttttattttttatacctatttttctaagaaaggcggtttgctatatgtctaccacacatttttactcacattacccaaccatagaatataaaacctgtgcttta

SEQ ID NO: 21168 - DNA, 260 bp, Unknown
  Description of Unknown: LeftRegion for integrase B8169 sequence
gtatggagggatatagtacctttattatgtataaataaaacaaaaaccgccaactactgcaaatagctgacggtttcctaattccttttgttagacaaaggaactgatttaaacgcacctgtattatagcagattttctattgtctttcaaagggtttttattttttatacccatttttctaagaaaggcggtttgctatatgtctaccacacatttttactcacattacccaaccatagaatataaaacctgtgcttta

SEQ ID NO: 21169 - DNA, 260 bp, Unknown
  Description of Unknown: LeftRegion for integrase B8170 sequence
agcatggagggttatagtaccttgattatatataaataaaacaaaaaccgccaactactgcaaatagctgacggtttcctaattccttttgttagacaaaggaactgatttaaacgcacctgtattatagcagattttctatcgtctttcaaagggtttttattttttatacccattttctaagaaaggcggtttgctatatgtctaccacgcacttttactcacattacccaaccatagaatataaaacctgtgcttta

SEQ ID NO: 21170 - DNA, 260 bp, Unknown
  Description of Unknown: LeftRegion for integrase B8171 sequence
gatttataccgacaacggagatattcaacaaatacaataaagtaaaaaccgccaactactgcaatagctgacggtttcctaattccttttgttagacaaaggaactgatttaaacgcacctgtattatagcagattttctattgtctttcaaagggtttttattttttatacccattttctaagaaaggcggtttgctatatgtctaccacacatttttactcacattacccaaccatagaatataaagcctgtgcttta

SEQ ID NO: 21171 - DNA, 260 bp, Unknown
  Description of Unknown: LeftRegion for integrase B8172 sequence
tgatttataccgacaacggagatattcaacaaatacaataaaacaaaaccgccaactactgcaatagctgacggtttcctaattccttttgttagacaaaggaactgatttaaacgcacctgtattatagcagattttctatcgtctttcaaagggtttttattttttatacccattttctaagaaaggcggtttgctatatgtctaccacacatttttactcacattacccaaccatagaatataaaacctgtgcttta

SEQ ID NO: 21172 - DNA, 260 bp, Unknown
  Description of Unknown: LeftRegion for integrase B8173 sequence
cgacaataacgacttttatttttaaggcattattataaagcaaaaaccgccaactactgcaaatagctgacggtttcctaattccttttgctagacaaaggaactgatttaaacgcacctgtattatagcagattttctattgtctttcaaagggtttttattttttatacctatttttctaagaagggcggtttgctatatgtctaccacacatttttactcacattacccaaccatagaatataaaacctgtgcttta

SEQ ID NO: 21173 - DNA, 260 bp, Unknown; identical to SEQ ID NO: 21142
  Description of Unknown: LeftRegion for integrase B8174 sequence

SEQ ID NO: 21174 - DNA, 260 bp, Unknown
  Description of Unknown: LeftRegion for integrase B8175 sequence
aagaagcagattatgctatcgcaaaccttgactaactaaataaagaaccgcccagtgttggcgcaccagacggtttaatatatatccgaagatatatcaaaaataccatttatattgtatcatcttcggagcagccttgcaagggataatctccctggctgttatttttatacccattttaagaatacggaggtgtatttatgaataatttagcccgaaacctagaatctatgccctttagagttgctttgtatatccgt

SEQ ID NO: 21175 - DNA, 260 bp, Unknown; identical to SEQ ID NO: 21139
  Description of Unknown: LeftRegion for integrase B8176 sequence

SEQ ID NO: 21176 - DNA, 260 bp, Unknown
  Description of Unknown: LeftRegion for integrase B8177 sequence
tgaaatgtaatgctttgtaaattactaaaagccattcagtgttttcacaccaaacggctttcaaatagatttttctcttgctggtcgttccagaagatataatccgtctcgcaaacaaattatatcatttctgatgcgtccttggcaaggggcgtattaattttactcttttttcatatattcagataggagatgattgaatgaaaaataacttattaagggtagcgctttacatccgtgtatcctcagaagaacaggca

SEQ ID NO: 21177 - DNA, 260 bp, Unknown
  Description of Unknown: LeftRegion for integrase B8178 sequence
tttacgcgtgttccggttgctcgcgagtataacgaaacactagaaattctgaaatctgaaaatgctatgtaaaaagaaaagtcccagcagtgcagggaacactgccgggactttgtgcaactattgttaatcataccagatacaacatatcgtctgccgcttgattatatcatatgcaggcagaaaaagaaaggaaaattatggcaaaaaaatctttttctatcattgatggcgcttcttgtcgtgtagctctgtatatc

SEQ ID NO: 21178 - DNA, 260 bp, Unknown
  Description of Unknown: LeftRegion for integrase B8179 sequence
tttataccgataacggagatattcaacagatacaataaaaacagaaaccgccaactactgtaatagctgacggtttcctaattccttttgttagacaaaggaactgatttaaacgcacctgtattatagcagattttctatcgtctttcaaagggtttttattttttatacctatttttctaagaaaggcggtttgctatatgtctaccacgcatttttactcacattacccaaccatagaatataaaacctgtgcttta

SEQ ID NO: 21179 - DNA, 260 bp, Unknown
  Description of Unknown: LeftRegion for integrase B8180 sequence
aactgtaacaatatttagtaaatggcgaaagccgtccagtgcttccaacacagaacggctttcacgtagattctcttaccgagcttccttgattgatataatctgtctcgcaagcaaattatatcatttctgatgcgtccttggcaaggggcgtattaattttactctttttttcatatgtttagataggagatgattaaatgaaaaataatttattaagggtagcgctttacatccgtgtatcctcagaagaacaggcg

SEQ ID NO: 21180 - DNA, 260 bp, Unknown
  Description of Unknown: LeftRegion for integrase B8181 sequence
tttataccgataacggagatattcaacagatacaataaaaacagaaaccgccaactactgtaatagctgacggtttcctaattccttttgttagacaaaggaactgatttaaacgcacctgtattatagcagattttctattgtctttcaaagggtttttattttttatacccatttttctaagaaaggcggtttgctatatgtctaccacacatttttactcacattacccgaccatagaatataaaacctgtgcttta

SEQ ID NO: 21181 - DNA, 260 bp, Unknown; identical to SEQ ID NO: 19972
  Description of Unknown: LeftRegion for integrase B8182 sequence

SEQ ID NO: 21182 - DNA, 260 bp, Unknown; identical to SEQ ID NO: 19897
  Description of Unknown: LeftRegion for integrase B8183 sequence

SEQ ID NO: 21183 - DNA, 260 bp, Unknown
  Description of Unknown: LeftRegion for integrase B8184 sequence
aaacaactactcacaatgagtcacaaatggaggaagtaccgcaaaataatcaaaatcaacgtgtagatcgtagaagttttaacgaaccattgccacgttcaactacaaatggagtggcaaatgaggcgtgggacggaaaaatataatatttcatgggtagctcgcctacccttattatttttttacttttttaaggggtgatgaattatgaacgtagctatttacgttcgtgtcaggtcagtacattagaacaaaaagag

SEQ ID NO: 21184 - DNA, 260 bp, Unknown
  Description of Unknown: LeftRegion for integrase B8185 sequence
ggaaatactaataaagaacaaacgcaacaatctgcacctagagaacatagtggcggacacccttctgctttcggtggcggagatgttcctgtaggtactgaaaaagttgatgatcaaggagaaagttatatagacgcaacaggtgaataaaaacgggtagcttgcctacccttattatttttttacttttttaaggggtgatgaattatgaacgtagctatttacgttcgtgtcaggtcagtacattagagcaaaaagaa

SEQ ID NO: 21185 - DNA, 260 bp, Unknown
  Description of Unknown: LeftRegion for integrase B8186 sequence
aaggcgctttggcgctgaagatggtgatccagtgtaagccgccggaggaaacaattctctataaagaataacctgcaaccaagtaaaaaaccgccccggtgctggaacaccgaagcggttcaaagggtagtaagttttcgacggcctactaccctttcattataacgtataaaagtgaataatggaaggagattttcaaaatgtccgaactacaaggaaagcgcatcctcacctacctgcgcgtctccacggaggagcag

SEQ ID NO: 21186 - DNA, 260 bp, Unknown
  Description of Unknown: LeftRegion for integrase B8187 sequence
aaaatggcccgcaagcacgggctcgacttcatccttgaccccatgaagcagcacatcaagcccaagctatcagaacatatagacggaatcgagacctacacagacgaactctatgctgccgaagatatcgctgcccctgcaccccgcgacggcaatgtgtgacccgtgcccgattcgggcacaggggaaggaggaacaccatgaagaaagatacccctgtgggtgagagcctacccctgcgggcggctctatacccccgc

SEQ ID NO: 21187 - DNA, 260 bp, Unknown
  Description of Unknown: LeftRegion for integrase B8188 sequence
accgggcaaaactgcgtatactgatacggtcatgttcgattccgagatacatgatgactatcatataagcagttatgacagtatatcttttaaattagacatgtgtcctacaacgacttatgacaacatctactcaggcgagatcactttaactaaatagcaacaacgacaacaacaaaacaacgggaggaaaattgaatatgaaaaggatattacgggctgcgctgtatatccgcgtatcgacagaagagcaggctaaa

SEQ ID NO: 21188 - DNA, 260 bp, Unknown
  Description of Unknown: LeftRegion for integrase B8189 sequence
ttaattatcgatatttactatatatatttccattgataaatattggttatttcttatattgggcttcacaaggaatacaagcccactcgttcgtattcaattaaaaacacgccctcccctcacagaatggcgtgctaagcaataaacaataaggcttatttgctatgcctattttaacaattaataggatgtgattcaatatgaaaaaagccggtatttatattcgagtttcaacaccggaacaagaaaaaaacggatac

SEQ ID NO: 21189 - DNA, 260 bp, Unknown
  Description of Unknown: LeftRegion for integrase B8190 sequence
acgactttgagaaccgcaaggagttggagggggataaggattcaactgcggcagtctaagatcgtaccaatcgaattacttagaagaaaagaagcattggaggtgagactatcaaagcggtaatctatgctcgctattcgagccataaccaaagagaggaatccattgagggacagcttcgagagtgccatgagtttgccttgaaaaacggctttgtcgtggtgaatgaatatatagatcgtgcgatttcgggcaagacc

SEQ ID NO: 21190 - DNA, 260 bp, Unknown
  Description of Unknown: LeftRegion for integrase B8191 sequence
gagattatgaacaggcacgtaaagatagcgagaaagtttggaacgatcctaacgctcatgtaggaggtccacgttgggttggcaaaaacgaaggatatgagagttgggcaaaaagacaacaagaagttcaaaactcaatagctgaatagttgtatgggtacattagtacccttattattttttacttttttagggaggtgatgaattatgaacgtaggtatttacgttcgtgtcaggtcagtacattagaacaaaaagaa

SEQ ID NO: 21191 - DNA, 260 bp, Unknown
  Description of Unknown: LeftRegion for integrase B8192 sequence
gaaacactaataaagaacaaacacaacaatctgcgcctagagaacatagtggtggacacccttctgctttcggtggtggcaatgttcctgtaggtacagaaaaagttgataatcaaggagaaagttatatagacgcaacaggtgaataaaaaacgggtagcttgcctacccttattatttttttacttttttaaggggtgatgaattatgaacgtagctatttacgttcgtgtcaggtcagtacattagaacaaaaagaa

SEQ ID NO: 21192 - DNA, 260 bp, Unknown
  Description of Unknown: LeftRegion for integrase B8193 sequence
aaaatggcccgcaagcacgggctcgacttcatccttgaccccatgaagcagcacatcaagcccaagctatcagaacatatagacggaatcgagacctacacagacgaactctatgctgccgaagatatcgctgcccctgcaccccgcgatggcaatgtgtgacccgtgcccgattcgggcacgggggaaggaggaacaccatgaagaaagatacccctgtgggtgagagcctacccctacgggcggctctatacccccgc

SEQ ID NO: 21193 - DNA, 260 bp, Unknown
  Description of Unknown: LeftRegion for integrase B8194 sequence
gaagcaattcgtgaccagctcgtttctgattatggagaacagtttaccaaagaagaagctgactatgcaatagaacatcttgaataatatattattgtattccagaaaattatccccgccccggtgtcaaccggggcggagttataactgtgccagacatttttatccatgaggattaatattatactataggtgataatatgaaagataagataatacgctgtgcaatctatgaccgcgtctcgacagagggtcaggtg

SEQ ID NO: 21194 - DNA, 260 bp, Unknown
  Description of Unknown: LeftRegion for integrase B8195 sequence
ggacttgacccaaacttcgtacgacataatgacaacatggtaaaagaatggcaaaatcaaatgcgagaacacaacgaaaactttaatcctgaatctggtggagatttgtataacgtcgaaaccggtaactacgttgatgatgaataaaattatggggtagtccacctacccttattatttttttacttttttaaggggtgatgaattatgaacgtagctatttacgttcgtgtcaggtcagtacattagaacaaaaagaa

SEQ ID NO: 21195 - DNA, 260 bp, Unknown
  Description of Unknown: LeftRegion for integrase B8196 sequence
gcaaaactgcgtatactgatacggtcatgttcgattccgagatacatgatgactatcatataagcagttacgacagtatatcttttaaattagacatgtgtcctacaacgacttatgacaatatctactcaaatgagatcactttaactaaataacaacaacgacaacaaagcaacaaaacaacgggaggaaaattgaatatgaaaaggatattacgggctgcgctgtatatccgcgtatcgacggaagagcaggctaaa

SEQ ID NO: 21196 - DNA, 260 bp, Unknown
  Description of Unknown: LeftRegion for integrase B8197 sequence
gtttacgatcgttttagaacataaaaagaacacgatctgcagaccgtgttcaaaaaagcataaatatttatataaaaagtccccgccgtgctgcaacacggtcggggcaaactagcgcaagtgaaatcagatacaaaccccactgcattttttattttagcataaaacagtgggaaataaaaggaaattaggtggttcaaatgaaaaaagctaaatctgaaacaactcttgtccgtgcagcgttatatatacgtgtgtcc

SEQ ID NO: 21197 - DNA, 260 bp, Unknown
  Description of Unknown: LeftRegion for integrase B8198 sequence
gcaaaactgcgtatactgatacggtcatgttcgattctgagatacatgatgactatcatataagcagttatgacagtatatcttttaaattagacatgtgtcctacaacgacttatgacaacatctactcaggcgagatcgctttaactaaataacaacaacgacaacaaagcaacaaaacaacgggaggaaaattgaatatgaaaaggatattacgggctgcgctgtatatccgcgtatcgacagaagagcaggctaaa

SEQ ID NO: 21198 - DNA, 260 bp, Unknown
  Description of Unknown: LeftRegion for integrase B8199 sequence
atgcagctcctacaattgttcccttcgttcagacggccggcgttggaattttcaagaagctgcagataaagctttctgacctacttatataagttgcaccggtgcaatttcatagtggccgccctgactccagtcggggcggctctaaaataaattgcatttatatcccaccagaataataattatatataggtgataacatgaaagaaaaaataatacgttgcgcaatctatgaccgtgtatcaacggacgggcaggtc

SEQ ID NO: 21199 - DNA, 260 bp, Unknown
  Description of Unknown: LeftRegion for integrase B8200 sequence
aaacaactactcacaatgagtcacaaatggagggagtaccgcaaaataatcaaaatcaacgtgtagatcgtagaagttttaacgaaccattgccacgttcaactacaaatggagtggcaaatgaggcgtgggacggaaaaatataatatttcatgggtagctcgcctacccttattatttttttacttttttaaggggtgatgaattatgaacgtagctatttacgttcgtgtcaggtcagtacattagaacaaaaagaa

SEQ ID NO: 21200 - DNA, 260 bp, Unknown
  Description of Unknown: LeftRegion for integrase B8201 sequence
gtttatgatcgttttagaacataaaaagaacacgatctgcagaccgtgttcaaaaaagcataaatatttatataaaaagtccccgccgtgctgcaacacggtcggggcaaactagcgcaagtgaaatcagatacaaaccccactgcattttttattttagcataaaacagtgggaaataaaaggaaattaggtggttcaaatgaaaaaagctaaatctgaaacaactcttgtccgtgcagcgttatatatacgtgtgtcc

SEQ ID NO: 21201 - DNA, 260 bp, Unknown
  Description of Unknown: LeftRegion for integrase B8202 sequence
gacttgacccaaacttcgtacgacataatgacaacatggtaaaagaatggcaaaatcaaatgcgagaacacaacgaaaactttaatcctgaatctggtggagatttgtataacgtcgaaaccggtaactacgttgatgatgaataaaattatgggggtagtccacctacccttattatttttttacttttttaaggggtgatgaattatgaacgtagctatttacgttcgtgtcaggtcagtacattagaacaaaaagaa

SEQ ID NO: 21202 - DNA, 260 bp, Unknown
  Description of Unknown: LeftRegion for integrase B8203 sequence
aactgcgtatactgatacggtcatgttcgattccgagatacatgatgactatcatataagcagttatgacagtatatcttttaaattagatatgtgtcctacaacgacttatgacaatatctattcaaatgagatcactttaactaaataataataacaacgacaacgacaacaacaaaacaacgggaggaaaattgaatatgaaaaggatattacgggctgcgctgtatatccgcgtatcgacggaagagcaggctaaa

SEQ ID NO: 21203 - DNA, 260 bp, Unknown
  Description of Unknown: LeftRegion for integrase B8204 sequence
aactgcgtatactgatacggtcatgttcgattccgagatacatgatgactatcatataagcagttatgacagtatatcttttaaattagatatgtgtcctacaacgacttatgacaatatctattcaaatgagatcactttaactaaataataataacaacgacaacgacaacaacaaaacaacgggaggaaaattgaatatgaaaaggatattacgggctgcgctgtatatccgcgtatcgacagaagagcaggctaaa

SEQ ID NO: 21204 - DNA, 260 bp, Unknown
  Description of Unknown: LeftRegion for integrase B8205 sequence
gggcaaggtagtatataccgatgacactatatatgacgatatgctgcatgatgattatcatatcggcagctatgacagtgtgacatttaagttagacatgtaccctatgacatcctatgacagcatctactcaggtgagatcactttaactaaataacgacaacaacgacaacaacaaaacaacgggaggaaaattgaatatgaaaaggatattacgggctgcgctgtatatccgcgtatcgacagaagagcaggctaaa

SEQ ID NO: 21205 - DNA, 260 bp, Unknown
  Description of Unknown: LeftRegion for integrase B8206 sequence
attaaaaataggctattacaagtaaaaaccgcccggtgcttccaacaccgaacagccaaacatatacccgaagatatacactatactaacaaaaatattgtatcatcttcggagcagccttgcaagcggaacaccagttcctcgctggctgttatttttatacccatttttacgtatagaattaagaaggagatggtacaatgaacaaagttatccgctgtgcctgctacgtccgggtttccacagacaaccagctagaa

SEQ ID NO: 21206 - DNA, 260 bp, Unknown; identical to SEQ ID NO: 21193
  Description of Unknown: LeftRegion for integrase B8207 sequence

SEQ ID NO: 21207 - DNA, 260 bp, Unknown
  Description of Unknown: LeftRegion for integrase B8208 sequence
ctgggttatatagcgtatgctctggatattggcaccgccgacgacgtcgtcagtgcggacggcggcgaattgggcgggtggtatatttggagctcggacatacagggcgggggaacagctatgcacttcattttctccgataagcgctaagagtcgatgtgtgacccgtgcccgattcgggcaccgaaaggaggaacaccatgaagaaagatacccctgcgggtgagagcttgcccttgcgggcagctctgtacccccgc

SEQ ID NO: 21208 - DNA, 260 bp, Unknown
  Description of Unknown: LeftRegion for integrase B8209 sequence
gattatgaacaggcacgtaaagatagtgagaaagtttggaacgatccaaatgcccatgtaggaggtccacgttgggttggcaaaaacgaaggatatgaaagttgggctaaacgacaacaagaagtacaaaatacaccagcacaataattttacgggtagcttgcctacccttattatttttttatcttttttaaggggtgatgaattatgaacgtagctatttacgttcgtgtcaggtcagtacattagaacaaaaagaa

SEQ ID NO: 21209 - DNA, 260 bp, Unknown
  Description of Unknown: LeftRegion for integrase B8210 sequence
catataaaaaaatgaaggaacaaagaattaaagatatagcaaatgaatacaaaaacaggattccacagaaactttatgacgctctttatgcatatgagattgaaataactgattaacttcaagttgttgacaaccacatataacggagttaaaatgtagttgtcctagaatcaggaacaacatagaggaggccatcatgaatgaagatattaagagctggtttatttagtcgcgtctcaacggaagaccagaagcgccac

SEQ ID NO: 21210 - DNA, 260 bp, Unknown
  Description of Unknown: LeftRegion for integrase B8211 sequence
taaagttaatggaagaaaagaattttttaaagttaatatcgatgaaattaaggataaaattttatcagaacacaataatacagtccaatttacagacgaaccaaaagctgtacaatacagagaaactttaaggttaacttcacaataaaattatgggtagcatgtctacccttattatttttttacttttttagggagtgatgaattatgaacgtagctatttacgttcgtgtcaggtcagtacgctagagcaaaaagaa

SEQ ID NO: 21211 - DNA, 260 bp, Unknown
  Description of Unknown: LeftRegion for integrase B8212 sequence
ttatgatcgttttagaacataaaaagaacacgatctgcagaccgtgttcaaaaaaaagcataaatatttatataaaaagtccccgccgtgctgcaacacggtcggggcaaactagcgcaagtgaaatcagatacaaaccccactgcattttttattttagcataaaacagtgggaaataaaaggaaattaggtggatcaaatgaaaaaagctaaatctgaaacaactcttgtccgtgcagcgttatatatacgtgtgtcc

SEQ ID NO: 21212 - DNA, 260 bp, Unknown
  Description of Unknown: LeftRegion for integrase B8213 sequence
ggaaatactaataaagaacaaacgcaacaatctgcacctagagaacatagtggcggacacccttctgctttcggtggcggagatgttcctgtaggtactgaaaaagttgatgatcaaggagaaagttatatagacgcaacaggtgaataaaaacgggtagcttgcctacccttattatttttttacttttttaaggggtgatgaattatgaacgtagctatttacgttcgtgtcaggtcagtacattagaacaaaaagaa

SEQ ID NO: 21213 - DNA, 260 bp, Unknown
  Description of Unknown: LeftRegion for integrase B8214 sequence
agattatgaacaagcacgtaaagaaagcgaaaaggtttgggacaatccaaacgcacatgtaggtggtccatattgggtaggaaaaaatgaaggttatgaaagttgggctaaacgacaacaagaagtacaaaatacaccagcagaataattttatgggtagcacgcctacccttattattttttactttttttagggagtgatgaattatgaacgtagctatttacgttcgtgtcaggtcagtacattagaacaaaaagag

SEQ ID NO: 21214 - DNA, 260 bp, Unknown
  Description of Unknown: LeftRegion for integrase B8215 sequence
gaaatactaataaagaacaaactcaacaatctgcacctagagaacatagtggcggacacccttctgctttcggtggcggagatgttcctgtaggtactgaaaaagttgatgatcaaggagaaagttatatagacgcaacaggtgaataaaaaatgggtagcatgcctacccttattatttttttacttttttaaggggtgatgaattatgaacgtagctatttacgttcgtgtcaggtcagtacattagaacaaaaagaa

SEQ ID NO: 21215 - DNA, 260 bp, Unknown; identical to SEQ ID NO: 21195
  Description of Unknown: LeftRegion for integrase B8216 sequence

SEQ ID NO: 21216 - DNA, 260 bp, Unknown
  Description of Unknown: LeftRegion for integrase B8217 sequence
acttacagaaaacattcaaaataatccggataaatatcaacatataggtggtgggcctggtatgtcattatctagtcctaaccaatcgtatgatagtttcaaacaagacgtaactaaagcaagaaatgagtcacaatcattacaacaataatttatgggtacctagtacccttattatttttttatctttttagggagtgatgaattatgaacgtagctatttacgttcgtgtcaggtcagtacattagaacaaaaagag

SEQ ID NO: 21217 - DNA, 260 bp, Unknown
  Description of Unknown: LeftRegion for integrase B8218 sequence
aagtatgccatttcggattcgcttaatttttcaatcaattctagcaattcttgtctcatacgacaaatacctcctaatgttatgagaacattatagaaagggtatgcaagttaaagcaacggtaaatccttctaattaaggaggtgatgcttgacaaatatagcaactagcgctagtacatcaaagaaggagattgggatatgacttttttagtagagaatccgtatgacagagtgctgagagcagcgttgtacgaacgt

SEQ ID NO: 21218 - DNA, 260 bp, Unknown
  Description of Unknown: LeftRegion for integrase B8219 sequence
ggtctgataacctctgttgcaccgggcaaaactgcgtatactgatacggtcatgttcgattccgagatacatgatgactatcatataagcagttacgacagtatatcttttaaattagacatgtgtcctacaacgacttatgacaatatctactcaaatgagatcactttaactaaataacaacgggaggaaaattgaatatgaaaaggatattacgggctgcgctgtatatccgcgtatcgacagaagagcaggctaaa

SEQ ID NO: 21219 - DNA, 260 bp, Unknown; identical to SEQ ID NO: 21194
  Description of Unknown: LeftRegion for integrase B8220 sequence

SEQ ID NO: 21220 - DNA, 260 bp, Unknown
  Description of Unknown: LeftRegion for integrase B8221 sequence
gaggcaattcgtgatcagcttgtctctgattatggagaacagtttacccaagaagaagctgactatgcaatagaacatcttgaataatatattattgtattccagaaaattatccccgccccggtgtcaaccggggcggagttataactgtgccagacatttttatccacgaggattaatattatactataggtgataatatgaaagaaaagataatacgctgtgccatctatgaccgagtctcaacggatgggcaggtg

SEQ ID NO: 21221 - DNA, 260 bp, Unknown
  Description of Unknown: LeftRegion for integrase B8222 sequence
aaacaactactcacaatgagtcacaaatggagaaagtaccgcaaaataatcaaaatcaaggtgtagatcgtagaagttttaaagaaccattaccacgttcaactacaaatggagtggcaaatgaggcgtgggacggaaaaatataataattcatgggtagcttgcctacccttattatttttttacttttttaaggggtgatgaattatgaacgtagctatttacgttcgtgtcaggtcagtacattagaacaaaaagaa

SEQ ID NO: 21222 - DNA, 260 bp, Unknown
  Description of Unknown: LeftRegion for integrase B8223 sequence
agtttatgatcgttttagaacataaaaagaacacgatctgcagaccgtgttcaaaaatcataaatatttatataaaaagtccccgccgtgctgcaacacggtcggggcaaactagcgcaagtgaaatcagatacaaaccccactgcattttttattttagcataaaacagtgggaaataaaaggaaattaggtggttcaaatgaaaaaagctaaatctgaaacaactcttgtccgtgcagcgttatatatacgtgtgtcc

SEQ ID NO: 21223 - DNA, 260 bp, Unknown
  Description of Unknown: LeftRegion for integrase B8224 sequence
ttgaataaggtgctattataccaatatataagggtttaacccctaaacattattgatattcgctattcatctacgaatagtaaaccgtgtaatcttataattataagtggcacctattttatataggtgtctttttttatgcaattcagggtacaccaccgtacccttattatttttaccttttttgaggaggaatgttaatgaaagtcgcaatatacacaagagtaagtacgttagagcaagcaaacgaaggttattct

SEQ ID NO: 21224 - DNA, 260 bp, Unknown
  Description of Unknown: LeftRegion for integrase B8225 sequence
cctattgaaaatttacaaattaaaactaatgaaatatttaatgtataaattaatgttaaaacattgaaataattaatccgatttattaaaagaatgtctgaaaaattgtattaaaacattaacaatataaatatttataggtgttctattttgggacaccttttataaatgattaaaaaatatagataaggagatgacaaatgttaagagtagcattatatataagagtaagtacagatgagcaagccctacatggagat

SEQ ID NO: 21225 - DNA, 260 bp, Unknown; identical to SEQ ID NO: 21190
  Description of Unknown: LeftRegion for integrase B8226 sequence

SEQ ID NO: 21226 - DNA, 260 bp, Unknown
  Description of Unknown: LeftRegion for integrase B8227 sequence
gccgggcaaggtagtatataccgatgatacgatatatgacgatatgctgcatgatgattatcatatcggcagctatgacagtgtgacatttaagttagacatgtaccctatgacatcctatgacagcatctactcaggtgagatcactttaactaaataacaacaacgacaacaacaaaacaacgggaggaaaattgaatatgaaaaggatattacgggctgcgctgtatatccgagtgtccacggaagaacaggctaaa

SEQ ID NO: 21227 - DNA, 260 bp, Unknown
  Description of Unknown: LeftRegion for integrase B8228 sequence
ccatgtatgaagaattgcaagaaaaatacaaccagcttgaaagtgaatataacgccttgaaagcagaaaaataataaaaatcccggcggtgcggggacactgccgggatttctgcaacgttttgtataatcataccagatacaacataccgtctgcattgttattgtagcatatgcagacaggaaaagaaaggaaatagcatgataaaaaaagaactttcttctgccggtccgcttcgtgttgcgctttatatccgtgtt

SEQ ID NO: 21228 - DNA, 260 bp, Unknown
  Description of Unknown: LeftRegion for integrase B8229 sequence
gccgggcaaggtagtatataccgatgatacgatatatgacgatatgctgcatgatgattatcatatcggcagctatgacagtgtgacatttaagttagacatgtaccctatgacatcctatgacagcatctactcaggtgagatcactttaactaaatagcaacaacgacaacaacaaaacaacgggaggaaaattgaatatgaaaaggatattacgggccgcgctgtatatccgagtgtccacggaagaacaggctaaa

SEQ ID NO: 21229 - DNA, 260 bp, Unknown
  Description of Unknown: LeftRegion for integrase B8230 sequence
gaaaacactaataaagaacaaacacaacaatctgcacctagagaacatagtggcggacacccttctgctttcggtggtggcgatgttcctgtaggtacagaaaaggttgataatcaaggagaaagttatatagacgcaacaggtgaataaaaacgggtagcttgcctacccttattatttttttacttttttaaggggtgatgaattatgaacgtagctatttacgttcgtgtcaggttagtacattagaacaaaaagaa

SEQ ID NO: 21230 - DNA, 260 bp, Unknown
  Description of Unknown: LeftRegion for integrase B8231 sequence
tgacaccttcacaaatagatgaatggaacaaaacaaaaccaactactcacgatgaatcacaaatggaacaagtaccacaagaccattctggtggccacccctcaattttcggaacagatacgccaccaaaaaataattaaataaatttatatgggtagcatgtctacccatattaatttttttacttttttagggaggtgatgaattatgaacgtagctatttacgttcgtgtcaggtcagtacattagaacaaaaagaa

SEQ ID NO: 21231 - DNA, 260 bp, Unknown
  Description of Unknown: LeftRegion for integrase B8232 sequence
ccatgtatgaagaattgcaagaaaaatacaatcagcttgaaagcgaatataatgctttgaaatcagaaaaataataaaaatcccggcggtgcggggacactgccgggatttctgcaacgttttgtataatcataccagatacaacataccgtctgcattgtcattgtaacatatgcaggcaggaaaagaaaggaaatagcatgataaaaaaagaactttctacgggtccgcttcgtgttgcgctttatatccgtgtttcc

SEQ ID NO: 21232 - DNA, 260 bp, Unknown
  Description of Unknown: LeftRegion for integrase B8233 sequence
actctttaaacttccataaaatgtaaaaccgcccggtgctggtaacaccgaacggctttacatagattttctcttgccggatgcccggaagatataaatcagactttgaacacctgaattatatcatctccgaagcgtcctggcaaggggtgttctttttgtacctatttcttcgtacactatcacaaggagatgattctatgttgaaaacaccacctgcctgccgcgctggtatctatatccgtgtcagcactgaagag

SEQ ID NO: 21233 - DNA, 260 bp, Unknown
  Description of Unknown: LeftRegion for integrase B8234 sequence
ccatgtatgaagaattgcaagaaaaatacaatcagcttgaaagtgaatataatgctttgaaatcagagaaataataaaaatcccggcggtgcggggacactgccgggatttctgcaacgttttgtataatcataccagatacaacataccgtctgcattgttattgtagcatatgcagacaggaaaagaaaggaaatagcatgataaaaaaagaactttctacgggtccgcttcgtgttgcactttatatccgtgtttcc

SEQ ID NO: 21234 - DNA, 260 bp, Unknown
  Description of Unknown: LeftRegion for integrase B8235 sequence
gaaatgacaatatcgtaaaaataaaagcccctgtgcgggaacacagagacttttacataattcttacccttccaggctttcagtaccaggaatgatagaacgtggaaatatgcactgctattatatcatttcttggacgcgctggcaaggggcgtattttttgtacccaaaaatcatactttatctaagaggtgatattaatgatcaaaggtgcttgctatgtccgcgtttccaccgataaccagttggagaactacagc

SEQ ID NO: 21235 - DNA, 260 bp, Unknown
  Description of Unknown: LeftRegion for integrase B8236 sequence
attggcaaactggagggcttaaatggtaaagataactgttgatggtaaagaagtaaaagcagaagatataaaactttctgctgatgttgtgaaagtcatatcatcatgccttgattgacattatagcaaaaagaggttagaatgtgtcgtaaagtgcgataaatgcggcacattctttttatataaagggggattaagcgatggaatgtgttgcgtatatgagagtatcaacagaaaagcaggcagaagagggcaatggt

SEQ ID NO: 21236 - DNA, 260 bp, Unknown
  Description of Unknown: LeftRegion for integrase B8237 sequence
ttgaaaaattggaggttttgaaatgattaaaataacaataaatggaaacgagataaaagcagaggatgtaactttatctgccgatattgtaaaaatcataacatcatgccttgattgacattgtgttttaaaaaggttagaatgtgtcgtaagtacgataaatgcggcacattctttttatataaaaggaggatttgaagatggaatgtgttgcgtacatgagagtatcgacagaaaaacaagcagaagatggaaacggg

SEQ ID NO: 21237 - DNA, 260 bp, Unknown
  Description of Unknown: LeftRegion for integrase B8238 sequence
tttgtcaaataatagtataaaatgcaaaaccgcccggtgttaccagcaccgaacggctttacatagattttctcttgccggatgctccggaaagatataatcagcttgaacacctgaattatatcatctccgaagcgtcctggcaaggggcgttctttttgtacctattttttcgtacattatcataaggagatgattctatgttgaaaacaccacctgcctgccgcgctggtatctatatccgtgtcagcactgaagag

SEQ ID NO: 21238 - DNA, 260 bp, Unknown
  Description of Unknown: LeftRegion for integrase B8239 sequence
ttgaaaaattggaggttttgaaatgattaaaataacaataaatggaaacgagataaaagcagaggatgtaactttatctgccgatattgtaaaaatcataacatcatgccttgattgacattatattttaaaaaggttagaatgtgtcgtaagtacgataaatgcggcacattctttttatataaaaggaggatttgaagatggaatgtgttgcgtacatgagagtatcaacagaaaaacaagcagaagatggaaacggg

SEQ ID NO: 21239 - DNA, 260 bp, Unknown
  Description of Unknown: LeftRegion for integrase B8240 sequence
cttcagatgatatagcaagaaaaggagaacaaattaaaataaatattgatttaactaaataaaataaaaaacaaaaaagcccccacaattattttatggaagctaatttataagtgtatgatatacactattctgacaaaataattatatcatacatttattattagcacaacttttagtagaaaggaagtgctatttttatggataatataaaaagagctggactatatatccgtgtttctcacgaagagcaagtcaaa

SEQ ID NO: 21240 - DNA, 260 bp, Unknown
  Description of Unknown: LeftRegion for integrase B8241 sequence
acctgtgcagcttccataaatagcaaaaccgcccggtgttaccagcaccgaacggctttacatagattttctcttgccggatgcccggaagatataaatcagactttgaacacctgaattatatcatctccgaagcgtcctggcaaggggtgttctttttgtacctatttcttcgtacactatcacaaggagatgattctatgttgaaaacaccacctgcctgccgcgctggtatatatatccgtgtcagcactgaagag

SEQ ID NO: 21241 - DNA, 260 bp, Unknown; identical to SEQ ID NO: 21236
  Description of Unknown: LeftRegion for integrase B8242 sequence

SEQ ID NO: 21242 - DNA, 260 bp, Unknown
  Description of Unknown: LeftRegion for integrase B8243 sequence
aataatggatatagcaaagaacagtttgcctgcaattgaatacagcaatttcatattgtctatatgttagaaaataaaaatcccggcggtgcggggacactgccgggatttctgcaacgttttgtataatcataccagatacaacataccgtctgcattgttattgtagcatatgcagacaggaaaagaaaggaaatagcatgataaaaaaagaactttctacgggtccgcttcgtgttgcactttacatacgtgtttcc

SEQ ID NO: 21243 - DNA, 260 bp, Unknown
  Description of Unknown: LeftRegion for integrase B8244 sequence
aataatggatatagcaaagaacagtttacctgcaattgaatacagcaatttcatattgtctatatgttagaaaataaaaatcccggcggtgcggggacactgccgggatttctgcaacgttttgtataatcataccagatacaacataccgtctgcattgttattgtagcatatgcagacaggaaaagaaaggaaatagcatgataaaaaaagaactttctacgggtccgcttcgtgttgcactttacatccgtgtttcc

SEQ ID NO: 21244 - DNA, 260 bp, Unknown; identical to SEQ ID NO: 21236
  Description of Unknown: LeftRegion for integrase B8245 sequence

SEQ ID NO: 21245 - DNA, 260 bp, Unknown
  Description of Unknown: LeftRegion for integrase B8246 sequence
ttgaaaaattggaggttttgaaatgattaaaataacaataaatggaaacgagataaaagcagaggatgtaactttatctgccgatattgtaaaaatcataacattatgccttgattgacattatattttaaaaaggttagaatgtgtcgtaagtacgataaatgcggcacattctttttatataaaaggaggatttgaagatggaatgtgttgcgtatatgagagtatcaacagaaaagcaggcagaagatggaaacggg

SEQ ID NO: 21246 - DNA, 260 bp, Unknown
  Description of Unknown: LeftRegion for integrase B8247 sequence
gttgtagatgttggttttaaatagcaaaaccgcccggtgttaccagcaccgaacggctttacatagattttctcttgccggatgcccggaaagatataaatcagcttgaacacctgaattatatcatctccaaagcgtcctggcaaggggcgttctttttgtacctattttttcgtacattatcataaggagatgatcatatgttgaaaacaccacctgcctgccgcgccggtatctatatccgtgtcagcactgaagag

SEQ ID NO: 21247 - DNA, 260 bp, Unknown
  Description of Unknown: LeftRegion for integrase B8248 sequence
tttatgatcgttttagaacataaaaagaacacgatctgcagaccgtgttcaaaaaaagcataaatatttatataaaaagtccccgccgtgctgcaacacggtcggggcaaactagcgcaagtgaaatcagatacaaaccccactgcattttttattttatcataaaacagtgggaaataaaaggaaattaggtggttcaaatgaaaaaagctaaatctgaaacaactcttgtccgtgcagcgttatatatacgtgtgtcc

SEQ ID NO: 21248 - DNA, 260 bp, Unknown; identical to SEQ ID NO: 21242
  Description of Unknown: LeftRegion for integrase B8249 sequence

SEQ ID NO: 21249 - DNA, 260 bp, Unknown
  Description of Unknown: LeftRegion for integrase B8250 sequence
catcaagaaaattaatcataaagaatttggaaactctgagatagaagtatatgcaataaaattaaaataaaaaggagaaaaatatgtcaaataactgtgtaataataagaaataaaaatattaatgaaaatgaaaaaaattatatcttaactttactattggatgaagcaaaaaaagaaaattttgattaggtgaattctatgaataaaataactgctatttattgcagagaatctacagaaaaacaaaatataagtaca

SEQ ID NO: 21250 - DNA, 260 bp, Unknown
  Description of Unknown: LeftRegion for integrase B8251 sequence
atatttcaaaaaattgtattgtaaagaatgtggtagccgcttagttcgttacattgaaagcagacaacatgtcaaatggatatgcaatggaaacaagcggaaaggaacagggttttgtaaaggcgttagagtgctggattcgactgtccggggctgggaaattgacacagatgttttagttgaaggaaaggttggtaaagatggcgaaaaaagttacagttatacctgcaaaacaggtcagagcaaatagtacaaaagca

SEQ ID NO: 21251 - DNA, 260 bp, Unknown
  Description of Unknown: LeftRegion for integrase B8252 sequence
agtttatgatcgttttagagcataaaaagaacacgatctgcagaccgtgttcaaaaatcataaatatttatataaaaagtccccgccgtgctgcaacacggtcggggcaaactagcgcaagtgaaatcagatacaaaccccactgcattttttattttagcataaaatagtgggaaataaaaggaaattaggtggttcaaatgaaaaaagctaaatctgaaacaactcttgtccgtgcagcgttatatatacgtgtgtcc

SEQ ID NO: 21252 - DNA, 260 bp, Unknown
  Description of Unknown: LeftRegion for integrase B8253 sequence
ctctttaaactcccataaatagcaaaaccgcccggtgctggtaacaccgaacggctttacatagattttctcttgccggatgctccggaagatataaatcagacttagaacacctgaattatatcatctccgaagcgtcctggcaaggggtgttctttttgtacctatttcttcgtacactatcacaaggagatgattctatgttgaaaacaccacctgcctgccgcgctggtatctatatccgtgtcagcactgaagag

SEQ ID NO: 21253 - DNA, 260 bp, Unknown
  Description of Unknown: LeftRegion for integrase B8254 sequence
accggtgcaactctcataaatagcaaaaaccgcccggtgttggcgcaccgaacggctttacatagattttctcttgccggatgcccggaagatataaatcagactttgaacacctgaattatatcatctccgaagcgtcctggcaaggggtgttctttttgtacctatttcttcgtacactatcacaaggagatgattctatgttgaaaacaccacctgcctgccgcgctggtatctatatccgtgtcagcactgaagaa

SEQ ID NO: 21254 - DNA, 260 bp, Unknown
  Description of Unknown: LeftRegion for integrase B8255 sequence
ttttgtttattttctataaaaatgcaaaaccgcccggtgttaccagcaccgaacggctttacatagattttctcttgccgaatgctccggaagatataatcaatcttgaacacctgaattatatcatctccgaagcgtcctggcaaggggtgttctttttgtacctatttcttcgtacactatcacaaggagatgattctatgttgaaaacaccacctgcctgccgcgccggtatctatatccgtgtcagcactgaagag

SEQ ID NO: 21255 - DNA, 260 bp, Unknown; identical to SEQ ID NO: 21238
  Description of Unknown: LeftRegion for integrase B8256 sequence

SEQ ID NO: 21256 - DNA, 260 bp, Unknown
  Description of Unknown: LeftRegion for integrase B8257 sequence
tttaagtttttaattattgcgattaattcatttcttaattcttctaacatagtaagatactcctttcttttaggtttatctttaatatatgtatcagtgatttaagtatttcacttttttagaaaaattttaaatattttatatttgtattataacatagaacgtgtgttcgttcaatatttaaaaaggaggattaaaatatgaaaataggaatttacacaagagtatcaacggaagagcaagctgttcatggtgtgtct

SEQ ID NO: 21257 - DNA, 260 bp, Unknown; identical to SEQ ID NO: 20944
  Description of Unknown: LeftRegion for integrase B8258 sequence

SEQ ID NO: 21258 - DNA, 260 bp, Unknown; identical to SEQ ID NO: 21236
  Description of Unknown: LeftRegion for integrase B8259 sequence

SEQ ID NO: 21259 - DNA, 260 bp, Unknown
  Description of Unknown: LeftRegion for integrase B8260 sequence
acgcaagcataaagaatcctggcttgtcggatatgctcaaatctgtagaacgtggagaagttgacttgctcttaaccagtggcggtgtagatcgtttcgtgcgttctaaagatgagtatgaacagctccttgaaatattagaggctcataactgtaatttagaaattgtaaaattgaaaaaagaataggtgtgatgtcttatgaagaaaaaagaaattatttccggtccactccgtgttgctttatacattcgagtttcc

SEQ ID NO: 21260 - DNA, 260 bp, Unknown
  Description of Unknown: LeftRegion for integrase B8261 sequence
tttatgatcgttttaggacataaaaagaacacgatctgcagaccgtgttcaaaaaaagcataaatatttatataaaaagtccccgccgtgctgcaacacggtcggggcaaactagcgcaagtgaaatcagatacaaaccccactgcattttttattttagcataaaacagtgggaaataaaaggaaattaggtggttcaaatgaaaaaagctaaatctgaaacaactcttgtccgtgcagcgttatatatacgtgtgtcc

SEQ ID NO: 21261 - DNA, 260 bp, Unknown
  Description of Unknown: LeftRegion for integrase B8262 sequence
tgggcgcttttcaattataaaggtctggcaggttcacaactactgttaaaaattggcaataaaaacacccgcagtgctgggaacactccgggtgcggtgcaaagatatatcataccagatacaacataccgtctgcacttattatattatcacggcatgacgggaaattaaaggaaattgacaagaattgtggtgatattatgagaaacaaggaaattgccccggcgcttgtccgggttgctctatatataagggtttcc

SEQ ID NO: 21262 - DNA, 260 bp, Unknown
  Description of Unknown: LeftRegion for integrase B8263 sequence
aaaattattggtaaagttgttgaagccagaaaaagaaatcaatttaaataaaaaagagaaaatgctactgtttggcgacacggcattttctcaaaccataaaaattccttgaaataaggtctctttatgttattattatagcatattttaaaaccttttttcaagcaatttaataaaattttagaaagaaggtttttattatgaaatatgtagcttgttattgccgtgtaagcacagatgaacaggcaaaatttggtttt

SEQ ID NO: 21263 - DNA, 260 bp, Unknown
  Description of Unknown: LeftRegion for integrase B8264 sequence
tgggcgcttttcaattataaaggtctggcaggttcacaactactggtaaaaaatggcaataaaaacacccgcagtgctgggaacactccgggtgtggtgcaaagatatatcataccagatacaacataccgtctgcacttattatattatcacggcatgacgggaaataaaaggaaattgacaagaattgtggtgatattatgagaaacaaggaaattgccccggcgcttgtccgggttgctctatatataagggtttcc

SEQ ID NO: 21264 - DNA, 260 bp, Unknown; identical to SEQ ID NO: 21261
  Description of Unknown: LeftRegion for integrase B8265 sequence

SEQ ID NO: 21265 - DNA, 260 bp, Unknown; identical to SEQ ID NO: 21261
  Description of Unknown: LeftRegion for integrase B8266 sequence

SEQ ID NO: 21266 - DNA, 260 bp, Unknown
  Description of Unknown: LeftRegion for integrase B8267 sequence
tcttcttttgtaagtaataaaataacagcctttaccaatgacattttgaatggctaatataaaaacacccgcagtgctgggaacactccgggtgcggtgcaaagatatatcataccagatacaacataccgtctgcacttattatattatcacggcatgacgggaaattaaaggaaattgacaagaattgtggtgatattatgagaaacaaggaaattgccccggcgcttgtccgggttgctctatatataagggtttcc

SEQ ID NO: 21267 - DNA, 260 bp, Unknown
  Description of Unknown: LeftRegion for integrase B8268 sequence
tcttcttttgtaagcaataaaatagcaacctttaccaacgatattttgaatatctaatataaaaacacccgcagtgctgggaacactccgggtgcggtgcaaagatatatcataccagatacaacataccgtctgcatttattatattaccacctgcggacgggaaattaaaggaaattgacaagaaatgtggtgatattgtgtataaaaaagaacttgccccggatttagtccgggttgctttatatatccgtgtttct

SEQ ID NO: 21268 - DNA, 260 bp, Unknown
  Description of Unknown: LeftRegion for integrase B8269 sequence
tcttcttttgtaagcaataaaatagcaacctttaccaacgatattttgaatgtctaatataaaaacacccgcagtgctgggaacactccgggtgcggtgcaaagatatatcataccagatacaacataccgtctgcatttattatattaccacctgcggacgggaaattaaaggaaattgacaagaaatgtggtgatattgtgtataaaaaagaacttgccccggatttagtccgggttgctttatatatccgtgtttct

SEQ ID NO: 21269 - DNA, 260 bp, Unknown
  Description of Unknown: LeftRegion for integrase B8270 sequence
gggcgcttttcaattataaaggtctggcaggttcacaactactgttaaaaattggcaaataaaaacacccgcagtgctgggaacactccgggtgcggtgcaaagatatatcataccagatacaacataccgtctgcacttattatattatcacggcatgacgggaaattaaaggaaattgacaagaattgtggtgatattatgagaaacaaggaaattgccccggcgcttgtccgggttgctctatatataagggtttcc

SEQ ID NO: 21270 - DNA, 260 bp, Unknown
  Description of Unknown: LeftRegion for integrase B8271 sequence
cttcttttgtaagcaataaaataacaacctttaccaacgatattttgaatgtctaatataaaaaacacccgcagtgctgggaacactccgggtgcggtgcaaagatatatcataccagatacaacataccgtctgcatttattatattatcacggcatgacgggaaataaaaggaaattgacaagaattgtggtgatattatgagaaacaaggaaattgccccggcgcttgtccgggttgctctatatataagggtttcc

SEQ ID NO: 21271 - DNA, 260 bp, Unknown
  Description of Unknown: LeftRegion for integrase B8272 sequence
ctggagcggtagggaatctccgaagagatacctgtctttagcaggaatattgtatcaccttcggagcagccatgcaagcggaacctttgtttgcgctggctgtattttttgtacccatttttgccggttgcgccggcgcaaattacaaaataggagcgttttgttgacttcaacataatgttacaggaggatgatactttatgaaaaaagaacaacccaatgtacttcacacagcaatttacattcgtgtttccactgat

SEQ ID NO: 21272 - DNA, 260 bp, Unknown; identical to SEQ ID NO: 21268
  Description of Unknown: LeftRegion for integrase B8273 sequence

SEQ ID NO: 21273 - DNA, 260 bp, Unknown
  Description of Unknown: LeftRegion for integrase B8274 sequence
tgggcgcttttcaattataaaggtctggcaggttcacaactactgttaaaaattggcaataaaaacacccgcagtgctgggaacactccgggtgcggtgcaaagatatatcataccagatacaacataccgtctgcatttattacattatcacggcatgacgggaaataaaaggaaattgacaagaattgtggtgatattatgagaaacaaggaaattgccccggcgcttgtccgggttgctctatatataagggtttcc

SEQ ID NO: 21274 - DNA, 260 bp, Unknown
  Description of Unknown: LeftRegion for integrase B8275 sequence
tgggcgcttttcaattataaaggtctggcaggttcacaactactgttaaaaattggcaataaaaacacccgcagtgctgggaacactccgggtgcggtgcaaagatatatcataccagatacaacataccgtctgcacttattatattatcacggcatgacgggaaattaaaggaaattgacaagaattgtggtgatattatgaggaacaaggaaattgccccggcgcttgtccgggttgctctatatataagggtttcc

SEQ ID NO: 21275 - DNA, 260 bp, Unknown
  Description of Unknown: LeftRegion for integrase B8276 sequence
tcttcttttgtaagtaataaaataacagcctttaccaatgacattttgaatggctaatataaaaacacccgcagtgctgggaacactccgggtgcggtgcaaagatatatcataccagatacaacataccgtctgcacttattatattatcacggcatgacgggaaataaaaggaaattgacaagaattgtggtgatattatgagaaacaaggaaattgccccggcgcttgtccgggttgctctatatataagggtttcc

SEQ ID NO: 21276 - DNA, 260 bp, Unknown
  Description of Unknown: LeftRegion for integrase B8277 sequence
tgggcgcttttcaattataaaggtctggcaggctcacaactactggtaaaaaatggcaataaaaacacccgcagtgctgggaacactccgggtgcggtgcaaagatatatcataccagatacaacataccgtctgcacttattatattatcacggcatgacgggaaataaaaggaaattgacaagaattgtggtgatattatgaaaagaaaagaagttgcggcagggcttgtccgtgtcgctttatatattcgtgtttcc

SEQ ID NO: 21277 - DNA, 260 bp, Unknown; identical to SEQ ID NO: 21266
  Description of Unknown: LeftRegion for integrase B8278 sequence

SEQ ID NO: 21278 - DNA, 260 bp, Unknown; identical to SEQ ID NO: 21269
  Description of Unknown: LeftRegion for integrase B8279 sequence

SEQ ID NO: 21279 - DNA, 260 bp, Unknown; identical to SEQ ID NO: 21261
  Description of Unknown: LeftRegion for integrase B8280 sequence

SEQ ID NO: 21280 - DNA, 260 bp, Unknown
  Description of Unknown: LeftRegion for integrase B8281 sequence
tgggcgcttttcaattataaaggtctggcaggttcacaactactgttaaaaattggcaataaaaacacccgcagtgctgggaacactccgggtgcggtgcaaagatatatcataccagatacaacataccgtctgcatttattatattatcacggcatgacgggaaattaaaggaaattggcaagaattgtggtgatattatgagaaacaaggaaattgccccggcgcttgtccgggttgctctatatataagggtttcc

SEQ ID NO: 21281 - DNA, 260 bp, Unknown
  Description of Unknown: LeftRegion for integrase B8282 sequence
tgggcgcttttcaattataaaggtctggcaggttcacaactactgttaaaaattggcaataaaaacacccgcagtgctgggagcactccgggtgcggtgcaaagatatatcataccagatacaacataccgtctgcacttattatattatcacggcatgacgggaaattaaaggaaattgacaagaattgtggtgatattatgagaaataaggaaattgccccggcgcttgtccgggttgctctatatataagggtttcc

SEQ ID NO: 21282 - DNA, 260 bp, Unknown
  Description of Unknown: LeftRegion for integrase B8283 sequence
gcacttgatgttattacacataataaataaaataaaaaaaccgcccctgtgctaccaacactgagacggcctatacatccggagatgcatacatattttacgtacaagaatattgtatcatcttcgggcagccatggcaagtggaatctctatattcctctggctgttatttttatacccatttttaaggagatgatcatatgagaaaccaaaacacttccgaagttccaatacgggcagctctttatgcccgtgtttcc

SEQ ID NO: 21283 - DNA, 260 bp, Unknown
  Description of Unknown: LeftRegion for integrase B8284 sequence
tcttcttttgtaagcaataaaataacaacctttaccaacgatattttgaatgtctaatataaaaacacccgcagtgctgggaacactccgggtgcggtgcaaagatatatcataccagatacaacataccgtctgcatttattatattaccacctgtggacgggaaataaaaggaaattgacaagaattgtggtgatattatgagaaacaaggaaattgccccggcgcttgtccgggttgctctatatataagggtttcc

SEQ ID NO: 21284 - DNA, 260 bp, Unknown
  Description of Unknown: LeftRegion for integrase B8285 sequence
tcttcctttgtaagcaataaaataacaacctttaccaacgatattttgaatgtctaatataaaaacacccgcagtgctgggaacactccgggtgcggtgcaaagatatatcataccagatacaacataccgtctgcacttattatattatcacggcatgacgggaaataaaaggaaattgacaagaattgtggtgatattatgagaaacaaggaaattgccccggcgcttgtccgggttgctctatatataagggtttcc

SEQ ID NO: 21285 - DNA, 260 bp, Unknown
  Description of Unknown: LeftRegion for integrase B8286 sequence
tcttcttttgtaagcaataaaatagcaacctttaccaacgatattttgaatgtctaatataaaaacacccgcagtgctgggaacactccgggtgcggtgcaaagatatatcataccagatacaacataccgtctgcacttattatattatcacggcatgacgggaaattaaaggaaattgacaagaattgtggtgatattatgagaaacaaggaaattgccccggcgcttgtccgggttgctctatatataagggtttcc

SEQ ID NO: 21286 - DNA, 260 bp, Unknown
  Description of Unknown: LeftRegion for integrase B8287 sequence
tgggcgcttttcaattataaaggtctggcaggcttgcaactactggtaaaaaatggcaataaaaacacccgcagtgctgggaacactccgggtgcggtgcaaagatatatcataccagatacaacataccgtctgcatttattatattatcacggcatgacgggaaattaaaggaaattgacaagaattgtggtgatattatgagaaacaaggaaattgccccggcgcttgtccgggttgctctatatataagggtttcc

SEQ ID NO: 21287 - DNA, 260 bp, Unknown
  Description of Unknown: LeftRegion for integrase B8288 sequence
gcacttgatgttattacacataataaataaaataaaaaaaccgcccctgtgctaccaacactgagacggcctatacatccggagatgcatacatattttacgtacaagaatattgtatcatcttcgggcagccatggcaagtggaatctctgtattcctctggctgttatttttatacccatttttaaggagatgatcatatgagaaaccaaaacacttccgaagttccaatacgggcagctctttatgtccgtgtttcc

SEQ ID NO: 21288 - DNA, 260 bp, Unknown
  Description of Unknown: LeftRegion for integrase B8289 sequence
gcacttgatgttattacacataataaataaaataaaaaaaccgcccctgtgctaccaacactgagacggccaatacatccggagatgcatacatattttacgtacaagaatattgtatcatcttcgggcagccatggcaagtggaatctctatattcctctggctgttatttttatacccatttttaaggagatgatcatatgagaaaccaaaacacttccgaagttccaatacgggcagctctttatgtccgtgtttcc

SEQ ID NO: 21289 - DNA, 260 bp, Unknown
  Description of Unknown: LeftRegion for integrase B8290 sequence
tgggcgcttttcaattataaaggtctggcaggtttgcaactactgttaaaaattggcaataaaaacacccgcagtgctgggaacactccgggtgcggtgcaaagatatatcataccagatacaacataccgtctgcacttattatattatcacggcatgacgggaaattaaaggaaattgacaagaattgtggtgatattatgagaaacaaggaaattgccccggcacttgtccgggttgctctatatataagggtttcc

SEQ ID NO: 21290 - DNA, 260 bp, Unknown; identical to SEQ ID NO: 21261
  Description of Unknown: LeftRegion for integrase B8291 sequence

SEQ ID NO: 21291 - DNA, 260 bp, Unknown
  Description of Unknown: LeftRegion for integrase B8292 sequence
tgggcgcttttcaattataaaggtctggcaggttcacaactactgttaaaaattggcaataaaaacacccgcagtgctgggaacactccgggtgcggtgcaaagatatatcataccagatacaacataccgtctgcacttattatattatcacggcatgacgggaaattaaaggaaattgacaagaattgtggtgatattatgagaaacaaggaaattgccccggtgcttgtccgggttgctctatatataagggtttcc

SEQ ID NO: 21292 - DNA, 260 bp, Unknown
  Description of Unknown: LeftRegion for integrase B8293 sequence
tgggcgcttttcaattataaaggtctggcaggcttgcaactactgttaaaaattggcaataaaaacacccgcagtgctgggaacactccgggtgcggtgcaaagatatatcataccagatacaacataccgtctgcacttattatattatcacggcatgacgggaaattaaaggaaattgacaagaattgtggtgatattatgagaaacaaggaaattgccccggcgcttgtccgggttgctctatatataagggtttcc

SEQ ID NO: 21293 - DNA, 260 bp, Unknown; identical to SEQ ID NO: 21261
  Description of Unknown: LeftRegion for integrase B8294 sequence

SEQ ID NO: 21294 - DNA, 260 bp, Unknown; identical to SEQ ID NO: 21261
  Description of Unknown: LeftRegion for integrase B8295 sequence

SEQ ID NO: 21295 - DNA, 260 bp, Unknown
  Description of Unknown: LeftRegion for integrase B8296 sequence
tgggcgcttttcaattataaaggtctggcaggcttgcaactactggtaaaaaatggcaataaaaacacccgcagtgctgggaacactccgggtgtggtgcaaagatatatcataccagatacaacataccgtctgcacttattatattatcacggcatgacgggaaataaaaggaaattgacaagaattgtggtgatattatgagaaacaaggaaattgccccggcgcttgtccgggttgctctatatataagggtttcc

SEQ ID NO: 21296 - DNA, 260 bp, Unknown; identical to SEQ ID NO: 21268
  Description of Unknown: LeftRegion for integrase B8297 sequence

SEQ ID NO: 21297 - DNA, 260 bp, Unknown
  Description of Unknown: LeftRegion for integrase B8298 sequence
tgggcgcttttcaattataaaggtctggcaggcttgcaactactgttaaaaattggcaataaaaacacccgcagtgctgggaacactccgggtgcggtgcaaagatatatcataccagatacaacataccgtctgcatttattatattatcacggcatgacgggaaattaaaggaaattgacaagaattgtggtgatattatgagaaacaaggaaattgccccggcgcttgtccgggttgctctatatataagggtttcc

SEQ ID NO: 21298 - DNA, 260 bp, Unknown
  Description of Unknown: LeftRegion for integrase B8299 sequence
tgggcgcttttcaattataaaggtctggcaggcttgcaactactgttaaaaattggcaataaaaacacccgcagtgctgggaacactccgggtgcggtgcaaagatatatcataccagatacaacataccgtctgcatttattatattatcacggcatgacgggaaataaaaggaagttgacaagaattgtggtgatattatgagaaacaaggaaattgccccggcgcttgtccgggttgctctatatataagggtttcc

SEQ ID NO: 21299 - DNA, 260 bp, Unknown; identical to SEQ ID NO: 21261
  Description of Unknown: LeftRegion for integrase B8300 sequence

SEQ ID NO: 21300 - DNA, 260 bp, Unknown
  Description of Unknown: LeftRegion for integrase B8301 sequence
tgggcgcttttcaattataaaggtctggcaggtttgcaactactgttaaaaattggcaataaaaacacccgcagtgctgggaacactccgggtgcggtgcaaagatatatcataccagatacaacataccgtctgcatttattatattatcacggcatgacgggaaataaaaggaaattgacaagaattgtggtgatattatgagaaacaaggaaattgccccggcgcttgtccgggttgctctatatataagggtttcc

SEQ ID NO: 21301 - DNA, 260 bp, Unknown
  Description of Unknown: LeftRegion for integrase B8302 sequence
tcttcttttgtaagcaataaaataacaacctttaccaacgatattttgaatgtctaatataaaaacacccgcagtgctgggaacactccgggtgcggtgcaaagatatatcataccagatacaacataccgtctgcatttattatattaccacctgcggacgggaaattaaaggaaattgacaagaaatgtggtgatattgtgtataaaaaagaacttgccccagatttagtccgggttgctttatatatccgtgtttct

SEQ ID NO: 21302 - DNA, 260 bp, Unknown; identical to SEQ ID NO: 21268
  Description of Unknown: LeftRegion for integrase B8303 sequence

SEQ ID NO: 21303 - DNA, 260 bp, Unknown
  Description of Unknown: LeftRegion for integrase B8304 sequence
tgggcgcttttcaattataaaggtctggcaggttcacaactactgttaaaaattggcaataaaaacacccgcagtgctgggaacactccgggtgcggtgcaaagatatatcataccagatacaacataccgtctgcacttattatattatcacggcatgacgggaaataaaaggaaattgacaagaattgtggtgatattatgagaaacaaggaaattgccccggcgcttgtccgggttgctctatatataagggtttcc

SEQ ID NO: 21304 - DNA, 260 bp, Unknown
  Description of Unknown: LeftRegion for integrase B8305 sequence
tgggcgcttttcaattataaaggtctggcaggttcacaactactgttaaaaattggcaataaaaacacccgcagtgctgggaacactccgggtgcggtgcaaagatatatcataccagatacaacataccgtctgcacttattatattatcacggcatgacgggaaattaaaggaaattgacaagaattgtggtgatattatgagaaacaaggaaattgtcccggcgcttgtccgggttgctctatatataagggtttcc

SEQ ID NO: 21305 - DNA, 260 bp, Unknown; identical to SEQ ID NO: 21261
  Description of Unknown: LeftRegion for integrase B8306 sequence

SEQ ID NO: 21306 - DNA, 260 bp, Unknown
  Description of Unknown: LeftRegion for integrase B8307 sequence
gggcgcttttcaattataaaggtctggcaggtttgcaactactgttaaaaattggcaaataaaaacacccgcagtgctgggaacactccgggtgcggtgcaaagatatatcataccagatacaacataccgtctgcatttattatattaccacctgcggacgggaaattaaaggaaattgacaagaattgtggtgatattatgagaaacaaggaaattgccccggcgcttgtccgggttgctctatatataagggtttcc

SEQ ID NO: 21307 - DNA, 260 bp, Unknown
  Description of Unknown: LeftRegion for integrase B8308 sequence
tcttcttttgtaagcaataaaatagcaacctttaccaacgatattttgaatgtctaatataaaaacacccgcagtgctgggaacactccgggtgcggtgcaaagatatatcgtaccagatacaacataccgtctgcatttattatattaccacctgctgacgggaaattaaaggaaattgacaagaaatgtggtgatattgtgtataaaaaagaacttgccccggatttagtccgggttgctttatatatccgtgtttct

SEQ ID NO: 21308 - DNA, 260 bp, Unknown
  Description of Unknown: LeftRegion for integrase B8309 sequence
tatgcgattgctcatttgaatgattaatcaaaataaaaccgcccctgcgctaccaacacagagacggcctatacatccgaggatgcatgcatatattttacgtgcaagaatattgtatcatctttggacagccacggcaagtggaatctctgtatttctctggctgttatttttatacccatttttaaggagatgatcatatgagaaaccaaaacacttccgaaactccggtaagggcagctctttatgtccgtgtttcc

SEQ ID NO: 21309 - DNA, 260 bp, Unknown
  Description of Unknown: LeftRegion for integrase B8310 sequence
tgggcgcttttcaattataaaggtctggcaggttcacaactactgttaaaaattggcaataaaaacacccgcagtgctgggaacactccgggttcggtgcaaagatatatcataccagatacaacataccgtctgcacttattatattatcacggcatgacgggaaattaaaggaaattgacaagaattgtggtgatattatgagaaacaaggaaattgccccggcgcttgtccgggttgctctatatataagggtttcc

SEQ ID NO: 21310 - DNA, 260 bp, Unknown
  Description of Unknown: LeftRegion for integrase B8311 sequence
tcttcttttgtaagcaataaaatagcaacctttaccaacgatattttgaatgtctaatataaaaacacccgcagtgctgggaacactccgggtgtggtgcaaagatatatcataccagatacaacataccgtctgcatttattatattaccacctgcggacgggaaattaaaggaaattgacaagaaatgtggtgatattgtgtataaaaaagaacttgccccggatttagtccgggttgctttatatatccgtgtttct

SEQ ID NO: 21311 - DNA, 260 bp, Unknown
  Description of Unknown: LeftRegion for integrase B8312 sequence
accaccaaataaaagcaactgattttcatttaaaacaaaaccgcccctgcgctaccaacacagagacggcctatacatccgaggatgcatacatattttacatgcaaaaatattgtatcatcttcgggcagccatggcaagtggaatctctatattcctctggctgttatttttatacccatttttaaggagatgattatatgagaaagcaaaataattctgaagctccggtaagggcagctctttatgtccgtgtttcc

SEQ ID NO: 21312 - DNA, 260 bp, Unknown
  Description of Unknown: LeftRegion for integrase B8313 sequence
aaaagaaactatgtcgtcaagacagatgggatgtcaaaaaaggcatcgcggcaaagacttataagatcgacaaacaggttgctgagaattttaagcaggcgtgtaagcaagtaggtgtgggaatgggaccacagctcacggcgatgatgcaagaatttattcggacagtgtcagagtctgacacgaaggaggaataatgcatggagaaaaaaatcagatgtgctatatatgacagggtatcgcacgagcttcaggttgaa

SEQ ID NO: 21313 - DNA, 260 bp, Unknown; identical to SEQ ID NO: 21268
  Description of Unknown: LeftRegion for integrase B8314 sequence

SEQ ID NO: 21314 - DNA, 260 bp, Unknown
  Description of Unknown: LeftRegion for integrase B8315 sequence
tgggcgcttttcaattataaaggtctggcaggcttgcaactactgttaaaaattggcaataaaaacacccgcagtgctgggaacactccgggtgcggtgcaaagatatatcataccagatacaacataccgtctgcacttattatattatcacggcatgacgggaaattaaaggaaattgacaagaattgtggtgatattatgagaaacaaggaaattgccccggcacttgtccgggttgctctatatataagggtttcc

SEQ ID NO: 21315 - DNA, 260 bp, Unknown; identical to SEQ ID NO: 21303
  Description of Unknown: LeftRegion for integrase B8316 sequence

SEQ ID NO: 21316 - DNA, 260 bp, Unknown
  Description of Unknown: LeftRegion for integrase B8317 sequence
gggcgcttttcaattataaaggtctggcaggtttgcaactactgttaaaaattggcaaataaaaacacccgcagtgctgggaacactccgggtgcggtgcaaagatatatcataccagatacaacataccgtctgcacttattatattatcacggcatgacgggaaattaaaggaaattgacaagaattgtggtgatattatgagaaacaaggaaattgccccggcgcttgtccgggttgctttatatataagggtttcc

SEQ ID NO: 21317 - DNA, 260 bp, Unknown; identical to SEQ ID NO: 21268
  Description of Unknown: LeftRegion for integrase B8318 sequence

SEQ ID NO: 21318 - DNA, 260 bp, Unknown
  Description of Unknown: LeftRegion for integrase B8319 sequence
tgggcgcttttcaattataaaggtctggcaggcttgcaactactgttaaaaattggcagtaaaaacacccgcagtgctgggaacactccgggtgcggtgcaaagatatatcataccagatacaacataccgtctgcatttattatattatcacggcatgacgggaaattaaaggaaattgacaagaattgtggtgatattatgagaaacaaggaaattgccccggcgcttgtccgggttgctctatatataagggtttcc

SEQ ID NO: 21319 - DNA, 260 bp, Unknown
  Description of Unknown: LeftRegion for integrase B8320 sequence
tgggcgcttttcaattataaaggtctggcaggtttgcaactactgttaaaaattggcaataaaaacacccgcagtgctgggaacactccgggtgcggtgcaaagatatatcataccagatacaacataccgtctgcatttattatattaccacctgcggacgggaaattaaaggaaattgacaagaattgtggtgatattatgagaaacaaggaaattgccccggcgcttgtccgggttgctctatatataagggtttcc

SEQ ID NO: 21320 - DNA, 260 bp, Unknown
  Description of Unknown: LeftRegion for integrase B8321 sequence
tcattgataaatcagaaaataagagcctttacagacgacattctgaaaggttaataaaataaaatgccccggttgtgctgggaacacttccggggtgtgcaaagatatatcataccagatacaacataccgtctgcacttattatattatcacggcatgacgggaaataaaaggaaattgacaagaattgtggtgatattatgagaaacaaggaaattgccccggcgcttgtccgggttgctctatatataagggtttcc

SEQ ID NO: 21321 - DNA, 260 bp, Unknown
  Description of Unknown: LeftRegion for integrase B8322 sequence
tgggcgcttttcaattataaaggtctggcaggcttgcaactactgttaaaaattggcaataaaaacacccgcagtgctgggaacactccgggtgcggtgcaaagatatatcataccagatacaacataccgtctgcatttattatattatcacggcatgacgggaaataaaaggaaattgacaagaattgtggtgatattatgagaaacaaggaaattgccccggcgcttgtccgggttgctctatatataagggtttcc

SEQ ID NO: 21322 - DNA, 260 bp, Unknown; identical to SEQ ID NO: 21261
  Description of Unknown: LeftRegion for integrase B8323 sequence

SEQ ID NO: 21323 - DNA, 260 bp, Unknown
  Description of Unknown: LeftRegion for integrase B8324 sequence
tcttcttttgtaagtaataaaataacagcctttaccaatgacattttgaatggctaatataaaaacacccgcagtgctgggaacactccgggtgcggtgcaaagatatatcataccagatacaacataccgtctgcatttattatattaccacctgcggacgggaaataaaaggaaattgacaagaattgtggtgatattatgagaaacaaggaaattgccccggcgcttgtccgggttgctctatatataagggtttcc

SEQ ID NO: 21324 - DNA, 260 bp, Unknown; identical to SEQ ID NO: 21261
  Description of Unknown: LeftRegion for integrase B8325 sequence

SEQ ID NO: 21325 - DNA, 260 bp, Unknown
  Description of Unknown: LeftRegion for integrase B8326 sequence
tgggcgcttttcaattataaaggtctggcaggttcacaactactgttaaaaatcggcaataaaaacacccgcagtgctgggaacactccgggtgcggtgcaaagatatatcataccagatacaacataccgtctgcatttattatattatcacggcatgacgggaaataaaaggaaattgacaagaattgtggtgatattatgagaaacaaggaaattgccccggcgcttgtccgggttgctctatatataagggtttcc

SEQ ID NO: 21326 - DNA, 260 bp, Unknown
  Description of Unknown: LeftRegion for integrase B8327 sequence
tgggcgcttttcaattataaaggtctggcaggttcacaactactgttaaaaattggcaataaaaacacccgcagtgctgggaacactccgggtgcggtgcaaagatatatcataccagatacaacataccgtctgcacttattatattatcacggcatgacgggaaattaaaggaaattgacaagaattgtggtgatattatgagaaacaaggaaattgccccggcacttgtccgggttgctctatatataagggtttcc

SEQ ID NO: 21327 - DNA, 260 bp, Unknown; identical to SEQ ID NO: 21285
  Description of Unknown: LeftRegion for integrase B8328 sequence

SEQ ID NO: 21328 - DNA, 260 bp, Unknown
  Description of Unknown: LeftRegion for integrase B8329 sequence
tgggcgcttttcaattataaaggtctggcaggcttgcaactactgttaaaaatcggcaataaaaacacccgcagtgctgggaacactccgggtgcggtgcaaagatatatcataccagatgcaacataccgtctgcatttattatattatcacggcatgacgggaaataaaaggaaattgacaagaattgtggtgatattatgagaaacaaggaaattgccccggcgcttgtccgggttgctctatatataagggtttcc

SEQ ID NO: 21329 - DNA, 260 bp, Unknown
  Description of Unknown: LeftRegion for integrase B8330 sequence
aatgtcaacaattctatatatattttatgcaaaaaaaaataaaaatatacaaaaaagaattagaaagtgtttgagttttcgcacagcacaaccacttatctaattccgacaaaccactattgaaagtgattatattattattatacacaataatacctacattttcaatagtgaaaattgaaaattggaggtattttattatgaaaaatgcagcttgttattgtagagtaagtacagatgagcaagtaaaatttgggttt

SEQ ID NO: 21330 - DNA, 260 bp, Unknown
  Description of Unknown: LeftRegion for integrase B8331 sequence
tcttcttttgtaagcaataaaatagcaacctttaccaacgatattttgaatgtctaatataaaaacacccgcagtgctgggaacactccgggtgcggtgcaaagatatatcataccagatacaacataccgtctgcatttattatattaccacctgctgacgggaaattaaaggaaattgacaagaaatgtggtgatattgtgtataaaaaagaacttgccccggatttagtccgggttgctttatatatccgtgtttct

SEQ ID NO: 21331 - DNA, 260 bp, Unknown
  Description of Unknown: LeftRegion for integrase B8332 sequence
aaaattattggtaaagttgttgaagccagaaaaagaaatcaatttaaataaaaaagagaaaatgctactgtttggcgacacggcattttctcaaaccataaaaattccttgaaacaaggtctctttatgttattattatagcatattttaaaaccttttttcaagcaatttaataaaattttagaaagaaggtttttattatgaaatatgtagcttgttattgccgtgtaagcacagatgaacaggcaaaatttggtttt

SEQ ID NO: 21332 - DNA, 260 bp, Unknown; identical to SEQ ID NO: 21268
  Description of Unknown: LeftRegion for integrase B8333 sequence

SEQ ID NO: 21333 - DNA, 260 bp, Unknown
  Description of Unknown: LeftRegion for integrase B8334 sequence
tgggcgcttttcaattataaaggtctggcaggttcacaactactggtaaaaaatggcaataaaaacacccgcagtgctgggaacactccgggtgcggtgcaaagatatatcataccagatacaacataccgtctgcacttattatattatcacggcatgacgggaaataaaaggaaattgacaagaattgtggtgatattatgagaaacaaggaaattgccccggcgcttgtccgggttgctctatatataagggtttcc

SEQ ID NO: 21334 - DNA, 260 bp, Unknown
  Description of Unknown: LeftRegion for integrase B8335 sequence
tattctgctttcgtaagtaagaaataatagcctttactaacggcattttgaatagttaataaaaacacccgcagtgctgggaacactccgggtgcggtgcaaagatatatcataccagatacaacataccgtctgcatttattatattatcacggcatgacgggaaacaaaaggaaattgacaagaattgtggtgatattatgagaaacaaggaaattgccccggcgcttgtccgggttgccttatatataagggtttcc

SEQ ID NO: 21335 - DNA, 260 bp, Unknown; identical to SEQ ID NO: 21261
  Description of Unknown: LeftRegion for integrase B8336 sequence

SEQ ID NO: 21336 - DNA, 260 bp, Unknown; identical to SEQ ID NO: 21285
  Description of Unknown: LeftRegion for integrase B8337 sequence

SEQ ID NO: 21337 - DNA, 260 bp, Unknown
  Description of Unknown: LeftRegion for integrase B8338 sequence
tgggcgcttttcaattataaaggtctggcaggttcacaactactgttaaaaattggcaataaaaacacccgcagtgctgggaacactccgggtgcggtgcaaagatatatcataccagatacaacataccgtctgcatttattatattatcacggcatgacgggaaataaaaggaaattgacaagaattgtggtgatattatgagaaacaaggaaattgccccggcgcttgtccgggttgctctatatataagggtttcc

SEQ ID NO: 21338 - DNA, 260 bp, Unknown; identical to SEQ ID NO: 21266
  Description of Unknown: LeftRegion for integrase B8339 sequence

SEQ ID NO: 21339 - DNA, 260 bp, Unknown
  Description of Unknown: LeftRegion for integrase B8340 sequence
tgggcgcttttcaattataaaggtcttgcaggttcacaactactgttaaaaattggcaataaaaacacccgcagtgctgggaacactccgggtgcggtgcaaagatatatcataccagatacaacataccgtctgcacttattatattatcacggcatgacgggaaattaaaggaaattgacaagaattgtggtgatattatgagaaacaaggaaattgccccggcgcttgtccgggttgctctatatataagggtttcc

SEQ ID NO: 21340 - DNA, 260 bp, Unknown; identical to SEQ ID NO: 21261
  Description of Unknown: LeftRegion for integrase B8341 sequence

SEQ ID NO: 21341 - DNA, 260 bp, Unknown
  Description of Unknown: LeftRegion for integrase B8342 sequence
tgggcgcttttcaattataaaggtctggcaggttcacaactactgttaaaaattggcaataaaaacacccgcagtgctgggaacactccgggtgcggtgcaaagatatatcataccagatacaacataccgtctgcacttattatattatcacggcatgacgggaaattaaaggaaattgacaagaattgtggtgatattatgagaaacaatgaaattgtcccggcgcttgtccgggttgctctatatataagggtttcc

SEQ ID NO: 21342 - DNA, 260 bp, Unknown
  Description of Unknown: LeftRegion for integrase B8343 sequence
tcttcttttgtaagcaataaaatagcaacctttaccaacgatattttgaatgtctaatataaaaacacccgcagtgctgggaacactccgggtgcggtgcaaagatatatcataccagatacaacataccgtctgcacttattatattatcacggcatgacgggaaataaaaggaaattgacaagaattgtggtgatattatgagaaacaaggaaattgccccggcgcttgtccgggttgccttatatataagggtttcc

SEQ ID NO: 21343 - DNA, 260 bp, Unknown; identical to SEQ ID NO: 21261
  Description of Unknown: LeftRegion for integrase B8344 sequence

SEQ ID NO: 21344 - DNA, 260 bp, Unknown
  Description of Unknown: LeftRegion for integrase B8345 sequence
tgggcgcttttcaattataaaggtctggcaggttcacaactactggtaaaaaatggcaataaaaacacccgcagtgctgggaacactccgggtgcggtgcaaagatatatcataccagatacaacataccgtctgcactcattatattatcacggcatgacgggaaattaaaggaaattgacaagaattgtggtgatattatgagaaacaaggaaattgccccggcgcttgtccgggttgctctatatataagggtttcc

SEQ ID NO: 21345 - DNA, 260 bp, Unknown
  Description of Unknown: LeftRegion for integrase B8346 sequence
gcacttgatgttattacacataataaataaaataaaaaaaccgcccctgtgctaccaacactgagacggcctatacatccggagatgcatacatattttacgtacaagaatattgtatcatcttcgggcagccatggcaagtggaatctctatattcctctggctgttatttttatacccatttttaaggagatgatcatatgagaaaccaaaacacttccgaagttccaatacgggcagctctttatgtccgtgtttcc

SEQ ID NO: 21346 - DNA, 260 bp, Unknown; identical to SEQ ID NO: 21261
  Description of Unknown: LeftRegion for integrase B8347 sequence

SEQ ID NO: 21347 - DNA, 260 bp, Unknown; identical to SEQ ID NO: 21261
  Description of Unknown: LeftRegion for integrase B8348 sequence

SEQ ID NO: 21348 - DNA, 260 bp, Unknown
  Description of Unknown: LeftRegion for integrase B8349 sequence
ctgggcgcttttcaattataaaggtctggcaggcttgcaactactgttaaaattggcaataaaaacacccgcagtgctgggaacactccgggtgcggtgcaaagatatatcataccagatacaacataccgtctgcacttattatattatcatggcatgacgggaaataaaaggaaattgacaagaattgtggtgatattatgagaaacaaggaaattgccccggcgcttgtccgggttgctctatatataagggtttcc

SEQ ID NO: 21349 - DNA, 260 bp, Unknown
  Description of Unknown: LeftRegion for integrase B8350 sequence
tcttcttttgtaagtaataaaataacagcctttaccaatgacattttgaatggctaatataaaaacacccgcagtgctggtaacactccgggtgcggtgcaaagatatatcataccagatacaacataccgtctgcacttattatattatcacggcatgacgggaaattaaaggaaattgacaagaattgtggtgatattatgagaaacaaggaaattgccccggcgcttgtccgggttgctctatatataagggtttcc

SEQ ID NO: 21350 - DNA, 260 bp, Unknown; identical to SEQ ID NO: 21337
  Description of Unknown: LeftRegion for integrase B8351 sequence

SEQ ID NO: 21351 - DNA, 260 bp, Unknown
  Description of Unknown: LeftRegion for integrase B8352 sequence
gggcgcttttcaattataaaggtctggcaggtttgcaactactgttaaaaattggcaaataaaaacacccgcagtgctgggaacactccgggtgcggtgcaaagatatatcataccagatacaacataccgtctgcacttattatattatcacggcatgacgggaaattaaaggaaattgacaagaattgtggtgatattatgagaagcaaggaaattgccccggcgcttgtccgggttgctctatatataagggtttcc

SEQ ID NO: 21352 - DNA, 260 bp, Unknown
  Description of Unknown: LeftRegion for integrase B8353 sequence
gggcgcttttcaattataaaggtctggcaggtttgcaactactgttaaaaattggcaaataaaaacacccgcagtgctgggaacactccgggtgcggtgcaaagatatatcataccagatacaacataccgtctgcacttattatattatcacggcatgacgggaaattaaaggaaattgacaagaattgtggtgatattatgagaaacaaggaaattgccccggcgcttgtccgggttgctctatatataagggtttcc

SEQ ID NO: 21353 - DNA, 260 bp, Unknown
  Description of Unknown: LeftRegion for integrase B8354 sequence
tattctgctttcgtaagtaagaaataatagcctttactaatggcattttgaatagttaataaaaacacccgcagtgctgggaacactccgggtgcggtgcaaagatatatcataccagatacaacataccgtctgcatttattatattatcacggcatgacgggaaataaaaggaaattgacaagaattgtggtgatattatgagaaacaaggaaattgccccggcgcttgtccgggttgccttatatataagggtttcc

SEQ ID NO: 21354 - DNA, 260 bp, Unknown; identical to SEQ ID NO: 21261
  Description of Unknown: LeftRegion for integrase B8355 sequence

SEQ ID NO: 21355 - DNA, 260 bp, Unknown; identical to SEQ ID NO: 21261
  Description of Unknown: LeftRegion for integrase B8356 sequence

SEQ ID NO: 21356 - DNA, 260 bp, Unknown; identical to SEQ ID NO: 21352
  Description of Unknown: LeftRegion for integrase B8357 sequence

SEQ ID NO: 21357 - DNA, 260 bp, Unknown
  Description of Unknown: LeftRegion for integrase B8358 sequence
tgggcgcttttcaattataaaggtctggcaggttcacaactactgttaaaaattggcaataaaaacacccgcagtgctgggaacactccgggtgcggtgcaaagatatatcataccagatacaacataccgtctgcacttattatattatcacggcatgacgggaaattaaaggaaattgacaagaattgtggtgatattatgagaaataaggaaattgccccggcgcttgtccgggttgctctatatataagggtttcc

SEQ ID NO: 21358 - DNA, 260 bp, Unknown; identical to SEQ ID NO: 21261
  Description of Unknown: LeftRegion for integrase B8359 sequence

SEQ ID NO: 21359 - DNA, 260 bp, Unknown
  Description of Unknown: LeftRegion for integrase B8360 sequence
tgggcgcttttcaattataaaggtctggcaggtttgcaactactgttaaaaattggcaataaaaacacccgcagtgctgggaacactccgggtgcggtgcaaagatatatcataccagatacaacataccgtctgcatttattatattaccacctgcggacgggaaattaaaggaaattgacaagaattgtggtgatattatgagaaacaaggaaattgccccggcgcttgtccgggttgctttatatataagggtttcc

SEQ ID NO: 21360 - DNA, 260 bp, Unknown; identical to SEQ ID NO: 21316
  Description of Unknown: LeftRegion for integrase B8361 sequence

SEQ ID NO: 21361 - DNA, 260 bp, Unknown; identical to SEQ ID NO: 21268
  Description of Unknown: LeftRegion for integrase B8362 sequence

SEQ ID NO: 21362 - DNA, 260 bp, Unknown; identical to SEQ ID NO: 21337
  Description of Unknown: LeftRegion for integrase B8363 sequence

SEQ ID NO: 21363 - DNA, 260 bp, Unknown
  Description of Unknown: LeftRegion for integrase B8364 sequence
agaaagctgaaaaacttattcttgaaggtcaagatcttttaattatgaatgagagtttgtttttagacactataaactctcaaaattaattgaaaaataaataaaaaaaatagaggacgtgacgagcacatcccctaataaagtggtataaacacttttcccttacaggtgtattataccacaaaatggaggtataaaacatgaaaagagcagtcgcttatggcagatactcgacagatatgcaaagagaagaaagcatt

SEQ ID NO: 21364 - DNA, 260 bp, Unknown; identical to SEQ ID NO: 21323
  Description of Unknown: LeftRegion for integrase B8365 sequence

SEQ ID NO: 21365 - DNA, 260 bp, Unknown; identical to SEQ ID NO: 21292
  Description of Unknown: LeftRegion for integrase B8366 sequence

SEQ ID NO: 21366 - DNA, 260 bp, Unknown; identical to SEQ ID NO: 21269
  Description of Unknown: LeftRegion for integrase B8367 sequence

SEQ ID NO: 21367 - DNA, 260 bp, Unknown
  Description of Unknown: LeftRegion for integrase B8368 sequence
cacttgatgttattacacataataaataaaataaaaaaaaccgcccctgtgctaccaacactgagacggcctatacatccggagatgcatacatattttacgtacaagaatattgtatcatcttcgggcagccatggcaagtggaatctctatattcctctggctgttatttttatacccatttttaaggagatgatcatatgagaaaccaaaacacttccgaagttccaatacgggcagctctttatgtccgtgtttcc

SEQ ID NO: 21368 - DNA, 260 bp, Unknown
  Description of Unknown: LeftRegion for integrase B8369 sequence
tgggcgcttttcaattataaaggtctggcaggttcacaactactgttaaaaattggcaataaaaacacccgcagtgctgggaacactccgggtgtggtgcaaagatatatcataccagatacaacataccgtctgcacttattatattatcacggcatgacgggaaataaaaggaaattaacaagaattgtggtgatattatgagaaacagggaaattgccccggcgcttgtccgggttgctctatatataagggtttcc

SEQ ID NO: 21369 - DNA, 260 bp, Unknown
  Description of Unknown: LeftRegion for integrase B8370 sequence
gggcgcttttcaattataaaggtctggcaggttcacaactactgttaaaaattggcaaataaaaacacccgcagtgctgggaacactccgggtgcggtgcaaagatatatcataccagatacaacataccgtctgcacttattatattatcacggcatgacgggaaattaaaggaaattgacaagaattgtggtgatattatgagaaacaaggaaattgccccggcgcttgtccgggttgctttatatataagggtttcc

SEQ ID NO: 21370 - DNA, 260 bp, Unknown; identical to SEQ ID NO: 21261
  Description of Unknown: LeftRegion for integrase B8371 sequence

SEQ ID NO: 21371 - DNA, 260 bp, Unknown; identical to SEQ ID NO: 21316
  Description of Unknown: LeftRegion for integrase B8372 sequence

SEQ ID NO: 21372 - DNA, 260 bp, Unknown
  Description of Unknown: LeftRegion for integrase B8373 sequence
tgggcgcttttcaattataaaggtctggcaggttcacaactactgttaaaaattggcaataaaaacacccgcagtgctgggaacactccgggtgcggtgcaaagatatatcataccagatacaacataccgtctgcatttattatattatcacggcatgacgggaaattaaaggaaattgacaagaattgtggtgatattatgagaaacaaggaaattgccccggcgcttgtccgggttgctctatatataagggtttcc

SEQ ID NO: 21373 - DNA, 260 bp, Unknown
  Description of Unknown: LeftRegion for integrase B8374 sequence
tcttcttttgtaagtaataaaataacagcttttaccaatgacattttgaatggctaatataaaaacacccgcagtgctgggaacactccgggtgcggtgcaaagatatatcataccagatacaacataccgtctgcatttattatattaccacctgcggacgggaaataaaaggaaattgacaagaattgtggtgatattatgagaaacaaggaaattgccccggcgcttgtccgggttgctctatatataagggtttcc

SEQ ID NO: 21374 - DNA, 260 bp, Unknown; identical to SEQ ID NO: 21261
  Description of Unknown: LeftRegion for integrase B8375 sequence

SEQ ID NO: 21375 - DNA, 260 bp, Unknown; identical to SEQ ID NO: 21261
  Description of Unknown: LeftRegion for integrase B8376 sequence

SEQ ID NO: 21376 - DNA, 260 bp, Unknown
  Description of Unknown: LeftRegion for integrase B8377 sequence
gttgagccagacgtggaaagcagcactgagaactaattgtttttataaaaaagaaaaagcccgctttcgcggactccttctcccaccacctatgcggcggctttgtataactttgattagcgttaatgattataccacaaaaagccgcatttgcataggcttttctttttatactcttttttaattttgaggtgtaatctatggataaaaataaaaaaattactgtaccaggattgctgcggactgctatctatatccgc

SEQ ID NO: 21377 - DNA, 260 bp, Unknown; identical to SEQ ID NO: 21320
  Description of Unknown: LeftRegion for integrase B8378 sequence

SEQ ID NO: 21378 - DNA, 260 bp, Unknown; identical to SEQ ID NO: 21268
  Description of Unknown: LeftRegion for integrase B8379 sequence

SEQ ID NO: 21379 - DNA, 260 bp, Unknown; identical to SEQ ID NO: 21337
  Description of Unknown: LeftRegion for integrase B8380 sequence

SEQ ID NO: 21380 - DNA, 260 bp, Unknown
  Description of Unknown: LeftRegion for integrase B8381 sequence
tcttcttttgtaagtaataaaataacagcctttaccaatgacattttgaatggctaatataaaaacacccgcagtgccgggaacactccgggtgcggtgcaaagatatatcataccagatacaacataccgtctgcacttattatattatcacggcatgacgggaaataaaaggaaattgacaagaattgtggtgatattatgagaaacaaggaaattgccccggcgcttgtccgggttgctctatatataagggtttcc

SEQ ID NO: 21381 - DNA, 260 bp, Unknown; identical to SEQ ID NO: 21261
  Description of Unknown: LeftRegion for integrase B8382 sequence

SEQ ID NO: 21382 - DNA, 260 bp, Unknown
  Description of Unknown: LeftRegion for integrase B8383 sequence
tgggcgcttttcaattataaaggtctggcaggttcacaactactgttaaaaattggcaataaaaacacccgcagtgctgggaacactccgggtgcggtgcaaagatatatcataccagatacaacataccgtctgcatttattatattatcacggcatgacgggaaataaaaggaaattgacaagaattgtggtgatattatgagaaacaaggaaattgccccggcgcttgtccgggttgccttatatataagggtttcc

SEQ ID NO: 21383 - DNA, 260 bp, Unknown; identical to SEQ ID NO: 21321
  Description of Unknown: LeftRegion for integrase B8384 sequence

SEQ ID NO: 21384 - DNA, 260 bp, Unknown; identical to SEQ ID NO: 21268
  Description of Unknown: LeftRegion for integrase B8385 sequence

SEQ ID NO: 21385 - DNA, 260 bp, Unknown
  Description of Unknown: LeftRegion for integrase B8386 sequence
aaattgaggtggaaagaaatggtaaagattactattgacggtaaagatgttaagccggcggatgttgttcttcccgaacagattttgaaaatcatcgcggaagcagtcggcggttgacaaaaccgtaacttaagtgtagaatgtgccgtaaatgcgataaatgcggcacattctttatttcagaaaggagattataaactatggaatgtgttgcttatataagagtttcgacagaaagacaagcggaggaaggttacgga

SEQ ID NO: 21386 - DNA, 260 bp, Unknown
  Description of Unknown: LeftRegion for integrase B8387 sequence
taagaatgaagatgaagaatcaaatgataaaattgaattacttattaataaaattgatcaattagaaagtacgattgaacaactaaaagaggaaataaaaaaataacgcaccccccgaccaagaagttgtgcgttaaaaatagaaccaaaataggcttattttgttacgcctattttaccaaaaataatgaggtgaaacaatggcaaatgaaataaaacaagtagcgttatacatacgtgtgtctacagatcaacaagct

SEQ ID NO: 21387 - DNA, 260 bp, Unknown
  Description of Unknown: LeftRegion for integrase B8388 sequence
ctgatttcccgaaacttaaagaacttctaaaaaagaataaaacagaaattgactataaaaaatctgaaattcttgcttgattaactcttttcgaccaaaattcacaaatgttttttggttgaaaaacaaatttgaaatatggtataatgtagtaaagtttctttgctacattatctttttttaaagagaaggggataacaatgacaaaagataatagaaaaacagctttatatattcgtgtttctacagattttcaagct

SEQ ID NO: 21388 - DNA, 260 bp, Unknown
  Description of Unknown: LeftRegion for integrase B8389 sequence
ataaaattgaggtagaaagaaatggtaaagattactattgacggtaaagatgtcaagccggcggatgttgttcttcccgaacagattttgaaaatcatcgcggaagctgtcggcggttgacaaaaccgtaacttaagtgtagaatgtgccgtaaatgcgataaatgcggcacattctttttagaaaggagattataaactatggaatgtgttgcttatataagagtttctacagaaagacaagcggaggaaggctacggg

SEQ ID NO: 21389 - DNA, 260 bp, Unknown
  Description of Unknown: LeftRegion for integrase B8390 sequence
taagaatgaagaagatgaatcaaatgataaaattgaattacttattaataaaattgatcaattagaaagtacgattgaacaactaaaagaggaaataaaaaaataacgcaccctccgaccaagaagttgtgcgttaaaaatagaaccaaaataggcttattttgttacgcctattttaccaaaaataatgaggtgaaacaatggcaaatgaaataaaacaagtagcgttatacatacgtgtgtctacagatcaacaagct

SEQ ID NO: 21390 - DNA, 260 bp, Unknown
  Description of Unknown: LeftRegion for integrase B8391 sequence
ctgatttcccaaaacttaaagagcttctaaaaaagaataaaacagaaattgactataaaaaatctgaaattcttgcttgattaactcttttcgaccaaaattcacaaatgttttttggttgaaaaacaaatttgaaatatggtataatgtagtaaagtttctttgctacattttctttttttaaagagaaggggataacaatgacaaaagataatagaaaaacagctttatatattcgtgtttctacagattttcaagct

SEQ ID NO: 21391 - DNA, 260 bp, Unknown
  Description of Unknown: LeftRegion for integrase B8392 sequence
gaaaattaagaagttggaggcgttttgatggttaaagtaacaatgggaggtcaggagatcaacatagaagacgttcaactttcagacgaagttctggaaatgattgctgagtgttgtaattgaccaaaatattaaatgatgatagaatgtgccgtatgtatgataaacacggcacattcttctataaagggggtaattgagtgaaagaatgtgttgcgtatataagagtttctacggaaaagcaagccgaagaaggacac

SEQ ID NO: 21392 - DNA, 260 bp, Unknown
  Description of Unknown: LeftRegion for integrase B8393 sequence
atgctcaaacaaaagcaacagcaaaatatcaacagaaagtcggacttgtctctaagtcttataagctgagaaaggaaatcgtagatgcttatgctgccgcctgtaaaaaggcgggtgtaagctgtgcaggccagctcacaataatgatgcaagaatttatccggacagtgtcagactctgacacaaaggagggataatgcatggagaaaaaaatcagatgtgctatatatgacagggtatcgcacgagctgcaggtcgaa

SEQ ID NO: 21393 - DNA, 260 bp, Unknown
  Description of Unknown: LeftRegion for integrase B8394 sequence
ggacttgaacattttgttaacatcaacaaaatgatagaaaaagccccagtgctaccaacaccggggcaatcccagaaaactatgcagaccggatggccagtataatcttctcacgcaaaagaaattataccacaaacctccggcatctgcataggtgtattttttatacctttttttaatagaatgaactggaggttaccatgacaaaaacttcgaaaagaatccgctgcgctatttatgaccgggtaagtacagacatg

SEQ ID NO: 21394 - DNA, 260 bp, Unknown; identical to SEQ ID NO: 21388
  Description of Unknown: LeftRegion for integrase B8395 sequence

SEQ ID NO: 21395 - DNA, 260 bp, Unknown
  Description of Unknown: LeftRegion for integrase B8396 sequence
ctgatttcccaaaacttaaagagcttctaaaaaagaataaaacagaaattggctataaaaaatctgaaattcttgcttgattaactcttttcgaccaaaattcacaaatgttttttggttgaaaaataaatttgaaatatggtataatgtagtaaagtttctttgctacattttctttttttaaagagaaggagacaacaatgacaaaagataataggaaaacagctttatatattcgtgtttctacagattttcaagcc

SEQ ID NO: 21396 - DNA, 260 bp, Unknown
  Description of Unknown: LeftRegion for integrase B8397 sequence
atttgacactaaactattaagtgaaggaaataaaaaggaaaatactagaaaaaattaaaataaaaaatagataatgtatccctcgccaaagttttacattatctattctcaaacactacttgtataagcagtttttattattatattacataataccttcttatacaagtaccgaatatttgtttaaggaggttttttatatgaaaactgttgcttgttattgtagagttagtacagaagaacaagtaaaatatggcttt

SEQ ID NO: 21397 - DNA, 260 bp, Unknown
  Description of Unknown: LeftRegion for integrase B8398 sequence
agcttgagggggataaaggagcaactgcggcggtgtgataagctcattccattcgctttgatacatagaaagaagatattggaggtgagactatcaaagcggtaatctatgctcgttattcgagccataaccaacgagaagaatccatcgagggtcagcttcgagagtgccatgagttcgctctcaagaatgacttcatcgtggttgacgaatatatcgaccgggcgatctccggcaagactgataatcgccccagcttc

SEQ ID NO: 21398 - DNA, 260 bp, Unknown
  Description of Unknown: LeftRegion for integrase B8399 sequence
aaaagacgaatcgaaatatactgttctttatttatatagcccattagataatacaaaaactatggaaataccattaaagagcgatcaataatctataaaaaaataacgcaccctccgaccaagaagttgtgcgttaaaaatagaaccaaaataggcttattttgttacgcctattttaccaaaaataatgaggtgaaacaatggcaaatgaaataaaacaagtagcgttatacatacgtgtgtctacagatcaacaagct

SEQ ID NO: 21399 - DNA, 260 bp, Unknown
  Description of Unknown: LeftRegion for integrase B8400 sequence
ctgatttcccaaaacttaaagagcttctaaaaaagaataaaacagaaattgactataaaaaatctgaaattcttgcttgattaactcttttcgaccaaaattcacaaatgttttttggttgaaaaataaatttgaaatatggtataatgtagtaaagcttctttgctacattttctttttttaaagagaaggagacaacaatgacaaaagataataggaaaacagctttatatattcgtgtttctacagattttcaagcc

SEQ ID NO: 21400 - DNA, 260 bp, Unknown
  Description of Unknown: LeftRegion for integrase B8401 sequence
aaattgaggtagaaagaaatggtaaagattactattgacggtaaagacgttaagccggcagatgttgttcttcccgaacagattttgaaaatcatcgcggaagctgtcggcggttgacaaaaccgtaacttaagtgtagaatgtgccgtaaatgcgataaatgcggcacattctttatttcagaaaggagattataaactatggaatgtgttgcttatataagagtttcaacagaaagacaagcggaggaaggctacgga

SEQ ID NO: 21401 - DNA, 260 bp, Unknown
  Description of Unknown: LeftRegion for integrase B8402 sequence
gggcttgaacattttgttaacatcaacaaaatgatagaaaaagccccagtgctaccaacaccggggcaatcccagaaaactacgcagaccggatggccagtataatcttctcacgcaaaagaaattataccacaaacctccggcatctgcataggtgtattttttatacccttttttaatagaatgaactggaggttaccatgacaaaaacttcgaaaagaatccgctgcgctatttatgaccgggtaagtacagacatg

SEQ ID NO: 21402 - DNA, 260 bp, Unknown
  Description of Unknown: LeftRegion for integrase B8403 sequence
ctaccaacaccgagacggtaacgcgccctctccgcacagcagagataggacgacttaactataacacctccggagatgctacagcatttcgaccaaaaatattgtatcatcttcggagcagccttgcaagagaacgaaagttcgctggctgttatttttatacccacttttacataatattcaagggaaggtgatgctgcatgaaaaaaatccgatgtgcaatctatgatagagtatccacagagatacaagccacttcc

SEQ ID NO: 21403 - DNA, 260 bp, Unknown; identical to SEQ ID NO: 21402
  Description of Unknown: LeftRegion for integrase B8404 sequence

SEQ ID NO: 21404 - DNA, 260 bp, Unknown; identical to SEQ ID NO: 21389
  Description of Unknown: LeftRegion for integrase B8405 sequence

SEQ ID NO: 21405 - DNA, 260 bp, Unknown
  Description of Unknown: LeftRegion for integrase B8406 sequence
attagaaaaagaaaagaaaaaaagattaaaacttaaggaaaataatagaaaaaaattaaaataaaaaatagataatgtatccctcgccaaagttttacattatctattctcaaacactacttgtataagcagtttttattattatattacataataccttcttatacaagtaccgaatatttgtttaaggaggtttttgtatgaaaactgtagcttgttattgtcgtgtcagtacagaagagcaagtaaaatatggcttt

SEQ ID NO: 21406 - DNA, 260 bp, Unknown
  Description of Unknown: LeftRegion for integrase B8407 sequence
taataaattgaatgaagcaagcaagtgtacttttactgttaaaatgtaaaaaaagagaattatgttcctatttggcgatacgacacataattctctatatcaaagaaccttgaaagaaggtctttatgttacatattataacataatataaagccttttttcaagaaaattattaaattttagaaagaaggtatttttttatgaaatatgtagcttgttattgccgtgtaagcactgacgaacaggtaaaatttggcttt

SEQ ID NO: 21407 - DNA, 260 bp, Unknown
  Description of Unknown: LeftRegion for integrase B8408 sequence
tgatttcccaaaacttaaagagcttctaaaaaagaataaaacagaaattgactataaaaaatctgaaattcttgcttgattaactcttttcgaccaaaattcacaaatgttttttggttgaaaaacaaatttgaaatatggtataatgtagtaaagtttctttgctacattttctttttttaaaagagaaggggataacaatgacaaaagataatagaaaaacagctttatatattcgtgtttctacagattttcaagct

SEQ ID NO: 21408 - DNA, 260 bp, Unknown
  Description of Unknown: LeftRegion for integrase B8409 sequence
tatggaacattattttataaataagactttaaacgattatataaataaaaatttaacaaacattataaaaaataactaactactccccgaccaaagttcgtagttagttagctcaaagcactcttgaaaagagctaatttaattatatatttatttttagcttctttcaagagaacataggtttgaaaggagttttttatatgaaaactgtagcttgttattgtagagtcagtacagaagagcaagtcaaatatggcttt

SEQ ID NO: 21409 - DNA, 260 bp, Unknown
  Description of Unknown: LeftRegion for integrase B8410 sequence
gctatgtaataagtgttttgaatcctgaaaatacagagaacactctgttaatggtaaaggatggaaatgtaacttataacttcgcagataaactataaaaaaataacgcaccctccgaccaagaagttgtgcgttaaaaatagaaccaaaataggcttattttgttacgcctattttaccaaaaataatgaggtgaaacaatggcaaatgaaataaaacaagtagcgttatacatacgtgtgtctacagatcaacaagct

SEQ ID NO: 21410 - DNA, 260 bp, Unknown
  Description of Unknown: LeftRegion for integrase B8411 sequence
atgccgtccgtcagaatggcgcaggtgaaccgctcggtaaatcgcaccgttactctccccgcgtggttaaatgcggcggcaatcgagcgcaatatcaatttttcgcaagtcttgcaggatgcgctaaaaaaacagataagatcataagagccgccctcgacctgacaggccgggggcggaattaacaagggggaaagcagatgcaggacgttgtgagggtggcactatacccgcgcgtatctacggaggagcaggtatta

SEQ ID NO: 21411 - DNA, 260 bp, Unknown
  Description of Unknown: LeftRegion for integrase B8412 sequence
ggacttgaacattttgttaacatcaacaaaatgatagaaaaagccccagtgctaccaacaccggggcaatcccagaaaactacgcagaccggatggccagtataatcttctcacgcaaaagaaattataccacaaacctccggcatctgcataggtgtattttttatacccttttttaatagaatgaactggaggttaccatgacaaaaacttcgaaaagaatccgctgcgctatttatgaccgggtaagtacagacatg

SEQ ID NO: 21412 - DNA, 260 bp, Unknown
  Description of Unknown: LeftRegion for integrase B8413 sequence
tttgacactaaactattaagtgaaggaaataaaaaggaaaataatagaaaaaaattaaaataaaaaatagataatgtatccctcgccaaagttttacattatctattctcaaacactacttgtataagcagtttttattattatattacataataccttcttatacaagtaccgaatatttgtttaaggaggttttttatatgaaaactgttgcttgttattgtagagttagtacagaagaacaagtaaaatatggcttt

SEQ ID NO: 21413 - DNA, 260 bp, Unknown
  Description of Unknown: LeftRegion for integrase B8414 sequence
aaattgaggtagaaaaaaatggtaaagattactattgacggtaaagatgtcaagccggcggatgttattcttcccgaacagattttgaaaatcatcgcggaagctgtcggcggttgacaaaaccgtaacttaagtgtagaatgtgccgtaaatgcgataaatgcggcacattctttatttcagaaaggagattataaattatggaatgtgttgcttatataagagtttctacagaaaggcaagcggaggaaggctacgga

SEQ ID NO: 21414 - DNA, 260 bp, Unknown
  Description of Unknown: LeftRegion for integrase B8415 sequence
taaatggctaacagtgtgacaagatcaaaggtttgcagcaggttagatatcttttttataagctcctttctatccatatgatgcacctccttaaaaaaaagatgtttccatgctaacacaaagaagaaagcgatataatactttttttaacacttttgatgtgactaatggtgtaaacgtgacacaaggaaggacagaaaatggcagaaaaggaagaacagaaaaggttagataaggaaggaaagaaaagggcggctata

SEQ ID NO: 21415 - DNA, 260 bp, Unknown
  Description of Unknown: LeftRegion for integrase B8416 sequence
cggaagcaccttttgttttacataaaaaataaccgccccagtgttgacgcaccgagacggtaagaaatctccgaagagatacctatatttgtcagatatattgtatcatcttcggagcagccttgcaagagaacgaaagttcgctggctgttatttttatacccatttttacataccatacaaaaggaaggtgatgctgcatgaaaaaaatccgatgtgcaatctatgatagagtgtccacagagatacaagccacttcc

SEQ ID NO: 21416 - DNA, 260 bp, Unknown; identical to SEQ ID NO: 21412
  Description of Unknown: LeftRegion for integrase B8417 sequence

SEQ ID NO: 21417 - DNA, 260 bp, Unknown; identical to SEQ ID NO: 21402
  Description of Unknown: LeftRegion for integrase B8418 sequence

SEQ ID NO: 21418 - DNA, 260 bp, Unknown
  Description of Unknown: LeftRegion for integrase B8419 sequence
ggacttgaacattttgttaacatcaacaaaatgatagaaaaagccccggtgctaccaacaccgaggcattctcagaaaactacgcagaccggatggtcagtataatcttctcacgcaaaagaaattataccacaaacctccggcatctgcataggtgtattttttatacccttttttaatagaatgaactggaggttaccatgacaaaaacttcgaaaagaatccgctgcgctatttatgaccgggtaagtacagacatg

SEQ ID NO: 21419 - DNA, 260 bp, Unknown
  Description of Unknown: LeftRegion for integrase B8420 sequence
ataaaattgaggtagaaagaaatggtaaagattactattgacggtaaagatgtcaagccggcagatgttgttcttcccgagcagattttgaaaatcatcgcggaagctgtcggcggttgacaaaaccgtaacttaagtgtagaatgtgccgtaaatgcgataaatgcggcacattctttttagaaaggagattataaactatggaatgtgttgcttatataagagtttcgacagaaagacaagcggaggaaggctacgga

SEQ ID NO: 21420 - DNA, 260 bp, Unknown
  Description of Unknown: LeftRegion for integrase B8421 sequence
ttgattacataattattaaaaataataatgaaattattttactcttaatatctaatcaatatttattaaaaaacgttactgttggcgcagtaacgaactgaaaaacaatataacattagtacaagcaattacataataattatatatgagtttttcgtatataattatatcataaggcattaaaaaatggaagtgatataatgaaacaaaaagacagaattaaaacagttgcgctctatattcgtgtttccacagatcgg

SEQ ID NO: 21421 - DNA, 260 bp, Unknown
  Description of Unknown: LeftRegion for integrase B8422 sequence
ataagattgaggtagaaagaaatggtaaagattactattgacggtaaagatgtcaagccggcggatgttgttcttcccgaacagattttgaaaatcatcgcggaagctgtcggcggttgacaaaaccgtaacttaagtgtagaatgtgccgtaaatgcgataaatgcggcacattctttttagaaaggagattataaactatggaatgtgttgcttatataagagtttctacagaaagacaagcggaggaaggctacggg

SEQ ID NO: 21422 - DNA, 260 bp, Unknown
  Description of Unknown: LeftRegion for integrase B8423 sequence
ctgatttcccaaaacttaaagagcttctaaaaaagaataaaacagaaattgactataaaaaatctgaaattcttgcttgattaactcttttcgaccaaaattcacaaatgttttttggttgaaaaataaatttgaaatatggtataatgtagtaaagtttctttgctacattttctttttttaaagagaaggagacaacaatgacaaaagataataggaaaacagctttatatattcgtgtttctacagattttcaagcc

SEQ ID NO: 21423 - DNA, 260 bp, Unknown
  Description of Unknown: LeftRegion for integrase B8424 sequence
taaaattttactattataaataagattcaattaaaaaataatcaataaaaaagagaactatgtctctatttggcgatacgacacataattctctatatcaaagaaccttgaatgaaggtatctttatgctacatattatagcataacataaagccttttttcaagaaaatttttaaattttagaaagaaggtaattttttatgaaatatgtagcttgttattgccgtgtaagcactgacgaacaggcaaggtttggcttt

SEQ ID NO: 21424 - DNA, 260 bp, Unknown
  Description of Unknown: LeftRegion for integrase B8425 sequence
tttatgctcggtattctgccggcccgagacagaccgaccagagtatcgaagggcagcttagagtctgtgccgacttttgtaagcagcgagggcttaccgttatcgacacatactgcgaccgtcatatctcaggccgcacagacgagtgaccggagttccaaaggctcatcgccgacgccaagcgcaagaagttcgaggcggtggtcgtctataagacagaccgctttgcccggaacaaatacgatagcgccgtttataag

SEQ ID NO: 21425 - DNA, 260 bp, Unknown
  Description of Unknown: LeftRegion for integrase B8426 sequence
gaaaattaagaagttggaggcgttttgatggttaaagtaacaatgggtggtcaggagatcaacatagaagacgttcaactttcggacgaagttctggaaatgattgctgagtgttgtaattgaccaaaatattaaatgatgatagaatgtgccgtatgtatgataaacacggcacattcttctataaagggggtaattgagtgaaagaatgtgttgcgtatataagagtttctacggaaaagcaagccgaagaaggacac

SEQ ID NO: 21426 - DNA, 260 bp, Unknown
  Description of Unknown: LeftRegion for integrase B8427 sequence
ttgattttgtgaaatgagaggtgagcatatggcaattgttacgattgatgggaaagaaattgacatcgaacaaattgaactgccagaagaaattattaaaatcataattgaatgcttaggttgaccgcaaaaatattgtagtgtaaaatgtgtcgtaacatgatatgtgcggcacatttctacacaaaggaggaatagtcatggaatgtgttgcgtatttgcgtgtatcaacagaaaaacaggccgaagagggaaatgga

SEQ ID NO: 21427 - DNA, 260 bp, Unknown
  Description of Unknown: LeftRegion for integrase B8428 sequence
acaagatatctcgtgttgaaggagatggtgataaatggttatagtaaccatcgagggtaaggagattgatgttgaaaatattgaattgccagatgaagtgttaaggatgattgcagaagcgattgacagtaaataaagaatgaactaaaatgtgtcgcaagtgtagtaatgcggcacatttttgataggaggtataaaaaatggaatgtgttgcatacatgcgtgtctcgacagaaaaacaggcagaagaaggaaacgga

SEQ ID NO: 21428 - DNA, 260 bp, Unknown
  Description of Unknown: LeftRegion for integrase B8429 sequence
ttttcctttcgttcattttagtttccccaaaattggcgtttttatatgatagaaatctgattatttatttataactaaaaagtgatttattaaaaaaagtttttaaaaaaattatattttatgagtaaatctaaaatttattgtttaaaatatttatatatgataacatttagtaaaaatttagcgaaggggtactcattatggaaacaataataaaaaaagctgcttgctactgtagagtttcacatgaagaacaaaag

SEQ ID NO: 21429 - DNA, 260 bp, Unknown; identical to SEQ ID NO: 21426
  Description of Unknown: LeftRegion for integrase B8430 sequence

SEQ ID NO: 21430 - DNA, 260 bp, Unknown
  Description of Unknown: LeftRegion for integrase B8431 sequence
ttgattttgtgaaatgagaggtgagcatatggcaattgttacgattgatggaaaagaaattgacatcgaacaaattgaactgccagaagaaattattaaaatcataattgaatgcttaggttgaccgcaaaaatattgtagtgtaaaatgtgtcgtaacatgatatgtgcggcacatttctacacaaaggaggaatagtcatggaatgtgttgcgtatttacgtgtgtcgacagaaaaacaggccgaagagggaaatgga

SEQ ID NO: 21431 - DNA, 260 bp, Unknown
  Description of Unknown: LeftRegion for integrase B8432 sequence
aagttagcagattggagtaaaaaatggcaaaaatgacgttaaacgggaaagaaatttccccagaagatgtgatcctgcccgaaaaagtattggagctcatagcgaattgcttagattgacacctcttgtagcaggatgtagaatgtgccgtgaacatgataaacacggcacattctttttagagaaaaggaggaacggcaatggaatgtgtcgcttacttaagggtttcaaccgaaaaacaggcggaagaaggttatgga

SEQ ID NO: 21432 - DNA, 260 bp, Unknown
  Description of Unknown: LeftRegion for integrase B8433 sequence
acaaaatatctcgtgttaaaggagatggtgataaatggttatagtgaccatcaatggcaaagaggttgatgtagaaagtttagaactgccagaggaagtattacagataattgcagaagtaattgacagtaaataaagaatggactaaaatgtgtcgcaagtgtagtaatgcggcacatttttgataggaggtatataaagtggaatgtgttgcatatatgcgtgtctcgacagagaaacaggcagaagaaggtaatgga

SEQ ID NO: 21433 - DNA, 260 bp, Unknown; identical to SEQ ID NO: 21426
  Description of Unknown: LeftRegion for integrase B8434 sequence

SEQ ID NO: 21434 - DNA, 260 bp, Unknown; identical to SEQ ID NO: 21430
  Description of Unknown: LeftRegion for integrase B8435 sequence

SEQ ID NO: 21435 - DNA, 260 bp, Unknown
  Description of Unknown: LeftRegion for integrase B8436 sequence
ttgattttgtgaaatgagaggtgagcatatggcaattgttacgattgatggaaaagaaattgacatcgaacaaattgaactgccagaagaaattattaaaatcataattgaatgcttaggttgaccgcaaaaatattgtagtgtaaaatgtgtcgtaacatgatatgtgcggcacatttctacacaaaggaggaatagtcatggaatgtgttgcgtatttgcgtgtatcaacagaaaaacaggccgaagagggaaatgga

SEQ ID NO: 21436 - DNA, 260 bp, Unknown
  Description of Unknown: LeftRegion for integrase B8437 sequence
ttgattttgtgaaataggggtgatcgcatggcaatcgtaacacttgacggtaaaccggttgacattgaaaaaatcgaactgccggaggaaattgtggagttaatcatgacgtgtctggattgaccaaatgaataatgtggtgtagaatgtgtcgtaacatgatatgtgcggcacattttctacacaaaggaggaaaacgcatggaatgtgttgcatatttgcgtgtatctacagagaaacaggcagaggaaggaaacgga

SEQ ID NO: 21437 - DNA, 260 bp, Unknown
  Description of Unknown: LeftRegion for integrase B8438 sequence
ttgattttgtgaaatagaggtgatcgcatggcaatcgtaacacttgacggtaaaccggttgatattgaaaaaatcgaactgccggaggaaattgtggagttaatcatgacgtgtctggattgaccaaatgaataatgtggtgtagaatgtgtcgtaacatgatatgtgcggcacattttctacacaaaggaggaaaacgcatggaatgtgttgcatatttgcgtgtatctacagagaaacaggcagaagaaggaaacgga

SEQ ID NO: 21438 - DNA, 260 bp, Unknown; identical to SEQ ID NO: 21426
  Description of Unknown: LeftRegion for integrase B8439 sequence

SEQ ID NO: 21439 - DNA, 260 bp, Unknown
  Description of Unknown: LeftRegion for integrase B8440 sequence
cagattggagtaaaatggcaaaaatgacaaaaatgacgttaaacgggaaagaaatttccccagaagatgtgatcctgcctgaaaaagtattggagcttatagcgaattgcttagattgacacctcttgtagcaggatgtagaatgtgccgtgaacatgataaacacggcacattctttttagagaaaaggaggaacggcaatggaatgtgtcgcttacttaagggtttcaaccgaaaaacaggcggaagaaggttatgga

SEQ ID NO: 21440 - DNA, 260 bp, Unknown
  Description of Unknown: LeftRegion for integrase B8441 sequence
agatatctcgtgttaaaggagatggtgataaatggttgttatagtaaccatcgatggcaaggagattgatgttgaaaatattgaattgccggatgaagtgttaaggatgattgcagaagcgattgacagtaaataaagaatagactaaaatgtgtcgcaagtgtagtaatgcggcacatttttgataggagggataaaaaatggaatgtgttgcatacatgcgtgtctcgacagaaaaacaggcagaagaaggtaatgga

SEQ ID NO: 21441 - DNA, 260 bp, Unknown
  Description of Unknown: LeftRegion for integrase B8442 sequence
ttgattttgtgaaataggggtgattgcatgacaatcgtaacacttgacggtaaaccggttgacattgaaaaaatcgaactgccggaggaaattgtggagttaatcatgacgtgtctggattgaccaaatgaataatgtggtgtagaatgtgtcgtaacatgatatgtgcggcacattttctacacaaaggaggaaaacgcatggaatgtgttgcatatttgcgtgtatctacagagaaacaggcagaggaaggaaacgga

SEQ ID NO: 21442 - DNA, 260 bp, Unknown; identical to SEQ ID NO: 21426
  Description of Unknown: LeftRegion for integrase B8443 sequence

SEQ ID NO: 21443 - DNA, 260 bp, Unknown; identical to SEQ ID NO: 21426
  Description of Unknown: LeftRegion for integrase B8444 sequence

SEQ ID NO: 21444 - DNA, 260 bp, Unknown
  Description of Unknown: LeftRegion for integrase B8445 sequence
attggcaaattggagggtttaaatggtaaagataactgttgatggtaaagaagtaaaagcagaagatataaaactttctgctgatgttgtgaaagtcatatcatcatgccttgattgacattatagcaaaaagaggttagaatgtgtcgtaaagtacgataaatgcggcacattctttttatataaagggggatttagtgatggaatgtgttgcgtatatgagagtatcaacagaaaaacaagcagaagagggcaatggt

SEQ ID NO: 21445 - DNA, 260 bp, Unknown
  Description of Unknown: LeftRegion for integrase B8446 sequence
aaaataaaaagattggagttgtaaaatggttagagttactctgaatggcgaagaagttaaaacggaagaattggaactttcacaaaagatcatagaatacatagtttctttgttggattgacagaaaaatataataatagtaaaatgccgtatatcgtgatgtatgcggcatttttactaaagaaaggagaaatgttttaatgaattgtgtcgcatatatgcgtgtttcaacggaaaaacaggcagaagaaggaaatgga

SEQ ID NO: 21446 - DNA, 260 bp, Unknown; identical to SEQ ID NO: 21426
  Description of Unknown: LeftRegion for integrase B8447 sequence

SEQ ID NO: 21447 - DNA, 260 bp, Unknown; identical to SEQ ID NO: 21426
  Description of Unknown: LeftRegion for integrase B8448 sequence

SEQ ID NO: 21448 - DNA, 260 bp, Unknown; identical to SEQ ID NO: 21435
  Description of Unknown: LeftRegion for integrase B8449 sequence

SEQ ID NO: 21449 - DNA, 260 bp, Unknown; identical to SEQ ID NO: 21430
  Description of Unknown: LeftRegion for integrase B8450 sequence

SEQ ID NO: 21450 - DNA, 260 bp, Unknown; identical to SEQ ID NO: 21426
  Description of Unknown: LeftRegion for integrase B8451 sequence

SEQ ID NO: 21451 - DNA, 260 bp, Unknown
  Description of Unknown: LeftRegion for integrase B8452 sequence
aaaataaaaagattggagttgtaaaatggtaaaagtcactctgaatggcgaagaagttaaaacggaagaattggaactttcgcaaaagatcatagaatatatagtttctttgttggattgacaggaaaatataataatagtaaaatgccgtatatcgtgatgtatgcggcatttttactaaagaaaggagaaatgttttaatgaattgtgtcgcatatatgcgtgtttcaacggaaaaacaggcagaagaaggaaatgga

SEQ ID NO: 21452 - DNA, 260 bp, Unknown
  Description of Unknown: LeftRegion for integrase B8453 sequence
ataaaatatgtcggaaaagctattgtgacgataaaattcgataacaagatagttatgaagaaaagattaaggtaaataaaaagcccccgtttccgagggcgggctgcaatgacgcaaccgtaattcgcacctacattgtatcattgcggcccggaaaaatcaagtctcgggcatttctatgcccaaaataggaggatacaatgagagacgaaaatttagaaggaaaaagagctgctctttatatcagagtaagcacggaa

SEQ ID NO: 21453 - DNA, 260 bp, Unknown; identical to SEQ ID NO: 21426
  Description of Unknown: LeftRegion for integrase B8454 sequence

SEQ ID NO: 21454 - DNA, 260 bp, Unknown
  Description of Unknown: LeftRegion for integrase B8455 sequence
cagattggagtaaaatggcaaaaatgacaaaaatgacgttaaacgggaaagaaatttccccagaagatgtgatcctgcccgaaaaagtattggagcttatagcgaattgcttagattgacaccgtttgtagcaggatgtagaatgtgccgtgaacatgataaacacggcacattctttttagagaaaaggaggaacggcaatggaatgtgtcgcttacttaagggtttcaaccgaaaaacaggcggaagaaggttatgga

SEQ ID NO: 21455 - DNA, 260 bp, Unknown
  Description of Unknown: LeftRegion for integrase B8456 sequence
ttgattttgtgaaatagaggtgattgcatgacaattgtaacacttgacggtaaaccggttgacattgaaaaaatcgaactgccggaggaaattgtggagttaatcatgatgtgtctggattgaccaaatgaataatgtggtgtagaatgtgtcgtaacatgatatgtgcggcacattttctacacaaaggaggaaaacgcatggaatgtgttgcatatttgcgtgtatctacagagaaacaggcagaggaaggaaacgga

SEQ ID NO: 21456 - DNA, 260 bp, Unknown
  Description of Unknown: LeftRegion for integrase B8457 sequence
caaaagtaaaattaacaaactggagggatattatgattaaagttactcaaaatggcgagaatgtaaaaatggaaaacataactctttcagataatttactaaagataattgcagagataattgacaacaaataaatatgtgttacaatgtgtcgcataacgtgatgaatgcggcacattttactttaaggagataaatatatggaatgtgttgcttatatgagagtatctactgaaaagcaagctgttgagggtaatgga

SEQ ID NO: 21457 - DNA, 260 bp, Unknown
  Description of Unknown: LeftRegion for integrase B8458 sequence
aaaatatttcgcattaaaggagatgatggcaaatggttgtagtaaccatcaatggtaaggaaattgatacagaaaatgtagaattgccagaggaagtattgcggatgatcgcagaaacgattgacagtcaataattaacgtattaaaatgtgtcgcaaagtgtagtaatgcggcacatttttgataggagggaaataaaaatggaatgtgttgcatatatgcgtgtctcaacagaaaagcaggcagaagaggggaatggt

SEQ ID NO: 21458 - DNA, 260 bp, Unknown; identical to SEQ ID NO: 21426
  Description of Unknown: LeftRegion for integrase B8459 sequence

SEQ ID NO: 21459 - DNA, 260 bp, Unknown
  Description of Unknown: LeftRegion for integrase B8460 sequence
gaaaagatgtctcgtgttaaaggagatggtgataaatggttatagtaaccatcgagggcaaggagattgatgtggaaaatattgaattgccggatgaagtgttaaggatgattgcagaagcgattgacagtaaataaagaatggactaaaatgtgtcgcaagtgtagtaatgcggcacatttttgataggagggataaaaatggaatgtgttgcatacatgcgtgtctcgacagaaaagcaggcagaagaaggcaatgga

SEQ ID NO: 21460 - DNA, 260 bp, Unknown; identical to SEQ ID NO: 21456
  Description of Unknown: LeftRegion for integrase B8461 sequence

SEQ ID NO: 21461 - DNA, 260 bp, Unknown
  Description of Unknown: LeftRegion for integrase B8462 sequence
ttgattttgtgaaatgagaggtgagcatatggcaattgttacgattgatgggaaagaaattgacatcgaacaaattgaactgccagaagaaattattaaaatcataattgaatgcttaggttgaccacaaaaatattgtagtgtaaaatgtgtcgtaacatgatatgtgcggcacatttctacacaaaggaggaatagtcatggaatgtgttgcgtatttgcgtgtatcaacagaaaaacaggccgaagagggaaatgga

SEQ ID NO: 21462 - DNA, 260 bp, Unknown; identical to SEQ ID NO: 21435
  Description of Unknown: LeftRegion for integrase B8463 sequence

SEQ ID NO: 21463 - DNA, 260 bp, Unknown; identical to SEQ ID NO: 21435
  Description of Unknown: LeftRegion for integrase B8464 sequence

SEQ ID NO: 21464 - DNA, 260 bp, Unknown
  Description of Unknown: LeftRegion for integrase B8465 sequence
caggaagcagatatgtcactctgcaaaatggacaatatttaaaactgtctaatgcaaaaattgtaagataaataaaaagcccccgtttccgagggcagggctgcaatgatacagccgtaattcgcacctacattgtatcattgcggcccgagaaaatcaagtctcgggcatttctatgcccaaaaataggagggatcgtaatgaaagatgaaaacttagaaggaaaaatagctgctctttatatcagagtaagcacggaa

SEQ ID NO: 21465 - DNA, 260 bp, Unknown
  Description of Unknown: LeftRegion for integrase B8466 sequence
gctgttatcgtgggatatatcttttttgactaccgtatcccccaccaggggcttattcagggcggagaggccagcatattcgcgtggattgtctttttgctgcttgcggtcggtattggcttttttgccgctattttgatgatgtattttcgctatgcaaaaaagtatacattatcgccagataagggaggagatgaacaatgagtgtagtattgcgggcagcattatacccgcgtgtgtccacaagtgtagtattgcgg

SEQ ID NO: 21466 - DNA, 260 bp, Unknown; identical to SEQ ID NO: 21430
  Description of Unknown: LeftRegion for integrase B8467 sequence

SEQ ID NO: 21467 - DNA, 260 bp, Unknown
  Description of Unknown: LeftRegion for integrase B8468 sequence
aaaataaaaagattggagttgtaaaatggttaaagttactctgaatggcgaagaagttaaaacggaagaattggaactatcacaaaagatcatagaatatatagtttctttgttggattgacaggaaaatattataagagtaaaatgccgtatatcgtgatgtatgcggcatttttactaaagaaaggagaaatgttttaatgaattgtgtcgcatatatgcgtgtttcaacggaaaaacaggcagaagaaggaaatgga

SEQ ID NO: 21468 - DNA, 260 bp, Unknown
  Description of Unknown: LeftRegion for integrase B8469 sequence
ttgattttgtgaaatagaggtgatcgcatggcaatcgtaacacttgacggtaaaccggttgacattgaaaaaatcgaactgccggaggaaattgtagagttaatcatgacgtgtctggattgaccaaatgaataatgtggtgtagaatgtgtcgtaacatgatatgtgcgacacattttctacacaaaggaggaaaacgcatggaatgtgttgcatatttgcgtgtatctacagagaaacaggcagaggaaggaaacgga

SEQ ID NO: 21469 - DNA, 260 bp, Unknown
  Description of Unknown: LeftRegion for integrase B8470 sequence
tttgccattaattcttataagaaaaaccgcccagtgttaccagcactgaacggtcactacatacccgaagatatgcaagtattctaagcaaatatattgtatcatcttcggaacagtttaacaatcagaacatttattctattgttggctgttatttttgtacctattttttaatacattctacaaaggaaggtgattacatggcaaaaacaaaacgctgtgcaatttatattcgcgtgagtacagaagaacagttcata

SEQ ID NO: 21470 - DNA, 260 bp, Unknown; identical to SEQ ID NO: 21435
  Description of Unknown: LeftRegion for integrase B8471 sequence

SEQ ID NO: 21471 - DNA, 260 bp, Unknown
  Description of Unknown: LeftRegion for integrase B8472 sequence
acaagatatctcgtgttgaaggagatggtgataaatggttatagtaaccatcgagggcaaggaaattgatgttgaaaatattgaattgccggatgaagtgttaagaatgattgcagaagcgattgacagcaaataaagaatgaactaaaatgtgtcgcaagtgtagtaatgcggcacatttttgataggagggataaaaaatggaatgtgttgcatacatgcgtgtctctacagaaaaacaggcagaagaaggaaacgga

SEQ ID NO: 21472 - DNA, 260 bp, Unknown; identical to SEQ ID NO: 21436
  Description of Unknown: LeftRegion for integrase B8473 sequence

SEQ ID NO: 21473 - DNA, 260 bp, Unknown
  Description of Unknown: LeftRegion for integrase B8474 sequence
ttgattttgtgaaataggggtgatcgtatggcaatcgtaacacttgacggtaaaccggttgacattgaaaaaatcgaactgccggaggaaattgtggagttaatcatgatgtgtctggattgaccaaatgaataatgtggtgtagaatgtgtcgtaacatgatatgtgcggcacattttctacacaaaggaggaaaacgcatggaatgtgttgcatatttgcgtgtatctacagagaaacaggcagaggaaggaaacgga

SEQ ID NO: 21474 - DNA, 260 bp, Unknown; identical to SEQ ID NO: 21427
  Description of Unknown: LeftRegion for integrase B8475 sequence

SEQ ID NO: 21475 - DNA, 260 bp, Unknown; identical to SEQ ID NO: 21435
  Description of Unknown: LeftRegion for integrase B8476 sequence

SEQ ID NO: 21476 - DNA, 260 bp, Unknown
  Description of Unknown: LeftRegion for integrase B8477 sequence
aaaataaaaagattggagttgtaaaatggttaaagttactctgaatggcgaagaagttaaaacggaagaattggaactttcacaaaagatcatagaatatatagtttctttgttggattgacaagaaaatattataagagtaaaatgccgtatatcgtgatgtatgcggcatttttactaaagaaaggagaaatgttttaatgaattgtgtcgcatatatgcgtgtttcaacggaaaaacaagcagaagaaggaaatgga

SEQ ID NO: 21477 - DNA, 260 bp, Unknown
  Description of Unknown: LeftRegion for integrase B8478 sequence
ttgattttgtgaaataggggtgatcgcatggtaattgtaacacttgacggtaaaccggttgacattgaaaaaatcgaactgccggaggaaattgtggagttaatcatgacgtgtctggattgaccaaatgaataatgtggtgtagaatgtgtcgtaacatgatatgtgcggcacattttctacacaaaggaggaaaacgcatggaatgtgttgcatatttgcgtgtatctacagagaaacaggcagaggaaggaaacgga

SEQ ID NO: 21478 - DNA, 260 bp, Unknown; identical to SEQ ID NO: 21427
  Description of Unknown: LeftRegion for integrase B8479 sequence

SEQ ID NO: 21479 - DNA, 260 bp, Unknown
  Description of Unknown: LeftRegion for integrase B8480 sequence
cagattggagtaaaatggcaaaaatgacaaaaatgacgttaaacgggaaagaaatttctccagaagatgtgatcctgcccgaaaaagtattggagcttatagcgaattgcttagattgacaccgtttgtagcaggatgtagaatgtgccgtgaacatgataaacacggcacattctttttagagaaaaggaggaacggcaatggaatgtgtcgcttacttaagggtttcaaccgaaaaacaggcggaagaaggttatgga

SEQ ID NO: 21480 - DNA, 260 bp, Unknown
  Description of Unknown: LeftRegion for integrase B8481 sequence
ttgattttgtgaaataggggtgatcgcatggcaatcataacacttgacggtaaaccggttgacattgaaaaaatcgaactgccggaggaaattgtggagttaatcatgacgtgtctggattgaccaaatgaataatgtggtgtagaatgtgtcgtaacatgatatgtgcggcacattttctacacaaaggaggaaaacgcatggaatgtgttgcatatttgcgtgtatctacagagaaacaggcagaggaaggaaacgga

SEQ ID NO: 21481 - DNA, 260 bp, Unknown; identical to SEQ ID NO: 21471
  Description of Unknown: LeftRegion for integrase B8482 sequence

SEQ ID NO: 21482 - DNA, 260 bp, Unknown
  Description of Unknown: LeftRegion for integrase B8483 sequence
ttgattttgtgaaatgagaggtgagcatatggcaattgttacgattgatggaaaagaaattgacatcgaacaaattgaactgccagaagaaattattaaaatcataattgaatgcctaggttgaccgcaaaaatattgtagtgtaaaatgtgtcgtaacatgatatgtgcggcacatttctacacaaaggaggaatagtcatggaatgtgttgcgtatttgcgtgtatcaacagaaaaacaggccgaagagggaaatgga

SEQ ID NO: 21483 - DNA, 260 bp, Unknown
  Description of Unknown: LeftRegion for integrase B8484 sequence
ttgagggggataagggaacaactgcggcggtgtgataaggtcattcccttcgctttgatatatagaaagaagatattggaggtgagactatcaaagcggtaatatatgctcgttactcgagccacaaccaacgagaagaatcaatcgagggacagcttcgtgaatgtcacgagtttgccctcaagaacggtttcattgtcgtggacgaatatatcgaccgggctatctccggcaagacagacaaccgaccgagcttccag

SEQ ID NO: 21484 - DNA, 260 bp, Unknown
  Description of Unknown: LeftRegion for integrase B8485 sequence
ttgattttgtgaaatgagaggtgagcatatggcaattgttacgattgacggaaaagaaattgacatcgaacaaattgaactgccagaagaaattattaaaatcataattgaatgcttaggttgaccacaaaaatattgtagtgtaaaatgtgtcgtaacatgatatgtgcggcacatttctacacaaaggaggaatagtcatggaatgtgttgcgtatttgcgtgtatcaacagaaaaacaggccgaagagggaaatgga

SEQ ID NO: 21485 - DNA, 260 bp, Unknown
  Description of Unknown: LeftRegion for integrase B8486 sequence
ttgattttgtgaaataggggtgatcgcatgacaatcgtaacacttgacggtaaaccggttgacattgaaaaaatcgaactgccggaggaaattgtggagttaatcatgacgtgtctggattgaccaaatgaataatgtggtgtagaatgtgtcgtaacatgatatgtgcggcacattttctacacaaaggaggaaaacgcatggaatgtgttgcatatttgcgtgtatctacagagaaacaggcagaggaaggaaacgga

SEQ ID NO: 21486 - DNA, 260 bp, Unknown
  Description of Unknown: LeftRegion for integrase B8487 sequence
aaagttagcagattggagtaaaaatggcaaaaatgacgttaaacgggaaagaaatttccccagaagatgtgatcctgccagaaaaagtattggagcttatagcgaattgcttagattgacaccgtttgtagcaggatgtagaatgtgccgtgaacatgataaacacggcacattctttttagagaaaaggaggaacggcaatggaatgtgtcgcttacttaagggtttcaaccgaaaaacaggcggaagaaggttatgga

SEQ ID NO: 21487 - DNA, 260 bp, Unknown
  Description of Unknown: LeftRegion for integrase B8488 sequence
aaagttagcagattggagtaaaaatggcaaaaatgacgttaaacgggaaagaaatttccccagaagatgtgatcctgcccgaaaaagtattggagcttatagcgaattgcttagattgacaccgtttgtagcaggatgtagaatgtgccgtgaacatgataaacacggcacattctttttagagaaaaggaggaacggcaatggaatgtgtcgcttacttaagggtttcaaccgaaaaacaggcggaagaaggttatgga

SEQ ID NO: 21488 - DNA, 260 bp, Unknown
  Description of Unknown: LeftRegion for integrase B8489 sequence
ctaaaaaccattaaaatttatgcaaaaaaaccggcccggtgctaccaacaccgaaccggccgatctccggagagatacactattatgaccatacatattgtatcatcttcggaacatctggtcaatccgaacacagtttcgcggctgggtgttctttttgtaccctttttattaataagataccaaggaggagtgatacaatgattaaaacaggctgctacgtccgcgtgtctacagaaaaccagctggaaaactacagc

SEQ ID NO: 21489 - DNA, 260 bp, Unknown
  Description of Unknown: LeftRegion for integrase B8490 sequence
gattggcaaattggaggggttaaatggtaaagataactgttgatggtaaagaagtaaaggcagaagatataaaactttctgctgatgttgtgaaagtcatatcatcatgtcttaattgacattaaagtaaaaagaggttagaatgtgtcgtaaagtacgataaatacggcacattctttttatataaagggggatttaagatggaatgtgttgtgtatatgagagtatcaacagaaaagcaggcagaagagggcaatggt

SEQ ID NO: 21490 - DNA, 260 bp, Unknown; identical to SEQ ID NO: 21431
  Description of Unknown: LeftRegion for integrase B8491 sequence

SEQ ID NO: 21491 - DNA, 260 bp, Unknown; identical to SEQ ID NO: 21435
  Description of Unknown: LeftRegion for integrase B8492 sequence

SEQ ID NO: 21492 - DNA, 260 bp, Unknown
  Description of Unknown: LeftRegion for integrase B8493 sequence
attaaaaagaaaataagtaagttggagggatataatgattaaaattacccagaacggcgagaatgtaaaaacagaaagtataacgctttcagacagcttactaaagataattgcagagataattgacaataagtaaatatgtgttacaatgtgccgtataacgtgataaatgcggcacatttttataaggagtaaaatatatggaatgtgttgcttatatgagagtatctactgaaaagcaggctgttgagggcaatgga

SEQ ID NO: 21493 - DNA, 260 bp, Unknown
  Description of Unknown: LeftRegion for integrase B8494 sequence
cagagtatcggaggaaaaacagatgaatgttgtggttacgcaaagtggtaaaaaagtgaatattgctgatattgttttgcctgatgatgtggcaagaacaatagctagcatgattggttgacaagtaaataaatgacaagtagaatgtgccgtagaatgtagtgtatatgcggcacattttacgtaggagggtaataaaaatggaatgtgtggcatatataagagtgtcaacagaaagacaggttgaagagggttacggc

SEQ ID NO: 21494 - DNA, 260 bp, Unknown
  Description of Unknown: LeftRegion for integrase B8495 sequence
agacagactggaggtaaaaaatggttagagttacacaagacggcaaagatgttgacattgaagatgtttctctgccaaaagaaattattgagattatagcatccatatgctgttgacaccattgtaaaaaggctttagaatgtgtcgtatgtatgataaatacggcacattctttatatattgaaaggagtgtaaagaaaatggaatgtgtcgcatatatgcgtgtttccacggaaaaacaggcagaagaaggcaacggt

SEQ ID NO: 21495 - DNA, 260 bp, Unknown
  Description of Unknown: LeftRegion for integrase B8496 sequence
aaacagactggaggtaaaaaatggttagagttacacaagacggcaaagatgttgacattgaagatgtttctctgccaaaagaaattattgagattatagcatccatatgctgttgacaccattgtaaaaaggctttaaaatgtgtcgtatgtatgataaatacggcacattctttatatattgaaaggagtgtaaagaaaatggaatgtgtcgcatatatgcgtgtttccacggaaaaacaggcagaagaaggcaacggt

SEQ ID NO: 21496 - DNA, 260 bp, Unknown
  Description of Unknown: LeftRegion for integrase B8497 sequence
gcaaaaaattaagcgactggaggatattttatgattaatgttactcaaaatggtaaaaatgtagacacggaagaattaacattgccggacagtatcgttaaaatgattgcagagataattgacaagtaaattttagatgtgtaaaatgtgctgtatcgtgataaatgcggcacattttatactttaggaggatatatactatgaaatgtgttgcttatatgagagtatcgacagagaaacaggcagaagaaggtaacgga

SEQ ID NO: 21497 - DNA, 260 bp, Unknown
  Description of Unknown: LeftRegion for integrase B8498 sequence
gaaaataagtaagttggaggttataaatgattagggttactcaaaatggcgaagacgtaaaaacagaaaacataactctttcagacagcttactaaagataattgcagagataattgacaacaagtaaatatgtgttacaatgtgccgtagaacgtgataaatgcggcacatttatttatattataaggagataaaatatatggaatgtgttgcttatatgagagtatctactgaaaaacaggctgttgagggcaatgga

SEQ ID NO: 21498 - DNA, 260 bp, Unknown
  Description of Unknown: LeftRegion for integrase B8499 sequence
gtctttttgatttatttaaataacgcaagagcccctgtgcagcaaacacaggggcccagccttaccaagggtgtcacggttccccagataagaaatgttgagtacaagacatagtatatcatctttccgggcaccaggcaaccgtatgtgtaattttacgttaaccaaagagtatagttaagtattaaggagagatgaatatgattaaaggcgcatgttatgtccgcgtatcaacggacaatcagttagaaaactacagc

SEQ ID NO: 21499 - DNA, 260 bp, Unknown
  Description of Unknown: LeftRegion for integrase B8500 sequence
atcaaaaagaaaataagtaagttggaggaatataatgattaaaattacccagaatggcgagaatgtaaaagcagaaaacataacactttcagacaacttactaaagataattgcagagataattgacaacaaataaatatgtgttacaatgtgtcgcataatgtgataaatgcggcacattttttataaaggagaaaaatatggaatgtgttgcttacatgagagtatccactgaaaaacaggctgttgagggtaacgga

SEQ ID NO: 21500 - DNA, 260 bp, Unknown
  Description of Unknown: LeftRegion for integrase B8501 sequence
caagcaaaagattagtaagttggaggttttaaatgattaaagttacccaaaacggagtagatgtgaatatagaaaatataactattccggacaacttacaaaagataattgccgaagtgattgacaacaaataaatatgtgttaaaatgtgccgtataacgtgataaatgcggcacattttacataaaggaggattgacaatggaatgtgttgcgtatatgagggtatcaacggaaaagcaggctgttgagggcaacgga

SEQ ID NO: 21501 - DNA, 260 bp, Unknown
  Description of Unknown: LeftRegion for integrase B8502 sequence
gcatacgctctcttgggaggtgataggatgccggaaatctgggtctgcaccgcgcagccgggggatgcagcgctgcgcagggccgccgctgcctgcgtgctggagctcgagtacgccgtgctctctttgctgctcgcgcgcggacggctgacacgcacggaatacgatctctgcgccgcactgcttgggcaggcgctgacatgagcgccgggaaaaagccgctgcgcgtggctgcctactgccgcgtctccacagacggc

SEQ ID NO: 21502 - DNA, 260 bp, Unknown
  Description of Unknown: LeftRegion for integrase B8503 sequence
atcaaaaagaaaataagtaagttggagggatataatgattaaggttactcaaaacggagagagtgtgaaaacagaaaacataactctttcagacagcttactaaagataatcgcagagataattgacaataagtaaatatgtgttacaatgtgccgtataatgtgataaatgcggcacattttttataagggagaaaaatatggaatgtgttgcttatatgagagtatccactgaaaaacaggctgttgagggcaacgga

SEQ ID NO: 21503 - DNA, 260 bp, Unknown
  Description of Unknown: LeftRegion for integrase B8504 sequence
aaacagaatggaggtaaaaaatggttagagttacacaagacggcaaagatgttgatattgaagatgtttctctaccaaaagaaattattgagattatagcatctatatgctgttgacaccattgtaaaaaggctttagaatgtgtcgtatgtatgataaatacggcacattctttatatattgaaaggagcgtaaagaaaatggaatgtgtcgcatatatgcgtgtttccacggaaaagcaggcagaagaaggcaacggt

SEQ ID NO: 21504 - DNA, 260 bp, Unknown
  Description of Unknown: LeftRegion for integrase B8505 sequence
taaatagaatcggaggtttgactatatgacagttgtgcttacacagaatgggaaagaaattaatccagaagatgtagttttgccgtcagaggttttgaaactgattgcggaactgattaattgacgaaaaattgataatagtgtagaatgcgtcagtagtgaatatggcgcattcttttatatctgatggaggaatgagaatggaatgtgtcgcatatatgcgtgtttctacagagaaacaggcagaagagggaaacgga

SEQ ID NO: 21505 - DNA, 260 bp, Unknown
  Description of Unknown: LeftRegion for integrase B8506 sequence
caagcaaaagattagtaagttggaggttttaaatgattaaagttactcaaaacggagtagatgtggatgtagaaaatataactattccggacagcttacagaagataattgccgaagtgattgacaacaaataaatatgtgctaaaatgtgccgtataacgtgataaatgcggcacattttacataaaggaggattgacaatggaatgtgtcgcttatatgagagtatcgacggaaaaacaggctgttgagggcaacgga

SEQ ID NO: 21506 - DNA, 260 bp, Unknown
  Description of Unknown: LeftRegion for integrase B8507 sequence
caagcaaaaaattagtaagttggaggttttaaatgattaaagttactcaaaacggagtagatgtgaatatagaaaatataactattccggacagcttacaaaagataattgccgaagtgattgacaacaaataaatatgtgttaaaatgtgccgtataacgtgataaatgcggcacattttacataaaggaggattgacaatggaatgtgttgcgtatatgagggtatcaacggaaaaacaagctgttgagggcaacgga

SEQ ID NO: 21507 - DNA, 260 bp, Unknown
  Description of Unknown: LeftRegion for integrase B8508 sequence
gcaaaaaattaagcgattggaggatattttatgattaatgttactcaaaatggtaaaaatgtagacacagaagaattaacattgccggacagtatcgttaaaatgattgcagagataattgacaagtaaattttagatgtgtaaaatgtgctgtatcgtgataaatgcggcacattttatactttaggaggatatatactatgaaatgtgttgcttatatgagagtatcgacagagaaacaggcagaagaaggtaacgga

SEQ ID NO: 21508 - DNA, 260 bp, Unknown; identical to SEQ ID NO: 21498
  Description of Unknown: LeftRegion for integrase B8509 sequence

SEQ ID NO: 21509 - DNA, 260 bp, Unknown
  Description of Unknown: LeftRegion for integrase B8510 sequence
aaacagactggaggtaaaaaatggttagagttacacaagacggcaaagatgttgatattgaagatgtttctctgccaaaagaaattattgagattatagcatccatatgctgttgacaccattgtaaaaaggctttagaatgtgtcgtatgtatgataaatacggcacattctttatatattgaaaggagtgtaaataaaatggaatgtgtcgcatatatgcgtgtttccacggaaaaacaggcagaagaaggcaacggt

SEQ ID NO: 21510 - DNA, 260 bp, Unknown
  Description of Unknown: LeftRegion for integrase B8511 sequence
cagagtatcggaggaaaaacagatgaatgttgtggttacgcaaagcggtaaaaaagtgaatattgctgatattgttctgcccaatgatgtggcgagaacaatagctagcatgattggttgacaagtaaataaatgacaagtagaatgtgccgtagaatgtagtgtatatgcggcacattttacgtaggaggacaataaaaatggaatgtgtggcatatataagagtgtcaacagaaagacaggttgaagagggttacggc

SEQ ID NO: 21511 - DNA, 260 bp, Unknown
  Description of Unknown: LeftRegion for integrase B8512 sequence
atagaatcggaggtttgtctatatgacagttgtgcttacacagaatgggaaagaaattaatccagaggaagtagttcttccaccagaagtactaaagctgattgcagaattgattaattgacgaaaaaaatataatagtgtagaatgcgtcatgtgtagtgaatatggcgcattcttttatatctgatggaggaacgagaatggaatgtgtcgcatatatgcgtgtttccacggagaaacaggcagaagagggaaacgga

SEQ ID NO: 21512 - DNA, 260 bp, Unknown
  Description of Unknown: LeftRegion for integrase B8513 sequence
caaaaagaaaataagtaagttggagggatataatgattaaaattacccagaatggtgagagcgtaaaaatagaaaatataacactttcagacagcttactaaagataattgcagagataattgacaataagtaaatatgtgttacaatgtgccgtataatgtgataaatgcggcacattttactataaggagataaatatatggaatgtgttgcttatatgagagtatccactgaaaaacaggctgttgagggtaacgga

SEQ ID NO: 21513 - DNA, 260 bp, Unknown
  Description of Unknown: LeftRegion for integrase B8514 sequence
agtcaaaaatcagcagattggaggggtaatcatggtgattgtgacacgaaacggcaaggagattaagacgggcgaaatcaaattgccggacaagactaaagagctgattgcatcaataattgacaatcagtaagcataagggtaaaatgtgccgtaacgcgataagtacggcacattcttttttaagaggaggttaaacaatggaatgtgttgcgtacatgagagtatcaacggagaagcaagccgaagaaggtaacgga

SEQ ID NO: 21514 - DNA, 260 bp, Unknown
  Description of Unknown: LeftRegion for integrase B8515 sequence
cggagtatcggaggaaaagcagatgaatgttgtggttacacaaaacggtaagaaagtgaatattgctgatattgttctgcctgatgatgtggtgagaacaatagctagcatgattggttgacaagtaaataaatgacaagtagaatgtgccgtagaatgtagtgtatatgcggcacattttacgtaggagggtaataaaaatggaatgtgtggcatatataagagtgtcaacagaaagacaggttgaagagggttacggc

SEQ ID NO: 21515 - DNA, 260 bp, Unknown
  Description of Unknown: LeftRegion for integrase B8516 sequence
aaaaattaataatttaaactaaaacgaaagggcccctgtgcagcaaacacagaggcccagccttaccaatggtgtcacggttcccatgataagaaatgttaagtacaagacatagtatatcatctttccggacaccgggcaaccatatgtgtaattttacgtcaaccgaagagtatagttaaatatgaggagagattaatatgattaaaggcgcatgttatgtccgcgtatccacggacaatcagttggaaaactatagt

SEQ ID NO: 21516 - DNA, 260 bp, Unknown; identical to SEQ ID NO: 21504
  Description of Unknown: LeftRegion for integrase B8517 sequence

SEQ ID NO: 21517 - DNA, 260 bp, Unknown; identical to SEQ ID NO: 21497
  Description of Unknown: LeftRegion for integrase B8518 sequence

SEQ ID NO: 21518 - DNA, 260 bp, Unknown
  Description of Unknown: LeftRegion for integrase B8519 sequence
taaacagactggaggtaaaaaatggttagagttacacaagacggcaaagatgttgatattgaagatgtttctctgccaaaagaaattattgagattatagcatccatatgctgttgacaccattgtaaaaaggctttagaatgtgtcgtatgtatgataaatacggcacattctttatatattgaaaggagtgtaaaaaaatggaatgtgtcgcatatatgcgtgtttccacggaaaaacaagcagaagagggcaacggt

SEQ ID NO: 21519 - DNA, 260 bp, Unknown
  Description of Unknown: LeftRegion for integrase B8520 sequence
taaacagactggaggtaaaaaatggttagagttacacaagacggcaaagatgttgatattgaagatgtttctctgccaaaagaaattattgagattatagcatccatatgctgttgacaccattgtaaaaaggctttagaatgtgtcgtatgtatgataaatacggcacattctttatatattgaaaggagtgtaaaaaaatggaatgtgtcgcatatatgcgtgtttccacggaaaaacaggcagaagaaggcaacggt

SEQ ID NO: 21520 - DNA, 260 bp, Unknown
  Description of Unknown: LeftRegion for integrase B8521 sequence
attacggacgagattccgactgggagcattggtatctttaccagggggaatgaatgccttatcaaagaactgggaaccgacaggcttatttctcataataaagaatacggagacataccagctagagaagatataaaattagtaggacttgtattaggaaaggtggcagaagtatgaggtgtcaataaggagagatgaatatgattaaaggcgcatgttatgtccgcgtatccacggacaatcagttagaaaactacagc

SEQ ID NO: 21521 - DNA, 260 bp, Unknown
  Description of Unknown: LeftRegion for integrase B8522 sequence
caagcaaaaaattagtaagttggaggttttaaatgattaaagttacccaaaacggaatggatgtggatatagaaaatataactattccggacagcttacaaaagataattgccgaagtgattgacaacaaataaatatgtgttaaaatgtgccgtataacgtgataaatgcggcacattttacataaaggaggattgacaatggaatgtgttgcgtatatgagggtatcaacggaaaaacaggctgttgagggcaacgga

SEQ ID NO: 21522 - DNA, 260 bp, Unknown; identical to SEQ ID NO: 21497
  Description of Unknown: LeftRegion for integrase B8523 sequence

SEQ ID NO: 21523 - DNA, 260 bp, Unknown
  Description of Unknown: LeftRegion for integrase B8524 sequence
agtctttttgatttatttaaataacgcaagagcccctgtgcagcaaacacaggggcccagccttaccaagggtgtcacggttccccagataagaaatgttgagtacaagacatagtatatcatctttccgggcaccgggcaaccataggtgtaattttacatcaaccgaagagtatagttaaatatgaggagagatgaatatgattaaaggcgcatgttatgtccgcgtatccacggacaatcagttagaaaactacagc

SEQ ID NO: 21524 - DNA, 260 bp, Unknown
  Description of Unknown: LeftRegion for integrase B8525 sequence
caagcaaaagattagtaagttggaggttttaaatgattaaagttactcaaaacggagtagatgtggatatagaaaatataactattccggacagcttacaaaagataattgccgaagtgattgacaataaataaatatgtgttaaaatgtgccgtataacgtgataaatacggcacattttacataaaggaggattgacaatggaatgtgtcgcttatatgagagtatcgacggaaaaacaggctgttgagggcaacgga

SEQ ID NO: 21525 - DNA, 260 bp, Unknown
  Description of Unknown: LeftRegion for integrase B8526 sequence
aaatagaatcggaggtttgactatatgacagttgtgcttacacagaatgggaaagaaattaatccagaagatgtagttttgccgtcagaggttttgaaactgattgcggagctgattaattgacgaaaaattgataatagtgtagaatgcgtcatgtagtgaatatggcgcattcttttatgtctgatggaggaataaggatggaatgtgtcgcatatatgcgtgtttctacagagaaacaggcagaagagggaaacgga

SEQ ID NO: 21526 - DNA, 260 bp, Unknown
  Description of Unknown: LeftRegion for integrase B8527 sequence
cggagtatcggaggaaaagcagatgaatgttgtggttacacaaaacggtaagaaagtgaatattgctgatattgttctgcctgatgatgtgatgagaacaatagctagcatgattggttgacaagtaaataaatgacaagtagaatgtgccgtagaatgtagtgtatatgcggcacattttacgtaggaggataatagaaatggaatgtgtggcatatataagagtgtcaacagaaagacaggttgaagagggttacggc

SEQ ID NO: 21527 - DNA, 260 bp, Unknown
  Description of Unknown: LeftRegion for integrase B8528 sequence
agtcaaaaatcagcagattggaggggtaatcatggtgattgtgacacgaaacggcaaggagattaagacgggcgaaatcaaattgccggacaagactaaagagctgattgcatcaataattgacaatcagtaagcataagggtaaaatgtgccgtaacgcgataagtacggcacattcttttttaagaggaggttaaacaatggaatgtgttgcgtacatgagagtatcaacggagaagcaagccgaagaaggcaacgga

SEQ ID NO: 21528 - DNA, 260 bp, Unknown
  Description of Unknown: LeftRegion for integrase B8529 sequence
aaacagactggaggtaaaaaatggttagagttacacaagacggcaaagatgttgatattgaagatgtttctctgccaaaagaaattattgagattatagcatccatatgctgttgacaccattgtaaaaaggctttagaatgtgtcgtatgtatgataaatacggcacattctttatatattgaaaggagtgtaaagaaaatggaatgtgtcgcatatatgcgtgtttccacggaaaagcaggcagaagagggcaacggt

SEQ ID NO: 21529 - DNA, 260 bp, Unknown
  Description of Unknown: LeftRegion for integrase B8530 sequence
gcatacgctctcttgggaggtgatgagatgccggagatttgggtctgcaccgcacagcctgcggacgcagcgctgcgcaaggccgccgctgccggcacgcttgtgctcgagcacgccgtgctctctctgctgctcgcgcgcggacggctgacgcgcgcggaatatgacggctgcgccgcactgcttgggcaggcgctgacatgagcgccgggaaaaagccgctgcgcgtggctgcctactgccgcgtctccacagacggc

SEQ ID NO: 21530 - DNA, 260 bp, Unknown
  Description of Unknown: LeftRegion for integrase B8531 sequence
acagactggaggtaaaaaatggttagagttacacaagacggcaaagatgttgatattgaagatgtttctctgccaaaagaaattattgagattatagcatccatatgctgttgacaccattgtaaaaagactttagaatgtgttgtatgtatgataaatacggcacattctttatatattgaaaggagtgtaaagaaaaaatggaatgtgtcgcatatatgcgtgtttccacggaaaaacaggcagaagaaggcaacggt

SEQ ID NO: 21531 - DNA, 260 bp, Unknown
  Description of Unknown: LeftRegion for integrase B8532 sequence
aagtcaaaaatcagcagattggaggggtaatcatggtgattgtgacacagaatggcagggagattaagacaggcgaaatcaaattgccggacaagaccaaagaactgattgcatcaataattgacaatcagtaaatatgagcgtaaaatgtgccgtaacgcgataagtacggcacattctttttaagaggaggttaaacgatggaatgtgttgcgtacatgagagtatcaacggagaagcaagccgaagaaggtaacgga

SEQ ID NO: 21532 - DNA, 260 bp, Unknown
  Description of Unknown: LeftRegion for integrase B8533 sequence
tcaaaaatcaacagattggaggggaaatcatggtgattgtgacacagaatggcaaggaaatcaaggcaggcgaaatcaaattgccagacaaaaccaaagaactgattgcgtcgataattgacaatcagtaagcataagagtaaaatgtgccgtaacgcgataagtacggcacattctttttaataagaggaggttaaacgatggaatgtgttgcgtatatgagagtatcaacagaaaagcaggtagaagagggcaatggt

SEQ ID NO: 21533 - DNA, 260 bp, Unknown; identical to SEQ ID NO: 21497
  Description of Unknown: LeftRegion for integrase B8534 sequence

SEQ ID NO: 21534 - DNA, 260 bp, Unknown
  Description of Unknown: LeftRegion for integrase B8535 sequence
gattggaggtatacgctaatggcaattctgacaattgacggagaagtagtacaggcagaagatgtggagctagatgaagaaacgctccgtatgattgcagaaatactttctcggtctgattgacaaaaaaccgtataaaagatagaatgtgtcataatataggaaatatggcacattctatttaaaggaggaaatgatatatggaatgtgtcgcatatttgcgtgtttcaacagaaaagcaggcagaagagggccatggt

SEQ ID NO: 21535 - DNA, 260 bp, Unknown; identical to SEQ ID NO: 21498
  Description of Unknown: LeftRegion for integrase B8536 sequence

SEQ ID NO: 21536 - DNA, 260 bp, Unknown
  Description of Unknown: LeftRegion for integrase B8537 sequence
gattggcaaattggagggtttaaatggtaaagataactgttgatggtaaagaagtaaaagcagaagatataaaactttctgctgatgttgtgaaagtcatatcatcatgtcttgattgacattaaggtaaaaagaggttagaatgtgtcgtaaagtacgataaatacggcacattctttttatataaagggggatttaagatggaatgtgttgcgtatatgagagtatcaacagaaaagcaggttgaagaaggctatgga

SEQ ID NO: 21537 - DNA, 260 bp, Unknown
  Description of Unknown: LeftRegion for integrase B8538 sequence
cggagtatcggaggaaaagcagatgaatgttgtggttacacaaaacggtaagaaagtgaatattgctgatattgttctgcctgatgatgtggtgagaacaatagctagcatgattggttgacaagtaaataaatgacaagtagaatgtgccgtagaatgtagtgtatatgcggcacattttacgtaggaggataatagaaatggaatgtgtggcatatataagagtgtcaacagaaagacaggttgaagagggttacggc

SEQ ID NO: 21538 - DNA, 260 bp, Unknown
  Description of Unknown: LeftRegion for integrase B8539 sequence
aaacagactggaggtaaaaaatggttagagttacacaagacggcaaagatgttgatattgaagatgtttctctgccaaaagaaattattgagattatagcatccatatgctgttgacaccattgtaaaaaggctttagaatgtgtcgtatgtatgataaatacggcacattctttatatattgaaaggagtgtaaagaaaatggaatgtgtcgcatatatgcgtgtttccacggaaaagcaggcagaagagggcaacggc

SEQ ID NO: 21539 - DNA, 260 bp, Unknown
  Description of Unknown: LeftRegion for integrase B8540 sequence
cagagtatcggaggaaaagcagatgaatgttgtggttacacaaaacggtaaaaaagtaaatattgctgatattgttctgcctgatgatgtggcgagaacaatagctagcatgattggttgacaagtaaataaatgacaagtagaatgtgtcgtagaatgtagtgtatatgcggcacattttacgtaggagggtaataaaaatggaatgtgtggcatatataagagtgtcaacagaaagacaggttgaagagggttacggc

SEQ ID NO: 21540 - DNA, 260 bp, Unknown
  Description of Unknown: LeftRegion for integrase B8541 sequence
cggagtatcggaggaaaaacagatgaatgttgtggttacgcaaagtggtaaaaaagtgaatattgctgatattgttttgcctgatgatgtggcaagaacaatagctagcatgattggttgacaagtaaataaatgacaagtagaatgtgccgtagaatgtagtgtatatgcggcacattttacgtaggagggtaataaaaatggaatgtgtggcatatataagagtgtcaacagaaagacaggttgaagagggttacggc

SEQ ID NO: 21541 - DNA, 260 bp, Unknown; identical to SEQ ID NO: 21496
  Description of Unknown: LeftRegion for integrase B8542 sequence

SEQ ID NO: 21542 - DNA, 260 bp, Unknown; identical to SEQ ID NO: 21497
  Description of Unknown: LeftRegion for integrase B8543 sequence

SEQ ID NO: 21543 - DNA, 260 bp, Unknown
  Description of Unknown: LeftRegion for integrase B8544 sequence
atagaaagattggaggacggtaatcatggtaaagattacacttaacggaacagaaatacagccagaggatgtagagctgagtgaagaagcaaagaaaatgattgccgagttgctcaatcattgacaattaaccagtgaaaggatagaatgtgctatacacaggaagtacggcacgttctatctttaaggagggatagatagtggaatgtgtcgcatatatgcgtgtttctacagaaaaacaggcagaagaggggaatgga

SEQ ID NO: 21544 - DNA, 260 bp, Unknown; identical to SEQ ID NO: 21497
  Description of Unknown: LeftRegion for integrase B8545 sequence

SEQ ID NO: 21545 - DNA, 260 bp, Unknown
  Description of Unknown: LeftRegion for integrase B8546 sequence
atagaaagattggagggcggtaatcatggtaaagattacacttaacggaacagaaatacagccagaggatgtagagctgagtgaagaagcaaagaaaatgattgccgagatgctcaatcgttgacaattaaccagtgaaaggatagaatgtgctatacacaggaagtacggcacgttctatctttaaggagggatagatagtggaatgtgtcgcatatatgcgtgtttctacagaaaaacaggcagaagaggggaatgga

SEQ ID NO: 21546 - DNA, 260 bp, Unknown; identical to SEQ ID NO: 21497
  Description of Unknown: LeftRegion for integrase B8547 sequence

SEQ ID NO: 21547 - DNA, 260 bp, Unknown
  Description of Unknown: LeftRegion for integrase B8548 sequence
cggagtatcggaggaaaaacagatgaatgttgtggttacgcaaagtggtaaaaaagtgaatattgctgatattgttttgcctgatgatgtggcaagaacaatagctagcatgattggttgacaagtaaataaatgacaagtagaatgtgccgtagaatgtagtgtatatgcggcacattttacgtaggaggataatagaaatggaatgtgtggcatatataagagtgtcaacagaaagacaggttgaagagggttacggc

SEQ ID NO: 21548 - DNA, 260 bp, Unknown
  Description of Unknown: LeftRegion for integrase B8549 sequence
caagcaaaagattagtaagttggaggtttttaatgattaaagttacccaaaacggagtagatgtgaatatagaaaatataactattccggacagcttacaaaagataattgccgaagtgattgacaacaaataaatatgtgttaaaatgtgccgtataacgtgataaatgcggcacattttacataaaggaggattgacaatggaatgtgttgcgtatatgagggtatcaacggaaaaacaggctgttgagggaaatgga

SEQ ID NO: 21549 - DNA, 260 bp, Unknown
  Description of Unknown: LeftRegion for integrase B8550 sequence
tcaaaaatcagcagattggaggggtaatcatggtggttgtgacacagaatggcaaggaaatcaaggcaggtgaaatcaaattgccagacaagacaaaagaactgattgcatcaataattgacaatcagtaagcatgggagtagaatgtgccgtaacgcgataagtacggcacattctttttaataagaggaggttaaacaatggaatgtgttgcgtacatgagagtgtcgacagaaaggcaagctgaagaaggcaacgga

SEQ ID NO: 21550 - DNA, 260 bp, Unknown
  Description of Unknown: LeftRegion for integrase B8551 sequence
aaagaaaaaattaataaaatcggaggttaataatggtagttattactttgaatgggagaaaattgcaagctgatgaaattgagttaagtgaaaaaatcttatcaataatagcttcaattattgacaacaggtaaaaacaaatgtaaaatgtgtcgcaacgtgataaatgcggcacatttttactaaaggaggatttaatgatggaatgtgttgcgtacatgagggtttccactgaaaaacaggcagaagagggaaacgga

SEQ ID NO: 21551 - DNA, 260 bp, Unknown
  Description of Unknown: LeftRegion for integrase B8552 sequence
agtcaaaaatcagcagattggaggggtaatcatggtgattgtgacacagaatggcagggagattaagacaggcgaaatcaaattgccggacaagaccaaagaactgattgcatcaataattgacaatcagtaaatatgagcgtaaaatgtgccgtaacgcgataagtacggcacattcttttttaagaggaggttaaacgatggaatgtgttgcgtacatgagagtatcaacggagaagcaagccgaagaaggcaatggg

SEQ ID NO: 21552 - DNA, 260 bp, Unknown
  Description of Unknown: LeftRegion for integrase B8553 sequence
tgcatttttatattgcacatacgttctatctatcgtataatcattttgtaaataaaaaaatccggtactggcaataccggattcgtaacttatcaaccaggatgattgatatataaacacaaacaaattatatcatgcatcctgttgtttgtatagggtgtattttttatacccttttttcaaaagaaaggtggatgtttatgaaaagaaaaatcagatgtgcaatctatgaccgtgtatctcatgagctgcaagtagaa

SEQ ID NO: 21553 - DNA, 260 bp, Unknown
  Description of Unknown: LeftRegion for integrase B8554 sequence
gcaaaaaattaagcgactggaggatattttatgattaatgttactcaaaatggtaaaaatgtagacacggaagaattaacattgccggaaagtatcgttaaaatgattgcagagataattgacaagtaaattttagatgtgtaaaatgtgctgtatcgtgataaatgcggcacattttatactttaggaggatatatactatgaaatgtgttgcttatatgagagtatcgacagagaaacaggcagaagaaggtaacgga

SEQ ID NO: 21554 - DNA, 260 bp, Unknown; identical to SEQ ID NO: 21523
  Description of Unknown: LeftRegion for integrase B8555 sequence

SEQ ID NO: 21555 - DNA, 260 bp, Unknown
  Description of Unknown: LeftRegion for integrase B8556 sequence
gaaaataagtaagttggaggttataaatgattagagttactcaaaatggtgaagacgtaaaaacagaaaacataactctttcagacagcttactaaagataattgcagagataattgacaacaagtaaatatgtgttacaatgtgccgtagaacgtgataaatgcggcacatttatttatattataaggagataaaatatatggaatgtgttgcttatatgagagtatctactgaaaaacaggctgttgagggcaatgga

SEQ ID NO: 21556 - DNA, 260 bp, Unknown
  Description of Unknown: LeftRegion for integrase B8557 sequence
gaaaataagtaagttggaggttataaatgattagggttactcaaaatggcgaagacgtaaaaacagaaaacataactctttcagacagcttactaaagataattgcagagataattgacaacaagtaaatatgtgttacaatgtgccgtagaacgtgataaatgcggcacatttatttatattataaggagataaaatatatggaatgtgttgcttatatgagagtatctactgaaaaacaggctgttgagggtaatgga

SEQ ID NO: 21557 - DNA, 260 bp, Unknown
  Description of Unknown: LeftRegion for integrase B8558 sequence
atagaaagattggagggcggtaatcatggtaaagattacacttaacggaacagaaatacagccagaggatgtagagctgagtgaagaagcaaagaaaatgattgccgagttgctcaatcgttgacaattaaccagtgaaaggatagaatgtgctatacacaggaagtacggcacgttctatctttaaggagggatagatagtggaatgtgtcgcatatatgcgtgtttctacagaaaaacaggcagaagaggggaatgga

SEQ ID NO: 21558 - DNA, 260 bp, Unknown
  Description of Unknown: LeftRegion for integrase B8559 sequence
aaaataagtaagttggaggttatacaatgattagggttactcaaaatggtgaagacgtaaaaacagaaaacataactctttcagacagcttactaaagataattgcagagataattgacaacaagtaaatatgtgttacaatgtgccgtagaacgtgataaatgcggcacatttatttatattataaggagataaaatatatggaatgtgttgcttatatgagagtatctactgaaaaacaggctgttgagggcaatgga

SEQ ID NO: 21559 - DNA, 260 bp, Unknown
  Description of Unknown: LeftRegion for integrase B8560 sequence
caaaagtaaaattagcaaactggagggatattatgattaaagttactcaaaatggcgagaatgtaaaaacggaaaacataactctttcagataatttactaaagataattgcagagataattgacagcaaataaatatgtgttacaatgtgtcgcataacgtgatgaatgcggcacattttactttaaggagataaatatatggaatgtgttgcttatatgagagtatctactgaaaagcaagctgttgagggtaatgga

SEQ ID NO: 21560 - DNA, 260 bp, Unknown
  Description of Unknown: LeftRegion for integrase B8561 sequence
caaaaagaaaataagtaagttggagggacataatgattaaaattacccagaatggtgagagcgtaaaaatagaaaatataacactttcagacagcttactaaagataattgcagagataattgacaataagtaaatatgtgctaaaatgtgtcgcataacgtgataaatgcggcacattttactataaggagataaatatatggaatgtgttgcttatatgagagtatctactgaaaaacaggctgttgagggtaacgga

SEQ ID NO: 21561 - DNA, 260 bp, Unknown
  Description of Unknown: LeftRegion for integrase B8562 sequence
cggagtatcggaggaaaagcagatgaatgttgtggttacgcaaagcggtaaaaaagtgaatattgctgatattgttttgcctgatgatgtggcgagaacaatagctagcatgattggttgacaagtaaataaatgacaagtagaatgtgccgtagaatgtagtgtatatgcggcacattttacgtaggaggataataaaaatggaatgtgtggcatatataagagtgtcaacagaaagacaggttgaagagggttacggc

SEQ ID NO: 21562 - DNA, 260 bp, Unknown
  Description of Unknown: LeftRegion for integrase B8563 sequence
caagcaaaagattagtaagttggaggttttaaatgattaaagttacccaaaacggagtagatgtgaatatagaaaatataactattccggacagcttacaaaagataattgccgaagtgattgacaacaaataaatatgtgttaaaatgtgccgtataacgtgataaatacggcacattttacataaaggaggattgacaatggaatgtgttgcgtatatgagggtatcaacggaaaaacaggctgttgagggtaatgga

SEQ ID NO: 21563 - DNA, 260 bp, Unknown
  Description of Unknown: LeftRegion for integrase B8564 sequence
agtaagattatcaaacgtttgggacgcgtatcggatcgagaccgacttctgctgacgatgcgtggacaaatcagaacctgatataattggcagacaactgaggttgtctgctttttttgttacatactatagaacgcgcaaatttggtatgtaaaagcagcgttttttaagtcgatcaacattttgccaacgccggcaaaatgactgacattggctccggatcatctgatatttatttggatctatacctccacgacggg

SEQ ID NO: 21564 - DNA, 260 bp, Unknown
  Description of Unknown: LeftRegion for integrase B8565 sequence
gttcacaaattggaggtattgaattgataaaggtaacgcaaaatggtagagaggttcgcatagaggatattgttcttccaaaagatatactactcataatcgcaactatgttcgattgacagttatattaataatggttagaatgtgtcgtatgtatgataaatacggcacattctttttataagaaaggagaaaattacatggaatgtgtcgcatatattcgtgtgtctacagaaaaacaggcagaggaaggatatggt

SEQ ID NO: 21565 - DNA, 260 bp, Unknown
  Description of Unknown: LeftRegion for integrase B8566 sequence
attaaaaagaaaataagtaagttggagggatataatgattaaggttactcaaaatggcggagacgtaaaaacagaaaacataactctttcagacagcttactaaagataattgcagagataattgacaacaagtaaatatgtgttacaatgtgccgtagaacgtgataaatgcggcacattttttataaggagaaaatatatggaatgtgttgcttacatgagagtatctactgaaaaacaagctgttgagggtaacgga

SEQ ID NO: 21566 - DNA, 260 bp, Unknown
  Description of Unknown: LeftRegion for integrase B8567 sequence
aaacagactggaggtaaaaaatggttagagttacacaagacggcaaagatgttgatattgaagatgtttctctaccaaaagaaattattgagattatagcatctatatgctgttgacaccattgtaaaaaggctttagaatgtgtcgtatgtatgataaatacggcacattctttatatattgaaaggagcgtaaagaaaatggaatgtgtcgcatatatgcgtgtttccacggaaaagcaggcagaagaaggcaacggt

SEQ ID NO: 21567 - DNA, 260 bp, Unknown
  Description of Unknown: LeftRegion for integrase B8568 sequence
cggagtatcggaggaaaagcagatgaatgttgtggttacacaaaacggtaagaaagtgaatattgctgatattgttctgcctgatgatgtggtgagaacaatagctagcatgattggttgacaagtaaataaatgacaagtagaatgtgccgtagaatgtagtgtatatgcggcacattttacgtaggaggacaataaaaatggaatgtgtggcatatataagagtgtcaacagaaagacaggttgaagagggctacggc

SEQ ID NO: 21568 - DNA, 260 bp, Unknown; identical to SEQ ID NO: 21497
  Description of Unknown: LeftRegion for integrase B8569 sequence

SEQ ID NO: 21569 - DNA, 260 bp, Unknown; identical to SEQ ID NO: 21561
  Description of Unknown: LeftRegion for integrase B8570 sequence

SEQ ID NO: 21570 - DNA, 260 bp, Unknown; identical to SEQ ID NO: 21538
  Description of Unknown: LeftRegion for integrase B8571 sequence

SEQ ID NO: 21571 - DNA, 260 bp, Unknown
  Description of Unknown: LeftRegion for integrase B8572 sequence
taaaaacaaaataaacaggctggaggggatttaatggttaaagtaactatagacggagaagaagtagatatttccgaaatagaattaccggaaggcactgttaaacttattgcagaggtaattgacaatcagaactaaggctagtagaatgtgctgtatgtgataaatacggcgcattctaattttttggagggataattatgaaatgcgtagcgtatataagagtatcaacagaaaagcaagcagaggagggaaacgga

SEQ ID NO: 21572 - DNA, 260 bp, Unknown
  Description of Unknown: LeftRegion for integrase B8573 sequence
acagactggaggtaaaaaatggttagagttacacaagacggcaaagatgttgatattgaagatgtttctctgccaaaagaaattattgagattatagcatccatatgctgttgacaccattgtaaaaaggctttagaatgtgtcgtatgtatgataaatacggcacattctttatatattgaaaggagtgtaaagaaaaaatggaatgtgtcgcatatatgcgtgtttccacggaaaaacaggcagaagaaggcaacggt

SEQ ID NO: 21573 - DNA, 260 bp, Unknown; identical to SEQ ID NO: 21525
  Description of Unknown: LeftRegion for integrase B8574 sequence

SEQ ID NO: 21574 - DNA, 260 bp, Unknown; identical to SEQ ID NO: 21571
  Description of Unknown: LeftRegion for integrase B8575 sequence

SEQ ID NO: 21575 - DNA, 260 bp, Unknown
  Description of Unknown: LeftRegion for integrase B8576 sequence
aataaataggtaatactattcataagcaatgaaattcctttctgtgtttgtgggattggtttacctaaagtattgacacaaaaagggaggtcattgcttttttctttgaaaaagtggtgtaatccctgaaaatacaaggtttgtaacaaaaaatgaggtagtaaacttgacactaccgttaagtataaggagagatgaatatgattaaaggagcatgttatgtccgcgtatcaacggacaatcagttagaaaactacagc

SEQ ID NO: 21576 - DNA, 260 bp, Unknown
  Description of Unknown: LeftRegion for integrase B8577 sequence
aaacagactggaggtaaaaaatggttagagttacacaagacggcaaagatgttgatattgaagatgtttctctgccaaaagaaattattgagattatagcatccatatgctgttgacaccattgtaaaaaggctttagaatgtgtcgtatgtatgataaatacggcacattctttatatattgaaaggagtgtaaagaaaatggaatgtgtcgcatatatgcgtgtttccacggaaaaacaggcagaagagggcaacggt

SEQ ID NO: 21577 - DNA, 260 bp, Unknown
  Description of Unknown: LeftRegion for integrase B8578 sequence
tagttttttactccaaaaatctctttatgaacttatatatgcgttccaactgctgttcgttcgctttttctaataatttcataattgattttttgtagtttcttttcatttttctacctcctaaatttgaaaatatttccatttaggagtatagacattataaaaaaggaaaataatatatttagaaatggggttatgatatgcagaaagtaacaagggcggttttctacattcgtgtatcacacaaagaacaggtttta

SEQ ID NO: 21578 - DNA, 260 bp, Unknown; identical to SEQ ID NO: 21510
  Description of Unknown: LeftRegion for integrase B8579 sequence

SEQ ID NO: 21579 - DNA, 260 bp, Unknown
  Description of Unknown: LeftRegion for integrase B8580 sequence
agtcaaaaatcagcagattggaggggtaatcatggtgattgtgacacagaatggtaaggaaatcaaggcaggtgaaatcaaattgccggacaagactaaagagctgattgcatcaataattgacaatcagtaagcataagagtaaaatgtgccgtaacgcgataagtacggcacattcttttttaagaggaggttaaacgatggaatgtgttgcgtacatgagagtatcaacggagaagcaagccgaagaaggcaatggg

SEQ ID NO: 21580 - DNA, 260 bp, Unknown
  Description of Unknown: LeftRegion for integrase B8581 sequence
tttgcatttttatattgcacatacgttctatctatcgtataatcattttgtaaataaaaaatccggtactggcaataccggattcgtaacttatcaaccaggatgattgatatataaacacaaacaaattatatcatgcatcctgttgtttgtatagggtgtattttttataccctttttcaaaagaaaggtggatgtttatgaaaagaaaaatcagatgcgcaatctatgaccgtgtatctcatgagctgcaagtagaa

SEQ ID NO: 21581 - DNA, 260 bp, Unknown
  Description of Unknown: LeftRegion for integrase B8582 sequence
gctattttaaagggcttttggtgtttttctcatatagtgcgaaaaaactttaaatttttaaatggcttttaattatgttttaaaaaatgtttaaatggcttaattactgaattttttgaggttttccgactaaggaaaaaagaacattatcattatccagtaacatttctgacagtgataaacacgcttttgaggggattttggtttatcagcttgaccgatttgcccgtaaccgctacgacagcgctatctacaaatca

SEQ ID NO: 21582 - DNA, 260 bp, Unknown; identical to SEQ ID NO: 21497
  Description of Unknown: LeftRegion for integrase B8583 sequence

SEQ ID NO: 21583 - DNA, 260 bp, Unknown; identical to SEQ ID NO: 21526
  Description of Unknown: LeftRegion for integrase B8584 sequence

SEQ ID NO: 21584 - DNA, 260 bp, Unknown
  Description of Unknown: LeftRegion for integrase B8585 sequence
cggagtatcggaggaaaagcagatgaatgttgtggttacacaaaacggtaagaaagtgaatattgctgatattgttctgcctgatgatgtggtgagaacaatagctagcatgattggttgacaagtaaataaatgacaagtagaatgtgccgtagaatgtagtgtatatgcggcacattttacgtaggaggataatagaaatggaatgtgtggcatatataagagtgtcaacagaaagacaggttgaagagggctacggc

SEQ ID NO: 21585 - DNA, 260 bp, Unknown
  Description of Unknown: LeftRegion for integrase B8586 sequence
cggagtatcggaggaaaagcagatgaatgttgtggttacacaaaacggtaagaaagtgaatattgctgatattgttctgcctgatgatgtggtgagaacaatagctagcatgattggttgacaagtaaataaatgacaagtagaatgtgccgtagaatgtagtgtatatgcggcacattttacgtaggaggataataaaaatggaatgtgtggcatatataagagtgtcaacagaaagacaggttgaagagggttacggc

SEQ ID NO: 21586 - DNA, 260 bp, Unknown; identical to SEQ ID NO: 21509
  Description of Unknown: LeftRegion for integrase B8587 sequence

SEQ ID NO: 21587 - DNA, 260 bp, Unknown
  Description of Unknown: LeftRegion for integrase B8588 sequence
aaacagactggaggtaaaaaatggttagagttacacaagacggcaaagatgttgatatcgaagatgtttctctgccaaaagaaattattgagattatagcatccatatgctgttgacaccattgtaaaaaggctttagaatgtgtcgtatgtatgataaatacggcacattctttatatattgaaaggagtgtaaagaaaatggaatgtgtcgcatatatgcgtgtttccacggaaaaacaggcagaagaaggcaatggt

SEQ ID NO: 21588 - DNA, 260 bp, Unknown
  Description of Unknown: LeftRegion for integrase B8589 sequence
gcaaaaaattaagcgattggaggatattttatgattaatgttactcaaaatggtaaaaatgtagacacggaagaattaacattgccggacagtatcgttaaaatgattgcagagataattgacaagtaaattttagatgtgtaaaatgtgctgtatcgtgataaatgcggcacattttatactttaggaggatatatactatgaaatgtgttgcttatatgagagtatcgacagagaaacaggcagaagaaggtaacgga

SEQ ID NO: 21589 - DNA, 260 bp, Unknown; identical to SEQ ID NO: 21572
  Description of Unknown: LeftRegion for integrase B8590 sequence

SEQ ID NO: 21590 - DNA, 260 bp, Unknown
  Description of Unknown: LeftRegion for integrase B8591 sequence
tcaaaaatcagcagattggaggggtaatcatggtgattgtgacacagaacggcaaggaaatcaaggcaggtgaaatcaaattgccggacaagactaaagaactgattgcatcaataattgacaatcagtaagcatgggagtagaatgtgccgtaacgcgataagtacggcacattctttttaataagaggaggttaaacaatggaatgtgttgcgtacatgagagtatcaacggaaaagcaagccgaagaaggcaatggg

SEQ ID NO: 21591 - DNA, 260 bp, Unknown; identical to SEQ ID NO: 21538
  Description of Unknown: LeftRegion for integrase B8592 sequence

SEQ ID NO: 21592 - DNA, 260 bp, Unknown
  Description of Unknown: LeftRegion for integrase B8593 sequence
aaacagactggaggtaaaaaatggttagagttacacaagacggcaaagatgttgatattgaagatgtttctctgccaaaagaaattattgagattatagcatccatatgctgttgacaccattgtaaaaaggctttagaatgtgtcgtatgtatgataaatacggcacattctttatatattgaaaggagtgtaaagaaaatggaatgtgtcgcatatatgcgtgtttccacggaaaaacaggcagaagaaggcaacggt

SEQ ID NO: 21593 - DNA, 260 bp, Unknown
  Description of Unknown: LeftRegion for integrase B8594 sequence
cagagtatcggaggaaaaacagatgaatgttgtggttacacaaagcggtaaaaaagtgaatattgctgatattgttctgcctgatgatgtggtgagaacaatagttagcatgattggttgacaagtaaataaatgacaagtagaatgtgccgtggaatgtagtgtatatgcggcacattttacgtaggaggataataaaaatggaatgtgtggcatatataagagtgtcaacagaaagacaggttgaagagggctacggc

SEQ ID NO: 21594 - DNA, 260 bp, Unknown
  Description of Unknown: LeftRegion for integrase B8595 sequence
atagaaagattggagggcggtaatcatggtaaagattacacttaacggaacagaaatacagccagaggatgtagagctgagtgaagaagcaaagaaaatgattgccgagttgctcaatcattgacaattaaccagtgaaaggatagaatgtgctatacacaggaagtacggcacgttctatctttaaggagggatagatagtggaatgtgtcgcatatatgcgtgtttctacagaaaaacaggcagaagaggggaatgga

SEQ ID NO: 21595 - DNA, 260 bp, Unknown
  Description of Unknown: LeftRegion for integrase B8596 sequence
ggatgaaaaaaattatcagttttatccagatatgaatatgattgaagtggctgaatatttggtagatgaaggattatttggagaaatcccagaatcgattatatcttatattgattatgaaagtttagcccgtgatctaagctattctggatatgttcaaacaaattatggcgttattgaattaaattgaggtgaacagtatggaaatgataaaagttggcttatacgaccgagttagtcatgacgagcaagcattatat

SEQ ID NO: 21596 - DNA, 260 bp, Unknown
  Description of Unknown: LeftRegion for integrase B8597 sequence
cagagtatcggaggaaaaacagatgaatgttgtggttacgcaaagcggtaaaaaagtgaatattgctgatattgttctgcctgatgatgtggcgagaacaatagctagcatgattggttgacaagtaaataaatgacaagtagaatgtgccgtagaatgtagtgtatatgcggcacattttacgtaggagggcgataaaaatggaatgtgtggcatatataagagtgtcaacagaaagacaggttgaagagggctacggc

SEQ ID NO: 21597 - DNA, 260 bp, Unknown; identical to SEQ ID NO: 21526
  Description of Unknown: LeftRegion for integrase B8598 sequence

SEQ ID NO: 21598 - DNA, 260 bp, Unknown; identical to SEQ ID NO: 21538
  Description of Unknown: LeftRegion for integrase B8599 sequence

SEQ ID NO: 21599 - DNA, 260 bp, Unknown
  Description of Unknown: LeftRegion for integrase B8600 sequence
acagagtatcggaggaaaaacagatgaatgttgtggttacacaaagcggtaaaaaagtaaatattactgatattgttctacctgatgatgtagcgagaacaatagcgaatatgattggttgacaagtaaataaatgacaagtagaatgtgccgtagaatgtagtgtatatgcggcacattttacgtaggaggtaataaaaatggaatgtgtggcatatataagagtgtcaacagaaagacaggttgaagagggctacggc

SEQ ID NO: 21600 - DNA, 260 bp, Unknown
  Description of Unknown: LeftRegion for integrase B8601 sequence
gattggaggtatatgctaatggcaattctgacaattgacggagaagtagtacaggcagaagatgtggagctaaatgaagaaacgctccgtatgattgcagaaatactttctcagtctgattgacaaaaaaccgtataaaagatagaatgtgtcataatataggaaatatggcacattctatttaaaggaggaaatgatatatggaatgtgtcgcatatttgcgtgtttcaacagaaaagcaggcagaagagggtcatggt

SEQ ID NO: 21601 - DNA, 260 bp, Unknown
  Description of Unknown: LeftRegion for integrase B8602 sequence
gaaatctgaaagagaggatagcatgacaaaagtaaccgtaaacggcgaagaaatccagccggaagaaatcaagctcacagaaaaacagattgaagtgatcgccgccagcctgaactgttgataaagagctgttaaagtgttaaaatgtgccatgtatagcgttatatgtggcacatttttaaatcacaggagggagcaaaatggaatgtgtcgcatatttgagagtatcgacagaaaaacaggcagaagagggtcatgga

SEQ ID NO: 21602 - DNA, 260 bp, Unknown
  Description of Unknown: LeftRegion for integrase B8603 sequence
aaaaaataaaataaacaggctggagggaatcggatggttaaagtgactatagacggagaagaggtagatatttccaaaatagaattaccggaaggcactgttaagcttattgcagaggtaattgacaatcagaactaaggctagtagaatgtgctgtatgtgataaatacggcgcattctaattttttggagggataattatgaaatgcgtagcgtatataagagtatcaacagaaaagcaagcagaggagggaaacgga

SEQ ID NO: 21603 - DNA, 260 bp, Unknown
  Description of Unknown: LeftRegion for integrase B8604 sequence
tgtcaaaaatcagcagattggaggggtaatcatggtggttgtgacacagaatggcaaggaaatcaaggcaggtgaaatcaaattgccggacaagacaaaagagctgattgcatcaataattgacaatcagtaagcataggagtagaatgtgccgtaacgcgataagtacggcacattcttttttaagaggaggttaaacaatggaatgtgttgcgtacatgagagtatcaacagagaagcaagtcgaagaaggtaacgga

SEQ ID NO: 21604 - DNA, 260 bp, Unknown
  Description of Unknown: LeftRegion for integrase B8605 sequence
cggagtatcggaggaaaaacagatgaatgttgtggttacgcaaagcggtaaaaaagtgaatattgctgatattgttctgcctgatgatgtggcgagaacaatagctagcatgattggttgacaagtgaataaatgaaaagtagaatgtgccgtagaatgtagtgtatatgcggcacattttacgtaggaggacaataaaaatggaatgtgtggcatatataagagtgtcaacagaaagacaggttgaagagggctacggc

SEQ ID NO: 21605 - DNA, 260 bp, Unknown
  Description of Unknown: LeftRegion for integrase B8606 sequence
cagagtatcggaggaaaagcagatgaatgttgtggttacacaaagtggtaaaaaagtgaatattactgatattgttctacctgatgatgtggcgagaacaatagctagcatgatcggttgacaagtgaataaatgataagtagaatgtgccgtagaatgtagtgtatatgcggcacattttacgtaggaggacaataaaaatggaatgtgtggcatatataagagtgtcaacagaaagacaggttgaagagggctacggc

SEQ ID NO: 21606 - DNA, 260 bp, Unknown
  Description of Unknown: LeftRegion for integrase B8607 sequence
aaatagaatcggaggtttgactatatgacagttgtgcttacacagaatgggaaagaaattaatccagaagatgtagttttgccgtcagaggttttgaaactgattgcggagctgattaattgacgaaaaattgataatagtgtagaatgcgtcatgtagtgaatatggcgcattcttttatatctgatggaggaataaggatggaatgtgtcgcatatatgcgtgtttctacagagaaacaggcagaagagggaaacgga

SEQ ID NO: 21607 - DNA, 260 bp, Unknown; identical to SEQ ID NO: 21498
  Description of Unknown: LeftRegion for integrase B8608 sequence

SEQ ID NO: 21608 - DNA, 260 bp, Unknown
  Description of Unknown: LeftRegion for integrase B8609 sequence
gattggcaaattggagggtttaaatggtaaagataactgttgatggtaaagaagtaaaagcagaagatataaaactttctgctgatgttgtgaaagtcatatcatcatgccttgattgacattatagcaaaaagaggttagaatgtgtcgtaaagtacgataaacacggcacattctttttatataaagggggatttaagatggaatgtgttgcgtatataagagtatcaacagaaaaacaggttgaagaaggctacggg

SEQ ID NO: 21609 - DNA, 260 bp, Unknown
  Description of Unknown: LeftRegion for integrase B8610 sequence
agacagactggaggtaaaaaatggttagagttacacaagacggcaaagatgttgacattgaagatgtttctctgccaaaagaaattattgagattatagcatccatatgctgttgacaccattgtaaaaaggctttagaatgtgtcgtatgtatgataaatacggcacattctttatatattgaaaggagtgtaaagaaaatggaatgtgtcgcatatatgcgtgtttccacggaaaaacaagcagaagagggcaacggt

SEQ ID NO: 21610 - DNA, 260 bp, Unknown
  Description of Unknown: LeftRegion for integrase B8611 sequence
caagcaaaagattagtaagttggaggttttaaatgattaaagttacccaaaacggagtagatgtgaatatagaaaatataactattccggacagcttacaaaagataattgccgaagtgattgacaacaaataaatatgtgttaaaatgtgccgtataacgtgataaatgcggcacattttacataaaggaggattgacaatggaatgtgttgcgtatatgagggtatcaacggaaaaacaggctgttgagggtaatgga

SEQ ID NO: 21611 - DNA, 260 bp, Unknown
  Description of Unknown: LeftRegion for integrase B8612 sequence
aaacagactggaggtaaaaaatggttagagttacacaagacggcaaagatgttgatattgaagatgtttctctgccaaaagaaattgttgagattatagcatccatatgctgttgacaccattgtaaaaaggctttagaatgtgtcgtatgtatgataaatacggcacattctttatatattgaaaggagtgtaaagaaaatggaatgtgtcgcatatatgcgtgtttccacggaaaaacaggcagaagaaggcaacggt

SEQ ID NO: 21612 - DNA, 260 bp, Unknown; identical to SEQ ID NO: 21497
  Description of Unknown: LeftRegion for integrase B8613 sequence

SEQ ID NO: 21613 - DNA, 260 bp, Unknown
  Description of Unknown: LeftRegion for integrase B8614 sequence
caagcaaaaaattagtaagttggaggttttaaatgattaaagttactcaaaacggagtagatgtgaatatggaaaatataactattccggacagcttacaaaagataattgccgaagtgattgacaataaataaatatatgttaaaatgtgccgtataacgtgataaatgcggcacattttacataaaggaggattgacaatggaatgtgtcgcttatatgagagtatcgacagaaaaacaggctgttgagggcaacgga

SEQ ID NO: 21614 - DNA, 260 bp, Unknown; identical to SEQ ID NO: 21594
  Description of Unknown: LeftRegion for integrase B8615 sequence

SEQ ID NO: 21615 - DNA, 260 bp, Unknown
  Description of Unknown: LeftRegion for integrase B8616 sequence
attctttttatgttgcacatacgttctgtgcattgtataatcatattataaataaaaaaatccggtactggcaataccggattcgtaacttatcaaccaggatgattgatatataaacacaaacaaattatatcatgcatcctgttgtttgtatagggtgtattttttatacccttttttcaaaagaaaggtggatgtttatgaaaagaaaaatcagatgtgcaatctatgaccgtgtatctcatgagctgcaagtagaa

SEQ ID NO: 21616 - DNA, 260 bp, Unknown; identical to SEQ ID NO: 21497
  Description of Unknown: LeftRegion for integrase B8617 sequence

SEQ ID NO: 21617 - DNA, 260 bp, Unknown
  Description of Unknown: LeftRegion for integrase B8618 sequence
caagcaaaagattagtaagttggaggcttttaatgattaaagttacccaaaacggagtagatgtgaatatagaaaatataactatcccggacagcttacaaaagataattgccgaagtgattgacaacaaataaatatgtgttaaaatgtgccgtataacgtgataaatgcggcacattttacataaaggaggattgacaatggaatgtgttgcgtatatgagggtatcaacggaaaaacaggctgttgagggaaatgga

SEQ ID NO: 21618 - DNA, 260 bp, Unknown; identical to SEQ ID NO: 21511
  Description of Unknown: LeftRegion for integrase B8619 sequence

SEQ ID NO: 21619 - DNA, 260 bp, Unknown
  Description of Unknown: LeftRegion for integrase B8620 sequence
atcaaaaagaaaataagtaagttggagggatataatgattaaggttactcaaaacggagagaatgtgaaaacagaaaacataactctttcagacaacttactaaagataatcgcagagataattgacaataagtaaatatgtgttacaatgtgccgtataatgtgataaatgcggcacattttttataaaggaggaaaatatggaatgtgttgcttatatgagagtatccactgaaaaacaggctgttgagggcaacgga

SEQ ID NO: 21620 - DNA, 260 bp, Unknown; identical to SEQ ID NO: 21606
  Description of Unknown: LeftRegion for integrase B8621 sequence

SEQ ID NO: 21621 - DNA, 260 bp, Unknown
  Description of Unknown: LeftRegion for integrase B8622 sequence
acaattcctccgggtgctttcatagaaccatggaatgtgaatattttgccttcaggggagttcattttttgtgctgaatctcgtgaaaagcgtataaaaagcttgcaatcttctgcaaaatgtgatatatagattatacgaaacactgctttaaaagaacactccaccgttcaatgatgtgtaaatgggaggtgcctgccatgactgctgtgatctatgctcgttattcaactgacagccagcgcgaggaatccattgaa

SEQ ID NO: 21622 - DNA, 260 bp, Unknown
  Description of Unknown: LeftRegion for integrase B8623 sequence
aagtcaaaaatcagcagattggaggggtaatcatggtgattgtgacacagaatggcagggagattaagacaggcgaaatcaaattgccggacaagaccaaagaactgattgcatcaataattgacaatcagtaaatatgagcgtaaaatgtgccgtaacgcgataagtacggcacattctttttaagaggaggttaaacaatggaatgtgttgcgtacatgagagtatcaacggaaaggcaagccgaagaaggcaacgga

SEQ ID NO: 21623 - DNA, 260 bp, Unknown
  Description of Unknown: LeftRegion for integrase B8624 sequence
aagcaaaaaattagtaagttggaggttttaaatgattaaagttactcaaaacggagtagatgtgaatatagaaaatataactattccggacagcttacaaaagataattgccgaagtgattgacaataaataaatatgtgttaaaattatgccgtataacgtgataaatgcggcacatttttactaaaggaggattgacaatggaatgtgtcgcttatatgagagtatcgacagaaaaacaggctgttgagggtaacgga

SEQ ID NO: 21624 - DNA, 260 bp, Unknown; identical to SEQ ID NO: 21552
  Description of Unknown: LeftRegion for integrase B8625 sequence

SEQ ID NO: 21625 - DNA, 260 bp, Unknown; identical to SEQ ID NO: 21526
  Description of Unknown: LeftRegion for integrase B8626 sequence

SEQ ID NO: 21626 - DNA, 260 bp, Unknown; identical to SEQ ID NO: 21592
  Description of Unknown: LeftRegion for integrase B8627 sequence

SEQ ID NO: 21627 - DNA, 260 bp, Unknown; identical to SEQ ID NO: 21497
  Description of Unknown: LeftRegion for integrase B8628 sequence

SEQ ID NO: 21628 - DNA, 260 bp, Unknown
  Description of Unknown: LeftRegion for integrase B8629 sequence
gatatgggcggtggaggtacaacacacagattatttgatataggtattaattggaaagaacacatatatgtaggtaaaacaatatcgatgtaggaggtagggaagatgaatgctgatacagtaaaaataataaaagttgaatcaaatgtatataacttaatcgaggaactatattacaaattgaaagagcaaaaattaaaatgaagaatgctattatatatgttagagtttctacagaagaacaggcaaaaaatgactta

SEQ ID NO: 21629 - DNA, 260 bp, Unknown
  Description of Unknown: LeftRegion for integrase B8630 sequence
aaaataagtaagttggaggttatacaatgattagggttactcaaaatggtgaagacgtaaaaacagaaaacataactctttcagacagcttactaaagataattgcagagataattgacaacaagtaaatatgtgttacaatgtgccgtagaacgtgataaatgcggcacatttatttatatcataaggagataaaatatatggaatgtgttgcttatatgagagtatctactgaaaaacaggctgttgagggcaatgga

SEQ ID NO: 21630 - DNA, 260 bp, Unknown
  Description of Unknown: LeftRegion for integrase B8631 sequence
caaaagtaaaattagcaaactggagggatattatgattaaagttactcaaaatggcgagaatgtaaaaacggaaaacataactctttcagataatttactaaagataattgcagagataattgacaacaaataaatatgtgttacaatgtgtcgcataacgtgatgaatgcggcacattttactttaaggagataaatatatggaatgtgttgcttatatgagagtatctactgaaaagcaagctgttgagggtaatgga

SEQ ID NO: 21631 - DNA, 260 bp, Unknown; identical to SEQ ID NO: 21588
  Description of Unknown: LeftRegion for integrase B8632 sequence

SEQ ID NO: 21632 - DNA, 260 bp, Unknown; identical to SEQ ID NO: 21566
  Description of Unknown: LeftRegion for integrase B8633 sequence

SEQ ID NO: 21633 - DNA, 260 bp, Unknown
  Description of Unknown: LeftRegion for integrase B8634 sequence
agctttgtattatcgatctggaaaaatgagcgaagcggaatttctgaaaaaacttaaggaggagaaaattaaatatgatccgtactgggtgaactgcatctttatctatgtggacaattgataaagatatagataagtgataaaatgtgccatgtatagcgttatatgtggcacatttttaaatcacaggagggagcaaaatggaatgtgtcgcatatttgagagtatcgacagaaaaacaggcagaagaaggtcatgga

SEQ ID NO: 21634 - DNA, 260 bp, Unknown
  Description of Unknown: LeftRegion for integrase B8635 sequence
attgatccccatgaaccttttgcagtatatattaatggtaaagcaagaatacaggaaacaggtccagcaattttaataataaatcaagattaggaggtagggaagatgaatgctgatacagtaaaaataataaaagttgaatcaaatgtgtataatctaatcgaggaattatatagtaaattgaaagagcaaaaattaaaatgaagaatgctattatatatgttagagtttctacagaagaacaggcaaaaaatgactta

SEQ ID NO: 21635 - DNA, 260 bp, Unknown
  Description of Unknown: LeftRegion for integrase B8636 sequence
tatcaaatcacaatgagacatttaaaagatatgttagataagaagattatttcaatcgaagaatacaatcaaatgatggctgaatttaaagagaaatatacaccaaaaataagcagtttattctttgaaataacccaataagacttgatatatacatcatttagagtgatatatagtaatgataaaaatggaggtgtaagatgcgaaaaataacaaaattagaaacaaaaaacatagaacttcctaaacttaaaagagtg

SEQ ID NO: 21636 - DNA, 260 bp, Unknown
  Description of Unknown: LeftRegion for integrase B8637 sequence
aagtcaaaaatcagcagattggaggggtaatcatggtgattgtgacacagaacggcaaggaaatcaaggcaggtgaaatcaaattgccggacaagaccaaagaactgattgcatcaataattgacaatcagtaaatatgagcgtaaaatgtgccgtaacgcgataagtacggcacattctttttaagaggaggttaaacaatggaatgtgttgcgtacatgagagtatcaacggagaagcaagccgaagaaggtaacgga

SEQ ID NO: 21637 - DNA, 260 bp, Unknown
  Description of Unknown: LeftRegion for integrase B8638 sequence
aagtcaaaaatcagcagattggaggggtaatcatggtgattgtgacacagaatggcagggagattaagacaggcgaaatcaaattgccggacaagaccaaagaactgattgcatcaataattgacaatcagtaaatatgagcgtaaaatgtgccgtaacgcgataagtacggcacattctttttaagaggaggttaaacaatggaatgtgttgcgtacatgagagtatcaacggagaagcaagccgaagaaggtaacgga

SEQ ID NO: 21638 - DNA, 260 bp, Unknown
  Description of Unknown: LeftRegion for integrase B8639 sequence
atgccagaggaagatgaggaagaagaataataataaataaaaccgccccatttctgagacggtttcacagatactacctgccggacgtgccggatgatagaatctccttcgcaagagcattatatcatttctggatgcgtcccgcaagtgggcgtattttttaaaccttttttaatagaatttataatcaaggaagtgatatgatgggaaaaataattcgatgcgcaatctatgaccgcgtatctacagacatccaggtt

SEQ ID NO: 21639 - DNA, 260 bp, Unknown
  Description of Unknown: LeftRegion for integrase B8640 sequence
atcaaaaagaaaatcagtaagttggagggatataatgattaaggttactcaaaacggagaaaatgtgaaaacagaaaacataattctttcagacagcttactaaagataattgcagagataattgacaacaagtaaatatgtgttacaatgtgccgtagaacgtgataaatgcggcacattttttataaggagaaaatatatggaatgtgttgcttacatgagagtatctactgaaaaacaggctgttgagggcaacgga

SEQ ID NO: 21640 - DNA, 260 bp, Unknown; identical to SEQ ID NO: 21497
  Description of Unknown: LeftRegion for integrase B8641 sequence

SEQ ID NO: 21641 - DNA, 260 bp, Unknown; identical to SEQ ID NO: 21579
  Description of Unknown: LeftRegion for integrase B8642 sequence

SEQ ID NO: 21642 - DNA, 260 bp, Unknown; identical to SEQ ID NO: 21497
  Description of Unknown: LeftRegion for integrase B8643 sequence

SEQ ID NO: 21643 - DNA, 260 bp, Unknown
  Description of Unknown: LeftRegion for integrase B8644 sequence
tgcaacgaatgtaacgtttgcaatcggtgaaatccttaattgcgagcaaactatcaatccagagaaaatttattataagcgggattggatgaactgcatctttatctatgtggacaattgataaagatatagataagtgataaaatgtgccatgtatagcgttatatgtggcacatttttaaatcacaggaggaagcaaaatggaatgtgtcgcatatttgagagtatcgacagaaaaacaggcagaagagggtcatgga

SEQ ID NO: 21644 - DNA, 260 bp, Unknown
  Description of Unknown: LeftRegion for integrase B8645 sequence
taagtcaaaaatcagcagattggaggggtaatcatggtgattgtgacacagaatggtaaggaaatcaaggcaggtgaaatcaaattgccggacaagactaaagagctgattgcatcaataattgacaatcagtaagcataagagtaaaatgtgccgtaacgcgataagtacggcacattctttttaaaggaggttaaacaatggaatgtgttgcgtacatgagagtatcaacggaaaagcaagccgaagaaggcaacggg

SEQ ID NO: 21645 - DNA, 260 bp, Unknown
  Description of Unknown: LeftRegion for integrase B8646 sequence
atagaaagattggaggacggtaatcatggtaaagattacacttaacggaacagaaatacagccagaggatgtagaactgagtgaagaagcaaagaaaatgattgccgagttgctcaatcattgacaattaaccagtgaaaggatagaatgtgctatacacaggaagtacggcacgttctatctttaaggagggatagatagtggaatgtgtcgcatatatgcgtgtttctacagaaaaacaggcagaagagggaaatgga

SEQ ID NO: 21646 - DNA, 260 bp, Unknown
  Description of Unknown: LeftRegion for integrase B8647 sequence
caagcaaaaaattagtaagttggaggttttaaatgattaaagttactcaaaacggagtagatgtgaatatagaaaatataactattccggacagcttacaaaagataattgccgaagtgattgacaataaataaatatgtgataaaatgtgccgtataacgtgatagatgcggcacattttacataaaggaggattgacaatggaatgtgtcgcttatatgagagtatcgacggaaaaacaggctgttgagggtaacgga

SEQ ID NO: 21647 - DNA, 163 bp, Unknown
  Description of Unknown: LeftRegion for integrase B8648 sequence
ttactaaagataatcgcagagataattgacaataagtaaatatgtgttacaatgtgccgtataatgtgataaatgcggcacattttttataaaggaggaaaatatggaatgtgttgcttatatgagagtatccactgaaaaacaggctgttgagggcaacgga

SEQ ID NO: 21648 - DNA, 260 bp, Unknown
  Description of Unknown: LeftRegion for integrase B8649 sequence
caagcaaaagattagtaagttggaggttttaaatgattaaagttactcaaaacggagtagatgtgaatatagaaaatataactattccggacggcttacaaaagataattgccgaagtgattgacaataaataaatatgtgttaaaatgtgccgtataacgtgataaatgcggcacatttttactaaaggaggattaacaatggaatgtgtcgcttatatgagagtatcgacagaaaaacaggctattgagggtaatggc

SEQ ID NO: 21649 - DNA, 260 bp, Unknown; identical to SEQ ID NO: 21497
  Description of Unknown: LeftRegion for integrase B8650 sequence

SEQ ID NO: 21650 - DNA, 260 bp, Unknown
  Description of Unknown: LeftRegion for integrase B8651 sequence
caaaaagaaaataagtaagttggagggatataatgattaaaattacccagaatggtgagagcgtaaaaatagaaaatataacactttcagacagcttactaaagataatcgcagagataattgacaataagtaaatatgtgttacaatgtgtcgcataacgtgatgaatgcggcacattttactttaaggagataaatatatggaatgtgttgcttatatgagagtatctactgaaaagcaagctgttgagggcaatgga

SEQ ID NO: 21651 - DNA, 260 bp, Unknown; identical to SEQ ID NO: 21601
  Description of Unknown: LeftRegion for integrase B8652 sequence

SEQ ID NO: 21652 - DNA, 260 bp, Unknown
  Description of Unknown: LeftRegion for integrase B8653 sequence
tcaaaaatcaacagattggaggggtaatcatggtgattgtgacacagaatggcaaggaaatcaaggcaggcgaaatcaaattgccagacaagacaaaagaactgattgcatcaataattgacaatcagtaagcatgggagtagaatgtgccgtaacgcgataagtacggcacattctttttaataagaggaggttaaacaatggaatgtgttgcgtacatgagagtgtcgacagaaaggcaagctgaagaaggcaacgga

SEQ ID NO: 21653 - DNA, 260 bp, Unknown
  Description of Unknown: LeftRegion for integrase B8654 sequence
gattggaggcatatgctaatggcagttctgacaattgacggagaagtaatacaggcagaagatgtggagttaaatgaagaaacgctccgtatgattgcagaaatactttctcggtctgattgacaaaaaaccgtataaaagatagaatgtgtcataatataggaaatatggcacattctatttaaaggaggaaatgatatatggaatgtgtcgcatatttgcgtgtttcaacagaaaagcaggcagaagaggggcatggt

SEQ ID NO: 21654 - DNA, 260 bp, Unknown
  Description of Unknown: LeftRegion for integrase B8655 sequence
aaaataagtaagttggaggttatacaatgattagggttactcaaaatggtgaagacgtaaaaacagaaaacataactctttcagacagcttactaaagataattgcagagataattgacaacaagtaaatatgtgttacaatgtgccgtagaacgtgataaatgcggcacatttatttatattataaggagataaaatatatggaatgtgttgcttatatgagagtatctactgaaaaacaggctgttgagggtaacgga

SEQ ID NO: 21655 - DNA, 260 bp, Unknown
  Description of Unknown: LeftRegion for integrase B8656 sequence
gaaaataagtaagttggaggttataaatgattagagttactcaaaatggcgaagacgtaaaaacagaaaacataactctttcagacagcttactaaagataattgcagagataattgacaacaagtaaatatgtgttacaatgtgccgtagaacgtgataaatgcggcacatttatttatattataaggagataaaatatatggaatgtgttgcttatatgagagtatctactgaaaaacaggctgttgagggcaatgga

SEQ ID NO: 21656 - DNA, 260 bp, Unknown
  Description of Unknown: LeftRegion for integrase B8657 sequence
tcaaaaatcagcagattggagggggaatcatggtgattgtgacacagaatggcaaggaaatcaaggcaggtgaaatcaaattaccggacaagacaaaagaactgattgcagcaataattgacaatcagtaagcataagagtaaaatgtgccgtaacgcgataagtacggcacattctttttaataagaggaggttaaacaatggaatgtgttgcgtacatgagagtatcaacggagaagcaagtagaagaaggtaacgga

SEQ ID NO: 21657 - DNA, 260 bp, Unknown; identical to SEQ ID NO: 21497
  Description of Unknown: LeftRegion for integrase B8658 sequence

SEQ ID NO: 21658 - DNA, 260 bp, Unknown
  Description of Unknown: LeftRegion for integrase B8659 sequence
agtctttttgatttatttaaataacgcaagagcccctgtgcagcaaacacaggggcccagccttaccaagggtgtcacggttccccagataagaaatgttgagtacaagacatagtatatcatctttccgggcaccgggcaaccataggtgtaattttacgtcaaccgaagagtatagttaaatatgaggagagatgaatatgattaaaggcgcatgttatgtccgcgtatccacggacaatcagttagaaaactacagc

SEQ ID NO: 21659 - DNA, 260 bp, Unknown; identical to SEQ ID NO: 21497
  Description of Unknown: LeftRegion for integrase B8660 sequence

SEQ ID NO: 21660 - DNA, 260 bp, Unknown; identical to SEQ ID NO: 21606
  Description of Unknown: LeftRegion for integrase B8661 sequence

SEQ ID NO: 21661 - DNA, 260 bp, Unknown
  Description of Unknown: LeftRegion for integrase B8662 sequence
gaaaattaagaaattggaggcgttttgatggttaaagtaacgatgggtggtcaagaggtcaacatagaagatattgaactttcagaggatgttctggatgtgattgctgagtgttgtaattgaccaaaatattaaatgatgatagaatgtgccgtatgtatgataaacacggcacattcttctataaagggggtaattgagtgaaagaatgtgttgcgtatataagagtttctacggaaaagcaagccgaagaaggacac

SEQ ID NO: 21662 - DNA, 260 bp, Unknown
  Description of Unknown: LeftRegion for integrase B8663 sequence
aaacagactggaggtaaaaaatggttagagttacacaagacggcaaagatgttgatattgaagatgtttctctgccaaaagaaattattgagattatagcatccatatgctgttgacaccattgtaaaaaggctttagaatgtgtcgtatgtatgataaatacggcacattctttatatattgaaaggagtgtagagaaaatggaatgtgtcgcatatatgcgtgtttccacggaaaaacaggcagaagagggcaacggt

SEQ ID NO: 21663 - DNA, 260 bp, Unknown
  Description of Unknown: LeftRegion for integrase B8664 sequence
cggagtatcggaggaaaagcagatgaatgttgtggttacacaaaacggtaagaaagtgaatattgctgatattgttctgtctgatgatgtggtgagaacaatagctagcatgattggttgacaagtaaataaatgacaagtagaatgtgccgtagaatgtagtgtatatgcggcacattttacgtaggaggataatagaaatggaatgtgtggcatatataagagtgtcaacagaaagacaggttgaagagggctacggc

SEQ ID NO: 21664 - DNA, 260 bp, Unknown
  Description of Unknown: LeftRegion for integrase B8665 sequence
aagtctaaaatcagcagattggaggggtaatcatggtgattgtgacacagaatggcagggagattaagacaggcgaaatcaaattgccggacaagaccaaagaactgattgcatcaataattgacaatcagtaaatatgagcgtaaaatgtgccgtaacgcgataagtacggcacattctttttaagaggaggttaaacaatggaatgtgttgcgtacatgagagtatcaacggagaagcaagccgaagaaggtaacgga

SEQ ID NO: 21665 - DNA, 260 bp, Unknown
  Description of Unknown: LeftRegion for integrase B8666 sequence
agtctttttgatttatttaaataacgcaagaacccctgtgcagaaaacacaggggcccagccttaccaagggtgtcacggttcccatgataagaaatgttgagtacaagacatagtatatcatctttccggacaccgggcaaccatatgtgtaattttacgtcaaccgaagagtatagttaagtatgaggagagatgaatatgattaaaggcgcatgttatgtccgtgtatctacggacaatcagttagaaaactatagt

SEQ ID NO: 21666 - DNA, 260 bp, Unknown
  Description of Unknown: LeftRegion for integrase B8667 sequence
cagagtatcggaggaaaaacagatgaatgttgtggttacgcaaagcggtaaaaaagtgaatattgctgatattgttctgcccaatgatgtggcgagaacaatagctagcatgattggttgacaagtagataaatgacaagtagaatgtgccgtagaatgtagtgtatatgcggcacattttacgtaggaggacaataaaaatggaatgtgtggcatatataagagtgtcaacagaaagacaggttgaagagggttacggc

SEQ ID NO: 21667 - DNA, 260 bp, Unknown; identical to SEQ ID NO: 21588
  Description of Unknown: LeftRegion for integrase B8668 sequence

SEQ ID NO: 21668 - DNA, 260 bp, Unknown
  Description of Unknown: LeftRegion for integrase B8669 sequence
aaaataagtaagttggaggttatacaatgattagggttactcaaaatggcgaagacgtaaaaacagaaaacataactctttcagacagcttactaaagataattgcagagataattgacaacaagtaaatatgtgttacaatgtgccgtagaacgtgataaatgcggcacatttatttatattataaggagataaaatatatggaatgtgttgcttatatgagagtatctactgaaaaacaggctgttgagggcaatgga

SEQ ID NO: 21669 - DNA, 260 bp, Unknown
  Description of Unknown: LeftRegion for integrase B8670 sequence
cagagtatcggaggaaaagcagatgaatgttgtggttacacaaagcggtaaaaaagtgaatattgctgatattgttctgcctgatgatgtggcgagaacaatagctagcatgattggttgacaagtaaataaatgacaagtagaatgtgccgtagaatgtagtgtatatgcggcacattttacgtaggaggacaatagaaatggaatgtgtggcatatataagagtgtcaacagaaagacaggttgaagagggctacggc

SEQ ID NO: 21670 - DNA, 260 bp, Unknown; identical to SEQ ID NO: 21564
  Description of Unknown: LeftRegion for integrase B8671 sequence

SEQ ID NO: 21671 - DNA, 260 bp, Unknown; identical to SEQ ID NO: 21523
  Description of Unknown: LeftRegion for integrase B8672 sequence

SEQ ID NO: 21672 - DNA, 260 bp, Unknown; identical to SEQ ID NO: 21637
  Description of Unknown: LeftRegion for integrase B8673 sequence

SEQ ID NO: 21673 - DNA, 260 bp, Unknown; identical to SEQ ID NO: 21532
  Description of Unknown: LeftRegion for integrase B8674 sequence

SEQ ID NO: 21674 - DNA, 260 bp, Unknown
  Description of Unknown: LeftRegion for integrase B8675 sequence
cagagtatcggaggaaaaacagatgaatgttgtggttacgcaaagcggtaaaaaagtgaatattgctgatattgttttgcctgatgatgtggcaagaacaatagctagcatgattggttgacaagtaaataaatgacaagtagaatgtgccgtagaatgtagtgtatatgcggcacattttacgtaggagggcgataaaaatggaatgtgtggcatatataagagtgtcaacagaaagacaggttgaagagggctacggc

SEQ ID NO: 21675 - DNA, 260 bp, Unknown
  Description of Unknown: LeftRegion for integrase B8676 sequence
cggtaaatggctaacagggtaacaagatcaaaggtttgcagtagactggatatcttttttataagctcctttctatccatgatgcacctccttaaaaaaaagatgtttccatgctaacacaaaggggaaagcgatataatactttttttaacacttttgatgtgactaatggtgtaaacatggcacaaggaaggacagaaatggaagaacagaaaaggttagataaggaagggcagaaaagggcggctatatatgtgcgt

SEQ ID NO: 21676 - DNA, 260 bp, Unknown
  Description of Unknown: LeftRegion for integrase B8677 sequence
gcatttttatattgcacatacgttctatctatcgtataatcattttgtaaataaaaaaatccggtactggcaataccggattcgcgacttatcaaccaggatgattgatatataaacacaaacaaattatatcatgcatcctgttatttgtatagggtgtattttttataccctttttttcaaaagaaaggtggatgtttatgaaaagaaaaatcagatgtgcaatctatgatcgcgtgtctcatgaactgcaggtagaa

SEQ ID NO: 21677 - DNA, 260 bp, Unknown
  Description of Unknown: LeftRegion for integrase B8678 sequence
ttaaaaagaaaataagtaagttggaggatatacaatgattagggttactcaaaatcgtgaagacgtaaaaacagaaaacataactctttcagacagcttactaaagataattgcagagataattgacaacaagtaaatatgtgttacaatgtgccgtataacgtgataaatgcggcacatttttataaggagtaaaatatatggaatgtgttgcttatatgagagtatctactgaaaagcaggctgttgagggcaatgga

SEQ ID NO: 21678 - DNA, 260 bp, Unknown; identical to SEQ ID NO: 21545
  Description of Unknown: LeftRegion for integrase B8679 sequence

SEQ ID NO: 21679 - DNA, 260 bp, Unknown
  Description of Unknown: LeftRegion for integrase B8680 sequence
caaccctgcttcaaaggaacgccttacggatattctgcaaagactgatagaccgtgaatgtgaagaaatgctcggtgaatccggacaagaacctgagaagtaggctgtgtaatattggcatttcggcgcattgccattgacggtatattgcgctataatgataacatagctcgctttatctgtcggaaaggaaggttaatatgacagacaagataacagcgttgtattgtcgtctttcgcaggacgatatgttacagggt

SEQ ID NO: 21680 - DNA, 260 bp, Unknown; identical to SEQ ID NO: 21526
  Description of Unknown: LeftRegion for integrase B8681 sequence

SEQ ID NO: 21681 - DNA, 260 bp, Unknown
  Description of Unknown: LeftRegion for integrase B8682 sequence
gtcaaaaatcagcagattggaggggtaatcatggtgattgtgacacagaatggcaagaagattaagacaggcgaaatcaaattgccggacaagaccaaagaactgattgcatcaataattgacaatcagtaaatatgagcgtaaaatgtgccgtaacgcgataagtacggcacattcttttttaaagaggaggttaaacgatggaatgtgttgcgtacatgagagtatcaacggagaagcaagccgaagaaggtaacgga

SEQ ID NO: 21682 - DNA, 260 bp, Unknown; identical to SEQ ID NO: 21654
  Description of Unknown: LeftRegion for integrase B8683 sequence

SEQ ID NO: 21683 - DNA, 260 bp, Unknown
  Description of Unknown: LeftRegion for integrase B8684 sequence
tcaaaaatcagcagattggaggggtaatcatggtggttgtgacacagaatggcaaggaaatcaaggtaggtgaaatcaaattgccggacaagacaaaagagctgattgcatcaataattgacaatcagtaagcatgggagtagaatgtgccgtaacgcgataagtacggcacattctttttagtaagaggaggttaaacgatggaatgtgttgtgtacatgagagtatcaacagagaagcaagtcgaagaaggcaacgga

SEQ ID NO: 21684 - DNA, 260 bp, Unknown
  Description of Unknown: LeftRegion for integrase B8685 sequence
aagcaaaaaattagtaagttggaggttttaaaatgattaaagttactcaaaacggagtagatgtgaatatagaaaatataactattccggacagcttacaaaagataattgccgaagtgattgacaataaataaatatgtgttaaaatgtgccgtataacgtgataaatgcggcacattttacataaaggaggattgacaatggaatgtgtcgcttatatgagagtatcgacggaaaaacaggctgttgagggtaacgga

SEQ ID NO: 21685 - DNA, 260 bp, Unknown
  Description of Unknown: LeftRegion for integrase B8686 sequence
agaaaataagtaagttggaggttataaatgattagagttactcaaaatggcgaagacgtaaaaacagaaaacataactctttcagacagcttactaaagataattgcagagataattgacaacaagtaaatatgtgttacaatgtgccgtagaacgtgataagtgcggcacatttatttatattataaggagataaatatatggaatgtgttgcttatatgagagtatctactgaaaaacaggctgttgagggtaatgga

SEQ ID NO: 21686 - DNA, 260 bp, Unknown; identical to SEQ ID NO: 21509
  Description of Unknown: LeftRegion for integrase B8687 sequence

SEQ ID NO: 21687 - DNA, 260 bp, Unknown
  Description of Unknown: LeftRegion for integrase B8688 sequence
atagaatcggaggtttgtctatatgacagttgtgcttacgcagaatgggaaagaaattaatccagaagatgtagttttgccgtcagaagtgctaaagctgattgcagaactgattaattgacgaaaaattgataatagtgtagaatgcgtcatgtgtagtgaatatggcgcattcttttatatctgatggaggaacgagaatggaatgtgtcgcatatatgcgtgtttccacggagaaacaggcagaagagggaaacgga

SEQ ID NO: 21688 - DNA, 260 bp, Unknown
  Description of Unknown: LeftRegion for integrase B8689 sequence
aaacagactggaggtaaaaaatggttagagttacacaagccggcaaagatgttgatattgaagatgtttctctgccaaaagaaattattgagattatagcatccatatgctgttgacaccattgtaaaaaggctttagaatgtgtcgtatgtatgataaatacggcacattctttatatattgaaaggagtgtaaagaaaatggaatgtgtcgcatatatgcgtgtttccacggaaaaacaggcagaagaaggcaacggt

SEQ ID NO: 21689 - DNA, 260 bp, Unknown
  Description of Unknown: LeftRegion for integrase B8690 sequence
acaaggattatttgaaaaatataaagagatgtatgaaaaagaataacataaattattttcccaatttcaatgaaaatggaaaaggaggttgaagatgataataaagaatgataaattaactgaaaaacaaaaagagatcaatgctatgagattgatagaagtattaaaagccaaagttgaaaatgagtgaggttgtataaatgaaaaaaagggctgttatttatattagagaatccacaaaatttcaagaccctgagagt

SEQ ID NO: 21690 - DNA, 260 bp, Unknown
  Description of Unknown: LeftRegion for integrase B8691 sequence
ataacaccaccgggaaaatattaaatgggaaaaatatgaatgcagaatattatgctggagttgacgaaggcggaaacattgaaattgttttcaatttattttcagatgcgagtttaactttccatgcaaaaatttaaaagagagcctccgggcttttctttttaccgaaaaaagaacgtatgtgcgaaaggagaacggaaatgaaggcagctatttatatacgcgtatctactcaagaacaaatagagaattactctata

SEQ ID NO: 21691 - DNA, 260 bp, Unknown
  Description of Unknown: LeftRegion for integrase B8692 sequence
tacgccgcattcttcggcaagccacttttgggttactccaagttcggcccggcgttctctaattcgattttttaccatagggcacctcccagtctattttgctggtagagtacccaaaaaagcaaaaaaacacccccggcgctaccaacacctaggtttgacgaatccatatcacttaccagaggtaggaggaaaaagcaatgccaaagcggacgcgaattgaagataccggtattcagcgcgcggcactgtacatccgt

SEQ ID NO: 21692 - DNA, 260 bp, Unknown
  Description of Unknown: LeftRegion for integrase B8693 sequence
taactttaattttaatttttaaattattttggttggcatataattcatacaataactcatagaatttagtaatattcacattatcaatcctttcttatcacattgtgaaagataaatgcttcaaatagtatatttaataactacattatgaaacaaaatataatattattacaactagaatttaaaggggatattggaaaatgaaagcaaaaagaatagcaggatatgttagggtttcacacgatgaacaaaagaaatat

SEQ ID NO: 21693 - DNA, 260 bp, Unknown
  Description of Unknown: LeftRegion for integrase B8694 sequence
ctttgccctgctgtttatttttgccctggcgctggtgtatggcattaccctggacctgttaaaccccagcatgggccttttcagaggataaaaagaggagccgcctccgataccgaaataccggaggcggcgatcaggaagcggatgctgatgcaaagcaatccgctcctccattatagcaaagcaggaggaaaacgcaagtgaaaatcccagaagaaaaaatgcgggccgcattatatatccgggtaagcacggaagaa

SEQ ID NO: 21694 - DNA, 260 bp, Unknown
  Description of Unknown: LeftRegion for integrase B8695 sequence
gaagtgaaagtttatttggttaatattttacagatttaaaggtattaaaattgaattttcccattttcattgaaattgggaaaggaggttgaagatgataataaagaatgataaattaactgaaaaacaaaaagagatcaatgctatgagattgatagaagtattaaaagccaaagttgaaaatgagtgaggttgtataaatgaaaaaaagggctgttatttatattagagaatccacaaaatttcaagaccctgagagt

SEQ ID NO: 21695 - DNA, 260 bp, Unknown
  Description of Unknown: LeftRegion for integrase B8696 sequence
tgtctaaagtgttattggtcataaagttatttacaaatttaaaattgaactggtttagaaccttgtttcctttagcactcacactaattttaatagggatacatcagttaatttcgtaggaggtagggaagatgaagaatgatgaaaaacgtaaacaagaaactataaataaaatagtggaaatattactggaggaataaatggaaagatgtgttatatacgctcgtgtttccactcatgaacaagctgaaaacgacagt

SEQ ID NO: 21696 - DNA, 260 bp, Unknown
  Description of Unknown: LeftRegion for integrase B8697 sequence
ccttgatgtaactgaaaagtttctaaatgaagctttagaatgttataaaagtaaatatggtttttcagctacactagataattatgtgatattttttgagccaagatttagtattatgaatgcaaattttttgtaacaattcatagtatatttaagagccgttcagctcctcttaaatatacaataagggggaatgtaaaatgttaagagtagcactttatatacgtgttagtacagaagaacaagctttaaatggagat

SEQ ID NO: 21697 - DNA, 260 bp, Unknown
  Description of Unknown: LeftRegion for integrase B8698 sequence
accgaaaaggagtgatgcggatggtaagaatctttgtgaacggcaaacaggtgacaaaagaagaactttccaaatatgaaatccataacaaggcggtaaaaaggattctttcagaaaagttgacaaaaaataagtgatattttagaattgaccttgatagaatcttggtcaattcttttttaattgaaaggagaattgacatgaaaaaattaaatgtaggttatatgagagtgtctacagaagcacagaccgaaaagtat

SEQ ID NO: 21698 - DNA, 260 bp, Unknown
  Description of Unknown: LeftRegion for integrase B8699 sequence
accgaaaaggagtgatgcggatggtaagaatatatgtgaacggcaaacaggtgacaaaagaagaactttcgaattatgaaatccataacaaggcggtaaaaaggattctttcagaaaagttgacaaaaaataagtgatattttagaattgaccttgatagaatcttggtcaattcttttttaattgaaaggagaattgacatgaaaaaattaaatgtaggttatatgagagtgtctacagaagcacagaccgaaaagtat

SEQ ID NO: 21699 - DNA, 260 bp, Unknown
  Description of Unknown: LeftRegion for integrase B8700 sequence
accgaaaaggagtgatgcggatggtaagagtttttgtgaacggtaaacaggtgacaaaagaagaactttccaaatatgaaatccataacaatgcggtaaaaaggattctttcagaaaagttgacaaaaaataagtgatattttagaattgaccttgatagaatcttggtcaattcttttttaattgaaaggagaattgacatgaaaaaattaaatgtaggttatatgagagtgtctacagaagcacagaccgaaaagtat

SEQ ID NO: 21700 - DNA, 260 bp, Unknown
  Description of Unknown: LeftRegion for integrase B8701 sequence
accgaaaaggagtgatgcggatggtaagagtttttgtgaacggtaaacaggtgacaaaagaagaactttccaaatatgaaatccataacaaggcggtaaaaaggattctttcagaaaagttgacaaaaaataagtgatattttagaattgaccttgatagaatcttggtcaattcttttttaattgaaaggagaattgacatgaaaaaattaaatgtaggttatatgagagtgtctacagaagcacagaccgaaaagtac

SEQ ID NO: 21701 - DNA, 260 bp, Unknown
  Description of Unknown: LeftRegion for integrase B8702 sequence
accgaaaaggagtgatgcggatggtaagaatctttgtgaacggcaaacaggtgacaaaagaagaactttctaaatatgaaatccataacaaggcggtaaaaaggattctttcagaaaagttgacaaaaaataagtgatattttagaattgaccttgatagaatcttggtcaattcttttttaattgaaaggagaattgacatgaaaaaattaaatgtaggttatatgagagtgtctacagaagcacagaccgaaaagtat

SEQ ID NO: 21702 - DNA, 260 bp, Unknown
  Description of Unknown: LeftRegion for integrase B8703 sequence
cgaaaaggagtgatgcggatggtaagaatctttgtgaacggcaaacaggtgacaaaagaagaactttcgaattatgaaatccatagcaaggcggtaaaaaggattctttcagaaaagttgacaaaaaataagtgatattttagaattgaccttgatagaatcttggtcaattctttttttaaattgaaaggagaattgacatgaaaaaattaaatgtaggttatatgagagtgtctacagaagcacagaccgaaaagtat

SEQ ID NO: 21703 - DNA, 260 bp, Unknown
  Description of Unknown: LeftRegion for integrase B8704 sequence
accgaaaaggagtgatgcggatggtaagaatctttgtgaacggcaaacaggtgacaaaagaagaactttcgaattatgaaatccataacaaggcggtaaaaaggattctttcagaaaagttgacaaaaaataagtgatattttagaattgaccttgatagaatcttggtcaattcttttttaattgaaaggagaattgacatgaaaaaattaaatgtaggttatatgagagtgtctacagaagcacagaccgaaaagtat

SEQ ID NO: 21704 - DNA, 260 bp, Unknown
  Description of Unknown: LeftRegion for integrase B8705 sequence
ccgaaaaggagtgatgcggatggtaagaatctttgtgaacggcaaacaggtgacaaaagaagaactttctaaatatgaaatccataacaaggcggtaaaaaggattctttcagaaaagttgacaaaaaataagtgatattttagaattgaccttgatagaatcttggtcaattctttttttaattgaaaggagaattgacatgaaaaaattaaatgtaggttatatgagagtgtctacagaagcacagaccgaaaagtat

SEQ ID NO: 21705 - DNA, 260 bp, Unknown
  Description of Unknown: LeftRegion for integrase B8706 sequence
gaaaaggagtgatgcggatggtaagaatctttgtgaacggcaaacaggtgacaaaagaagaactttcgaattatgaaatccataacaaggcggtaaaaaggattctttcagaaaagttgacaaaaaataagtgatattttagaattgaccttgatagaatcttggtcaattcttttttttaaattgaaaggagaattgacatgaaaaaattaaatgtaggttatatgagagtgtctacagaagcacagaccgaaaagtat

SEQ ID NO: 21706 - DNA, 260 bp, Unknown
  Description of Unknown: LeftRegion for integrase B8707 sequence
cgaaaaggagtgatgcggatggtaagaatctttgtgaacggaaaacaggtgacaaaagaagaactttcgaattatgaaatccatagcaaagcggtaaaaaggattctttcagaaaagttgacaaaaaataagtgatattttagaattgaccttgatagaatcttggtcaattcttttttttgattgaaaggagaattgacatgaaaaaattaaatgtaggttatatgagagtgtctacagaagcacagaccgaaaagtat

SEQ ID NO: 21707 - DNA, 260 bp, Unknown
  Description of Unknown: LeftRegion for integrase B8708 sequence
accgaaaaggagtgatgcggatggtaagaatctatgtgaacggaaaacaggtgacaaaagaagaactttccaaatatgaaatccataacaaggcggtaaaaaggattctttcagaaaagttgacaaaaaataagtgatattttagaattgaccttgatagaatcttggtcaattcttttttaattgaaaggagaattgacatgaaaaaattaaatgtaggttatatgagagtgtctacagaagcacagaccgaaaagtat

SEQ ID NO: 21708 - DNA, 260 bp, Unknown
  Description of Unknown: LeftRegion for integrase B8709 sequence
accgaaaaggagtgatgcggatggtaagaatttttgtgaacggcaaacaggtgacaaaagaagaactttcgaattatgaaatccataacaaggcggtaaaaaggattctttcagaaaagttgacaaaaaataagtgatattttagaattgaccttgatagaatcttggtcaattcttttttaattgaaaggagaattgacatgaaaaaattaaatgtaggttatatgagagtgtctacagaagcacagaccgaaaagtat

SEQ ID NO: 21709 - DNA, 260 bp, Unknown
  Description of Unknown: LeftRegion for integrase B8710 sequence
ccgaaaaggagtgatgcggatggtaagaatctttgtgaacggcaaacaggtgacaaaagaagaactttcgaattatgaaatccataacaatgcggtaaaaaggattctttcagaaaagttgacaaaaaataagtgatattttagaattgaccttgatagaatcttggtcaattcttttttttattgaaaggagaattgacatgaaaaaattaaatgtaggttatatgagagtgtctacagaagcacagaccgaaaagtat

SEQ ID NO: 21710 - DNA, 260 bp, Unknown
  Description of Unknown: LeftRegion for integrase B8711 sequence
aaaataaagaaaaaaattagaaaggtaggtgcatttatgttgatccaaaatggagaggaggttgagccggaaaaagttgagctccctaaaaacatagttgatatgataatgtctataattgacaacaagtaattaaaaaggtaaaatgtgtcgtaccacgataagtgcggcacatttttatataaaaaggaggataataaatgaaatgcgtcgcatatataagagtgtcaactgacaaacaggtagaggaaggctttggg

SEQ ID NO: 21711 - DNA, 260 bp, Unknown; identical to SEQ ID NO: 21699
  Description of Unknown: LeftRegion for integrase B8712 sequence

SEQ ID NO: 21712 - DNA, 260 bp, Unknown
  Description of Unknown: LeftRegion for integrase B8713 sequence
accgaaaaggagtgatgcggatggtaagaatctatgtgaacggaaaacaggtgacaaaagaagaactttccaaatatgaaatccataacaaggcggtaaaaaggattctttcagaaaagttgacaaaaaataagtgatattttagaattgaccttgatagaatcttggtcaattcttttttaattgaaaggagaattgacatgaaaaaattaaatgtaggttatatgagagtgtctacagaagcacaggccgaaaagtat

SEQ ID NO: 21713 - DNA, 260 bp, Unknown
  Description of Unknown: LeftRegion for integrase B8714 sequence
accgaaaaggagtgatgcggatggtaagagtttttgtgaacggtaaacaggtgacaaaagaagaactttccaaatatgaaatccataacaaggcggtaaaaaggattctttcagaaaagttgacaaaaaataagtgatattttagaattgaccttgatagaatcttggtcaattcttttttaattgaaaggagaattgacatgaaaaaattaaatgtaggttatatgagagtgtctacagaagcacagaccgaaaagtat

SEQ ID NO: 21714 - DNA, 260 bp, Unknown
  Description of Unknown: LeftRegion for integrase B8715 sequence
ccgaaaaggagtgatgcggatggtaagaatctatgtgaacggaaaacaggtgacaaaagaagaactttcgaattatgaaatccataacaagacggtaaaaaggattctttcagaaaagttgacaaaaaataagtgatattttagaattgaccttgatagaatcttggtcaattcttttttaaattgaaaggagaattgacatgaaaaaattaaatgtaggttatatgagagtgtctacagaagcacagaccgaaaagtat

SEQ ID NO: 21715 - DNA, 260 bp, Unknown
  Description of Unknown: LeftRegion for integrase B8716 sequence
accgaaaaggagtgatgcggatggtaagaatctttgtgaacggcaaacaggtgacaaaagaagaactttcgaattatgaaatccatagcaaagcggtaaaaaggattctttcagagaagttgacaaaacataagtgatattttagaattgaccttgatagaatcttggtcaattctttttttgttgaaaggagaattgacatgaaaaaattaaatgtaggttatatgagagtgtctacagaagcacagaccgaaaagtat

SEQ ID NO: 21716 - DNA, 260 bp, Unknown
  Description of Unknown: LeftRegion for integrase B8717 sequence
aaaagaaaaaattagtagattggagtggtttgatggttaaaataacgaaaaacggtaaagaagttgagccggaaaaactgattatcccagaaaatgtaaagaaggtaatcgccgaaataattgacaagtagcaactatccgtatacaatgtgccgtaacacgataaatgcggcacattgtgtactaaggagggtttatagatgaaatgtgtcgcttatattagagtttcaacagaaaagcaggcagaggaagggtatggc

SEQ ID NO: 21717 - DNA, 260 bp, Unknown; identical to SEQ ID NO: 21698
  Description of Unknown: LeftRegion for integrase B8718 sequence

SEQ ID NO: 21718 - DNA, 260 bp, Unknown
  Description of Unknown: LeftRegion for integrase B8719 sequence
ccgaaaaggagtgatgcggatggtaagaatctatgtgaacggtaaacaggtgacaaaagaagaactttcgaattatgaaatccataacaaggcggtaaaaaggattctttcagaaaagttgacaaaaaataagtgatattttagaattgaccttgatagaatcttggtcaattcttttttaaattgaaaggagaattgacatgaaaaaattaaatgtaggttatatgagagtgtctacagaagcacagaccgaaaagtat

SEQ ID NO: 21719 - DNA, 260 bp, Unknown; identical to SEQ ID NO: 21712
  Description of Unknown: LeftRegion for integrase B8720 sequence

SEQ ID NO: 21720 - DNA, 260 bp, Unknown
  Description of Unknown: LeftRegion for integrase B8721 sequence
ccgaaaaggagtgatgcggatggtaagagtttttgtgaacggtaaacaggtgacaaaagaagaactttccaaatatgaaatccataacaaggcggtaaaaaggattctttcagaaaagttgacaaaaaataagtgatattttagaattgaccttgatagaatcttggtcaattctttttttaattgaaaggagaattgacatgaaaaaattaaatgtaggttatatgagagtgtctacagaagcacagaccgaaaagtat

SEQ ID NO: 21721 - DNA, 260 bp, Unknown
  Description of Unknown: LeftRegion for integrase B8722 sequence
gaaaaggagtgatgcggatggtaagaatctatgtgaacggcaaacaggtgacaaaagaagaactttcgaattatgaaatccataacaaggcggtaaaaaggattctttcagaaaagttgacaaaaaataagtgatattttagaattgaccttgatagaatcttggtcaattctttttttaaaattgaaaggagaattgacatgaaaaaattaaatgtaggttatatgagagtgtctacagaagcacagaccgaaaagtat

SEQ ID NO: 21722 - DNA, 260 bp, Unknown; identical to SEQ ID NO: 21703
  Description of Unknown: LeftRegion for integrase B8723 sequence

SEQ ID NO: 21723 - DNA, 260 bp, Unknown
  Description of Unknown: LeftRegion for integrase B8724 sequence
tacgagaaggagtgatgcggatggtaagaatctttgtgaacggcaaacaggtgacaaaagaagaactttcgaattatgaaatccataacaaggcggtaaaaaggattctttcagaaaagttgacaaaaaataagtgatattttagaattgaccttgatagaatcttggtcaattcttttttaattgaaaggagaattgacatgaaaaaattaaatgtaggttatatgagagtgtctacagaagcacagaccgaaaagtat

SEQ ID NO: 21724 - DNA, 260 bp, Unknown
  Description of Unknown: LeftRegion for integrase B8725 sequence
cgaaaaggagtgatgcggatggtaagaatctttgtgaacggaaaacaggtgacaaaagaagaactttcgaattatgaaatccataacaagtcggtaaaaaggattctttcagaaaagttgacaaaaaataagtgatattttagaattgaccttgatagaatcttggtcaattcttttttttaattgaaaggagaattgacatgaaaaaattaaatgtaggttatatgagagtgtctacagaagcacagaccgaaaagtat

SEQ ID NO: 21725 - DNA, 260 bp, Unknown
  Description of Unknown: LeftRegion for integrase B8726 sequence
accgaaaaggagtgatgcggatggtaagaatctttgtgaacggtaaacaggtgacaaaagaagaactttccaaatatgaaatccataacaaggcggtaaaaaggattctttcagaaaagttgacaaaaaataagtgatattttagaattgaccttgatagaatcttggtcaattcttttttaattgaaaggagaattgacatgaaaaaattaaatgtaggttatatgagagtgtctacagaagcacagaccgaaaagtat

SEQ ID NO: 21726 - DNA, 260 bp, Unknown
  Description of Unknown: LeftRegion for integrase B8727 sequence
cgaaaaggagtgatgcggatggtaagaatctttgtgaacggcaaacaggtgacaaaagaagaactttcgaattatgaaatccataacaaggcggtaaaaaggattctttcagaaaagttgacaaaaaataagtgatattttagaattgaccttgatagaatcttggtcaattctttttttaaattgaaaggagaattgacatgaaaaaattaaatgtaggttatatgagagtgtctacagaagcacagaccgaaaagtat

SEQ ID NO: 21727 - DNA, 260 bp, Unknown; identical to SEQ ID NO: 21697
  Description of Unknown: LeftRegion for integrase B8728 sequence

SEQ ID NO: 21728 - DNA, 260 bp, Unknown
  Description of Unknown: LeftRegion for integrase B8729 sequence
tagacagcatggataattaactatttgaaacattttgcttaaaaaaaagttcgtatttaatttttaaatgttcttgctctgcatacagtttaaataacatttcatagaacttctcgatattcataatatcgctcctttctgaaaaagttattagtattatgtactttattttctatttgtaaacattggaggttttctttttgaaaaaagttttaaaaataggcggttatgttagagtatcccatgaagaacaaaaaaag

SEQ ID NO: 21729 - DNA, 260 bp, Unknown; identical to SEQ ID NO: 21726
  Description of Unknown: LeftRegion for integrase B8730 sequence

SEQ ID NO: 21730 - DNA, 260 bp, Unknown; identical to SEQ ID NO: 21704
  Description of Unknown: LeftRegion for integrase B8731 sequence

SEQ ID NO: 21731 - DNA, 260 bp, Unknown
  Description of Unknown: LeftRegion for integrase B8732 sequence
aatctcatggaggtaatagatcaagtgaccacaatctatgtaaatggtaagagggttacgaaagatgaattaaaaaattacgagatacaaatagaatccgtaaagaagatactggcagataaattgacgaaaagtaaatgaaatgttatgctatggctagagtaaaacctagccattacttatatgggaggatggctaaaatgaaaaagatggacgttgcatatctgagagtatcaacagaaacacagactgaaaaatac

SEQ ID NO: 21732 - DNA, 260 bp, Unknown
  Description of Unknown: LeftRegion for integrase B8733 sequence
accgaaaaggagtgatgcggatggtaagaatctttgtgaacggaaaacaggtgacaaaagaagaactttcgaattatgaaatccatagcaaagcggtaaaaaggattctttcagagaagttgacaaaacataagtgatattttagaattgaccttgatagaatcttggtcaattctttttttgttgaaaggagaattgacatgaaaaaattaaatgtaggttatatgagagtgtctacagaagcacagaccgaaaagtat

SEQ ID NO: 21733 - DNA, 260 bp, Unknown
  Description of Unknown: LeftRegion for integrase B8734 sequence
gtattgactggtggtattggtctattggctggttttgccggaaaaaaaggcaaaaatgaattcttctgcaggaaatgtaacaatacttttttgcataaataaaaaaacacgctcctccgaccaagaaagcgcgtgtttaaaataaggcaatagcttatttagctatgcctattatactaaataataggatgtgattcaacttgcaacgagtagcaatttatatgcgtgtatcgactgatcagcaggcaaaacatggtgac

SEQ ID NO: 21734 - DNA, 260 bp, Unknown
  Description of Unknown: LeftRegion for integrase B8735 sequence
cgaaaaggagtgatgcggatggtaagaatctatgtgaacggcaaacaggtgacaaaagaagaactttccaaatatgaaatccataacaaggcggtaaaaaggattctttcagaaaagttgacaaaaaataagtgatattttagaattgaccttgatagaatcttggtcaattctttttttaaattgaaaggagaattgacatgaaaaaattaaatgtaggttatatgagagtgtctacagaagcacagaccgaaaagtat

SEQ ID NO: 21735 - DNA, 260 bp, Unknown; identical to SEQ ID NO: 21697
  Description of Unknown: LeftRegion for integrase B8736 sequence

SEQ ID NO: 21736 - DNA, 260 bp, Unknown
  Description of Unknown: LeftRegion for integrase B8737 sequence
accgaaaaggagtgatgcggatggtaagagtttttgtgaatggtaaacaggtgacgaaagaagaacttacaaattatgaaattcataacaaagcggtaaaaaggattctttcagagaagttgacaaaacataagtgatattttagaattgaccttgatagaatcttggtcaattcttttttaattgaaaggagaattgacatgaaaaaaataaatgtaggttatatgagagtgtctacagaagcacagaccgaaaagtat

SEQ ID NO: 21737 - DNA, 260 bp, Unknown
  Description of Unknown: LeftRegion for integrase B8738 sequence
accgaaaaggagtgatgcggatggtaagaatctttgtgaacggaaaacaggtgacaaaagaagaactttccaaatatgaaatccataacaaggcggtaaaaaggattctttcagaaaagttgacaaaaaataagtgatattttagaattgaccttgatagaatcttggtcaattcttttttaattgaaaggagaattgacatgaaaaaattaaatgtaggttatatgagagtgtctacagaagcacagaccgaaaagtat

SEQ ID NO: 21738 - DNA, 260 bp, Unknown
  Description of Unknown: LeftRegion for integrase B8739 sequence
taccgaaaaggagtgatgcggatggtaagaatctttgtgaacggaaaacaagtgacaaaagaagaactttcgaattatgaaatccataacaaagcggtaaaaaggattctttcagagaagttgacaaaacataagtgatattttagaattgaccttgatagaatcttggtcaattcttttttattgaaaggagaattgacatgaaaaaaataaatgtaggttatatgagagtgtctacggaagcacagaccgaaaagtat

SEQ ID NO: 21739 - DNA, 260 bp, Unknown; identical to SEQ ID NO: 21707
  Description of Unknown: LeftRegion for integrase B8740 sequence

SEQ ID NO: 21740 - DNA, 260 bp, Unknown
  Description of Unknown: LeftRegion for integrase B8741 sequence
accgaaaaggagtgatgcggatggtaagaatctatgtgaacggcaaacaggtgacaaaagaagaactttcgaattatgaaatccataacaaggcggtaaaaaggattctttcagaaaagttgacaaaaaataagtgatattttagaattgaccttgatagaatcttggtcaattcttttttaattgaaaggagaattgacatgaaaaaattaaatgtaggttatatgagagtgtctacagaagcacagaccgaaaagtat

SEQ ID NO: 21741 - DNA, 260 bp, Unknown
  Description of Unknown: LeftRegion for integrase B8742 sequence
accgaaaaggagtgatgcggatggtaagaatctttgtgaacggcaaacaggtgacaaaagaagaactttcgaattatgaaatccataacaaagcggtaaaaaggattctttcagagaagttgacaaaaaataagtgatattttagaattgaccttgatagaatcttggtcaattcttttttaattgaaaggagaattgacatgaaaaaattaaatgtaggttatatgagagtgtctacagaagcacagaccgaaaagtat

SEQ ID NO: 21742 - DNA, 260 bp, Unknown; identical to SEQ ID NO: 21698
  Description of Unknown: LeftRegion for integrase B8743 sequence

SEQ ID NO: 21743 - DNA, 260 bp, Unknown
  Description of Unknown: LeftRegion for integrase B8744 sequence
accgaaaaggagtgatgcggatggtaagaatctatgtgaacggaaaacaggtgacaaaagaagaactttcgaattatgaaatccataacaagacggtaaaaaggattctttcagaaaagttgacaaaaaataagtgatattttagaattgaccttgatagaatcttggtcaattctttttttattgaaaggagaattgacatgaaaaaattaaatgtaggttatatgagagtgtctacagaagcacagaccgaaaagtat

SEQ ID NO: 21744 - DNA, 260 bp, Unknown; identical to SEQ ID NO: 21732
  Description of Unknown: LeftRegion for integrase B8745 sequence

SEQ ID NO: 21745 - DNA, 260 bp, Unknown
  Description of Unknown: LeftRegion for integrase B8746 sequence
accgaaaaggagtgatgcggatggtaagaatctttgtgaacggcaaacaggtgacaaaagaagaactttccaaatatgaaatccataacaaggcggtaaagaggattctttcagaaaagttgacaaaaaataagtgatattttagaattgaccttgatagaatcttggtcaattcttttttaattgaaaggagaattgacatgaaaaaattaaatgtaggttatatgagagtgtctacagaagcacagactgaaaagtat

SEQ ID NO: 21746 - DNA, 260 bp, Unknown; identical to SEQ ID NO: 21732
  Description of Unknown: LeftRegion for integrase B8747 sequence

SEQ ID NO: 21747 - DNA, 260 bp, Unknown; identical to SEQ ID NO: 21713
  Description of Unknown: LeftRegion for integrase B8748 sequence

SEQ ID NO: 21748 - DNA, 260 bp, Unknown
  Description of Unknown: LeftRegion for integrase B8749 sequence
accgaaaaggagtgatgcggatggtaagaatctatgtgaacggcaaacaggtgacaaaagaagaactttcgaattatgaaatccataacaaggcggtaaaaaggattctttcagaaaagttgacaaaaaataagtgatattttagaattgaccttgatagaatcttggtcaattcttttttgattgaaaggagaattgacatgaaaaaattaaatgtaggttatatgagagtgtctacagaagcacagaccgaaaagtat

SEQ ID NO: 21749 - DNA, 260 bp, Unknown
  Description of Unknown: LeftRegion for integrase B8750 sequence
accgaaaaggagtgatgcggatggtaagaatctttgtgaacggcaaacaggtgacaaaagaagaactttctaaatatgaaatccataacaaggcggtaaaaaggattctttcagaaaagttgacaaaaaataagtgatattttagaattgaccttgatagaatcttggtcaattcttttttgattgaaaggagaattgacatgaaaaaattaaatgtaggttatatgagagtgtctacagaagcacagaccgaaaagtat

SEQ ID NO: 21750 - DNA, 260 bp, Unknown
  Description of Unknown: LeftRegion for integrase B8751 sequence
ccgaaaaggagtgatgcggatggtaagaatctttgtgaacggcaaacaggtgacaaaagaagaactttcgaattatgaaatccataacaaggcggtaaaaaggattctttcagaaaagttgacaaaaaataagtgatattttagaattgaccttgatagaatcttggtcaattctttttttaattgaaaggagaattgacatgaaaaaattaaatgtaggttatatgagagtgtctacagaagcacagaccgaaaagtat

SEQ ID NO: 21751 - DNA, 260 bp, Unknown
  Description of Unknown: LeftRegion for integrase B8752 sequence
aaacaatcgatatcttccttactatgtcctgtttttttacaggacatagtatataaataaaaaacaccctagcgccaactaggatgtttaaaaaagtgatacgccaatatcactaaaaagtaaaaacacaccgaatgcctttttacgtactcaattatagcatttttgtacgtttaaggcaaaataaaggagtcttaaatatgaaacaaaaagcaagaatatatgcacgtgtttctagagatgaacaagtcaaatatggt

SEQ ID NO: 21752 - DNA, 260 bp, Unknown; identical to SEQ ID NO: 21750
  Description of Unknown: LeftRegion for integrase B8753 sequence

SEQ ID NO: 21753 - DNA, 260 bp, Unknown; identical to SEQ ID NO: 21704
  Description of Unknown: LeftRegion for integrase B8754 sequence

SEQ ID NO: 21754 - DNA, 260 bp, Unknown
  Description of Unknown: LeftRegion for integrase B8755 sequence
accgaaaaggagtgatgcggatggtaagaatctttgtgaacggcaaacaagtgacaaaagaagaactttcgaattatgaaatccataacaaagcggtaaaaaggattctttcagaaaagttgacaaaaaataagtgatattttagaattgaccttgatagaatcttggtcaattcttttttaattgaaaggagaattgacatgaaaaaaataaatgtaggttatatgagagtgtctacagaagcacagaccgaaaagtat

SEQ ID NO: 21755 - DNA, 260 bp, Unknown
  Description of Unknown: LeftRegion for integrase B8756 sequence
gaaaaggagtgatgcggatggtaagaatctatgtgaacggtaaacaggtgacaaaagaagaactttcgaattatgaaatccatagcaaggcggtaaaaaggattctttcagaaaagttgacaaaaaataagtgatattttagaattgaccttgatagaatcttggtcaattcttttttttaaattgaaaggagaattgacatgaaaaaaataaatgtaggttatatgagagtgtctacagaagcacagaccgaaaagtat

SEQ ID NO: 21756 - DNA, 260 bp, Unknown
  Description of Unknown: LeftRegion for integrase B8757 sequence
accgaaaaggagtgatgcggatggtaagaatctttgtgaacggaaaacaggtgacaaaagaagaactttcgaattatgaaatccataacaaggcggtaaaaaggattctttcagaaaagttgacaaaaaataagtgatattttagaattgaccttgatagaatcttggtcaattcttttttaattgaaaggagaattgacatgaaaaaattaaatgtaggttatatgagagtgtctacagaagcacagaccgaaaagtat

SEQ ID NO: 21757 - DNA, 260 bp, Unknown
  Description of Unknown: LeftRegion for integrase B8758 sequence
tctatggggtgcagtgttatgtaaaatcagatgagcaaaaacagaaagtcatggacatgaaaatagatgaacattacactatccgagtaaaaattaaagatgtcggagaagttatgggatattccgctgatataattgaattcgtagactaaagattaagccacttttatagtggctttttctatcagaaaggaacagcaatgattaactgcgcaatctacccacgtaaatccaaagccgtggacaactccgacagcatg

SEQ ID NO: 21758 - DNA, 260 bp, Unknown
  Description of Unknown: LeftRegion for integrase B8759 sequence
cgattttgacaaagcaactgaaaaatatctataaataaaatctgccccggtgctaccaacaccggagcagatcaggaactacatcgggaaatccgatacagtcacctcgcaagtgaaattgtatcatttttcccggtgaaatacaagcaccgggcatttttatgccctgctgccataaaatgtatgaggaggatgatataatgatccgttgtgccatttatgatcgtgtgtctaccgacctgcaggtggaaaagggctta

SEQ ID NO: 21759 - DNA, 260 bp, Unknown
  Description of Unknown: LeftRegion for integrase B8760 sequence
tctatggggtgcagtgttatgtaaaatcagatgagcaaaaacagaaagtcatggacatgaaaaaagatgaacattacactatccgagtaaaaattaaagatgtcggagaagttatgggatattccgctgatataattgaattcgtagactaaagattaagccacttttatagtggctttttctgtcagaaaggaacagtaatgattaactgcgcaatctacccacgtaaatccaaagccgtggacaactccgacagcatg

SEQ ID NO: 21760 - DNA, 260 bp, Unknown
  Description of Unknown: LeftRegion for integrase B8761 sequence
tttacggtgtacagtgttatgtaaaatcagatgagcaaaagcagaaagtcatggacatgaaaatagatgagcattacactatccgagtaaaaattaaagatgtcggagaagttatgggatattccgctgatataattgaattcgtagactaaagattaagccacttttatagtggctttttctgtcagaaaggaacagtaatgattaactgtgcaatctacccacgtaaatccaaagccgtggacaactccgacagcatg

SEQ ID NO: 21761 - DNA, 260 bp, Unknown
  Description of Unknown: LeftRegion for integrase B8762 sequence
tttacggtgtacagtgttatgtaaaatcagatgagcaaaagcagaaagtcatggacatgaaaatagatgagcattacactatccgagtaaaaattaatgatgtcggagaagttatgggatattccgctgatataattgaattcgtagactaaagattaagccacttttatagtggctttttctgtcagaaaggaacagcaatgattaactgcgcaatctacccacgtaaatccaaagccgtggacaactccgacagcatg

SEQ ID NO: 21762 - DNA, 260 bp, Unknown
  Description of Unknown: LeftRegion for integrase B8763 sequence
tctatggggtgcagtgttatgtaaaatcagatgagcaaaaacagaaagtcatggacatgaaaaaagatgaacattacactatccgagtaaaaattaaagatgtcggagaagttatgggatattccgctgatataattgaattcgtagactaaagattaagccacttttatagtggctttttctatcagaaaggaacagcaatgattaactgcgcaatctacccacgtaaatccaaagccgtggacaactccgacagcatg

SEQ ID NO: 21763 - DNA, 260 bp, Unknown
  Description of Unknown: LeftRegion for integrase B8764 sequence
tttacggtgtacagtgttatgtaaaatcagatgagcaaaagcagaaagtcatggacatgaaaatagatgagcattacactatccgagtaaaaattaaagatgtcggagaagttatgggatattccgctgatataattgaattcgtagactaaagattaagccacttttatagtggctttttctgtcagaaaggaacagtaatgattaactgcgcaatctacccacgtaaatccaaagccgtggacaactccgacagtatg

SEQ ID NO: 21764 - DNA, 260 bp, Unknown
  Description of Unknown: LeftRegion for integrase B8765 sequence
tttacggtgtgcagtgttatgtaaaatcagatgagcaaaaacagaaagtcatggacatgaaaatagatgagcattacactatccgagtaaaaattaaagatgtcggagaagttatgggatattctgctgatataattgaatttgtagactaaagattaagccacttttatagtggctttttctgtcagaaaggaacattaatgattaactgtgcaatctacccacgtaaatccaaagccgtggacaactccgacagcatg

SEQ ID NO: 21765 - DNA, 260 bp, Unknown
  Description of Unknown: LeftRegion for integrase B8766 sequence
taataagttaaaattgatatcggattatttcggtgttggaattgattattttattcaaggaaacaatgttgatgttttgcctgaattatcaaatgaagaacttaaattattatcacagttcagaaaaatagatgatataaaaaagaaaatgatatggataatattatcttcttaatttgcttcgtcagaaaggaacagcaatgattaactgcgcaatctacccacgtaaatccaaagccgtggacaactccgacagcatg

SEQ ID NO: 21766 - DNA, 260 bp, Unknown
  Description of Unknown: LeftRegion for integrase B8767 sequence
tctatggggtgcagtgttatgtaaaatcagatgagcaaaaacagaaagtcatggacatgaaaaaagatgaacattacactatccgagtaaaaattaaagatgtcggagaagttatgggatattccgctgatataattgaattcgtagactaaagattaagccacttttatagtggctttttctgtcagaaaggaacaataatgattaactgcgcaatctacccacgtaaatccaaagccgtggacaactccgacagcatg

SEQ ID NO: 21767 - DNA, 260 bp, Unknown
  Description of Unknown: LeftRegion for integrase B8768 sequence
tgtttaaagaattagaagttactaaagatattccgcttcaatacaaagtagaaattaatcaataaaaaagccatagggtgttggcgcactctatggcaaggaaagtaatttttcataccgcaaagtaagaaatatataaagtctttccgtctatattataccataaacggacggactttttcaatgaaaagggggtctatatggatataataagggccgcactctatataagggtatcgacggaagaacaggtccgcgaa

SEQ ID NO: 21768 - DNA, 260 bp, Unknown
  Description of Unknown: LeftRegion for integrase B8769 sequence
attttgacaaagcaactgaaaaatatctataaataaaatctgccccagtgctaccaacaccggagcagattaggaaccatatcgggaaatccgatacaatcacctagacaagtgaaattgtatcattttccccggtgaaaatacaagcaccgggcatttttatgccctgctgccataaaatgtatgaggaggatgatataatgatccgttgtgccatttatgatcgtgtgtctaccgacctgcaggtggaaaagggctta

SEQ ID NO: 21769 - DNA, 260 bp, Unknown
  Description of Unknown: LeftRegion for integrase B8770 sequence
tttacggtgtgcagtgttatgtaaaatcagatgagcaaaaacagaaagtcatggacatgaaaatagatgagcattacactatccgagtaaaaattaaagatgtcggagaagttatgggatattccgctgatataattgaatttgtagactaaagattaagccacttttatagtggctttttctgtcagaaaggaacagcaatgattaactgcgcaatctacccacgtaaatccaaagccgtggacaactccgacagcatg

SEQ ID NO: 21770 - DNA, 260 bp, Unknown
  Description of Unknown: LeftRegion for integrase B8771 sequence
ctttgcctgtttactatctgcgggcataaattttatgagggaaaaatcggcatggggattgtttatctgttcaccgcagggttattcggtattggttggttaattgatctcattttaattctctgcaaaccaaatccgtactacgtatagattgattaagccacttttatagtggctttttctgtcagaaaggaacagcaatgattaactgcgcaatctacccacgtaaatccaaagccgtggacaactccgacagcatg

SEQ ID NO: 21771 - DNA, 260 bp, Unknown
  Description of Unknown: LeftRegion for integrase B8772 sequence
aattacttaagtaacttcggatagatcgcctataattaaaatctgccccggtacgccaataccggagcagatcaggaaccacatcgggagtaccgatacagtcacctcgcaagtgaaattgtatcatttttcccggtgaaatacaagcaccgggcatttttatgccatgctgccataaaatgtatgaggaggatgatataatgatccgttgtgccatttatgatcgtgtgtctaccgacctgcaggtggaaaagggctta

SEQ ID NO: 21772 - DNA, 260 bp, Unknown
  Description of Unknown: LeftRegion for integrase B8773 sequence
atttgaatcaataaaatatatgtaatataaataattaaaatctgccccggtacgccaataccggagcagatcaggaaccacatcgggagtaccgatacagtcacctacacaagtgaaattgtatcattttcccggtgaaaatacaagcaccgggcatttttatgccctgctgccataaaatgtatgaggaggatgatataatgatccgttgtgccatttatgatcgtgtgtctaccgacctgcaggtggaaaagggctta

SEQ ID NO: 21773 - DNA, 260 bp, Unknown
  Description of Unknown: LeftRegion for integrase B8774 sequence
ctttgcctgtttactatctgcgggcataaattttatgagggaaaaatcggcatgggtattgtttatctgttcaccgcagggttattcggtattggttggttaattgatctcattttaattctctgcaaaccaaatccgtactacgtatagattgattaagccacttttatagtggctttttctgtcagaaaggaacagcaatgattaactgcgcaatctacccacgtaaatccaaagccgtggacaactctgacagcatg

SEQ ID NO: 21774 - DNA, 260 bp, Unknown
  Description of Unknown: LeftRegion for integrase B8775 sequence
tttacggtgtacagtgttatgtaaaatcagatgagcaaaagcagaaagtcatggacatgaaaatagatgaacattacactatccgagtaaaaattaaagatgtcggagaagttatgggatattccgctgatataattgaattcgtagactaaagattaagccacttttatagtggctttttctatcagaaaggaacagcaatgattaactgcgcaatctacccacgtaaatccaaagccgtggacaactccgacagcatg

SEQ ID NO: 21775 - DNA, 260 bp, Unknown; identical to SEQ ID NO: 21770
  Description of Unknown: LeftRegion for integrase B8776 sequence

SEQ ID NO: 21776 - DNA, 260 bp, Unknown
  Description of Unknown: LeftRegion for integrase B8777 sequence
gtatatggagctgaacaaaacggttattaatatataaaaaatctgccccggtacgccaataccggagcagatcaggaactacatcgggaaatccgatacagtcacctcgcaagtgaaattgtatcatttttcccggtgaaatacaagcaccgggcatttttatgccctgctgccataaaatgtatgaggaggatgatataatgatccgttgtgccatttatgatcgtgtgtctaccgacctgcaggtggaaaagggctta

SEQ ID NO: 21777 - DNA, 260 bp, Unknown; identical to SEQ ID NO: 21760
  Description of Unknown: LeftRegion for integrase B8778 sequence

SEQ ID NO: 21778 - DNA, 260 bp, Unknown
  Description of Unknown: LeftRegion for integrase B8779 sequence
tttacggtgtacagtgttatgtaaaatcagatgagcaaaagcagaaagtcatggacatgaaaatagatgagcattacactatccgagtaaaaattaaagatgtcggagaagttatgggatattccgctgatataattgaatttgtagactaaagattaagccacttttatagtggctttttctgtcagaaaggaacagtaatgattaactgcgcaatctacccacgtaaatccaaagccgtggacaactccgacagcatg

SEQ ID NO: 21779 - DNA, 260 bp, Unknown
  Description of Unknown: LeftRegion for integrase B8780 sequence
caaatagaacgagaagaaaagaaaaaattgaaataaaaatctgccccggtacgccaataccggagcagatcaggaaccacatcgggaaaaccgatacagtcacctacacacgtgaaattgtatcggttttcccggcgaaaatacaagcaccgggcatttttatgctctgctgccataaaatgtatgaggaggatgatataatgatccgttgtgccatttatgatcgtgtgtctaccgacctgcaggtggaaaagggctta

SEQ ID NO: 21780 - DNA, 260 bp, Unknown
  Description of Unknown: LeftRegion for integrase B8781 sequence
tgaagtagaaaaaagactttgcgaagagttgaatattgaatatattaacttaaatttacgtacaggacctagtcacagatttactgaaaaagaataccaagagcttaaatctgattatgctcagttatttttacaattaaacaagcttaatgttgagaaagaccaagagtagtttttaaataagatagggggattcgtttatgctaaagagagcagcgttatacattagggtttctactgatcaacaagcaaaacacggg

SEQ ID NO: 21781 - DNA, 260 bp, Unknown
  Description of Unknown: LeftRegion for integrase B8782 sequence
ttgattttttggaggtgtttgaaaacatgactacaatttatgttaatggacagcgtgttacaaaggaagatctgaaaaataatgaaattaaaatagaaagtgtaaaaaaaatacttgctgagaaattgactaagacaaagtgatgttgtagactatggctagaataaaaacctagccattttcttttaggaggatggcctatgagcaaattgcaggtggcatatttgagagtatcaacagaaacacagactgaaaaatac

SEQ ID NO: 21782 - DNA, 260 bp, Unknown
  Description of Unknown: LeftRegion for integrase B8783 sequence
aaagagtttttggaggtgtctggcaatatgactacaatctatgtcaatggtaagcgtgtgacaaaagaagagctcaaaaacaatgaaattcagatagagtcagtaaaaaaaatactgtcagagaaattgacgaaaagtaaatagaattgtagaatatggctagaataaaaactagccatttcttttaggaggaatggcatatgagaaaacttaatgtcgcgtatctaagagtatctacagaagctcagaccgaaaagtac

SEQ ID NO: 21783 - DNA, 260 bp, Unknown
  Description of Unknown: LeftRegion for integrase B8784 sequence
ttcacttaatttttctatcaattctaataagtcttgtttcataaatagccaaactcctctcaactgtttatctagaacaaatgttctgaaaacattatagtgactgaggcgcgcaaaagcaacgtgaaaatgtttccattaaggaggtgatgcgagaatatattttcgctgcacgacatcactataaaggagacaggaaaatggggattttaagagtaggtttatatgaacgtgtttctacaacagagcaaagtttgaac

SEQ ID NO: 21784 - DNA, 260 bp, Unknown; identical to SEQ ID NO: 21780
  Description of Unknown: LeftRegion for integrase B8785 sequence

SEQ ID NO: 21785 - DNA, 260 bp, Unknown
  Description of Unknown: LeftRegion for integrase B8786 sequence
tggattttttggaggtgtttgaaaacatgactacaatttatgttaatggtcggcgtgttacaaaggaagatctgaaaaataacgaaattcaaattgaaagtgttaaaaaaatgcttgctgagaaattgactaagacaaagtgatgttgtagactatggctagaataaaaacctagccattttcttttaggaggatggcatatgagcaaattacaggtggcatatttgagagtatcaacagagacacagactgaaaaatac

SEQ ID NO: 21786 - DNA, 260 bp, Unknown
  Description of Unknown: LeftRegion for integrase B8787 sequence
ttgattttttggaggtgtttgaaaacatgactacaatttatgttaatggacagcgtgttacaaaggaagatctgaaaaataatgaaattaaaatagaaagtgtaaaaaaaatacttgctgagaaattgactaagacaaagtgatgttgtagactatggctagaataaaaacctagccattttcttttaggaggatggcctatgagcaaattgcaggtggcatatttgagagtatcaacagaaacacagactgaaaagtac

SEQ ID NO: 21787 - DNA, 260 bp, Unknown
  Description of Unknown: LeftRegion for integrase B8788 sequence
tgaagtagaaaaaagactttgcgaagagttaaatattgaatatattaacttaagtttacgtacaggacctagtcatagatttactgaaaaagaataccaagaacttaaatctgattatgctcagttatttttacaattaaacaagcttaatgttgagaaagaccaagagtagtttttaaataagatagggggattcgtttatgctaaagagagcagcgttatacattagggtttctactgatcaacaagcaaaacacggg

SEQ ID NO: 21788 - DNA, 260 bp, Unknown
  Description of Unknown: LeftRegion for integrase B8789 sequence
tgaggtagaaaaaagactttgcgaagagttgaatattgaatatattaacttaaatttacgtacaggacctagtcacagatttactgaaaaagaataccaagagcttaaatctgattatgctcagttatttttacaattaaacaagcttaatgttgagaaagaccaagagtagtttttaaataagatagggggattcgtttatgctaaagagagcagcgttatacattagggtttctactgatcaacaagcaaaacacggg

SEQ ID NO: 21789 - DNA, 260 bp, Unknown
  Description of Unknown: LeftRegion for integrase B8790 sequence
ggcttttcaagtcataccctggaggtgttttcattgttgtctttttttcgcacgcacaccacccgcaccgtcacctcgccccgggcggaaataattcgggccagagcctcatatagtgccttgacggcctgcgcatccatgggcatccctccggtgcattgtatgcgccgcgcggccgcggcagaacgggaggtggtacgatgagcggcgacgtaattcgggcggcgggctacatccgcgtttccacggccgagcaggct

SEQ ID NO: 21790 - DNA, 260 bp, Unknown
  Description of Unknown: LeftRegion for integrase B8791 sequence
ctcgcttaatttttcgatcaattctaataagtcttgtttcataaatagaaaaactcctctcaactgtttatctagaacaaatgttctgaaaacattatagtgactgaggcgtataaaagcaacgtgaaaatgtttccattaaggaggtgatgcgagaatatattttagctgcaagacatcactataaaggagacaggaaaatggggattttaagagtaggtttatacgagcgtgtttcaacaacagagcaaagtttgaat

SEQ ID NO: 21791 - DNA, 260 bp, Unknown
  Description of Unknown: LeftRegion for integrase B8792 sequence
ggcttttcaagtcataccttggaggtgttttttgtgtccgcctttttcacaatggagatcacccggatgtccacatcctcgcgcgccgaaatgatgcgcgccaacgtctcatataaatttcttacggcggcctcgtccatctgtgctcacccctgccagcatatgtgcggggcggccgccccagaacaggaggtgtcacgatgagcgctcccgttgtccgtgccgcggggtatatccgcgtctctacggccgagcaggcg

SEQ ID NO: 21792 - DNA, 260 bp, Unknown
  Description of Unknown: LeftRegion for integrase B8793 sequence
aaaatattctatcaaattttagcgatttttgatagaagccatatacggcattaaaacaaataaaaaaacccgccagcgccaactggcaggatcggcagcgacggcaatcgctgtagcgcagttaaaatgaccacgaatcatttctttttctgcgctttcattttaccaaaaatcaggaataaatgaaaggatgattgaatatgctgagagggtttctttacgcccgaatatccgtcgaagaacggaatcaaaagaaatac

SEQ ID NO: 21793 - DNA, 260 bp, Unknown; identical to SEQ ID NO: 21786
  Description of Unknown: LeftRegion for integrase B8794 sequence

SEQ ID NO: 21794 - DNA, 260 bp, Unknown
  Description of Unknown: LeftRegion for integrase B8795 sequence
aaagagtttttggaggtatctggcaatatgactacaatctatgtcaatggtaagcgtgtgacaaaagaagaactcaaaaacaatgaaattcagatagagtcagtaaaaaaaatactgtcagagaaattgacgaaaagtaaatagaattgtagaatatggctagaataaaaactagccatttcttttaggaggaatggcatatgagaaaacttaatgtcgcgtatctaagagtatctacagaagctcagactgaaaagtac

SEQ ID NO: 21795 - DNA, 260 bp, Unknown; identical to SEQ ID NO: 21791
  Description of Unknown: LeftRegion for integrase B8796 sequence

SEQ ID NO: 21796 - DNA, 260 bp, Unknown; identical to SEQ ID NO: 21786
  Description of Unknown: LeftRegion for integrase B8797 sequence

SEQ ID NO: 21797 - DNA, 260 bp, Unknown
  Description of Unknown: LeftRegion for integrase B8798 sequence
aaagagtttttggaggtgtctggcaatatgactacaatctatgtcaatggtaagcgtgtgacaaaagaagagctcaaaaacaatgaaattcagatagagtcagtaaaaaaaatactgtcagagaaattgacgaaaagtaaatagaattgtagaatatggctagaataaaaactagccatttcttttaggaggaatggcatatgagaaaacttaatgtcgcgtatctaagagtatctacagaagctcagactgaaaagtac

SEQ ID NO: 21798 - DNA, 260 bp, Unknown
  Description of Unknown: LeftRegion for integrase B8799 sequence
aaactggagagcctgttgaattttaagatttatttataataaaaaatcgccccagtgttggcgcaccaggacgactttgtgtgaatcttttgcagctatcagttgatgctacaatcttttctgagcaatttgattatagcacgaactgatacgcctgcaaaggtgtattttttatacccatttttaaggagcgataggttatgagtataacaaatgttgctatttatgtgcgtgtatctacggaccggcaggcaaaaaaa

SEQ ID NO: 21799 - DNA, 260 bp, Unknown
  Description of Unknown: LeftRegion for integrase B8800 sequence
ctactccgtccgagcgtgagttgatggaacggcaactcaaagtcgagcgtgagaagcaggatttgctggagcgaagcgtgaagatgctgcgtaggatcgtgtttggcttgatagttgttgttgcactgatcgccatgtatgcggtcacgctggataattgtgcgtctacagtcggtttttttagagggtgaggttaccacatgaaacaaagagctgcactctacgtcagggtgtccacggaggaacaggcaaagcacggg

SEQ ID NO: 21800 - DNA, 260 bp, Unknown
  Description of Unknown: LeftRegion for integrase B8801 sequence
gaaactggagagcctgttgaattttaagatttatttataataaaaaatcgccccggtgttggcgcaccaggacgactttgtgtgaatcttttgcagctatcagttgatgctacaatcttttctgaacaatttgattatagcacgaactgatacgcctgcaaaggtgtattttttatacccattttaaggagtgataggttatgagtataacaaatgttgctatttatgtacgtgtatctacggaccggcaggcaaaaaaa

SEQ ID NO: 21801 - DNA, 260 bp, Unknown
  Description of Unknown: LeftRegion for integrase B8802 sequence
tggattttttggaggtgtttgaaaacatgactacaatttatgttaatggtcagcgtgttacaaaggaagatctgaaaaataacgaaattcaaattgaaagtgttaaaaaaatgcttgctgagaaattgactaagacaaagtgatgttgtagactatggctagaataaaaacctagccattttcttttaggaggatggcatatgagcaaattacaagtggcatatttgagagtatcaacagagacacagactgaaaaatac

SEQ ID NO: 21802 - DNA, 260 bp, Unknown
  Description of Unknown: LeftRegion for integrase B8803 sequence
agtttttggaggtatctggcaatatgactacaatttatgttaatggaaaaagagtcactaaagaagaactcaaaaaaaatgaaattcagatagaggcagtcaaaaaaattctatccgagaaattgacgaaaaataaataaaattgtagaatatggctagaataaaacctagccatttcttttagaaagggatggccaaatatgagtaaacttaatgttgcatatttaagagtatcaacagaatctcaaaccgaaaagtac

SEQ ID NO: 21803 - DNA, 260 bp, Unknown
  Description of Unknown: LeftRegion for integrase B8804 sequence
taccccgtccgaacgtgaattgatggaacggcagctgaaggttgagcgcgagaagcaggctttgctggaacggagcgtgaaggccttgcgcaggatcgtgtttggcctgctggccgttattgcagtggtcgccgtgtatgccgtcacgctggatgtctgcacgtctacagtcggattttttagaggatgaggtgggatctatgaggcaaagagcggcgctctatatccgggtgtccacggaggaacaggcaaagcacggg

SEQ ID NO: 21804 - DNA, 260 bp, Unknown
  Description of Unknown: LeftRegion for integrase B8805 sequence
ttaaaaaaggaggaagaaagtggttaggatatacgtaaatgggatccttacaaaaagagaagatttggaaaaaattgaaataaaaaatgaaaatataaaaaagattcttgccagtaaattgacggaaaagaagtgatgatatagaattgaccttgatagaatctcggtcaattctttttaaatggaaaggaagagttgacatgaagaaaatgaatgtaggttatcttagggtatcgaccgagaaccagacggaaaaatat

SEQ ID NO: 21805 - DNA, 260 bp, Unknown; identical to SEQ ID NO: 21588
  Description of Unknown: LeftRegion for integrase B8806 sequence

SEQ ID NO: 21806 - DNA, 260 bp, Unknown
  Description of Unknown: LeftRegion for integrase B8807 sequence
aaagaggaacagttagtatattatttcgaacactgtaaataaaaaatcgccccggtgttggcgcaccaggacgactttgtgtgaatcttttgcagctatcagttgatgctacaatcctttctgagcaatttgattatagcacgaactgatacgcctgcaaaggtgtattttttatacccatttttaaggagtgataggttatgagtataacaaatgttgctatttatgtgcgtgtatctacggaccggcaggcaaaaaaa

SEQ ID NO: 21807 - DNA, 260 bp, Unknown
  Description of Unknown: LeftRegion for integrase B8808 sequence
gagaaccggttgagttctgattttatgtaaaataaaaatcgccccggtattagggtaccggaacgactttacagattgcatgtgaaacttttgcagctatcagttgatgctacaatcatttcgtgaccaatttgattatagcacgaactgatacgcctgcataggtgtattttttatacccatttttaaggagtgatactatgagtataataaacgttgctatatatgtgcgtgtttccacggaccggcaggcgaaaaag

SEQ ID NO: 21808 - DNA, 260 bp, Unknown
  Description of Unknown: LeftRegion for integrase B8809 sequence
ggtaaatggctagcagagtaacaagatcaaaggtttgcagcaggttggatatcttttttataagctcctttctatccatgatgcacctccttaaaaaaaagatgtttccatgctaacacaaaggggaagacgatataatactttttttaacacttttgatgtgactaatggtgtaaacgtaacacaagaaaggacaggaaatgacagaaaaggaagaacagaaaagggcggctatatatgtgcgtgtatcaaccgcagaa

SEQ ID NO: 21809 - DNA, 260 bp, Unknown
  Description of Unknown: LeftRegion for integrase B8810 sequence
aaactggagagcctgttgaattttaagatttatttataataaaaaatcgccccagtgttggcgcaccaggacgactttgtgtgaatcttttgcagctatcagttgatgctacaatcttttctgaacaatttgattatagcacgaactgatacgcctgcaaaggtgtatttttttatacccattttaaggagtgataggttatgagtataacaaatgttgctatttatgtacgtgtatctacggaccggcaggcaaaaaaa

SEQ ID NO: 21810 - DNA, 260 bp, Unknown
  Description of Unknown: LeftRegion for integrase B8811 sequence
aagcgcgcggatatgatgcgtgcaagaaatgttatagataaataaaaatcgtcccagtgttggcgcaccaggacgacttcgtgaaaactctgcagctatcagttgatgctacaattcttttccagacaattagaattatagcacgaactgatacgcctgcataggtgtattttttatacccatttttaaggagtgatactatgagtataacaaacgttgctatatatgtacgtgtttccacggaccggcaggcgaaaaag

SEQ ID NO: 21811 - DNA, 260 bp, Unknown; identical to SEQ ID NO: 21810
  Description of Unknown: LeftRegion for integrase B8812 sequence

SEQ ID NO: 21812 - DNA, 260 bp, Unknown
  Description of Unknown: LeftRegion for integrase B8813 sequence
taaatggctagcagagtaacaaggtcaaaggtttgcagcaggttggatatcttttttataagctcctttctatccatataatgcgcctccttaaaaaaaagatgtttccatgctaacacaaaggggaagacgatataatactttttttaacacttttgatgtgactaatggtgtaaacgtgacacaagaaaggacaggaaatgacagaaaaggaagagcagaaaagggcggctatatatgtgcgtgtatcaaccgcagaa

SEQ ID NO: 21813 - DNA, 260 bp, Unknown
  Description of Unknown: LeftRegion for integrase B8814 sequence
gaaaagaatttgacacaagcggaacttgccgagattgtcggcggcacacattcaacagtggcgaagtgggaagctggcgtaaacttaccgcgcgcaaaagaattgcgtatattagcaaggctgttcgaggtcagctctgattacttgatcggtttaacggatgatcgtacaccctactatctaaaagagaaggcgaagtcgtgagaacaggtttatatgtaagagtttcgacaacggaacaagaaaagcatggttactct

SEQ ID NO: 21814 - DNA, 260 bp, Unknown
  Description of Unknown: LeftRegion for integrase B8815 sequence
aaaagaggaacagttagtatattatttcgaacactgtaaataaaaaatcgccccggtgttggcgcaccaagacgactttgtgtgaatcttttgcagctatcagttgatgctacaatcttttctgaacaatttgattatagcacgaactgatacgcctgcaaaggtgtattttttatacccattttaaggagtgataggttatgagtataacaaatgttgctatttatgtacgtgtatctacggaccggcaggcaaaaaaa

SEQ ID NO: 21815 - DNA, 260 bp, Unknown
  Description of Unknown: LeftRegion for integrase B8816 sequence
taaatggctagcagagtaacaaggtcaaaggtttgcagcaggttggatatcttttttataagctcctttctatccatataatgcgcctccttaaaaaaaagatgcttttacactaacacaaaaaggaaagcgatataatactttttctaacacttttgatgtgactaatggtgtaaacgtgacacaagaaaggacaggaaatggcagaaaaggaaggacagaaaagggcggctatatatgtgcgtgtatcaaccgcagaa

SEQ ID NO: 21816 - DNA, 260 bp, Unknown; identical to SEQ ID NO: 21807
  Description of Unknown: LeftRegion for integrase B8817 sequence

SEQ ID NO: 21817 - DNA, 260 bp, Unknown; identical to SEQ ID NO: 21801
  Description of Unknown: LeftRegion for integrase B8818 sequence

SEQ ID NO: 21818 - DNA, 260 bp, Unknown
  Description of Unknown: LeftRegion for integrase B8819 sequence
ggagaaaaagtatcaggcggccctcgcggtggcccgtgaaatgctgcaaaaaggcgtcataaacgaggcggattttctgcgcattgaggccagactggcggcaaaattccggcctgttttgggcggtattttctgctgaaaagcctttcttttcagggtggcttcctataacatcagtgtcctgaaaggagggcgtatttatggaacgcattattcaaaaagttaccccgcccgcgcggaaaaaagcgccaaagctaaag

SEQ ID NO: 21819 - DNA, 260 bp, Unknown
  Description of Unknown: LeftRegion for integrase B8820 sequence
agcgcgcggatatgatgcgtgcaagaaatgttatagataaataaaaatcgtcccagtgttggcgcaccaggacgactttgtgaaaactctgcagctatcagttgatgctacaattcttttccagacaattagaattatagcacgaactgatacgcctgcataggtgtattttttatacccattttttaaggagtgatactatgagtataacaaacgttgctatatatgtacgtgtttccacggaccggcaggcgaaaagg

SEQ ID NO: 21820 - DNA, 260 bp, Unknown
  Description of Unknown: LeftRegion for integrase B8821 sequence
agcgcgcggatatgatgcgtgcaagaaatgttatagataaataaaaatcgccccagtgttggcgcaccaggacgactttgtgaaaactctgcagctatcagttgatgctacaattcttttccagacaattagaattatagcacgaactgatacgcctgcataggtgtattttttatacccattttttaaggagtgatactatgagtataacaaatgttgctatatatgtacgtgtctccacagaccggcaggcaaaaaag

SEQ ID NO: 21821 - DNA, 260 bp, Unknown
  Description of Unknown: LeftRegion for integrase B8822 sequence
cttaaaagtccccggtgctacaaacaccgaggacaagcattgctccgaagatacaacgccccaaacaagcatattgtatcacttcggagcagcctttcgcaagcagaactcacgttctacttaggctgttatttttgtacccatttttccaacatacaccgtatgtcggaggaataaattaataagaatggagtgatattatggtaaaaaaacacgttgctctttacgtcagggtatccacggaagaacaaaagaatcac

SEQ ID NO: 21822 - DNA, 260 bp, Unknown; identical to SEQ ID NO: 21820
  Description of Unknown: LeftRegion for integrase B8823 sequence

SEQ ID NO: 21823 - DNA, 260 bp, Unknown
  Description of Unknown: LeftRegion for integrase B8824 sequence
aagcgcgcggatatgatgcgtgcaagaaatgttatagataaataaaaatcgccccagtgttggcgcaccaggacgacttcgagaaaactctgcagctatcatttgatgctacaattcttttccagacaattagaattatagcacgaactgatacgcctgcataggtgtattttttatatccatttttaaggagtgatactatgagtataacaaatgttgctatatatgtacgtgtctccacagaccgacaggcgaaaaag

SEQ ID NO: 21824 - DNA, 260 bp, Unknown
  Description of Unknown: LeftRegion for integrase B8825 sequence
agcaggtattgcgttataaaactactataaagaccgctgccaagatgctggagcaggggattatttccgagaaagagtttgctgaatttgagcaggaaattgcagaaaaatatggtattaaaagtgactcacttttccgcaatattgctggataatatctgagtaaagaggtaatatacgagcaacaaaaggaggtacatatgcgtgaaattcagttggtaacacccaacaatcgacccattcttgtgcgcaaacgcgta

SEQ ID NO: 21825 - DNA, 260 bp, Unknown
  Description of Unknown: LeftRegion for integrase B8826 sequence
gattttttagaaaaaggtgattacatgacaactgtttatgttaatggagaacgtgtaaaaaaagaagagcttgataaaattgagattcacatggaaaatgttaagaaaattctatccgagaaattgactaaaaatgactaacggtttagaattgacttagggtgaaaacttggtcaattctttttgaaggagaattgattatgggaaaaatgaatgtagcttacatgagagtttcaacagaagctcagacagaaaagtac

SEQ ID NO: 21826 - DNA, 260 bp, Unknown
  Description of Unknown: LeftRegion for integrase B8827 sequence
aaagcgcgcggatatgatgcgtgcaagaaatgttatagataaataaaaatcgtcccagtgttggcgcaccaggacgacttcatgaaaactctgcagctatcagttgatgctacaattcttttccagacaattagaattatagcacgaactgatacgcctgcataggtgtattttttatacccatttttaaggaggatactatgagtataacaaatgttgctatatatgtacgtgtctccacagaccgacaggcgaaaaag

SEQ ID NO: 21827 - DNA, 260 bp, Unknown
  Description of Unknown: LeftRegion for integrase B8828 sequence
ttgagtttctgaaaggagatgtttgtttgacaactatttacgtgaacggtcaacgtgtcgacaagaaagatcttgaaaaaatggaaattcacattgaaagtgtaaaaaagattctttctgagaaattgacaaaaaataaatagcagtgtaggattgacctgaatagagttcaggtcaattttattaaagggggaattgacatgaacagattgaacgtaggatacctgcgggtgtcgactgaggcacagacagagaaatat

SEQ ID NO: 21828 - DNA, 260 bp, Unknown
  Description of Unknown: LeftRegion for integrase B8829 sequence
acgaaagaggaacagttagtatattatttcgaacattgcaaataaaaatcgccccagtgctggcacaccaggacgactttgtgtgaatcttttgcagctatcagttgatgctacaatcttttccgaacaatttgattatagcatgaactgatacgcctgcataggtgtattttttatacccatttttaaggagtgatactatgagtataacaaatgttgctatatatgtacgtgtttccacggaccggcaagcgaaaaaa

SEQ ID NO: 21829 - DNA, 260 bp, Unknown
  Description of Unknown: LeftRegion for integrase B8830 sequence
aacagttagtatattatttcgaacattgcaaataaaaatcgccccggtattagggtaccggaacgactttacagattgcatgtgaaacttttgcagctatcagttgatgctacaatcatttcgtgaccaatttgattatagcacgaactgatacgcctgcataggtgtattttttatacccatttttaaggagtgatactatgagtataacaaatgttgctatatatgtacgtgtctccacagaccggcaggcaaaaaag

SEQ ID NO: 21830 - DNA, 260 bp, Unknown
  Description of Unknown: LeftRegion for integrase B8831 sequence
gaaccggttgagttctaattttaagcaaaacaaaaatcgccccggtattagggtaccggaacgactttacagattgcatgtgaaacttttgcagctatcagttgatgctacaatcatttcgtgaccaatttgattatagcacgaactgatacgcctgcataggtgtatttttttatacccattttttaaggagtgatactatgagtataacaaatgttgctatatatgtacgtgtctccacagaccgacaggcaaaaaag

SEQ ID NO: 21831 - DNA, 260 bp, Unknown
  Description of Unknown: LeftRegion for integrase B8832 sequence
acgaaagaggaacagttagtatattatttcgaacattgcaaataaaaatcgccccagtgctggcacaccaggacgactttgtgtgaatcttttgcagctatcagttgatgctacaatcttttccgaacaatttgattatagcatgaactgatacgcctgcataggtgtattttttatacccatttttaaggagtgatactatgagtataacaaatgttgctatatatgtacgtgtttccacggaccggcaggcgaaaaag

SEQ ID NO: 21832 - DNA, 260 bp, Unknown
  Description of Unknown: LeftRegion for integrase B8833 sequence
aagcgcgcggatatgatgcgtgcaagaaatgttatagataaataaaaatcgtcccagtgttggcgcaccaggacgacttcgtgaaaactctgcagctatcagttgatgctacaattcttttccagacaattagaattatagcacgaactgatacgcctgcataggtgtattttttatacccatttttaaggagtgatactatgagtataacaaatgttgctatatatgtacgtgtctccacggaccggcaagcgaaaaaa

SEQ ID NO: 21833 - DNA, 260 bp, Unknown
  Description of Unknown: LeftRegion for integrase B8834 sequence
gcgcgcggatatgatgcgtgcaagaaatgttatagataaataaaaatcgtcccagtgttggcgcaccaggacgactttgtgaaaactctgcagctatcagttgatgctacaattcttttccagacaattagaattatagcacgaactgatacgcctgcataggtgtattttttatacccatttttaaggagtgatatattatgagtataacaaatgttgctatatatgtacgtgtctccacagaccgacaggcgaaaaag

SEQ ID NO: 21834 - DNA, 260 bp, Unknown
  Description of Unknown: LeftRegion for integrase B8835 sequence
agcaggtattgcgttataaaactactataaaggccgctgtcgagatgctgaagcaggggattatttccgagaaagagtttgctgaatttgagcaggaaattgcagaaaaatatggtattaaaagtgactcacttttccgcaatatcgctggataatatctgtgtaaagaggtaatatacgagcaacaaaaggaggtacatatgcgtgaaattcagttggtaacacccaacaatcgacccattcttgtgcgcaaacgcgta

SEQ ID NO: 21835 - DNA, 260 bp, Unknown
  Description of Unknown: LeftRegion for integrase B8836 sequence
cttacgcaaaagcaaggaaagaattatcgaaatagaacaatttaaaagtcgccccagtgttggcacaccaggacgaccttgtgaatctttgcagctatcagttgatgctacaattcttccctagacagttagaattatagcacgaactgatacgcctgcataggtgtatttttttatacccatttttaaggagtgatactatgagtataacaaatgttgctatatatgtacgtgtctccacggaccgacaagcgaaaaaa

SEQ ID NO: 21836 - DNA, 260 bp, Unknown
  Description of Unknown: LeftRegion for integrase B8837 sequence
agcaggtattgcgttataaaactactataaagaccgctgccgagatgctggagcaggggattatttccgagaaagagtttgctgaatttgagcaggaaattgcagaaaaatatggtattaaaagtgactcacttttccgcaatatcgctggataatatctgtgtaaagaggtaatatacgagcaacaaaaggaggtacatatgcgtgaaattcagttggtaacacccaacaatcgacccattcttgtgcgcaaacgcgta

SEQ ID NO: 21837 - DNA, 260 bp, Unknown
  Description of Unknown: LeftRegion for integrase B8838 sequence
acgaaagaggaacagttagtatattatttcgaacattgcaaataaaaatcgccccagtgctggcacaccaggacgactttgtgtgaatcttttgcagctatcagttgatgctacaatcttttccgaacaatttgattatagcatgaactgatacgcctgcataggtgtattttttatacccatttttaaggagtgatactatgagtataacaaatgttgctatatatgtacgtgtctccacggaccggcaagcgaaaaaa

SEQ ID NO: 21838 - DNA, 260 bp, Unknown
  Description of Unknown: LeftRegion for integrase B8839 sequence
attgagaccggagaaccagttgagttttaatttcaagtaaaataaaaaaccgtcccagtgttggcgcaccaggacgactttgtgaaaactctgcagctatcagttgatgctacaattcttttccagacaattagaattatagcacgaactgatacgcctgcatagatgtttttttatacccatttttaaggagtgatactatgagtataacaaatgttgctatatatgtacgtgtctccacggaccggcaagcgaaaaaa

SEQ ID NO: 21839 - DNA, 260 bp, Unknown
  Description of Unknown: LeftRegion for integrase B8840 sequence
ttcttacgcaaaagcaaggaaagaattatcgaaatagaacaatttaaaagtcgccccagtgttggcacatcaggacgaccttgtgaatctttgcagctatcagttgatgctacaattcttccctagacagttagaattatagcacgaactgatacgcctgcataggtgtattttttatacccatttttaaggaggatactatgagtataacaaatgttgctatatatgtacgtgtctccacagaccggcaggcgaaaaag

SEQ ID NO: 21840 - DNA, 260 bp, Unknown
  Description of Unknown: LeftRegion for integrase B8841 sequence
ggaatcgaacgaaatgacaacaatttttattgatggcaaacctgtgaaaaaagaggacatcgagaactatgaaatcaagttggattcagttaaaaaaactatcaaaaataaattgacttgattgtattttgaggagtagaattgactggagcaaatccggtcaattctttttattttaaaacattataaggagaattgatatgggaaaaatgaatgttggatacctgagagtatctacagagaatcaaacagaaaagtac

SEQ ID NO: 21841 - DNA, 260 bp, Unknown
  Description of Unknown: LeftRegion for integrase B8842 sequence
ttgagtttctgaaaggagatgtttgtttgacaactatttacgtgaacggtcaacgtgtcgacaagaaagatcttgaaaaaatggaaattcacattgaaagtgtaaaaaagattctttctgagaaattgacaaaaaataaatagcagtgtaggattgacctgaatagagttcaggtcaattttattaaagggggaattgacatgaacaaattgaacgtaggatacctgcgggtgtcgactgaggcacagacagagaaatat

SEQ ID NO: 21842 - DNA, 260 bp, Unknown; identical to SEQ ID NO: 21820
  Description of Unknown: LeftRegion for integrase B8843 sequence

SEQ ID NO: 21843 - DNA, 260 bp, Unknown
  Description of Unknown: LeftRegion for integrase B8844 sequence
aacagtgtgacaagatcaaaggtttgcagcaggttagatatcttttttataagctcctttctatccatatgatgcacctccttaaaaaaagatgtttccatgctaacacaaagaggaaagcgatataatactttttttaacactttttacatgactaatcacgtaaacgtgacacagtaagaaaggatacagaaaaggaaatggaaggaaagaaaagggcggctatatatgtgcgtgtatcaaccgcagaacaaagagat

SEQ ID NO: 21844 - DNA, 260 bp, Unknown
  Description of Unknown: LeftRegion for integrase B8845 sequence
aaagcgcgcggatatgatgcgtgcaagaaatgttatagataaataaaaatcgtcccagtgttggcgcaccaggacgacttcgtgaaaactctgcagctatcagttgatgctacaattcttttccagacaattagaattatagcacgaactgatacgcctgcataggtgtattttttatacccatttttaaggaggatactatgagtataacaaatgttgctatatatgtacgtgtctccacagaccggcaggcaaaaaag

SEQ ID NO: 21845 - DNA, 260 bp, Unknown
  Description of Unknown: LeftRegion for integrase B8846 sequence
ttgagtttctgaaaggagatgtttgtttgacaactatttacgtgaacggtcaacgtgtcgacaagaaagatcttgaaaaaatggaaattcacattgaaagtgtaaaaaagattctttctgagaaattgacaaaaaataaatagcagtgtaggattgacctgaatagagttcaggtcaattttattaaagggagaattgacatgaacaaattgaacgtaggatacctgcgggtgtcgactgaggcacagacagagaaatat

SEQ ID NO: 21846 - DNA, 260 bp, Unknown
  Description of Unknown: LeftRegion for integrase B8847 sequence
acgaaagaggaacagttagtatattatttcgaacattgcaaataaaaatcgccccagtgctggcacaccaggacgactttgtgcgaatcttttgcagctatcagttgatgctacaatcttttccgaacaatttgattatagcatgaactgatacgcctgcataggtgtattttttatacccatttttaaggagtgatactatgagtataacaaatgttgctatatatgtacgtgtctccacggaccggcaagcgaaaaaa

SEQ ID NO: 21847 - DNA, 260 bp, Unknown
  Description of Unknown: LeftRegion for integrase B8848 sequence
ttgagaccggagaaccagttgagttttaatttcaagtaaaataaaaaaccgtcccagtgctggcgcaccaggacgactttgtgaaaactctgcagctatcatttgatgctacaattcttttccagacaattagaattatagcacgaactgatacgcctgcataggtgtattttttatacccatttttaaggagtgatactatgagtataacaaatgttgctatatatgtacgtgtctccacagaccgacaggcgaaaaag

SEQ ID NO: 21848 - DNA, 260 bp, Unknown
  Description of Unknown: LeftRegion for integrase B8849 sequence
gagaccggagaaccagttgagttttaatttcaagtaaaataaaaaaccgtcccagtgttggcgcaccaggacgactttgtgaaaactctgcagctatcagttgatgctacaattcttttccagacaattagaattatagcacgaactgatacgcctgcataggtgtattttttatacccatttttaaggagtgatatgttatgagtataacaaatgttgctatatatgtacgtgtctccacagaccgacaggcgaaaaag

SEQ ID NO: 21849 - DNA, 260 bp, Unknown
  Description of Unknown: LeftRegion for integrase B8850 sequence
ataatatccgaagctattttatgattctatttcaatcaaataaaaatcgccccagtgttggcgcaccaggacgacttcgtgaaaactctgcagctatcagttgatgctacaattcttttccagacaattagaattatagcacgaactgatacgcctgcataggtgtattttttatacccatttttaaggagtgatatgttatgagtataacaaatgttgctatatatgtacgtgtctccacagaccgacaggcgaaaaag

SEQ ID NO: 21850 - DNA, 260 bp, Unknown
  Description of Unknown: LeftRegion for integrase B8851 sequence
agcgcgcggatatgatgcgtgcaagaaatgttatagataaataaaaatcgtcccagtgttggcgcaccaggacgacttcgtgaaaactctgcagctatcaattgatgctacaattcttttccagacaattagaattatagcacgaactgatacgcctgcataggtgtattttttatacccattttttaaggagtgatactatgagtataacaaatgttgctatatatgtacgtgtctccacagaccgacaggcgaaaaaa

SEQ ID NO: 21851 - DNA, 260 bp, Unknown; identical to SEQ ID NO: 21814
  Description of Unknown: LeftRegion for integrase B8852 sequence

SEQ ID NO: 21852 - DNA, 260 bp, Unknown; identical to SEQ ID NO: 21840
  Description of Unknown: LeftRegion for integrase B8853 sequence

SEQ ID NO: 21853 - DNA, 260 bp, Unknown
  Description of Unknown: LeftRegion for integrase B8854 sequence
aaaggacggtctggaacaccgccttgagaacaaacggcagaccatcggcctgatggacacagaactgtgcaatctttggcactccgtgaagctatacaggcggatcatactcggtttgtcactattgatcatcgggcttttcgtctggtgcgtttgggttgacatccattgtgccaactatggattttggaggggataacatgtgccaaaaaatagtggtcactctaccaaataatctacgcatccgtgtagcactgtac

SEQ ID NO: 21854 - DNA, 260 bp, Unknown; identical to SEQ ID NO: 21844
  Description of Unknown: LeftRegion for integrase B8855 sequence

SEQ ID NO: 21855 - DNA, 260 bp, Unknown
  Description of Unknown: LeftRegion for integrase B8856 sequence
agcgcgcggatatgatgcgtgcaagaaatgttatagataaataaaaatcgtcccagtgttggcgcaccaggacgacttcgtgaaaactctgcagctatcaattgatgctacaattcttttccagacaattagaattatagcacgaactgatacgcctgcataggtgtattttttatacccattttttaaggagtgatactatgagtataacaaatgttgctatatatgtacgtgtctccacagaccgacaggcgaaaaag

SEQ ID NO: 21856 - DNA, 260 bp, Unknown
  Description of Unknown: LeftRegion for integrase B8857 sequence
aaagaggaacagttagtatattatttcgaacactgtaaataaaaaatcgccccggtgttggcgcaccaggacgactttgtgtgaatcttttgcagctatcagttgatgctacaatcttttctgagcaatttgattatagcacgaactgatacgcctgcaaaggtgtattttttatacccatttttaaggagtgataggttatgagtataacaaatgttgctatttatgtgcgtgtatctacggaccggcaggcaaaaaaa

SEQ ID NO: 21857 - DNA, 260 bp, Unknown
  Description of Unknown: LeftRegion for integrase B8858 sequence
gcgcgcggatatgatgcgtgcaagaaatgttatagataaataaaaatcgtcccagtgttggcgcaccaggacgacttcgtgaaaactctgcagctatcagttgatgctacaattcttttccagacaattagaattatagcacgaactgatacgcctgcataggtgtattttttatacccatttttaaggagtgatatgttatgagtataacaaatgttgctatatatgtacgtgtctccacagaccgacaggcgaaaaag

SEQ ID NO: 21858 - DNA, 260 bp, Unknown; identical to SEQ ID NO: 21837
  Description of Unknown: LeftRegion for integrase B8859 sequence

SEQ ID NO: 21859 - DNA, 260 bp, Unknown
  Description of Unknown: LeftRegion for integrase B8860 sequence
ttgagtttctgaaaggagatgtttgtttgacaactatttacgtgaacggccaacgtgtcgacaagaaagatcttgaaaaaatggaaattcacattgaaagtgtaaaaaagattctttctgagaaattgacaaaaaataaatagcagtgtaggattgacctgaatagagttcaggtcaattttattaaagggggaattgacatgaacaaattgaacgtaggatacctgcgggtgtcgactgaggcacagacagagaaatat

SEQ ID NO: 21860 - DNA, 260 bp, Unknown
  Description of Unknown: LeftRegion for integrase B8861 sequence
ttgagtttctgaaaggagatgtttgtttgacaactatttacgtgaacggccaacgtgtcgacaagaaagatcttgaaaaaatggaaattcacattgaaagtgtaaaaaagattctttctgagaaattgacaaaaaataaatagcagtgtaggattgacctgaatagagttcaggtcaattttattaaagggggaattgacatgaacaaattgaacgtaggatacctgcgggtgtcgactgaggcgcagacagaaaaatac

SEQ ID NO: 21861 - DNA, 260 bp, Unknown
  Description of Unknown: LeftRegion for integrase B8862 sequence
aagcgcgcggatatgatgcgtgcaagaaatgttatagataaataaaaatcgccccagtgttggcgcaccaggacgactttgagaaaactctgcagctatcatttgatgctacaattcttttccagacaattagaattatagcacgaactgatacgcctgcataggtgtattttttatacccatttttaaggagtgatactatgagtataacaaatgttgctatatatgtacgtgtctccacagaccgacaggcgaaaaag

SEQ ID NO: 21862 - DNA, 260 bp, Unknown; identical to SEQ ID NO: 21855
  Description of Unknown: LeftRegion for integrase B8863 sequence

SEQ ID NO: 21863 - DNA, 260 bp, Unknown
  Description of Unknown: LeftRegion for integrase B8864 sequence
tgtgcctgtcggtgaataattgacaaataatttttaataaataaaaatcgccccagtgttggcgcaccaggacgacttcgtgaaaactctgcagctatcatttgatgctacaattcttttccagacaattagaattatagcacgaactgatacgcctgcataggtgtattttttatacccattttttaaggagtgatactatgagtataacaaatgttgctatatatgtacgtgtctccacagaccggcaggcaaaaaag

SEQ ID NO: 21864 - DNA, 260 bp, Unknown
  Description of Unknown: LeftRegion for integrase B8865 sequence
gagaccggagaaccagttgagttttaatttcaagtaaaataaaaaaccgtcccagtgttggcgcaccaggacgactttgtgaaaactctgcagctatcagttgatgctacaattcttttccagacaattagaattatagcacgaactgatacgcctgcataggtgtattttttatacccatttttaaggagtgatatattatgagtataacaaatgttgctatatatgtacgtgtctccacagaccgacaggcgaaaaag

SEQ ID NO: 21865 - DNA, 260 bp, Unknown; identical to SEQ ID NO: 21849
  Description of Unknown: LeftRegion for integrase B8866 sequence

SEQ ID NO: 21866 - DNA, 260 bp, Unknown; identical to SEQ ID NO: 21827
  Description of Unknown: LeftRegion for integrase B8867 sequence

SEQ ID NO: 21867 - DNA, 260 bp, Unknown; identical to SEQ ID NO: 21826
  Description of Unknown: LeftRegion for integrase B8868 sequence

SEQ ID NO: 21868 - DNA, 260 bp, Unknown
  Description of Unknown: LeftRegion for integrase B8869 sequence
caaaaagtccccggtgctaccaacaccgaggacaagcattgctccgaagatgcaataccacaaatcaaacatattgtatcacttcggagcagccaaaagcaagtggaactcatgttctgcttaggctgttatttttgtacctatttttccaacatacatcgtatgtcggaggaataaattaataagaatggagtgatattatggcaaaaaaacacgttgctctttacgtcagggtatccacggaagaacaaaagaatcac

SEQ ID NO: 21869 - DNA, 260 bp, Unknown
  Description of Unknown: LeftRegion for integrase B8870 sequence
gttcgcctttgccttggctctcgcattgcagagttccgtgttcagttctgaaatggttgttcttctcttcttgacggtctttttcaggtcttcagtctctgctttcaggttcttatcttttccagacaattagaattatagcacgaactgatacgcctgcataggtgtattttttatacccatttttaaggagtgatactatgagtataacaaatgttgctatatatgtacgtgtctccacggaccggcaagcgaaaaaa

SEQ ID NO: 21870 - DNA, 260 bp, Unknown
  Description of Unknown: LeftRegion for integrase B8871 sequence
taaagcgcgcggatatgatgcgtgcaagaaatgttatagataataaaaatcgtcccagtgttggcgcaccaggacgactttgtgaaaactctgcagctatcagttgatgctacaattcttttccagacaattagaattatagcacgaactgatacgcctgcataggtgtattttttatacccatttttaaggaggatactatgagtataacaaatgttgctatatatgtacgtgtctccacggaccggcaagcgaaaaaa

SEQ ID NO: 21871 - DNA, 260 bp, Unknown; identical to SEQ ID NO: 21849
  Description of Unknown: LeftRegion for integrase B8872 sequence

SEQ ID NO: 21872 - DNA, 260 bp, Unknown; identical to SEQ ID NO: 21844
  Description of Unknown: LeftRegion for integrase B8873 sequence

SEQ ID NO: 21873 - DNA, 260 bp, Unknown
  Description of Unknown: LeftRegion for integrase B8874 sequence
cttaaaagtccccggtgctacaaacaccgaggacaagcattgctccgaagatacaacgccccaaacaagcatattgtatcacttcggagcagcctttcgcaagcagaactcacgttctacttaggctgttatttttgtacccatttttccaacatacaccgtatgtcggaggaataaattaataagaatggagtaatattatggtaaaaaaacacgttgctctttacgtcagggtatccacggaagaacaaaagaatcac

SEQ ID NO: 21874 - DNA, 260 bp, Unknown
  Description of Unknown: LeftRegion for integrase B8875 sequence
agaataatatcagaagctattttatgattctattccgatcaaataaaaatcgccccagtgttggcgcaccaggacgactttgtgaaaactctgcagctatcagttgatgctacaattcttttccagacaattagaattatagcacgaactgatacgcctgcataggtgtattttttatacccatttttaaggaggatactatgagtataacaaatgttgctatatatgtacgtgtctccacagaccggcaggcaaaaaaa

SEQ ID NO: 21875 - DNA, 260 bp, Unknown
  Description of Unknown: LeftRegion for integrase B8876 sequence
aataatatccgaagctattttatgattctatttcaatcaaataaaaatcgccccagtgttggcgcaccaggacgacttcgtgaaaactctgcagctatcagttgatgctacaattcttttccagacaattagaattatagcacgaactgatacgcctgcataggtgtattttttatacccattttttaaggagtgatactatgagtataacaaatgttgctatatatgtacgtgtctccacagaccgacaggcaaaaaag

SEQ ID NO: 21876 - DNA, 260 bp, Unknown
  Description of Unknown: LeftRegion for integrase B8877 sequence
caattcccggttccataaagaatcgggagttttttatttttttcgttattttcatctccttaacgactttacagattgcatgtgaaacttttgcagctatcagttgatgctacaatcatttcgtgaccaatttgattatagcacgaactgatacgcctgcataggtgtattttttatatccatttttaaggagtgatactatgagtataacaaatgttgctatatatgtacgtgtctccacagaccgacaggcgaaaaag

SEQ ID NO: 21877 - DNA, 260 bp, Unknown
  Description of Unknown: LeftRegion for integrase B8878 sequence
ttgagaccggagaaccagttgagttttaatttcaagtaaaataaaaaccgtcccagtgctggcgcaccaggacgactttgtgaaaactctgcagctatcatttgatgctacaattcttttccagacaattagaattatagcacgaactgatacgcctgcataggtgtattttttatacccattttttaaggagtgatactatgagtataacaaatgttgctatatatgtacgtgtctccacagaccgacaggcgaaaaag

SEQ ID NO: 21878 - DNA, 260 bp, Unknown
  Description of Unknown: LeftRegion for integrase B8879 sequence
aaaggacggtctggaacaccgccttgagaacaaacggcagaccatcggcctgatggacacagaactgtgcaatctttggcactccgtgaagctatacaggtggatcatactcggtttgtcactattgatcatcgggcttttcgtctggtgcgtttgggttgacatccattgtgccaactatggattttggaggggataacatgtgccaaaaaatagtggtcactctaccaaataatctacgcatccgtgtagcactgtac

SEQ ID NO: 21879 - DNA, 260 bp, Unknown
  Description of Unknown: LeftRegion for integrase B8880 sequence
tcttacgcaaaagcaaggaaagaattatcgaaatagaacaatttaaaagtcgccccagtgttggcacaccaggacgaccttgtgaatctttgcagctatcagttgatgctacaattcttccctagacagttagaattatagcacgaactgatacgcctgcataggtgtattttttatacccatttttaaggagtgatactatgagtataataaacgttgctatatatgtgcgtgtctccacggaccggcaggcaaaaaaa

SEQ ID NO: 21880 - DNA, 260 bp, Unknown
  Description of Unknown: LeftRegion for integrase B8881 sequence
gcaacaaatccaaaaggacttgagcctagtaagaaagtagctagacaaggtggcgcaatcgccagaaacgcccgcaaagaactggaagaaaaaacgggagcctctgcaatttcaaagcataccgctaaagacataaaggagttagacaaatagcgccgtcaggaatcccctggcggcgtgatcttaggaggtgcgcatttgtgaaacgggctgcgttatatattcgagtcagtacagaagagcaggcccggcacggccta

SEQ ID NO: 21881 - DNA, 260 bp, Unknown
  Description of Unknown: LeftRegion for integrase B8882 sequence
aaaggacggactagaacaccgccttgagaacaaacggcagaccatcggcctgatggacacagaactgtgcaatctttggcactccgtgaagctatacaggtggatcatactcggtttgtcactattgatcatcgggctttttgcctggtgcgtttgggttgacatccattgtgccaactatggattttggaggggataacatgtgccaaaaaatagtggtcactctaccaaataatctacgcatccgtgtagcactgtac

SEQ ID NO: 21882 - DNA, 260 bp, Unknown
  Description of Unknown: LeftRegion for integrase B8883 sequence
aattcttggtgtccagtgcttcataaaagatgaagatgcaaaagcaaaagtaatggatatgtccataggagacactgtaactcttaaggtccatataaaggaagttggagaagttatggcatacgtcgcagacattatagaaatcgaatagtatacagtccctctagtaaatgagggactttttttaaagggagttaaaaatgaacatagcaatttatccaagaaaatcaaaaaaagatgataattcagaatcaatggaa

SEQ ID NO: 21883 - DNA, 260 bp, Unknown
  Description of Unknown: LeftRegion for integrase B8884 sequence
aaaggacggactagaacaccgccttgagaataagcggcagaccatcggcctgatggacacagaactgtgcaatctttggcactccgtgaagctatacaggtggatcatactcggtttgtcactattgatcatcgggctttttgcctggtgcgtttgggttgacatccattgtgctaactatggattttggaggggataacatgtgccaaaaaatagtggtcactctaccaaataatctacgcatccgtgtagcactgtac

SEQ ID NO: 21884 - DNA, 260 bp, Unknown
  Description of Unknown: LeftRegion for integrase B8885 sequence
tgcttgtttttaggatggtttggagttcataaattctatgaagggaaaattttatttggaattttatatttattaacttttggtttatttggtgtcggagttgtaattgaccttatattaattatattgaagccaaatccatattatgtataaaaattatgcccctctattaatatgagggtttttttagggagttaaaaatgaacatagcaatttatccaagaaaatcaaaaaaagatgataattcagaatcaatggaa

SEQ ID NO: 21885 - DNA, 260 bp, Unknown
  Description of Unknown: LeftRegion for integrase B8886 sequence
aattgttggtgtccaatgctatataaaagatgatgatgtaaaagcaaaggtaatggaaatgtccaaagacgatactataacgctaaaagttcatattaaaagcgttggagaagttattggatactcggcagatattatagaaatagaatagtatacagtccctctagcaaatgagggactttttttaaagggagttaaaaatgaacatagcaatttatccaagaaaatcaaaaaaagatgataattcagaatcaatggaa

SEQ ID NO: 21886 - DNA, 260 bp, Unknown
  Description of Unknown: LeftRegion for integrase B8887 sequence
aaaggacggactagaacaccgccttgagaacaaacggcagaccatcggcctgatggacacagaactgtgcaatctttggcactccgtgaagctatacaggtggatcatactcggtttgtcactattgatcatcgggctttttgcctggtgcgtttgggttgacatccattgtgccaactatggattttggaggggataacatgtgccaaaaaatagtggtcactttaccaaataatctacgcatccgtgtagcactgtac

SEQ ID NO: 21887 - DNA, 260 bp, Unknown
  Description of Unknown: LeftRegion for integrase B8888 sequence
aattgttggtgtccaatgctatataaaagatgatgatgtaaaagcaaaggtaatggaaatgtccaaagacgatactataacgctaaaagttcatattaaaagcgttggagaagttattggatactcggcagatattatagaaatagaatagtatacagtccctctagcaaatgagggactttttttaaagggagttaaaaatgaacatagcaatttatccaaggaaatcaaaaaaagatgataattcagaatcaatggaa

SEQ ID NO: 21888 - DNA, 260 bp, Unknown
  Description of Unknown: LeftRegion for integrase B8889 sequence
atttgataatatcatagcaccgaggataatataaggcaatcagcagattttcacaattctttccatttatattttgtattgacctatatctagtggtctttatttttataccacaattttactttttacgataggttttcattctagtgaaaagccgccgtcaggaatcacctggcggcgtgatcttaggaggtggagctatgcaacgagctgcattatatataagggttagtacagaagaacaagcccggcatggcttg

SEQ ID NO: 21889 - DNA, 260 bp, Unknown; identical to SEQ ID NO: 21881
  Description of Unknown: LeftRegion for integrase B8890 sequence

SEQ ID NO: 21890 - DNA, 260 bp, Unknown
  Description of Unknown: LeftRegion for integrase B8891 sequence
agaagaaaccctccaggcggagaaagtcggcctcgaaaagcatttgtccagcaaacggcagatcattacgatgatggagcagggcgtgaaaacccggaaccgcatcattgccgctttgctggttttattgtttttatccataacctatgcgttgtaccttgataccaattgtattcaaatcggcttttggaggggatagcatgtgccaaaaaatagtggtcactctaccaaatattctacgcatccgtgtagcactgtac

SEQ ID NO: 21891 - DNA, 260 bp, Unknown; identical to SEQ ID NO: 21881
  Description of Unknown: LeftRegion for integrase B8892 sequence

SEQ ID NO: 21892 - DNA, 260 bp, Unknown; identical to SEQ ID NO: 21881
  Description of Unknown: LeftRegion for integrase B8893 sequence

SEQ ID NO: 21893 - DNA, 260 bp, Unknown; identical to SEQ ID NO: 21881
  Description of Unknown: LeftRegion for integrase B8894 sequence

SEQ ID NO: 21894 - DNA, 260 bp, Unknown; identical to SEQ ID NO: 21887
  Description of Unknown: LeftRegion for integrase B8895 sequence

SEQ ID NO: 21895 - DNA, 260 bp, Unknown; identical to SEQ ID NO: 21882
  Description of Unknown: LeftRegion for integrase B8896 sequence

SEQ ID NO: 21896 - DNA, 260 bp, Unknown; identical to SEQ ID NO: 21882
  Description of Unknown: LeftRegion for integrase B8897 sequence

SEQ ID NO: 21897 - DNA, 260 bp, Unknown; identical to SEQ ID NO: 21885
  Description of Unknown: LeftRegion for integrase B8898 sequence

SEQ ID NO: 21898 - DNA, 260 bp, Unknown
  Description of Unknown: LeftRegion for integrase B8899 sequence
aaaggacggattagaacaccgccttgagaacaaacggcagaccatcggcctgatggacacagaactgtgcaatctttggcactccgtgaagctatacaggtggatcatactcggtttgtcactattgatcatcgggctttttgcctggtgcgtttgggttgacatccattgtgccaactatggattttggaggggataacatgtgccaaaaaatagtggtcactctaccaaataatctacgcatccgtgtagcactgtac

SEQ ID NO: 21899 - DNA, 260 bp, Unknown; identical to SEQ ID NO: 21882
  Description of Unknown: LeftRegion for integrase B8900 sequence

SEQ ID NO: 21900 - DNA, 260 bp, Unknown
  Description of Unknown: LeftRegion for integrase B8901 sequence
gcttgtttttaggatggtttggagttcataaattctatgaagggaaaattttatttggaattttatatttattaacttttggtttatttggtgtcggagttgtaattgaccttatattaattatattgaagccaaatccatattatgtataaaaattatgcccctctattaatatgaggggttttttaagggagttaaaaatgaacatagcaatttatccaaggaaatcaaaaaaagatgataattcagaatcaatggaa

SEQ ID NO: 21901 - DNA, 260 bp, Unknown; identical to SEQ ID NO: 21885
  Description of Unknown: LeftRegion for integrase B8902 sequence

SEQ ID NO: 21902 - DNA, 260 bp, Unknown; identical to SEQ ID NO: 21900
  Description of Unknown: LeftRegion for integrase B8903 sequence

SEQ ID NO: 21903 - DNA, 260 bp, Unknown; identical to SEQ ID NO: 21900
  Description of Unknown: LeftRegion for integrase B8904 sequence

SEQ ID NO: 21904 - DNA, 260 bp, Unknown; identical to SEQ ID NO: 21900
  Description of Unknown: LeftRegion for integrase B8905 sequence

SEQ ID NO: 21905 - DNA, 260 bp, Unknown
  Description of Unknown: LeftRegion for integrase B8906 sequence
aaaggacggactagaacaccgccttgagaacaaacggcagaccatcggcctgatggacacagaactgtgcaatctttggcactccgtgaagctatacaggtggatcatactcggtttgtcactattgatcatcgggctttttgcctggtgcgtgtgggttgacatccattgtgccaactatggattttttgggggataacatgtgcaaaaaaatagtggttactctaccaaataatctacgcatccgtgtagcactgtac

SEQ ID NO: 21906 - DNA, 260 bp, Unknown
  Description of Unknown: LeftRegion for integrase B8907 sequence
aattgttggtgtccaatgctatataaaagatgatgatgtaaaagcaaaagtaatggaaatgtctaaagacgatactgtgacgctcaaagttcatattaaaaacgttggggaagttatggggtactccgcagatattatagaaatagaatagtatacagtccctctattaaatgagggactttttttaaagggagttaaaaatgaacatagcaatttatccaaggaaatcaaaaaaagatgataattcagaatcaatggaa

SEQ ID NO: 21907 - DNA, 260 bp, Unknown; identical to SEQ ID NO: 21881
  Description of Unknown: LeftRegion for integrase B8908 sequence

SEQ ID NO: 21908 - DNA, 260 bp, Unknown
  Description of Unknown: LeftRegion for integrase B8909 sequence
agaagaaaccctccaggcggagaaagtcggcctcgaaaagcatttgtccagcaaacggcagatcattacgatgatggagcagggcgtgaaaacccggaaccgcatcattgccgctttgctggttttattgtttttatccataacctatgcgttgtaccttgataccaattgtattcaaatcggcttttggaggggatagcatgtgccaaaaaatagtggtcactctaccaaataatctacgcatccgtgtagcactgtac

SEQ ID NO: 21909 - DNA, 260 bp, Unknown
  Description of Unknown: LeftRegion for integrase B8910 sequence
gcttgtttttaggatggtttggagttcataaattctatgaagggaaaattttatttggaattttatatttattaactttcggtttatttggtgttggagttgtaattgaccttatattaattatattgaagccaaatccatattatgtataaaaattatgcccctctattaatgtgaggggtttttttagggagttaaaaatgaacatagcaatttatccaaggaaatcgaaaaaagatgataattcagaatcaatggaa

SEQ ID NO: 21910 - DNA, 260 bp, Unknown
  Description of Unknown: LeftRegion for integrase B8911 sequence
aataacttgtatatggaatatgaaataacggtaagcatcaatggagtccaagtgagcatggaggagtatcggcggcacgattttagtcgctcgacatcaaacaagagtagaccaaaaaaggtagaaattaaggaggcagtatgatatactaagggggtcgaaagactcccttagtttttttttggttaaggaggaatattatggttactgcgctatacgcacgagtatctaccgatgcacaagctgaagaaggctacagc

SEQ ID NO: 21911 - DNA, 260 bp, Unknown
  Description of Unknown: LeftRegion for integrase B8912 sequence
tgcttgtttttaggatggtttggagttcataaattctatgaagggaaaattttatttggaattttatatttattaacttttggtttatttggtgtcggagttgtaattgaccttatattaattatattgaagccaaatccatattatgtataaaaattatgcccctctattaatatgaggggttttttagggagttaaaaatgaacatagcaatttatccaagaaaatcgaaaaaagatgataattcagaatcaatggaa

SEQ ID NO: 21912 - DNA, 260 bp, Unknown; identical to SEQ ID NO: 21885
  Description of Unknown: LeftRegion for integrase B8913 sequence

SEQ ID NO: 21913 - DNA, 260 bp, Unknown
  Description of Unknown: LeftRegion for integrase B8914 sequence
aattgttggtgtccaatgctatataaaagatgatgatgtaaaagcaaaggtaatggaaatgtccaaagacgatactataacgctaaaagttcatattaaaagcgttggagaagttattggatactcggcagatattatagaaatagaatagtatacagtccctctagcaaatgagggactttttttaaagggagttaaaaatgaacatagcaatttatccaagaaaatcaaaaaaagatgacaattcagaatcaatggaa

SEQ ID NO: 21914 - DNA, 260 bp, Unknown; identical to SEQ ID NO: 21881
  Description of Unknown: LeftRegion for integrase B8915 sequence

SEQ ID NO: 21915 - DNA, 260 bp, Unknown
  Description of Unknown: LeftRegion for integrase B8916 sequence
caattattggtgtccaatgctatataaaagatgatgatgtaaaagcaaaggtaatggaaatgtctatagacgatactataacgctcaaagttcatattaaaaacgttggggaagttatggggtactctgcagatattatagaaatagaataatataaagtccctcatttactagagggacttttttaaagggagttaaaaatgaacatagcaatttatccaagaaaatcaaaaaaagatgacaattcagaatcaatggaa

SEQ ID NO: 21916 - DNA, 260 bp, Unknown
  Description of Unknown: LeftRegion for integrase B8917 sequence
gcttgtttttaggatggtttggagttcataaattctatgaagggaaaattttatttggaattttatatttattaacttttggtttatttggtgtcggagttgtaattgaccttatattaattatattgaagccaaatccatattatgtataaaaattatgcccctctattaatatgaggggttttttaagggagttaaaaatgaacatagcaatttatccaagaaaatcaaaaaaagatgataattcagaatcaatggaa

SEQ ID NO: 21917 - DNA, 260 bp, Unknown; identical to SEQ ID NO: 21881
  Description of Unknown: LeftRegion for integrase B8918 sequence

SEQ ID NO: 21918 - DNA, 260 bp, Unknown; identical to SEQ ID NO: 21906
  Description of Unknown: LeftRegion for integrase B8919 sequence

SEQ ID NO: 21919 - DNA, 260 bp, Unknown
  Description of Unknown: LeftRegion for integrase B8920 sequence
ttgtttttaggatggtttggagttcataaattctatgaagggaaaattttatttggaattttatatttattaacttttggtttatttggtgtcggagttgtaattgaccttatattaattatattgaagccaaatccatattatgtataaaaattatgcccctctagcaaatgagggactttttttaaagggagttaaaaatgaacatagcaatttatccaaggaaatcaaaaaaagatgataattcagaatcaatggaa

SEQ ID NO: 21920 - DNA, 260 bp, Unknown
  Description of Unknown: LeftRegion for integrase B8921 sequence
ctgtactagatggtgatacattaacaattaatatgagcggacaagatataacatttaagagaaaataaaaaaaagccctgtgctggtaacacagagcaaataaacggtactggtaataccgtcttggtacaataaaatgacttggtcggtcatagcttttattgtacctacattttaacataaaaatggaggttataacaatgattaaacaaaaagtgcgattatatgcgcgtgtatcgacagaagagcaagccagaaag

SEQ ID NO: 21921 - DNA, 260 bp, Unknown
  Description of Unknown: LeftRegion for integrase B8922 sequence
aaaggacggactagaacaccgccttgagaacaaacggcagaccatcggcctgatggacacagaactgtgcaatctttggcactccgtgaagctatacaggtggatcatactcggtttgtcactattgatcatcgggctttttgcctggtgcgtttgggttgacatccattgtgccaactatggattttggaggggataacatgtgcccaaaaatagtggtcactctaccaaataatctacgcatccgtgtagcactgtac

SEQ ID NO: 21922 - DNA, 260 bp, Unknown
  Description of Unknown: LeftRegion for integrase B8923 sequence
agaagaaaccctccaggcggagaaagtcggcctcgaaaagcatttgtccagcaaacggcagatcattacgatgatggagcagggcgtgaaaacccggaaccgcatcattgccgctttgctggttttattgtttttctccatatcctatgcgttgtaccttgatttcaattgtatccaaatgggcttctggaggggatagcatgtgccaaaaaatagtggtcactctaccaaataatctacgcatccgtgtagcactgtac

SEQ ID NO: 21923 - DNA, 260 bp, Unknown
  Description of Unknown: LeftRegion for integrase B8924 sequence
cgaaaaaactctgcatgcggagaacgtcggccttgagaaacacttatccagcaaacggcaaatcattacgatgatggagaagggcgtaaaaacccggaaccgcatcattgccgcgttgctggttttattgtttttctccatatcctatgcgttgtaccttgatttcaattgtatccaaaccggattctggaggggatagcatgtgccaaaaaatagtggtcactttaccaaataatctacgcatccgtgtagcactgtac

SEQ ID NO: 21924 - DNA, 260 bp, Unknown
  Description of Unknown: LeftRegion for integrase B8925 sequence
agaagaaaccctccaggcggagaaagtcggcctcgaaaagcatttgtccagcaaacggcagatcattacgatgatggagcggggcgtgaaaacccggaaccgcatcattgccgctttgctggttttattgtttttatccataacctatgcgttgtaccttgataccaattgtattcaaatcggcttttggaggggatagcatgtgccaaaaaatagtggtcactctaccaaataatctacgcatccgtgtagcactgtac

SEQ ID NO: 21925 - DNA, 260 bp, Unknown
  Description of Unknown: LeftRegion for integrase B8926 sequence
aaaggacggactagaacaccgccttgagaacaaacggcagaccatcggcctgatggatacagaactgtgcaatctttggcactccgtgaagctatacaggtggatcatactcggtttgtcactattgatcatcgggctttttgcctggtgcgtttgggttgacatccattgtgctaactatggattttggaggggataacatgtgccaaaaaatagtggtcactctaccaaataatctacgcatccgtgtagcactgtac

SEQ ID NO: 21926 - DNA, 260 bp, Unknown
  Description of Unknown: LeftRegion for integrase B8927 sequence
aaaggacggactagaacaccgccttgagaataagcggcagaccatcggcctgatggacacaggactgtgcaatctttggcactccgtgaagctatacaggtggatcatactcggtttgtcactattgatcatcgggctttttgcctggtgcgtttgggttgacatccattgtgctaactatggattttggaggggataacatgtgccaaaaaatagtggtcactctaccaaataatctacgcatccgtgtagcactgtac

SEQ ID NO: 21927 - DNA, 260 bp, Unknown
  Description of Unknown: LeftRegion for integrase B8928 sequence
caattgttggtgttcaatgctatataaaagatgatgatgtaaaagcaaaggtaatggaaatgtctaaagacgatactgtgacgctcaaagttcatattaaaaacgttggggaagttatggggtactccgcagatattatagaaatagaatagtatacagtccctctagtaaatgagggactttttttaagggagttaaaaatgaacatagcaatttatccaagaaaatcaaaaaaagatgacaattcagaatcaatggaa

SEQ ID NO: 21928 - DNA, 260 bp, Unknown
  Description of Unknown: LeftRegion for integrase B8929 sequence
gtttgtttttaggatggtttggagttcataaattctatgaagggaaaattttatttggaattttatatttattaacttttggtttatttggtgtcggagttgtaattgaccttatattaattatattgaagccaaatccatattatgtataaaaattatgcccctctattaatatgaggggttttttaagggagttaaaaatgaacatagcaatttatccaaggaaatcaaaaaaagatgataattcagaatcaatggag

SEQ ID NO: 21929 - DNA, 260 bp, Unknown
  Description of Unknown: LeftRegion for integrase B8930 sequence
tgcttgtttttaggatggtttggaattcataaattctatgaagggaaaattttatttggaattttatatttattaacttttggtttatttggtgtcggagttgtaattgaccttatattaattatattgaagccaaatccatattatgtataaaaattatgcccctctattaatatgaggggttttttagggagttaaaaatgaatatagcaatttatccaaggaaatcaaaaaaagatgataattcagaatcaatggaa

SEQ ID NO: 21930 - DNA, 260 bp, Unknown
  Description of Unknown: LeftRegion for integrase B8931 sequence
tgtcaaagtatactctatggaggtttttttatgtcttctttcttttcaacatgtacacgaaccacaactccttctcgatttcccacaattctggccaataccgtaaatatcttttccgcctgttctatttccatggtatcaccccgtttactcaagcgtatgcttaaagcaggtggcacagaacgaaaggaggccattgtatgcaggtgattcgtggagcaggatatatccgtgtatccaccacggaacaggcaacgcgc

SEQ ID NO: 21931 - DNA, 260 bp, Unknown
  Description of Unknown: LeftRegion for integrase B8932 sequence
ttttatcaaattgaaatagataacaatggtaaattagtattatccaaggatcaaagcgacttctaacaaaaaaagccctgtgctggtaacacagagcaaataaacggtactggtaataccgtcttggtacaataaaatgacttggtcggtcatagcttttattgtacctacattttaacataaaaatggaggttataacaatgattaaacaaaaagtgcgattatatgcgcgtgtatcgacagaagagcaagccagaaag

SEQ ID NO: 21932 - DNA, 260 bp, Unknown; identical to SEQ ID NO: 21887
  Description of Unknown: LeftRegion for integrase B8933 sequence

SEQ ID NO: 21933 - DNA, 260 bp, Unknown
  Description of Unknown: LeftRegion for integrase B8934 sequence
aattcttggtgtccagtgcttcataaaagatgaagatgcaaaagcaaaagtaatggatatgtccataggagacactgtaactcttaaggtccatataaaggaagttggagaagttatggcatatgtcgcagacattatagaaatcgaatagtataaagtccctctgacaaatgagggactttttttaaagggagttaaaaatgaacatagcaatttatccaaggaaatcaaaaaaagatgataattcagaatcaatggaa

SEQ ID NO: 21934 - DNA, 260 bp, Unknown
  Description of Unknown: LeftRegion for integrase B8935 sequence
aattgttggtgtccaatgctatataaaagatgatgatgtaaaagcaaaggtaatggaaatgtccaaagacgatactataacgctaaaagttcatattaaaagcgttggagaagttattggatactcggcagatattatagaaatagaatagtatacagtccctctagcaaatgagggactttttttaaagggagttaaaaatgaacatagcaatttatccaaggaaatcaaaaaaagatgacaattcagaatcaatggaa

SEQ ID NO: 21935 - DNA, 260 bp, Unknown
  Description of Unknown: LeftRegion for integrase B8936 sequence
gttcttcaaagtgaggttggagatgccggaagctctgttgggactataaaaacatatcgctgggagggcactgacggaactttgtcttatgcaaccattttatttgatgattatattgtatatagtaaacatggttatggactagaataacaatacgccgtcaggaatcacctggcggcgtgatcttaggaggtggagctatgcaacgagctgcattatatataagggttagtacagaagaacaagcccggcatggcttg

SEQ ID NO: 21936 - DNA, 260 bp, Unknown
  Description of Unknown: LeftRegion for integrase B8937 sequence
gatgcactaaatgatatcaacgtggaaactctgatggagtgcaatcagaactatgatacattatcagaggaacaatacgatgctatctcagcgtatgtttatgcggcattgaaagagtacacgagtcagcagagcgaagaacacgaaatacacgaatagcttcggctactcgttttattttgaaagatggaggtgatgacgtgcgatgtgcactttatatcagagtatcttctgatgaacaaaagagaaaaggttattct

SEQ ID NO: 21937 - DNA, 260 bp, Unknown; identical to SEQ ID NO: 21906
  Description of Unknown: LeftRegion for integrase B8938 sequence

SEQ ID NO: 21938 - DNA, 260 bp, Unknown
  Description of Unknown: LeftRegion for integrase B8939 sequence
aataacttgtatatggaatatgaaataacagtaagcatcaatggagtccaagtgagcatggaggagtatcgacagcacgattttagccgctcgatatcgaataacagtaggtcaaaaacagtagaaattaaggaggcagtatgatatactaagggagtcgaaagactcccttagtttttttttggttaaggaggaacattatggttactgcgctatacgcacgagtatctaccgatgcacaagccgaagaaggctacagc

SEQ ID NO: 21939 - DNA, 260 bp, Unknown
  Description of Unknown: LeftRegion for integrase B8940 sequence
cattattggtgtccaatgctatataaaagatgatgatgtaaaagcaaaagtaatggaaatgtctatagacgatactataactctcaaagttcatattaaaagcgttggggaagttattggatactcggcagatattatagaaatagaataatatacagtccctctagtaaatgagggactttttttaaagggagttaaaaatgaacatagcaatttatccaaggaaatcaaaaaaagatgataattcagaatcaatggaa

SEQ ID NO: 21940 - DNA, 260 bp, Unknown; identical to SEQ ID NO: 21885
  Description of Unknown: LeftRegion for integrase B8941 sequence

SEQ ID NO: 21941 - DNA, 260 bp, Unknown; identical to SEQ ID NO: 21887
  Description of Unknown: LeftRegion for integrase B8942 sequence

SEQ ID NO: 21942 - DNA, 260 bp, Unknown; identical to SEQ ID NO: 21890
  Description of Unknown: LeftRegion for integrase B8943 sequence

SEQ ID NO: 21943 - DNA, 260 bp, Unknown
  Description of Unknown: LeftRegion for integrase B8944 sequence
aattgttggtgttcaatgctatataaaagatgatgatgtaaaagcaaaggtaatggaaatgtctaaagacgatactataacgctcaaagttcatattaagagcgttggggaagttatgggttactctgcagatattatagaaatagaatagtatatagtccctctagtaaatgagggactttttttaaagggagttaaaaatgaacatagcaatttatccaaggaaatcaaaaaaagatgataattcagaatcaatggaa

SEQ ID NO: 21944 - DNA, 260 bp, Unknown
  Description of Unknown: LeftRegion for integrase B8945 sequence
ttgctgtcacattccatttcaccggcgccgtcgcggcgccgcacatccgtcacgcggatctccacgccctcgcgcagagagataatccgtaccagagcttcatacactcttctgacggcagcctcgtccatgtgcgttccccctcgtcagcatatgcgcacggctgccggcaaagaaccgcagaaggggagggaagccgcatgaaggtcattcggggagctggctatgtgcgcgtgtctactgcggagcaggcgctgcgc

SEQ ID NO: 21945 - DNA, 260 bp, Unknown
  Description of Unknown: LeftRegion for integrase B8946 sequence
gtttgtttttaggatggtttggagttcataaattctatgaagggaaaattttatttggaattttatatttattaacttttggtttatttggtgtcggagttgtaattgaccttatattaattatattgaagccaaatccatattatgtataaaaattatgcccctctattaatatgaggggttttttaagggagttaaaaatgaacatagcaatttatccaaggaaatcaaaaaaagatgataattcagaatcaatggaa

SEQ ID NO: 21946 - DNA, 260 bp, Unknown
  Description of Unknown: LeftRegion for integrase B8947 sequence
agaagaaaccctccaggcggagaaagtcggcctcgaaaagcatttgtccagcaaacggcagatcattacgatgatggagcagggcgtgaaaacccggaaccgcatcattgccgctttgctggttttattgtttttatccataacctatgcgttgtaccttgataccaattgtattcaaatcggcttttggaggggatagcatgtgccaaaaaatagtgatcactctaccaaatattctacgcatccgtgtagcactgtac

SEQ ID NO: 21947 - DNA, 260 bp, Unknown; identical to SEQ ID NO: 21885
  Description of Unknown: LeftRegion for integrase B8948 sequence

SEQ ID NO: 21948 - DNA, 260 bp, Unknown
  Description of Unknown: LeftRegion for integrase B8949 sequence
gcttgtttttaggatggtttggagttcataaattctatgaagggaaaattttatttggaattttatatttattaacttttggtttatttggtgtcggagttgtaattgaccttatattaattatattgaagccaaatccatattatgtataaaaattatgcccctctattaatatgaggggtttttttagggagttaaaaatgaacatagcaatttatccaagaaaatcaaaaaaagatgataattcagaatcaatggaa

SEQ ID NO: 21949 - DNA, 260 bp, Unknown
  Description of Unknown: LeftRegion for integrase B8950 sequence
tggataatagcataacacctgtagatttataaatcaatcagcatattttcacaattctttccatttatattttgtattgacctatatctagtggtctttacttttataccacaattttactttttaaaataggtttccattttagtgaaaagccgccgtcaggaatcccctggcggcgtgatcttaggaggtgcgcatttgtgaaacgggctgcgttatatattcgagtcagtacagaagagcaggcccggcacggccta

SEQ ID NO: 21950 - DNA, 260 bp, Unknown
  Description of Unknown: LeftRegion for integrase B8951 sequence
aattgttggtgttcaatgctatataaaagatgatgatgtaaaagcaaaggtaatggaaatgtctaaagacgatactgtgacgctcaaagttcatattaaaaacgttggggaagttatggggtactccgcagatattatagaaatagaatagtatacagtccctctagtaaatgagggacttttttttaagggagttaaaaatgaacatagcaatttatccaagaaaatcaaaaaaagatgataattcagaatcaatggaa

SEQ ID NO: 21951 - DNA, 260 bp, Unknown; identical to SEQ ID NO: 21900
  Description of Unknown: LeftRegion for integrase B8952 sequence

SEQ ID NO: 21952 - DNA, 260 bp, Unknown
  Description of Unknown: LeftRegion for integrase B8953 sequence
aaaggacggtctagaacaccgccttgcaaataagcggaagaccatcggcctgatggaaacggagctaaacaacctccgccattccgtgaagctatacaggtggatcatacttggtttgtcgctatcgatcgtcggtcttttcgtctggtgcgtgtgggttgacatccattgtgccaactatggatttttgaggggataacatgtgccaaaaaatagtggtcactctaccaaataatctacgcatccgtgtagcactgtac

SEQ ID NO: 21953 - DNA, 260 bp, Unknown
  Description of Unknown: LeftRegion for integrase B8954 sequence
gcttgtttttaggatggttgggagttcataaattctatgaagggaaaattttatttggaattttatatttattaacttttggtttatttggtgttggagttgtaattgaccttatattaattatattgaagccaaatccatattatgtataaaaattatgcccctctattaatgtgaggggtttttttagggagttaaaaatgaacatagcaatttatccaaggaaatcaaaaaaagatgacaattcagaatcaatggaa

SEQ ID NO: 21954 - DNA, 260 bp, Unknown; identical to SEQ ID NO: 21881
  Description of Unknown: LeftRegion for integrase B8955 sequence

SEQ ID NO: 21955 - DNA, 260 bp, Unknown; identical to SEQ ID NO: 21885
  Description of Unknown: LeftRegion for integrase B8956 sequence

SEQ ID NO: 21956 - DNA, 260 bp, Unknown
  Description of Unknown: LeftRegion for integrase B8957 sequence
aaaggacggactagaacaccgccttgagaacaaacggcagaccatcggcctgatggacacagaactgtgcaatctttggcactccgtgaagctatacaggtggatcatactcggtttgtcactattgattatcgggctttttgtctggtgcgtttgggttgacatccattgtgccaactatggattttggaggggataacatgtgccaaaaaatagtggtcactctaccaaataatctacgcatccgtgtagcactgtac

SEQ ID NO: 21957 - DNA, 260 bp, Unknown; identical to SEQ ID NO: 21900
  Description of Unknown: LeftRegion for integrase B8958 sequence

SEQ ID NO: 21958 - DNA, 260 bp, Unknown; identical to SEQ ID NO: 21881
  Description of Unknown: LeftRegion for integrase B8959 sequence

SEQ ID NO: 21959 - DNA, 260 bp, Unknown; identical to SEQ ID NO: 21909
  Description of Unknown: LeftRegion for integrase B8960 sequence

SEQ ID NO: 21960 - DNA, 260 bp, Unknown; identical to SEQ ID NO: 21923
  Description of Unknown: LeftRegion for integrase B8961 sequence

SEQ ID NO: 21961 - DNA, 260 bp, Unknown
  Description of Unknown: LeftRegion for integrase B8962 sequence
aaaggacggtctagaacaccgccttgcgaataagcggaagaccatcggcctgatggaaacggagctaaacaacctccgccattccgtgaagctatacaggtggatcatacttggtttgtcgctatcgatcgtcggtctcttcgtctggtgcgtgtgggttgacatccattgtgccaactatggatttttgagggaataacatgtgccaaaaaatagtggtcactctaccaaataatctacgcatccgtgtagcgctgtac

SEQ ID NO: 21962 - DNA, 260 bp, Unknown
  Description of Unknown: LeftRegion for integrase B8963 sequence
tgcttgtttttaggatggtttggagttcataaattctatgaagggaaaattttatttggaattttatatttattaacttttggtttatttggtgtcggagttgtaattgaccttatattaattatattgaagccaaatccatattatgtataaaaattatgcccctctattaatatgaggggttttttagggagttaaaaatgaacatagcaatttatccaaggaaatcaaaaaaagatgataattcagaatcaatggaa

SEQ ID NO: 21963 - DNA, 260 bp, Unknown
  Description of Unknown: LeftRegion for integrase B8964 sequence
aaaggacggtctggaacaccgccttgagaataagcggaagaccatcggcctgatggacacagaactgtgcaatctttggcactccgtgaagctatacaggtggatcatactcggtttgtcactattgatcatcgggctttttgcctggtgcgtttgggttgacatccattgtgccaactatggattttggaggggataacatgtgccaaaaaatagtggtcactctaccaaataatctacgcatccgtgtagcactgtac

SEQ ID NO: 21964 - DNA, 260 bp, Unknown; identical to SEQ ID NO: 21882
  Description of Unknown: LeftRegion for integrase B8965 sequence

SEQ ID NO: 21965 - DNA, 260 bp, Unknown; identical to SEQ ID NO: 21900
  Description of Unknown: LeftRegion for integrase B8966 sequence

SEQ ID NO: 21966 - DNA, 260 bp, Unknown
  Description of Unknown: LeftRegion for integrase B8967 sequence
gatgcactaaatgatatcaacgtggaaactctgatggagtgcaatcagaactatgatacattatcagaggaacaatacgatgctatctcagcgtatgtttatgcggcattgaaagagtacacgagtcagcagagcgaagaacacgaaatacacgaatagcttcggctactcgttttattttgaaagatggaggtgatgacgtgcgatgtgcactttatatcagagtatcctctgatgaacaaaaaagaaacggtttctct

SEQ ID NO: 21967 - DNA, 260 bp, Unknown
  Description of Unknown: LeftRegion for integrase B8968 sequence
aatggatgattattcggacctagaggacgaccaaaaccgttccgaagaatatgagaaaacaagtgctccgtctgatactccggacgaatacgatatcttcacgctccttcttattggagttgcaatagccggaggctcatattatatgggtacaaagaagaataaataggaaacagaggtacaaacaaggtggtgatagtatgagatgtgcactttatatcagagtatcttctgatgaacaaaagagaaacggtttctct

SEQ ID NO: 21968 - DNA, 260 bp, Unknown
  Description of Unknown: LeftRegion for integrase B8969 sequence
tgcttgtttttaggatggtttggagttcataaattctatgaagggaaaattttatttggaattttatatttattaacttttggtttatttggtgtcggagttgtaattgaccttatattaattatattgaagccaaatccatattatgtataaaaattatgcccctctattaatatgaggggttttttagggagttaaaaatgaacatagcaatttatccaagaaaatcaaaaaaagatgacaattcagaatcaatggaa

SEQ ID NO: 21969 - DNA, 260 bp, Unknown
  Description of Unknown: LeftRegion for integrase B8970 sequence
tgtcaaagtatgctctatggaggtttttttatgtcttctttcttttcaacatgtacacgaaccacaactccttctcgattccccacaattctggctaataccgtaaatatcttttccgcctgttctatttccatggtatcaccccgtttactcaagcgtatgcttaaagcaggtggcacagaacgaaaggaggccattgtatgcaggtgattcgtggagcaggatatatccgtgtatccaccacggaacaggcaacgcgc

SEQ ID NO: 21970 - DNA, 260 bp, Unknown
  Description of Unknown: LeftRegion for integrase B8971 sequence
gcttgtttttaggatggtttggagttcataaattctatgaagggaaaattttatttggaattttatatttattaacttttggtttatttggtgtcggagttgtaattgaccttatattaattatattgaagccaaatccatattatgtataaaaattatgcccctctattaatatgaggggttttttaagggagttaaaaatgaacatagcaatttatccaaggaaatcaaaaaaaaatgataattcagaatcaatggaa

SEQ ID NO: 21971 - DNA, 260 bp, Unknown; identical to SEQ ID NO: 21909
  Description of Unknown: LeftRegion for integrase B8972 sequence

SEQ ID NO: 21972 - DNA, 260 bp, Unknown; identical to SEQ ID NO: 21916
  Description of Unknown: LeftRegion for integrase B8973 sequence

SEQ ID NO: 21973 - DNA, 260 bp, Unknown
  Description of Unknown: LeftRegion for integrase B8974 sequence
ggaagaaaccttacaagcggagaaagtcggccttgaaaagcatttatccagcaaacggcaaatcattacgatgatggagaagggtgtgaaaacccggaaccgcgtaattgccgcgttgctggttttattgtttttctccatatcctatgcgttgtacctcgattttaaatgtatccaattcggcttttggaggggatagcatgtgccaaaaaatagtggtcactctaccaaataatctacgcatccgtgtagcactgtac

SEQ ID NO: 21974 - DNA, 260 bp, Unknown; identical to SEQ ID NO: 21936
  Description of Unknown: LeftRegion for integrase B8975 sequence

SEQ ID NO: 21975 - DNA, 260 bp, Unknown; identical to SEQ ID NO: 21885
  Description of Unknown: LeftRegion for integrase B8976 sequence

SEQ ID NO: 21976 - DNA, 260 bp, Unknown; identical to SEQ ID NO: 21887
  Description of Unknown: LeftRegion for integrase B8977 sequence

SEQ ID NO: 21977 - DNA, 260 bp, Unknown; identical to SEQ ID NO: 21881
  Description of Unknown: LeftRegion for integrase B8978 sequence

SEQ ID NO: 21978 - DNA, 260 bp, Unknown; identical to SEQ ID NO: 21900
  Description of Unknown: LeftRegion for integrase B8979 sequence

SEQ ID NO: 21979 - DNA, 260 bp, Unknown; identical to SEQ ID NO: 21900
  Description of Unknown: LeftRegion for integrase B8980 sequence

SEQ ID NO: 21980 - DNA, 260 bp, Unknown; identical to SEQ ID NO: 21939
  Description of Unknown: LeftRegion for integrase B8981 sequence

SEQ ID NO: 21981 - DNA, 260 bp, Unknown
  Description of Unknown: LeftRegion for integrase B8982 sequence
aaaggacggtctggaacaccgccttgagaataagcggaagaccatcggcctgatggacacagaactgtgcaatcttcggcactccgtgacgctctacaggtggatcatactcggtttgtcgctattgatcgtcgggctttttgcctggtgcgtgtgggttgacattcattgtgccaactatggatttttgaggggataacatgtgccaaaaaatagtggttactctaccaaataatctacgcatccgtgtagcactgtac

SEQ ID NO: 21982 - DNA, 260 bp, Unknown; identical to SEQ ID NO: 21900
  Description of Unknown: LeftRegion for integrase B8983 sequence

SEQ ID NO: 21983 - DNA, 260 bp, Unknown
  Description of Unknown: LeftRegion for integrase B8984 sequence
cttgtttttaggatggtttggagttcataaattctatgaagggaaaattttatttggaattttatatttattaacttttggtttatttggtgtcggagttgtaattgaccttatattaattatattgaagccaaatccatattatgtataaaaattatgcccctctattaatatgagggggttttttaagggagttaaaaatgaacatagcaatttatccaaggaaatcaaaaaaagatgataattcagaatcaatggag

SEQ ID NO: 21984 - DNA, 260 bp, Unknown
  Description of Unknown: LeftRegion for integrase B8985 sequence
aattcttggtgtccagtgcttcataaaagatgaagatgcaaaatcaaaagtaatggatatgtccataggagacactgtaactcttaaggtccatataaaggaagttggagaagttatggcatacgtcgcagacattatagaaatcgaatagtatacagtccctctagtaaatgagggactttttttaaagggagttaaaaatgaacatagcaatttatccaagaaaatcaaaaaaagatgataattcagaatcaatggaa

SEQ ID NO: 21985 - DNA, 260 bp, Unknown; identical to SEQ ID NO: 21885
  Description of Unknown: LeftRegion for integrase B8986 sequence

SEQ ID NO: 21986 - DNA, 260 bp, Unknown
  Description of Unknown: LeftRegion for integrase B8987 sequence
aattgttggtgtccaatgctatataaaagatgatgatgtaaaagcaaaagtaatggaaatgtctaaagacgatactgtgacgctcaaagttcatattaaaaacgttggggaagttatggggtactccgcagatattatagaaatagaatagtatacagtccctctattaaatgagggactttttttaaagggagttaaaaatgaacatagcaatttatccaagaaaatcaaaaaaagatgataattcagaatcaatggaa

SEQ ID NO: 21987 - DNA, 260 bp, Unknown; identical to SEQ ID NO: 21906
  Description of Unknown: LeftRegion for integrase B8988 sequence

SEQ ID NO: 21988 - DNA, 260 bp, Unknown
  Description of Unknown: LeftRegion for integrase B8989 sequence
cattaggaactattacaattcattaattattattaaaagcatgttgaatcagcaaattatttcaaaagaagatgccataaaatctgagtcttttttagctaagaaatattgtatcaaacctgacagcatttatcgtctaaatgacttgataaatgacgataatagagtgatgtatagtagcgaaaggacgtgaataaataatgaaaatagtaacagaaattggtgcaattgctccaattaagaaactaaaaaaggtttgt

SEQ ID NO: 21989 - DNA, 260 bp, Unknown
  Description of Unknown: LeftRegion for integrase B8990 sequence
cattattggtgtccaatgctatataaaagatgatgatgtaaaagcaaaagtaatggaaatgtctaaagacgatactataacgctcaaagttcatattaaaaacgttggggaagttatggggtactccgcagatattatagaaatagaatagtatacagtccctctagtaaatgagggactttttttaaagggagttaaaaatgaacatagcaatttatccaaggaaatcaaaaaaagatgataattcagaatcaatggaa

SEQ ID NO: 21990 - DNA, 260 bp, Unknown
  Description of Unknown: LeftRegion for integrase B8991 sequence
gcttgtttttaggatggtttggagttcataaattctatgaagggaaaattttatttggaattttatatttattaacttttggtttattaggtgtcggagttgtaattgaccttatattaattatattgaagccaaatccatattatgtataaaaattatgcccctctattaatgtgaggggtttttttagggagttaaaaatgaacatagcaatttatccaagaaaatcaaaaaaagatgataattcagaatcaatggaa

SEQ ID NO: 21991 - DNA, 260 bp, Unknown; identical to SEQ ID NO: 21906
  Description of Unknown: LeftRegion for integrase B8992 sequence

SEQ ID NO: 21992 - DNA, 260 bp, Unknown
  Description of Unknown: LeftRegion for integrase B8993 sequence
aaaggacggactagaacatcgccttgagaacaaacggcagaccatcggcctgatggacacagaactgtgcaatctttggcactccgtgaagctatacaggtggatcatactcggtttgtcactattgatcatcgggctttttgcctggtgcgtttgggttgacatccattgtgccaactatggattttggaggggataacatgtgccaaaaaatagtggtcactctaccaaataatctacgcatccgtgtagcactgtac

SEQ ID NO: 21993 - DNA, 260 bp, Unknown; identical to SEQ ID NO: 21881
  Description of Unknown: LeftRegion for integrase B8994 sequence

SEQ ID NO: 21994 - DNA, 260 bp, Unknown
  Description of Unknown: LeftRegion for integrase B8995 sequence
gcttgtttttaggatggtttggagttcataaattctatgaagggaaaattttatttggaattttatatttattaacttttggtttatttggtgtcggagttgtaattgaccttatattaattatattgaagccaaatccatattatgtataaaaattatgcccctctattaatatgaggggttttttaagggagttaaaaatgaacatagcaatttatccaaggaaatcaaaaaaagatgacaattcagaatcaatggaa

SEQ ID NO: 21995 - DNA, 260 bp, Unknown
  Description of Unknown: LeftRegion for integrase B8996 sequence
aaaggacggactagaacaccgccttgagaacaaacggcagaccatcggcctgatggacacagaactgtgcaatctttggcactccgtgaagctatacaggtggatcatactcggtttgtcactattgatcatcgggctttttgcctggtgcgtttgggttgacatccattgtgctaactatggattttggaggggataacatgtgccaaaaaatagtggtcactctaccaaataatctacgcattcgtgtagcgctgtac

SEQ ID NO: 21996 - DNA, 260 bp, Unknown
  Description of Unknown: LeftRegion for integrase B8997 sequence
aggggaagattatttgcagatgctattagacgcagaaaaaagaggctgaaaacagcctccctctccataatttaatagttaataaaataatttctactcacacgcatattatatatgcggacaactatattatagcaaaatattatcacaaagtcaagtaaatacccgccccggaggtacgaaggcaggaagggaaataaatgaaaagagccgctttatacgtgcgagtaagcacgcaagagcagaagaacagtggattg

SEQ ID NO: 21997 - DNA, 260 bp, Unknown
  Description of Unknown: LeftRegion for integrase B8998 sequence
catttgtattgctccgattattgcagaaaaggagaaaaaaagatacagctgtgcatagcagatattaagcgtgggaaaagcagagatttgcaaaaatatatagatgatcgcaatcagtacagagaaaaggttgcacaggagaaagctagtgaaaattagcaacacccgccccggaggtacgaaggcaggaagggaaataaatgaaaagagccgctttgtacgtgcgagtaagcacgcaagagcagaagaacagtggattg

SEQ ID NO: 21998 - DNA, 260 bp, Unknown
  Description of Unknown: LeftRegion for integrase B8999 sequence
aaactatggaattaaaaagatacgaaaacatagcattggttaacgaatttgaaaatgcttgttttcgcttggttaactttccggacagtgaagaaataaccgagaaatacgaaaagcttagaaaaaagctaatagacaggcttagttgtatgtagatagcagcacccgccccggaggtacgaaggcaggaagaggaataaatgaaaagagccgctttatatgtgcgagtaagcacgcaagagcagaagaacagtggattg

SEQ ID NO: 21999 - DNA, 260 bp, Unknown
  Description of Unknown: LeftRegion for integrase B9000 sequence
aaactatggaattaaaaagatacgaaaacatagcattagttaatgaatttgaaaacgcttgttttcgcttggttaactttccggacagtgaagaaataaccgagaaatacgaaaagcttagaaaaaagctaatagataggcttagttgtatgtagatagcagcacccgccccggaggtacgaaggcaggaagggaaataaatgaaaagagccgctttgtacgtgcgagtaagcacgcaagagcagaagaacagtggattg

SEQ ID NO: 22000 - DNA, 260 bp, Unknown
  Description of Unknown: LeftRegion for integrase B9001 sequence
tgcacctattttggacagcgaggtgttttctttatgtctttttttaccttttccacagtgatttttacaggcgttccccgccctgaaatgatacgcgccagctctgcatatatctttactgcatccattgccgcgccccctttctgttgcattcatacgcgggcggcggcagcggtatgcggaaggaggcatgctgcagcatgaatgtaattcgcggcgttggctatatccgtgtttctaccgccgagcaggccacacgc

SEQ ID NO: 22001 - DNA, 260 bp, Unknown
  Description of Unknown: LeftRegion for integrase B9002 sequence
catttgtattgctccgattattgcagaaaaggagaaaaaaagatacagctgtgcatagcagatattaagcgtgggaaaagcagagatctgcaaaaatatatagatgatcgcaatcagtacagagaaaaggttgcacaggagaaagctagtgaaaattagcagcacccgccccggaggtacgaaggcaggaagggaaataaatgaaaagagccgctttgtacgtgcgagtaagcacgcaagagcagaagaacagtggattg

SEQ ID NO: 22002 - DNA, 260 bp, Unknown
  Description of Unknown: LeftRegion for integrase B9003 sequence
aatataaaaaataatacattttcgtgtatttttctcttgacataatagacattatcgtgtacaataagattaaatcaagagaggagatacaaagaaataaccgagaaatacgaaagtctcagaaaaaagctaatagatagacttagcagctataattagcagcacccgccccggaggtacgaaggcaggaagggaaataaatgaaaagagccgctttatacgtgcgagtaagcacgcaagagcagaagaacagcggtctg

SEQ ID NO: 22003 - DNA, 260 bp, Unknown
  Description of Unknown: LeftRegion for integrase B9004 sequence
aagctatagaattaaaaagatacgaaaacatagcattggttaacgaatttgaaaatgcttgttttcgcttggttaactttccggatagtgaagaaataaccgagaaatacgaaaagcttagaaaaaagctaatagacaggcttagttgtatgtagatagcagcacccgccccggaggtacgaaggcaggaagggaaataaatgaaaagagccgctttatacgtgcgagtaagcacgcaagagcagaagaacagtggattg

SEQ ID NO: 22004 - DNA, 260 bp, Unknown
  Description of Unknown: LeftRegion for integrase B9005 sequence
cagaactgaaacagctctgaacatgtaagcataagcatcaccccctctttcggagggggcaagaagtcccctccgggatggaggggccaaccgcctaccgttgcaggtagcgccgaattgaggatagcatattgtggcgggaaatgcaaggggaagcccagcctagcactcgatgttaagcagagggtgggaaagctatattgttcgctgtcagggggaaaggggcaggagttatgactcgcgcagctttatatatccgc

SEQ ID NO: 22005 - DNA, 260 bp, Unknown
  Description of Unknown: LeftRegion for integrase B9006 sequence
aaatcaatttaagacattggtagacgtcgattttgataattaccgtaaacgcaacgaaaatcgttccgtcagaaagaactgcactatcccatcttggttgaatgacgaagcagaaaaagctggaatcaatttttcggccactttgcaggaagcattaaaggcccaattaggattataggaaaaagggaggaaaaacatccatgaaacgcgtagcattatacatgcgcgtgtccaccgaagaacaagcgctccacggctac

SEQ ID NO: 22006 - DNA, 260 bp, Unknown
  Description of Unknown: LeftRegion for integrase B9007 sequence
aaactatggaattaaaaagatacgaaaacatagcattggttaacgaatttgaaattgcttgttttcgcttggttaactttccggacagtgaagaaataaccgagaaatacgaaaagcttagaaaaaagctaatagacaggcttagttgtatgtagatagcagcacccgccccggaggtacgaaggcaggaagggaaataaatgaaaagagccgctttgtacgtgcgagtaagcacgcaagagcagaagaacagtggattg

SEQ ID NO: 22007 - DNA, 260 bp, Unknown
  Description of Unknown: LeftRegion for integrase B9008 sequence
aaactatggaattaaaaagatacgaaaacatagcattggttaacgaatttgaaaatgcttgttttcgcttggttaactttccggacagtgaagaaataaccgagaaatacgaaaagcttagaaaaaagctaatagacagacttagttgtatgtagatagcagcacccgccccggaggtacgaaggcaggaagggaaataaatgaaaagagccgctttgtacgtgcgagtaagcacgcaagagcagaagaacagtggattg

SEQ ID NO: 22008 - DNA, 260 bp, Unknown; identical to SEQ ID NO: 22003
  Description of Unknown: LeftRegion for integrase B9009 sequence

SEQ ID NO: 22009 - DNA, 260 bp, Unknown
  Description of Unknown: LeftRegion for integrase B9010 sequence
atataaaaaataatatactttcgtatatttttatcttggtaaaatagtcattatcgtatataatccaatcaaaccaaaagaggatatacaaagaaataaccgagaaatacgaaagtcttagaaaaaaagctaatggatagacttagcagctataattagcaacacccgccccggaggtacgaaggcaggaagggaaagaaatgaaaagagccgctttatacgtgcgagtaagcacgcaggagcagaagaacagtggattg

SEQ ID NO: 22010 - DNA, 260 bp, Unknown
  Description of Unknown: LeftRegion for integrase B9011 sequence
gaactgaaacagctctgaatatgtaagcataagcatcaccccctctttcggagggggcaagaagtcccctccgggatggaggggccaaccgcctaccgttgcaggtagcgccgaattgaggatagcatattgtggcgggaaatgcaaggggaagccccgcctagcacttacgatgttaggcagagggtgggaaagctatattgttcgctgtcagggggaaaggggcagaggttatgactcgcgcagctttatatatccgc

SEQ ID NO: 22011 - DNA, 260 bp, Unknown
  Description of Unknown: LeftRegion for integrase B9012 sequence
aaaagatgggctggaacaccgccttgaaaataagcggaagaccatcggcctgatggaggcggaactgaataacctacgtcattccgtaaaactatacaggtggatcatgctcggtttgtcgctattgatcgtcggtctcttcgtctggtgcgtgtgggtagatattcactgcgccaattacggattttggaggggatagtatgagagccgcactatatatccgcgtctcgacggaagaacaggcgcggcacggcctatct

SEQ ID NO: 22012 - DNA, 260 bp, Unknown
  Description of Unknown: LeftRegion for integrase B9013 sequence
atataaaaaataatatactttcgtatatttttatcttggtaaaatagtcattatcgtatttaatccaattaaaccaaaagaggatgtgcgaagaaataaccgagaaatacgaaagtcttagaaaaaaagctaatagatagacttagcagctataattagcagcacccgccccggaggtacgaaggcaggaagggaaataaatgaaaagagccgctttgtacgtgcgagtaagcacgcaagagcagaagaacagtggattg

SEQ ID NO: 22013 - DNA, 260 bp, Unknown; identical to SEQ ID NO: 22003
  Description of Unknown: LeftRegion for integrase B9014 sequence

SEQ ID NO: 22014 - DNA, 260 bp, Unknown
  Description of Unknown: LeftRegion for integrase B9015 sequence
aatataaaaaataatatactttcgtatatttttatcttggtaaaatagtcattatcgtatttaatccaattaaaccaaaagaggatgtgcaaagaaataaccgagaaatacgaaagtcttagaaaaaaactaatagatagacttagcagctataattagcagcacccgccccggaggtacgaaggcaggaagaggaataaatgaaaagagccgctttatatgtgcgagtaagcacgcaagagcagaagaacagtggattg

SEQ ID NO: 22015 - DNA, 260 bp, Unknown
  Description of Unknown: LeftRegion for integrase B9016 sequence
aagttgcgacacgataggaacgtgaacatagatacaattatgtatttgtgtgagaaattagactgccaggtatgcgatattgtggaatataaaaaataatacattttcgtgtattttcatcttggcataatagacattatcgtgtataattgaattaaatcaagaaaggagatacaaaaaaatgagggggttgagaaataatgaaaagagccgctttatatgtgcgagtaagcacgcaggagcaaaaaaacagcggtctg

SEQ ID NO: 22016 - DNA, 260 bp, Unknown
  Description of Unknown: LeftRegion for integrase B9017 sequence
ttggttattatagtaataaaaaagacgccattgctgcaagaaaagaggcggaagaaaaaatgcatggtccatttttggaatggtacgcagaacattatcccaaacaatgggaaaccaagaagaaaaaagctaatagatagacttagcagctataattggcagcacccgccccggaggtacgaaggcaggaaggggaataaatgaaaagagccgctttgtacgtgcgagtaagcacgcaagagcagaagaacagtggattg

SEQ ID NO: 22017 - DNA, 260 bp, Unknown
  Description of Unknown: LeftRegion for integrase B9018 sequence
aaaactatagaattaaaaagatacgaaaacatagcattggttaacgaatttgaaaatgcttgttttcgcttggttaactttccggatagtgaagaaataaccgagaaatacgaaactctcagaaaaaagctaatagataggcttagcagctataattagcagcacccgccccggaggtacgaaggcaggaagggaaagaaatgaaaagagccgctttatacgtgcgagtaagcacgcaagagcagaagaacagcggattg

SEQ ID NO: 22018 - DNA, 260 bp, Unknown
  Description of Unknown: LeftRegion for integrase B9019 sequence
atataaaaaataatatactttcgtatatttttatcttggtaaaatagtcattatcgtatttaatccaattaaaccaaaagaggatgtgcgaagaaataaccgagaaatacgaaaatcttagaaaaaaagctaatagatagacttagcagctataattagcagcacccgccccggaggtacgaaggcaggaaaggaaataaatgaaaagagccgctttatacgtgcgagtaagcacgcaagagcagaagaacagtggattg

SEQ ID NO: 22019 - DNA, 260 bp, Unknown
  Description of Unknown: LeftRegion for integrase B9020 sequence
agtataaaaaataatatattttcgtgtatttttacctcgacataatagtcattatcgtgtataatgtgagtaaatcaagagaggagatacaaagaaataaccgagaaatacgaaagtctcagaaaaaagctaatagatagacttagcagctataattagcagcacccgccccggaggtacgaaggaaggaagggaaataaatgaaaagagccgctttatacgtgcgagtaagcacgcaagagcagaagaacagcggattg

SEQ ID NO: 22020 - DNA, 260 bp, Unknown; identical to SEQ ID NO: 22003
  Description of Unknown: LeftRegion for integrase B9021 sequence

SEQ ID NO: 22021 - DNA, 260 bp, Unknown
  Description of Unknown: LeftRegion for integrase B9022 sequence
aaactatagaattaaaaagatacgaaaacatagcattggttaacgaatttgaaaatgcttgttttcgcttggttaactttccagacagtgaagaaataaccgagaaatacgaaaaactcagaaaaaagctaatagacaggcttagttgtatgtagatagtagcacccgccccggaggtacgaaggcaggaaaggaaataaatgaaaagagccgctttatacgtgcgagtaagcacgcaagagcagaagaacagtggtctg

SEQ ID NO: 22022 - DNA, 260 bp, Unknown; identical to SEQ ID NO: 21999
  Description of Unknown: LeftRegion for integrase B9023 sequence

SEQ ID NO: 22023 - DNA, 260 bp, Unknown
  Description of Unknown: LeftRegion for integrase B9024 sequence
ttggttattatagcaataaaaaagacgccattgctgcaagaaaagaggcggaagaaaaattgcatggtccgtttttggaatggtacgcagaaaattatcccaaacaatgggaagctaagaagaaaaaagctaatagatagacttagcagctataattagcagcacccgcctcggaggtacgaaggcaggaaggggaataaatgaaaagagccgctttatacgtgcgagtaagcacgcaagagcagaaaaacagcggtctg

SEQ ID NO: 22024 - DNA, 260 bp, Unknown; identical to SEQ ID NO: 22004
  Description of Unknown: LeftRegion for integrase B9025 sequence

SEQ ID NO: 22025 - DNA, 260 bp, Unknown
  Description of Unknown: LeftRegion for integrase B9026 sequence
aaactatggaattaaaaagatacgaaaacatagcattggttaacgaatttgaaaatgcttgttttcgcttggttaactttccggacagtgaagaaataaccgagaaatacgaaaagcttagaaaaaagctaatagacaggcttagttgtatgtagatagcagcacccgccccggaggtacgaaggcaggaagggaaataaatgaaaagagccgctttgtacgtgcgagtaagcacgcaagagcagaagaacagtggattg

SEQ ID NO: 22026 - DNA, 260 bp, Unknown
  Description of Unknown: LeftRegion for integrase B9027 sequence
atataaaaaataatatactttcgtatatttttatcttggtaaaatagtcattatcgtatttaatccaattaaatcaaaagaggatgtacaaagaaataaccgagaaatacgaaagtcttagaaaaaaagctaatagatagacttagcagctataattagcagcacccgccccggaggtacgaaggcaggaagggaaataaatgaaaagagccgctttgtacgtgcgagtaagcacgcaagagcagaagaacagtggattg

SEQ ID NO: 22027 - DNA, 260 bp, Unknown
  Description of Unknown: LeftRegion for integrase B9028 sequence
aaactatagaattaaaaagatacgaaaacatagcattggttaacgaatttgaaaatgcttgttttcgcttggttaactttccggatagtgaagaaataaccgagaaatacgaaaatctcagaaaaaagctaatagacaggcttagttgtatgtagatagcagcacccgccccggaggtacgaaggcaggaaggtaaataaatgaaaagagccgctttatacgtgcgagtaagcacgcaagagcagaagaacagcggattg

SEQ ID NO: 22028 - DNA, 260 bp, Unknown; identical to SEQ ID NO: 22003
  Description of Unknown: LeftRegion for integrase B9029 sequence

SEQ ID NO: 22029 - DNA, 260 bp, Unknown
  Description of Unknown: LeftRegion for integrase B9030 sequence
tcttgcacctattttggacagcgaggtgttttctttatgtctttttttaccttttccacagtgatttttacaggcattccccgccctgaaatgatacgcgccagctctgcatatatctttactgcatccattgccgcgccccctttctgttgcattcatacgcgggcggcggcagcggtatgcggaaggaggcgcgcagcatgaatgtaattcgcggcgtgggctatatccgcgtttctaccgccgagcaggccacacgc

SEQ ID NO: 22030 - DNA, 260 bp, Unknown
  Description of Unknown: LeftRegion for integrase B9031 sequence
aaactatagaattaaaaagatacgaaaacatagcattggttaacgaatttgaaaatgcttgttttcgcttggttaactttccggacagtgaagaaataaccgagaaatacgaaaagcttagaaaaaagctaatagacaggcttagttgtatgtagatagcagtgcccgccccggaggtacgaaggcaggaagggaaataaatgaaaagagccgctttgtacgtgcgagtaagcacacaagagcagaagaacagtggattg

SEQ ID NO: 22031 - DNA, 260 bp, Unknown
  Description of Unknown: LeftRegion for integrase B9032 sequence
aaactatagaattaaaaagatacgaaaacatagcattagttaacgaatttgaaaatgcttgttttcgcttggttaactttccggacagtgaagaaataaccgagaaatacgaaaatctcagaaaaaagctaatagacaggcttagttgtatgtagatagcagcacccgccccggaggtacgaaggcaggaagggaaataaatgaaaagagccgctttatacgtgcgagtaagcacgcaagagcagaagaacagtggattg

SEQ ID NO: 22032 - DNA, 260 bp, Unknown
  Description of Unknown: LeftRegion for integrase B9033 sequence
aaactatagaattaaaaagatacgaaaacatagcattagttaatgaatttgaaaacgcttgtttttgcttggttaactttccgaatagtgaagaaataaccgagaaatacgaaagtctcaggaaaaagctaatagacaggcttagcggtatgtaggcagcagcacccgccccggaggtacgaaggcaggaagggaaataaatgaaaagagccgctttatatgtgcgagtaagcacgcaagagcagaagaacagtggattg

SEQ ID NO: 22033 - DNA, 260 bp, Unknown
  Description of Unknown: LeftRegion for integrase B9034 sequence
aaactatggaattaaaaagatacgaaaacatagcattggttaacgaatttgaaaatgcttgttttcgcttggttaactttccggacagtgaagaaataaccgagaaatacgaaaagcttagaaaaaagctaatagacaggcttagttgtatgtagatagcagcacccgccccggaggtacgaaggcaggaagggaaataaatgaaaagagccgctttatatgtgcgagtaagcacgcaagagcagaagaacagtggattg

SEQ ID NO: 22034 - DNA, 260 bp, Unknown
  Description of Unknown: LeftRegion for integrase B9035 sequence
agaaagtatggaaaatatgccaaattagaaacagaaaaaagagcctgaaaacagactccctttccgttaacttaatagttaataaaatagtttctactcacacgcatatacaatatgcggacaactatattatagcaaaatattatcacaaagtcaaataaatacccgccccggaggtacgaaggaaggaagggaaataaatgaaaagagccgctttatacgtgcgagtaagcacgcaagagcagaaaaacagcggattg

SEQ ID NO: 22035 - DNA, 260 bp, Unknown; identical to SEQ ID NO: 22034
  Description of Unknown: LeftRegion for integrase B9036 sequence

SEQ ID NO: 22036 - DNA, 260 bp, Unknown
  Description of Unknown: LeftRegion for integrase B9037 sequence
acagggtaacaagatcaaaggtttgcagtagactggatatcttttttataagctcctttctatccatattatgcgcctccttaaaaaaaagatgtttccatgctaacacaaagggaaaagcgatataatactttttttaacactttttacatgactaatcatgtaaacgtggcacagtaagaaaggatacagaaaaggaaatggaaggaaagaaaagggcggctatatatgtgcgtgtatcaaccgcagaacaaaaggaa

SEQ ID NO: 22037 - DNA, 260 bp, Unknown
  Description of Unknown: LeftRegion for integrase B9038 sequence
atttgtattgctccgattattgcagaaaaggagaaaaaaagatacagctgtgcatagcagatattaagcgtgggaaaagcagagatctgcaaaaatatatagatgatcgcaatcagtacagagaaaaggttgcacaggagaaagctagtgaaaattagcagcacccgccccggaggttacgacggcaggaagggaaataaatgaaaagagccgctttgtacgtgcgagtaagcacgcaagagcagaagaacagtggattg

SEQ ID NO: 22038 - DNA, 260 bp, Unknown; identical to SEQ ID NO: 22019
  Description of Unknown: LeftRegion for integrase B9039 sequence

SEQ ID NO: 22039 - DNA, 260 bp, Unknown
  Description of Unknown: LeftRegion for integrase B9040 sequence
tggttattatagtgataaaaaagatgctgttgctgcaagaaaggaggcggaagaaaaattgcatggtccgtttttggaatggtacgcagaacattatcccaaacaatgggaaactaagaagaaaaaagctaatggacagacttagtggtatgtagatagcagcacccgcctcggaggtacgaaggcaggaagggaaataaatgaaaagagccgctttatacgtgcgagtaagcacgcaagagcagaagaacagtggattg

SEQ ID NO: 22040 - DNA, 260 bp, Unknown; identical to SEQ ID NO: 22019
  Description of Unknown: LeftRegion for integrase B9041 sequence

SEQ ID NO: 22041 - DNA, 260 bp, Unknown
  Description of Unknown: LeftRegion for integrase B9042 sequence
ttggttattatagcaataaaaaagacgccattgctgcaagaaaagaggcggaagaaaaattgcatggtccatttttggaatggtacgcagaacattatcccaagcaatgggaaactaagaagaaaaaagctaatagataggcttagcagctataattagcagcacccgccccggaggtacgaaggcaggaaaggaaataaatgaaaaaagcagctttgtacgtgcgagtaagcacgcaagagcagaagaacagtggattg

SEQ ID NO: 22042 - DNA, 260 bp, Unknown
  Description of Unknown: LeftRegion for integrase B9043 sequence
aaactatagaattaaaaagatacgaaaacatagcattagttaatgaatttgaaaacgcttgttttcgcttggttaactttccggacagtgaagaaataaccgagaaatacgaaaagcttagaaaaaagctaatagacaggcttagttgtatgtagatagcagcacccgccccggaggtacgaaggcaggaagggaaataaatgaaaagagccgctttatacgtgcgagtaagcacgcaagagcagaagaacagtggattg

SEQ ID NO: 22043 - DNA, 260 bp, Unknown
  Description of Unknown: LeftRegion for integrase B9044 sequence
aatataaaaaataatacattttcgcgtatttttttcttgacacgatagtcattatcgtgtttaatcaaattaaaccaagagatgagatacaaagaaatgaaaaagcatggaaaactaagaagaaaaaagctaatagataggcttagcagctataattagcagcacccgccccggaggtacgaaggcaggaaaggaaataaatgaaaagagccgctttatacgtgcgagtaagcacgcaagagcagaagaacagtggattg

SEQ ID NO: 22044 - DNA, 260 bp, Unknown; identical to SEQ ID NO: 22017
  Description of Unknown: LeftRegion for integrase B9045 sequence

SEQ ID NO: 22045 - DNA, 260 bp, Unknown; identical to SEQ ID NO: 22014
  Description of Unknown: LeftRegion for integrase B9046 sequence

SEQ ID NO: 22046 - DNA, 260 bp, Unknown
  Description of Unknown: LeftRegion for integrase B9047 sequence
aaaatatggaattaaaaagatatgaaaacatagcattggttaacgaatttgaaaacgcttgttttcgcttggttaactttccggacagtgaagaaataaccgagaaatacgaaaatctcagaaaaaagctaatagacaggcttagttgtatgtagatagcagcacccgccccggaggtacgaaggcaggaagaggaataaatgaaaagagccgctttatatgtgcgagtaagcacgcaagagcagaagaacagtggattg

SEQ ID NO: 22047 - DNA, 260 bp, Unknown
  Description of Unknown: LeftRegion for integrase B9048 sequence
atataaaaaataatatactttcgtatatttttatcttggtaaaatagtcattatcgtatttaatccaattaaaccaaaagaggatgtgcgaagaaataaccgagaaatacgaaaatcttagaaaaaaagctaatagatagacttagcagctataattagcagcacccgccccggaggtacgaaggcaggaaaggaaataaatgaaaagagccgctttatacgtgcgagtaagcacgcaagagcagaagaacagcggattg

SEQ ID NO: 22048 - DNA, 260 bp, Unknown
  Description of Unknown: LeftRegion for integrase B9049 sequence
aaactatagaattaaaaagatacgaaaacatagcattagttaatgaatttgaaaacgcttgttttcgcttggttaactttccggacagtgaagaaataaccgagaaatacgaaaagcttagaaaaaagctaatagacaggcttagttgtatgtagatagcagcacccgccccggaggtacgaaggcaggaagaggaataaatgaaaagagccgctttgtacgtgcgagtaagcacgcaagagcagaagaacagtggattg

SEQ ID NO: 22049 - DNA, 260 bp, Unknown
  Description of Unknown: LeftRegion for integrase B9050 sequence
gaatataaaaaatgatacattttcgtgtatttttctcttgacataatagtcattatcgtgtataatgtgagtaaatcaagagaggagatacaaagaaataaccgagaaatacgaaagtctcagaaaaagctaatagatagacttagcagctataattagcagcacccgccccggaggtacgaaggaaggaagggaaataaatgaaaagagccgctttatacgtgcgagtaagcacgcaagagcagaagaacagcggattg

SEQ ID NO: 22050 - DNA, 260 bp, Unknown
  Description of Unknown: LeftRegion for integrase B9051 sequence
tggttattatagtgataaaaaagacgccattgctgcaagaaaagaggcggaagaaaaattacacggtccgtttttggaatggtacgcagaacattatcccaaacaatgggaagctaagaagaaaaaagctaatggacagacttagtggtatgtagatagcagcacccgccccggaggtacgaaggcaggaaaggaaataaatgaaaagagccgctttatacgtgcgagtaagcacgcaagagcagaagaacagtggattg

SEQ ID NO: 22051 - DNA, 260 bp, Unknown
  Description of Unknown: LeftRegion for integrase B9052 sequence
gaaatcaatttaagacattggtagacgtcgattttgacaattaccgtaaacgcaacgaaaatcgttccgtcagaaagaactgcactatcccatcttggctgaatgacgaagcagaaaaagctggaatcaatttttcggccactttacaggaagcattaaaggctcaattaggaatgtaggaaaaagggaggaaaacgtccatgaaacgcgtagcattgtacatgcgcgtgtccaccgaagaacaggcgctccatggctac

SEQ ID NO: 22052 - DNA, 260 bp, Unknown
  Description of Unknown: LeftRegion for integrase B9053 sequence
aaactatagaattaaaaagatgcgaaaacatagcactggttaacgaatttgaaaatgcttgttttcgcttggttaactttccggacagtgaagaaataaccgagaaatacgaaaagcttagaaaaaagctaatagacaggcttagttgtatgtagatagcagcacccgccccggaggtacgaaggcaggaagggaaataaatgaaaagagccgctttatacgtgcgagtaagcacgcaagagcagaagaacagcggattg

SEQ ID NO: 22053 - DNA, 260 bp, Unknown; identical to SEQ ID NO: 22023
  Description of Unknown: LeftRegion for integrase B9054 sequence

SEQ ID NO: 22054 - DNA, 260 bp, Unknown
  Description of Unknown: LeftRegion for integrase B9055 sequence
catttgtattgctccgattattgcagaaaaggagaaaaaaagatacagctgtgcatagcagatattaagcgtgggaaaagcagagatctgcaaaaatatatagatgatcgcaatcagtacagagaaaaggttgcacaggagaaagctagtgaaaattagcagcacccgccccggaggtacgaaggcaggaagggaaataaatgaaaagatgtgctttgtacgtgcgtgtgagcacgcaagagcagaagaacagtggattg

SEQ ID NO: 22055 - DNA, 260 bp, Unknown; identical to SEQ ID NO: 22003
  Description of Unknown: LeftRegion for integrase B9056 sequence

SEQ ID NO: 22056 - DNA, 260 bp, Unknown
  Description of Unknown: LeftRegion for integrase B9057 sequence
aagttgcgacacgataggaacgtgaacatagatacaattatgtatttgtgtgagaaattagactgccaggtatgcgatattgtggaatataaaaaataatacattttcgtgtattttcatcttggcacaatagacattatcgtgtataattgaattaaatcaagaaaggagatacaaaaaaatgagggggttgagaaataatgaaaagagccgctttatatgtgcgagtaagcacgcaggagcaaaaaaacagcggtctg

SEQ ID NO: 22057 - DNA, 260 bp, Unknown
  Description of Unknown: LeftRegion for integrase B9058 sequence
agaaagtatggaaaatatgccaaattagaaacagaaaaaagagcctgaaaacagactccctttccgttaacttaatagttaataaaatagtttctactcacacgcatatacaatatgcggacaactatattatagcaaaatattatcacaaagtcaaataaatacccgccccggaggtacgaaggcaggaagggaaataaatgaaaagagccgctttgtacgtgcgagtaagcacgcaagagcagaagaacagtggattg

SEQ ID NO: 22058 - DNA, 260 bp, Unknown
  Description of Unknown: LeftRegion for integrase B9059 sequence
atataaaaaataatatactttcgtatatttttatcttggtaaaatagtcattatcgtatttaatccaattaaaccaaaagaggatgtgcgaagaaataaccgagaaatacgaaaatcttagaaaaaaagctaatagatagacttagcagctataattagcagcacccgccccggaggtacgaaggcaggaagggaaataaatgaaaagagccgctttgtacgtgcgagtaagcacgcaagagcagaagaacagtggattg

SEQ ID NO: 22059 - DNA, 260 bp, Unknown
  Description of Unknown: LeftRegion for integrase B9060 sequence
aagctatagaattaaaaagatacgaaaacatagcattggttaacgaatttgaaaatgcttgttttcgcttggttaactttccggatagtgaagaaataaccgagaaatacgaaaagcttagaaaaaagctaatagacaggcttagttgtatgtagatagcagcacccgccccggaggtacgaaggcaggaagggaaataaatgaaaagagccgctttatacgtgcgagtaagcacgcaagagcagaagaacagcggattg

SEQ ID NO: 22060 - DNA, 260 bp, Unknown
  Description of Unknown: LeftRegion for integrase B9061 sequence
ttagactgccaagtgtgcgacattgtggaatataaaaaataatacattttcgtgtatttttctattgatataatagacactatcgtgtacaataatattaaatcaagagaggagatacaaagaaatgaaaaagcatggaaaactaagaagaaaaaagctaatgaacagacttaacgccgtggaggtaggaaggggaataaatgaaaagagccgctttatatgtgcgagtaagcacgcaagagcagaagaacagtggtctg

SEQ ID NO: 22061 - DNA, 260 bp, Unknown
  Description of Unknown: LeftRegion for integrase B9062 sequence
tgcacctattttggacagcgaggtgttttctttatgtctttttttaccttttccacagtgatttttacaggcgttccccgccctgaaatgatacgcgccagctctgcatatatctttactgcatccattgccgcgccccctttctgttgcattcatacgcgggcggcggcagcggtatgcggaaggaggcatgctgcagcatgaatgtaattcgcggcgttggctatatccgcgtttctaccgccgagcaggccacgcgc

SEQ ID NO: 22062 - DNA, 260 bp, Unknown; identical to SEQ ID NO: 21999
  Description of Unknown: LeftRegion for integrase B9063 sequence

SEQ ID NO: 22063 - DNA, 260 bp, Unknown
  Description of Unknown: LeftRegion for integrase B9064 sequence
ccgtggtctgcccccattgtcagcgagacattcctcagccgactgccgaagaaatcgccaaagctgaagccgaaactgtcgaatgcccgacgtgtcactatagagccccgaagggcgccgactgctgccctcggtgcaacaatcttatacattaaaaaagaccccgcctgtgcggggtttacttatacacggagaacgcaatgaagaataaacgagtagccctatatattcgcgtaagcaccgaggagcaggctcgtcag

SEQ ID NO: 22064 - DNA, 260 bp, Unknown
  Description of Unknown: LeftRegion for integrase B9065 sequence
catttgtattgctccgattattgcagaaaaggagaaaaaaagatacagctgtgcatagcagatattaagcgtgggaaaagcagagatctgcaaaaatatatagatgatcgcaatcagtacagagaaaaggttgcacaggagaaagctagtgaaaattagcagcacccgccccggaggtacgaaggcaggaaggaaaataaatgaaaagagctgctttatatgtgcgagtgagcacgcaagagcagaagaacagtgggttg

SEQ ID NO: 22065 - DNA, 260 bp, Unknown; identical to SEQ ID NO: 22048
  Description of Unknown: LeftRegion for integrase B9066 sequence

SEQ ID NO: 22066 - DNA, 260 bp, Unknown
  Description of Unknown: LeftRegion for integrase B9067 sequence
ttgatgctcttgctttaggtcagaatcgcttggctcaacaggtctggaatttcgaagtgctaaagaaaaacggacagaaacagacctatactatatcatcacagttcttcacccccgaagaaatgaaaaaactattcgacgctaaataccaataaaaaacaccccgcctgtgcggggtttacttatacacggagaccaatatgaagaataatcgggtggccctatacatacgggtaagcactgaggaacaggctcgtcag

SEQ ID NO: 22067 - DNA, 260 bp, Unknown
  Description of Unknown: LeftRegion for integrase B9068 sequence
aaactatagaattaaaaagatacgaaaacatagcattggttaacgaatttgaaaacgcttgtttttgcttggttaactttccggatagcaaagaagcaaccgagaaatacgaaagtctcagaaaaaagctaatagacagacttagcggtatgtagatagcagcacccgccccggaggtacgaaggcaggaagggaaataaatgaaaagagctgctttatatgtgcgagtaagcacgcaggagcaaaagaacagtggattg

SEQ ID NO: 22068 - DNA, 260 bp, Unknown; identical to SEQ ID NO: 22056
  Description of Unknown: LeftRegion for integrase B9069 sequence

SEQ ID NO: 22069 - DNA, 260 bp, Unknown
  Description of Unknown: LeftRegion for integrase B9070 sequence
aaactatagaattaaaaagatacgaaaacatagcattagttaatgaatttgaaaacgcttgttttcgcttggttaactttccggacagtgaagaaataaccgagaaatacgaaaagcttagaaaaaagctaatagacaggcttagttgtatgtagatagcagcacccgccccggaggtacgaaggcaggaagggaaataaatgaaaagagccgctttatacgtgcgagtaagcacacaagagcagaagaacagtggattg

SEQ ID NO: 22070 - DNA, 260 bp, Unknown
  Description of Unknown: LeftRegion for integrase B9071 sequence
aaactatggaattaaaaagatacgaaaacatagcattggttaacgaatttgaaaatgcttgttttcgcttggttaactttccggacagtgaagaaataactgagaaatacgaaaagcttagaaaaaagctaatagacaggcttagttgtatgtagatagcagcacccgccccggaggtacgaaggcaggaaaggaaataaatgaaaagagccgctttatatgtgcgagtaagcacgcaagagcagaagaacagcggattg

SEQ ID NO: 22071 - DNA, 260 bp, Unknown
  Description of Unknown: LeftRegion for integrase B9072 sequence
aagctgcgacacgatagaaacgtgaacatagatacaattatgtatttgtgcgagaaattagactgtcaggtgtgcgacatcgtggaatataaaaaatagtatattttcgtatatttttatcttggaataatagacatcatcgcgtataattgaattaaactaagagaagagatacaaagaaatgagagggttgagaaataatgaaaagagccgctttatacgtgcgagtaagcacgcaagagcagaagaacagtggattg

SEQ ID NO: 22072 - DNA, 260 bp, Unknown
  Description of Unknown: LeftRegion for integrase B9073 sequence
aaaatatagaattaaaaagatatgaaaacatagcgttggtgaacgaatttgaaaacgcttgtttttgcttggttaactttccggatagtgaagaaataaccaagaaatacgaaagtctcagaaaaaagctaatagacaggcttagttgtatgtagacagcagcgcccgccccggaggtacgaaggcaggaaggaaaataaatgaaaagagccgctttgtacgtgcgagtaagcacgcaagagcagaagaacagtggattg

SEQ ID NO: 22073 - DNA, 260 bp, Unknown
  Description of Unknown: LeftRegion for integrase B9074 sequence
catttgtattgctccgattattgcagaaaaggagaaaaaaagatacagctatgcatagcagatattaagcgtgggaaaagcagagatttgcaaaaatatatagatgatcgcaatcagtacagagaaaaggttgcacaggagaaagctagtgaaaattagcagcacccgccccggaggtacgaaggcaggaagggaaataaatgaaaagagccgctttgtacgtgcgagtaagcacgcaagagcagaagaacagtggattg

SEQ ID NO: 22074 - DNA, 260 bp, Unknown; identical to SEQ ID NO: 22019
  Description of Unknown: LeftRegion for integrase B9075 sequence

SEQ ID NO: 22075 - DNA, 260 bp, Unknown
  Description of Unknown: LeftRegion for integrase B9076 sequence
aaactatggaattaaaaagatacgaaaacatagcattggttaacgaatttgaaaatgcttgttttcgcttggttaactttccggacagtgaagaaataaccgagaaatacgaaaagcttagaaaaaaactaatagacaggcttagttgtatgtagatagcagcacccgccccggaggtacgaaggcaggaagggaaataaatgaaaagagccgctttatacgtgcgagtaagcacgcaagagcagaagaacagtggattg

SEQ ID NO: 22076 - DNA, 260 bp, Unknown; identical to SEQ ID NO: 22001
  Description of Unknown: LeftRegion for integrase B9077 sequence

SEQ ID NO: 22077 - DNA, 260 bp, Unknown; identical to SEQ ID NO: 22014
  Description of Unknown: LeftRegion for integrase B9078 sequence

SEQ ID NO: 22078 - DNA, 260 bp, Unknown
  Description of Unknown: LeftRegion for integrase B9079 sequence
catttgtattgctccgattattgcagaaaaggagaaaaaaagatacagctatgcatagcagatattaagcgtgggaaaagcagagatttgcaaaaatatatagatgatcgcaatcagtacagagaaaaggttgcacaggagaaagatagtgaaaattagcagcacccgccccggaggtacgaaggcaggaagggaaataaatgaaaagagccgctttgtacgtgcgagtaagcacgcaagagcagaagaacagtggattg

SEQ ID NO: 22079 - DNA, 260 bp, Unknown
  Description of Unknown: LeftRegion for integrase B9080 sequence
catttgtattgctccgattattgcagaaaaggagaaaaaaagatacagctgtgcatagcagatattaagcgcggaaaaagcagagatctgcaaaaatatatagatgatcgcaatcagtacagagaaaaggttgcacaggagaaagctagtaaaaattagcagcacccgccccggaggtacgaaggcaggaaaggaaataaatgaaaagagccgctttatacgtgcgagtaagcacgcaagagcagaagaacagtggattg

SEQ ID NO: 22080 - DNA, 260 bp, Unknown; identical to SEQ ID NO: 21999
  Description of Unknown: LeftRegion for integrase B9081 sequence

SEQ ID NO: 22081 - DNA, 260 bp, Unknown
  Description of Unknown: LeftRegion for integrase B9082 sequence
aaactatagaattaaaaagatacgaaaacatagcattggttaatgaatttgaaaatgcttgttttcgcttggttaactttccggatagtgaagaaataaccgagaaatacgaaaatctcagaaaaaagctaatagacaggcttagcggtatgtagacagcagcgcccgccccggaggtacgaaggcaggaaggaaaataaatgaaaagagccgctttgtacgtgcgagtaagcacgcaagagcagaagaacagcggattg

SEQ ID NO: 22082 - DNA, 260 bp, Unknown
  Description of Unknown: LeftRegion for integrase B9083 sequence
gaacgggtatgcattaagcggttttataagacagatacaggggttatgcttgtgtccgaaaatccgaaatatgcaccgcttcaattcagtgagtcgaattgtacggattttaaggttttggggttggcggtgttaaaacaaagcgaaatacattaaaaaagccccgcctgtgcggggtttacttatacgcggagaacaatatgaagaataaacgagtagccttatatatacgcgtaagcaccgaagagcaagcacggcaa

SEQ ID NO: 22083 - DNA, 260 bp, Unknown
  Description of Unknown: LeftRegion for integrase B9084 sequence
ttgtgtaaattgtagtaaagttcttacagaagaagaaatagaatattatgataatttttgtgagtattgtgaaggagaactatatcaatcaatgttgcaggaggaaaaatgacagcaaatatattaagaaaaaatgtaagtaaaatagacttaaaagatataaaaaaagctataaaagcaatagcagatgaggttaaaaagtgaattgcaaagttgcaatatacgcaagagaatcaacagaaaagcaagatatagataca

SEQ ID NO: 22084 - DNA, 260 bp, Unknown
  Description of Unknown: LeftRegion for integrase B9085 sequence
tcttgtacctattttggacagcgaggtgttttctttatgtcttttttcaccttctccacagtgatttttacaggcgttccccgccctgaaatgatacgcgccagttctgcatatatctttactgcatccattgccgcgccccctctctgttgcattcatacgcgggcagcggcagcggtatgcggaaggaggcgcgcggcatgaatgtaattcgcggcgtgggctatattcgcgtttctaccgccgagcaggccacacgc

SEQ ID NO: 22085 - DNA, 260 bp, Unknown
  Description of Unknown: LeftRegion for integrase B9086 sequence
aaatcaatttaagacattggtagacgtcgattttgataattaccgtaaacgcaacgaaaatcgttccgtcagaaagaactgcactatcccatcttggttgaatgacgaagcagaaaaagctggaatcaatttttcggccactttgcaggaagcattaaaggcccaattaggattataggaaaaagggaggaaaaacatccatgaaacgcgtagcattatacatgcgcgtgtccaccgaagaacaggcgctccacggctac

SEQ ID NO: 22086 - DNA, 260 bp, Unknown; identical to SEQ ID NO: 22034
  Description of Unknown: LeftRegion for integrase B9087 sequence

SEQ ID NO: 22087 - DNA, 260 bp, Unknown
  Description of Unknown: LeftRegion for integrase B9088 sequence
ttggttattatagcaataaaaaagacgccattgctgcaagaaaggaggcggaagaaaaattgcatggtccatttttagaatggtacgcagagcattatcccaaacaatgggaggctaagaagaaaaaagctaatagataagcttagcagctataattagcagcacccgccccggaggtacgaaggcaggaagggaaataaatgaaaagagccgctttatacgtgcgagtaagcacgcaagagcaaaagaacagtggattg

SEQ ID NO: 22088 - DNA, 260 bp, Unknown
  Description of Unknown: LeftRegion for integrase B9089 sequence
atataaaaaataatatactttcgtatatttttatcttggtaaaatagtcattatcgtatttaatccaattaaaccaaaagaggatgtacaaagaaataaccgagaaatacgaaagtcttagaaaaaaagctaatagatagacttagcagctataattagcagcacccgccccggaggtacgaaggaaggaagggaaataaatgaaaagagccgctttatacgtgcgagtaagcacgcaagagcagaagaacagcggattg

SEQ ID NO: 22089 - DNA, 260 bp, Unknown
  Description of Unknown: LeftRegion for integrase B9090 sequence
aaattataacataaaaaaatcctccagcactgcaatgctgaaggagtgttgaagaggtgtactgcaatacacccaatacataaaaagaatggctaccaaccatatatctttttatgtactcattttaccacaagcaattaattgcttcaattatgcaattaatttgcaatatatttaataaaaaagaaaggatgagtacaatgcaaaatgtacgaatatacgcacgtgtttctacagccgagcaaaagaaaaaagatatt

SEQ ID NO: 22090 - DNA, 260 bp, Unknown; identical to SEQ ID NO: 22003
  Description of Unknown: LeftRegion for integrase B9091 sequence

SEQ ID NO: 22091 - DNA, 260 bp, Unknown; identical to SEQ ID NO: 22003
  Description of Unknown: LeftRegion for integrase B9092 sequence

SEQ ID NO: 22092 - DNA, 260 bp, Unknown
  Description of Unknown: LeftRegion for integrase B9093 sequence
gaaaatatggaaaatatgccaaattagaaacaggaaaaagagcctgaaaacagactctttttccccttaacttaatagttaataaaatagtttctactcacacgcatatacaatatgcggacaattatattatagcaaaatattatcacaaagtcaaataaatacccgccccggaggtacgaaggcaggaagggaaataaatgaaaagagccgctttatacgtgcgagtaagcacgcaagagcagaagaacagcggtctg

SEQ ID NO: 22093 - DNA, 260 bp, Unknown
  Description of Unknown: LeftRegion for integrase B9094 sequence
ttggttattatagcaataaaaaagacgccattgctgcaagaaaggaggcggaagaaaaattgcatggtccatttttagaatggtacgcagagcattatcccaaacaatgggaggctaagaagaaaaaagctaatagataagcttagcagctataattagcagcacccgccccggaggtacgaaggcaggaagggaaataaatgaaaagagccgctttatacgtgcgagtaagcacgcaagagcagaagaacagcggtctg

SEQ ID NO: 22094 - DNA, 260 bp, Unknown; identical to SEQ ID NO: 22025
  Description of Unknown: LeftRegion for integrase B9095 sequence

SEQ ID NO: 22095 - DNA, 260 bp, Unknown
  Description of Unknown: LeftRegion for integrase B9096 sequence
aaactatggaattaaaaagatacgaaaacatagcattggttaacgaatttgaaaatgcttgttttcgcttggttaactttccggacagtgaagaaataactgagaaatacgaaaagcttagaaaaaagctaatagacaggcttagttgtatgtagatagcagcacccgccccggaggtacgaaggcaggaagggaaataaatgaaaagagccgctttatacgtgcgagtaagtacgcaagagcagaagaacagtggattg

SEQ ID NO: 22096 - DNA, 260 bp, Unknown
  Description of Unknown: LeftRegion for integrase B9097 sequence
aaactatggaattaaaaagatacgaaaacatagcattggttaacgaatttgaaaatgcttgttttcgcttggttaactttccggacagtgaagaaataaccgagaaatacgaaaagcttagaaaaaagctaatagacaggcttagttgtatgtagatagcagcacccgccccggaggtacgaaggcaggaagggaaataaatgaaaagagccgctttatacgtgcgagtaagcacgcaagagcagaagaacagtggattg

SEQ ID NO: 22097 - DNA, 260 bp, Unknown; identical to SEQ ID NO: 22003
  Description of Unknown: LeftRegion for integrase B9098 sequence

SEQ ID NO: 22098 - DNA, 260 bp, Unknown; identical to SEQ ID NO: 22023
  Description of Unknown: LeftRegion for integrase B9099 sequence

SEQ ID NO: 22099 - DNA, 260 bp, Unknown; identical to SEQ ID NO: 22011
  Description of Unknown: LeftRegion for integrase B9100 sequence

SEQ ID NO: 22100 - DNA, 260 bp, Unknown
  Description of Unknown: LeftRegion for integrase B9101 sequence
acagtgtgacaagatcaaaggtttgcagtaggttagatatcttttttataagctcctttctatccatatgatgcacctccttaaaaaaaagatgtttccatgctaacacaaagaggaaagcgatataatactttttttaacactttttacatgactaatcatgtaaacgtgacacagtaagaaaggatacagaaaaggaaatggaaggaaagaaaagggcggctatatacgtgcgtgtatcaactgtagagcaaaaagaa

SEQ ID NO: 22101 - DNA, 260 bp, Unknown
  Description of Unknown: LeftRegion for integrase B9102 sequence
ccgtggtctgccctcattgtcagcgagacattcctcagccgacggccgaagaaattgccaaagctgaagccgaaaccgtcgaatgcccgacgtgtcactatagagccccgaagggcgccgactgctgccctcggtgcaataatcttatacattaaaaaagaccccgcacaagcggggtttacttatatacggagaacaacatgaagaataagcgagtagccctatatatacgcgtaagcactgaagagcaagcacggcaa

SEQ ID NO: 22102 - DNA, 260 bp, Unknown
  Description of Unknown: LeftRegion for integrase B9103 sequence
aaactatggaattaaaaagatacgaaaacatagcattggttaacgaatttgaaaatgcttgttttcgcttggttaactttccggacagtgaagaaataactgagaaatacgaaaagcttagaaaaaagctaatagacaggcttagttgtatgtagatagcagcacccgccccggaggtacgaaggcaggaaaggaaataaatgaaaagagtcgctttatacgtgcgagtaagtacgcaagagcagaagaacagtggattg

SEQ ID NO: 22103 - DNA, 260 bp, Unknown
  Description of Unknown: LeftRegion for integrase B9104 sequence
tgctagacgcagaaaaaagaggctgaaaacagcctccctccccattaacttaatagttaataaaataatttctactcacacgcatatataatatgcggacaactatattatagcaaaatattatcgcaaagtcaaattagacttagcagctataattagcagcgcccgccccggaggtacgaaggcaggaagggaaataaatgaaaagagccgctttatacgtgcgagtaagcacgcaggaacagaagaacagtggattg

SEQ ID NO: 22104 - DNA, 260 bp, Unknown
  Description of Unknown: LeftRegion for integrase B9105 sequence
catttgtattgctccgattattgcagaaaaggagaaaaaaagatacagctgtgcatagcagatattaagcgtgggaaaagcagagatctgcaaaaatatatagatgatcgcaatcagtacagagaaaaggttgcacaggagaaagctagtgaaaattagcagcacccgccccggaggtacgaaggcaggagggaaaataaatgaaaagagccgctttatatgtgcgagtaagcacgcaagagcagaagaacagcggtctg

SEQ ID NO: 22105 - DNA, 260 bp, Unknown; identical to SEQ ID NO: 22023
  Description of Unknown: LeftRegion for integrase B9106 sequence

SEQ ID NO: 22106 - DNA, 260 bp, Unknown
  Description of Unknown: LeftRegion for integrase B9107 sequence
gaaaatatggaaaatatgccaaattagaaacaggaaaaagagcctgaaaacagactctttttccccttaacttaatagttaataaaatagtttctactcacacgcatatacaatatgcggacaattatattatagcaaaatattatcacaaagtcaaataaatacccgccccggaggtacgaaggcaggaagggaaataaatgaaaagagccgctttatacgtgcgagtaagcacgcaagagcagaagaacagcggtcta

SEQ ID NO: 22107 - DNA, 260 bp, Unknown
  Description of Unknown: LeftRegion for integrase B9108 sequence
agattaaaaaaggaggaagaaagtggttaggatatacgtaaatgggatccttacaaaaagagaagatttggaaaaaattgaaataaaaaatgaaaatataaaaaagattcttgccagtaaattgacggaaaagaagtgatgatatagaattgaccttgatagaatctcggtcaattcttttttagagaggaagagttgacatgaagaaaatgaatgtaggttatctgagggtatccacagaaaaccagacggaaaaatat

SEQ ID NO: 22108 - DNA, 260 bp, Unknown; identical to SEQ ID NO: 22054
  Description of Unknown: LeftRegion for integrase B9109 sequence

SEQ ID NO: 22109 - DNA, 260 bp, Unknown
  Description of Unknown: LeftRegion for integrase B9110 sequence
ttgcacctattttggacagcgaggtgttttctttatgtcttttttaccttttccacagtgatttttacaggcgttccccgccctgaaatgatacgcgccagctctgcatatatctttactgcatccattgccgcgccccctttctgttgcattcatacgcgggcggcggcagcggtatgcggaaggaggcatgctgcagcatgaatgtaattcgcggcgttggctatatccgcgtttctaccgccgagcaggccacgcgc

SEQ ID NO: 22110 - DNA, 260 bp, Unknown
  Description of Unknown: LeftRegion for integrase B9111 sequence
acagtgtgacaagatcaaaggtttgcagcaggttagatatcttttttataagctcctttctatccatatgatgcacctccttaaaaaaaagatgttttcatgctaacacaaagaggaaagcgatataatactttttttaacactttttacatgactaatcatgtaaacgtgacacagtaagaaaggatacagaaaaggaaatggaaggaaagaaaagggcggctatatatgtccgcgtatcaaccgcagaacaaagagat

SEQ ID NO: 22111 - DNA, 260 bp, Unknown
  Description of Unknown: LeftRegion for integrase B9112 sequence
ttgacagtaaaaatgtttctgattgaaaccatctgtcgaaaaaaaagagttgtctaactcatattcaatttttagattctcctgttcagcataaagattaaacagcaacgaatatattttttctgcgtccatattttcaccgcccctcatcggctagtatggactgctttttttattttcaaacaatcggaggtatttttatgagaaaaaatctgcgagtggcaggatacgctcgtgtttccactgatgaacaaaagaaa

SEQ ID NO: 22112 - DNA, 260 bp, Unknown
  Description of Unknown: LeftRegion for integrase B9113 sequence
tgacagtaagaatgtttctgattgaaaccatctgtcgaaaaaaaagagttgtctaactcatattcaatttttagattctcctgttcagcataaagattaaacaacaacgaatatattttttctgcgtccatattttcaccgcctctcatcggctagtatggactgctttttttattttcaatcaatcggaggtatttttgatgaaaaaaaatttacgaattggtggttatgcccgtgtatctactgatgaacaaaagaaa

SEQ ID NO: 22113 - DNA, 260 bp, Unknown
  Description of Unknown: LeftRegion for integrase B9114 sequence
ttgacagcaagaatgtttctgattgaaaccatctgtcgaaaaaaaagagttgtttaactcatattcaattttgatattttcctgttcagcataaagattaaacaacaacgaatatattttttctgcatccatattttcaccgcccctcatcggctagtatggactgctttttttattttcaatcaatcggaggtaattttatgagaaaaaatctgcgagtggcaggatacgctcgtgtttccactgatgaacaaaagaaa

SEQ ID NO: 22114 - DNA, 260 bp, Unknown
  Description of Unknown: LeftRegion for integrase B9115 sequence
cttgacagcaagaatgtttctcattgaaaccatctgtcgaaaaaaaagagttgtctaactcatattcaattttgagattttcctgttcagcataaagattaaacagcaacgaatatattttttttgcgtccatattttcaccgccctcatcggctagtatggactgctttttttattttcaaacaaacggaggtatttttatgagaaaaaatctgcgagtggcaggatacgctcgtgtttccactgatgaacaaaagaaa

SEQ ID NO: 22115 - DNA, 260 bp, Unknown
  Description of Unknown: LeftRegion for integrase B9116 sequence
agacagtaaaaatgtttctgattgaaaccatctgtcgaaaaaaaagagttatctaactcatactcaattttgagatcttcctgttctgcataaagattaaacagcaaagaatagaaactttcagcgtccatatgctcaccgcctttcaatggctagtatggactgctttttttattttcaatcaatcggagggattttttatgagaaaaaaactgcgagtggcaggatatgctcgtgtttccactgacgagcaaaaaaaa

SEQ ID NO: 22116 - DNA, 260 bp, Unknown; identical to SEQ ID NO: 22112
  Description of Unknown: LeftRegion for integrase B9117 sequence

SEQ ID NO: 22117 - DNA, 260 bp, Unknown
  Description of Unknown: LeftRegion for integrase B9118 sequence
tagacagcaagaatgtttctgattgaaaccatctgtcgaaaaaaaagaattgtctaattcatattcaattttgatattttcctgttcagcataaagattaaacagcaacgaatatattttttctgcgtccatattttcaccgtcctcatcggctagtatggactgctttttttattttcaatcaaacggatgtaatttttatgagaaaaaatctgcgagtggcaggatacgctcgtgtttccactgatgaacaaaagaaa

SEQ ID NO: 22118 - DNA, 260 bp, Unknown; identical to SEQ ID NO: 22034
  Description of Unknown: LeftRegion for integrase B9119 sequence

SEQ ID NO: 22119 - DNA, 260 bp, Unknown
  Description of Unknown: LeftRegion for integrase B9120 sequence
agtataaaaaataatatattttcgtgtatttttacctcgacataatagtcattatcgtgtataatgtgagtaaatcaagagaggagatacaaagaaataaccgagaaatacgaaagtctcagaaaaaagctaatagatagacttagcagctataattagcagcacccgccccggaggtacgaaggaaggaagggaaataaatgaaaagagccgctttatacgtgcgagtaagcacgcaagagcagaaaaacagcggattg

SEQ ID NO: 22120 - DNA, 260 bp, Unknown
  Description of Unknown: LeftRegion for integrase B9121 sequence
ttgacagcaagaatgtttctgattgaaacactctgtcgaaaaaaaagagttgtctaactcatattcaattttgatattttcctgttcagcataaagattaaacagcaacgaatatattttttctgcgtccatattttcaccgcccctcatcggctagtatggactgctttttttattttcaatcaatcggagggatttttatgaaaaaaaaactgcgagtggcaggatatgctcgtgtttcaacagatgaacaaaaaaaa

SEQ ID NO: 22121 - DNA, 260 bp, Unknown
  Description of Unknown: LeftRegion for integrase B9122 sequence
tagacagcaagaatgtttctgattgaaaccatctgtcgaaaaaaaagaattgtctaattcatactcgattttaagattttcttgttcggcatacagattaaacaacaacgaatataatttttctgcgtccatattttcaccgcctctcatcggctagtatggactgctttttttattttcaaacaaacggaggtatttttatgagaaaaaatctgcgagtggcaggatacgctcgtgtttccactgatgaacaaaagaaa

SEQ ID NO: 22122 - DNA, 260 bp, Unknown
  Description of Unknown: LeftRegion for integrase B9123 sequence
acagtgtgacaagatcaaaggtttgcagcaggttagatatcttttttataagctcctttctatccatatgatgcacctccttaaaaaaaagatgtttttatgctaacacaaagaggaaagcgatataatactttttttaacactttttacatgactaatcatgtaaacgtgacacagtaagaaaggatacagaaaaggaaatggaaggaaagaaaagggcggctatatatgtgcgtgtatcaaccgcagagcaaagagat

SEQ ID NO: 22123 - DNA, 260 bp, Unknown
  Description of Unknown: LeftRegion for integrase B9124 sequence
cttgacagcaagaatgtttctgattgaaaccatctgtcgaaaaaaaagagttgtctaactcataatcaattttaagattttcctgttcagcatacaaattaaacaacaacgaatatattttttctgcgtccatattttcaccgccctcatcggctagtatggactgctttttttattttcaaacaatcggaggtatttttatgagaaaaaatctgcgagtggcaggatacgctcgtgtttccactgacgaacaaaaaaaa

SEQ ID NO: 22124 - DNA, 260 bp, Unknown
  Description of Unknown: LeftRegion for integrase B9125 sequence
agacagcaagaatgtttctgattgaaaccatctgtcgaaaaaaaagagttgtctaactcatactcaattttgagatcttcctgttcagcataaagattaaacagcaaagaatagaaactttcagcgtccatatgctcaccgcctttcaatggctagtatggactgctttttttattttcaatcaatcggagggattttttatgagaaaaaaactgcgagtggcaggatatgctcgtgtttccactgacgaacaaaagaaa

SEQ ID NO: 22125 - DNA, 260 bp, Unknown
  Description of Unknown: LeftRegion for integrase B9126 sequence
cttgacagcaagaatgtttctcgttgaaaccatctgtcgaaaaaaaagagttgtctaactcatattcaattttgagattttcctgttcagcataaagattaaacagcaacgaatatattttttttgcgtccatattttcaccgccctcatcggctagtatggactgctttttttattttcaatcaatcggaggtaattttatgagaaaaaatctgcgagtggcaggatacgctcgtgtttccactgatgaacaaaagaaa

SEQ ID NO: 22126 - DNA, 260 bp, Unknown
  Description of Unknown: LeftRegion for integrase B9127 sequence
cgacagcaagaatgtttctgattgaaacaacctgtcgaaaaaaaagagttatctaactcatattcaattttgagatcttcttgttcagcataaagattaaacagcaacgaatatattttttctgcgtccatattttcaccgcccttcatcggctagtatggactgctttttttattttcaatcaagcggaggttatttttatgagaaaaaaactgcgagtggcaggatatgctcgtgtttccactgacgaacaaaagaaa

SEQ ID NO: 22127 - DNA, 260 bp, Unknown
  Description of Unknown: LeftRegion for integrase B9128 sequence
aacagtgtgacaagatcaaaggtttgcagcaggttagatatcttttttataagctcctttctatccatatgatgcacctccttaaaaaaagatgtttccatgctaacacaaagaggaaagcgatataatactttttttaacactttttacatgactaatcatgtaaacgtgacacagtaagaaaggatacataaaaggaaatggaaggaaagaaaagggcggctatatatgtccgtgtatcaaccgcagaacaaagagat

SEQ ID NO: 22128 - DNA, 260 bp, Unknown
  Description of Unknown: LeftRegion for integrase B9129 sequence
tttcacttaacactctcttaatggttttacatagtttttctaaatctacttcctgattcataaactcacctattatttacttagttaagaatatgctaaaatataaggatattgacaatatttaagaccttttatacttttccttcttatcattagatgagctactttctgcataagatatttagaagggatgatgtcttatgttaaggtgtgctatctatatcagagtatctacagaagaacaaaaaattaacgggctg

SEQ ID NO: 22129 - DNA, 260 bp, Unknown
  Description of Unknown: LeftRegion for integrase B9130 sequence
cgacagcaagaatgtttctgattgaaacaacctgtcgaaaaaaaagagttatctaactcatattcaattttgagatcttcttgttcagcataaagattaaacagcaacgaatatattttttctgcgtccatattttcaccgcccttcatcggctagtatggactgctttttttattttcaatcaatcggaggtattttttatgagaaaaaaactgcgagtggcaggatatgctcgtgtttccactgacgaacaaaagaaa

SEQ ID NO: 22130 - DNA, 260 bp, Unknown; identical to SEQ ID NO: 22019
  Description of Unknown: LeftRegion for integrase B9131 sequence

SEQ ID NO: 22131 - DNA, 260 bp, Unknown
  Description of Unknown: LeftRegion for integrase B9132 sequence
agacagcaagaatgtttctgattgaaaccatctgtcgaaaaaaaagagttgtctacttcatattcaattttgatattttcctgttcagcataaagattaaacagcaacgaatatattttttctgcgtccatattttcaccgcccctcatcggctagtatggactgctttttttattttcaatcaatcggaggtattttttatgagaaaaaaactgcgagtggcaggatatgctcgtgtttccactgatgaacaaaagaaa

SEQ ID NO: 22132 - DNA, 260 bp, Unknown
  Description of Unknown: LeftRegion for integrase B9133 sequence
ggaatttaacatccgggaagaatggatccgaacaggcgagggcgatatgcacatagcgcaggccaaggatgaagaaatcagccggtttttgcatgacgtattaggcgttttcaaggggagttgcacaaaatgcggtttgcaaacattgtacgcatttattgtacatcaacccccaatcaaaatcaaggggggattgaaaaatgagagtagcactatatgctagagtgtcaacggaggagcaggccgtgcatggcctatct

SEQ ID NO: 22133 - DNA, 260 bp, Unknown
  Description of Unknown: LeftRegion for integrase B9134 sequence
tgacagtaaaaatgtttctgattgaaacagtctgtcgaaaaaaaagagttgtctaactcatattcaattttgagatcttcctgttcagcataaagattaaacagcaaagaatagaaactttcagcgtccatatgctcaccgcctttcaatggctagtatggactgctttttttattttcaatcaatcggaggtattttttatgagaaaaaaactgcgagtggcaggatatgctcgtgtttccactgacgaacaaaaaaaa

SEQ ID NO: 22134 - DNA, 260 bp, Unknown
  Description of Unknown: LeftRegion for integrase B9135 sequence
ccttgacagcaagaatgtttctgattgaaaccatctgtcgaaaaaaaagagttgtttaactcatattcaatttggatattttcctgttcagcataaagattaaacaataatgaatatattttttctgcgtccatattttcaccgcctcatcggctagtatggactgctttttttattttcaaacaatcggaggtatttttatgagaaaaaatctgcgagtggcaggatatgctcgtgtttcaacagatgaacaaaagaaa

SEQ ID NO: 22135 - DNA, 260 bp, Unknown; identical to SEQ ID NO: 22134
  Description of Unknown: LeftRegion for integrase B9136 sequence

SEQ ID NO: 22136 - DNA, 260 bp, Unknown
  Description of Unknown: LeftRegion for integrase B9137 sequence
acagggtaacaagatcaaaggtttgcagtagactggatatcttttttataagctcctttctatccatatgatgcacctccttaaaaaaaagatgtttccatgctaacacaaagaagaaagcgatataatactttttttaacactttttacatgactaatcatgtaaacgtgacacagtaagaaaggatacagaaaaggaaatggaaggaaagaaaagggcggctatatatgtccgtgtatcaaccgcagaacaaagagat

SEQ ID NO: 22137 - DNA, 260 bp, Unknown
  Description of Unknown: LeftRegion for integrase B9138 sequence
ttgacagtaaaaatgtttctgattgaaaccatctgtcgaaaaaaaagagttgtctaactcatattcaatttttagattctcctgttcagcatacaaattaaacaacaacgaatatattttttctgcgtccatattttcaccgcccctcatcggctagtatggactgctttttttattttcaaacaatcggaggtatttttatgagaaaaaatctgcgagtggcaggatacgctcgtgtttccactgatgaacaaaagaaa

SEQ ID NO: 22138 - DNA, 260 bp, Unknown
  Description of Unknown: LeftRegion for integrase B9139 sequence
tagacagcaagaatgtttctgattgaaacactctgtcgaaaaaaaagaattgtctaactcatattcaattttgagattttcctgttcagcataaagattaaacaacaacgaatatattttttctgcgtccatattttcaccgcccctcatcggctagtatggactgctttttttattttcaaacaaacggaggtatttttatgagaaaaaatctgcgagtggcaggatatgcccgtgtatctaccgatgaacaaaagaaa

SEQ ID NO: 22139 - DNA, 260 bp, Unknown
  Description of Unknown: LeftRegion for integrase B9140 sequence
agaagagtttgaagatgactgggaagatgaagaagaatattaaaaaataaaaataagttatttgaagagggagtttccctcttcttttaatactggaggtaaattatgataatagctaatgaaaaaatgacagaaactgaaaaaataatagcagcaagaaaaatactagaattaataaaagctaaaaaagatgattaaaaatgaaaagagcagttatatatattagagaatctacaaaatttcaagaccctgatactcaa

SEQ ID NO: 22140 - DNA, 260 bp, Unknown
  Description of Unknown: LeftRegion for integrase B9141 sequence
tagacagcaagaatgtttctgattgaaaccatctgtcgaaaaaaaagagttgtctaactcataatcaatttttagattctcctgttcagcataaagattaaacagcaacgaatatattttttccgcgtccatattttcaccgcctctcatcggctagtatggactgctttttttattttcaaacaatcggaggtatttttatgagaaaaaatctgcgagtggcaggatacgctcgtgtttccactgatgaacaaaagaaa

SEQ ID NO: 22141 - DNA, 260 bp, Unknown
  Description of Unknown: LeftRegion for integrase B9142 sequence
cttgacagtaaaaatgtttctgattgaaaccatctgtcgaaaaaaaagagttgtctaactcatactcgattttaagattttcctgttcagcataaagattaaacaacaacgaatatattttttctgcatccatattttcaccgccctcatcggctagtatggactgctttttttattttcaatcaatcggaggtaattttatgagaaaaaatctgcgagtggcaggatacgctcgtgtttccactgatgaacaaaagaaa

SEQ ID NO: 22142 - DNA, 260 bp, Unknown
  Description of Unknown: LeftRegion for integrase B9143 sequence
ctaacagggtaacaagatcaaaggtttgcagtagacttgatatcttttttataagctcctttctatccatatgatgcacctccttaaaaaaaagatgtttccatgctaacacaaagaagaaagcgatataatactttttttaacactttttacatgactaatcatgtaaacgtaacacaagaaaggatacagaaaaggaaatggaaggaaagaaaagggcggctatatatgtccgcgtatcaaccgcagaacaaagagat

SEQ ID NO: 22143 - DNA, 260 bp, Unknown
  Description of Unknown: LeftRegion for integrase B9144 sequence
cgacagcaagaatgtttctgattgaaacaacctgtcgaaaaaaaagagttatctaactcatattcaattttgagatcttcttgttcagcataaagattaaacagcaacgaatatattttttctgcgtccatattttcaccgcccttcatcggctagtatggactgctttttttattttcaatcaatcggaggtatttttgatgaaaaaaaatttacgaattggtggttatgcccgtgtatctactgatgaacaaaagaaa

SEQ ID NO: 22144 - DNA, 260 bp, Unknown
  Description of Unknown: LeftRegion for integrase B9145 sequence
ccttgacagcaagaatgtttctgattgaaacaacctgtcgaaaaaaaagagttgtttaactcatattcaattttgatattttcctgttcagcataaagattaaacagcaacgaatatattttttctgcgtccatattttcaccgcctcatcggctagtatggactgctttttttattttcaaacaatcggaggtatttttatgagaaaaaatctgcgagtggcaggatatgctcgtgtttccactgacgaacaaaagaaa

SEQ ID NO: 22145 - DNA, 260 bp, Unknown
  Description of Unknown: LeftRegion for integrase B9146 sequence
tagacagcaagaatgtttctgattgaaacaacctgtcgaaaaaaaagagttgtctaactcatattcgattttgatattttcctgttcagcataaagattaaacaacaacgaatatattttttctgcgtccatattttcaccgcccctcatcggctagtatggactgctttttttattttcaatcaagcggaggtaattttatgagaaaaaaactgcgagtggcaggatatgctcgtgtttccactgacgaacaaaaaaaa

SEQ ID NO: 22146 - DNA, 260 bp, Unknown
  Description of Unknown: LeftRegion for integrase B9147 sequence
cagtgtgcaggaaaggcaaggtgggtgcatgtatcgcaatgtaatgatgtatcagatcatggttgatattctgaaaggatggctggaaaacggcgtaatttcgcaaaaagactatcgggcaatgcatacaacaatggctgaaaaatacggcatatctttgtccggtatattcgttgataattcctccgtgacgagttaatatggtatcggaaggaggggttattacgaaaagattgatacaaaaaattgaacccacaatc

SEQ ID NO: 22147 - DNA, 260 bp, Unknown
  Description of Unknown: LeftRegion for integrase B9148 sequence
tcgacagcaagaatgtttctgattgaaaccatctgtcgaaaaaaaagagttgtctaactcatattcaattttgatattctcctgttcagcataaagattaaacagcaacgaatatattttttctgcgtccatattttcaccgccctcatcggctagtatggactgctttttttattttcaatcaagcggaggtaatttttatgagaaaaaaactgcgagtggcaggatatgctcgtgtttcaacagacgaacaaaagaaa

SEQ ID NO: 22148 - DNA, 260 bp, Unknown
  Description of Unknown: LeftRegion for integrase B9149 sequence
cgacagcaagaatgtttctgattgaaacaacctgtcgaaaaaaaagagttatctaactcatactcaattttgagatcttcttgttcagcataaagattaaacagcaacgaatatattttttctgcgtccatattttcaccgcccttcatcggctagtatggactgctttttttattttcaatcaatcggaggtattttttatgagaaaaaaactgcgagtggcaggatatgctcgtgtttccactgacgaacaaaagaaa

SEQ ID NO: 22149 - DNA, 260 bp, Unknown
  Description of Unknown: LeftRegion for integrase B9150 sequence
agacagcaagaatgtttctgattgaaaccatctgtcgaaaaaaaagagttgtttaactcatattcaattttgagattttcctgttcagcataaagattaaacaacaacgaatatattttttctgcgtccatattttcaccgcccctcatcggctagtatggactcctttttttattttcaatcaatcggaggtattttttatgagaaaaaaactgcgagtggcaggatatgctcgtgtttccactgacgaacaaaaaaaa

SEQ ID NO: 22150 - DNA, 260 bp, Unknown
  Description of Unknown: LeftRegion for integrase B9151 sequence
agacagcaagaatgtttctgattgaaaccacctgtcgaaaaaaaagaattgtctaactcataatcaattttgactttttcctgttcagcataaagattaaacagcaacgaatatattttttctgcgtccatattttcaccgcccctcatcggctagtatggactgctttttttattttcaatcaagcggaggtaatttttatgagaaaaaaattgcgagtggcaggatatgctcgtgtttcaactgacgaacaaaaaaaa

SEQ ID NO: 22151 - DNA, 260 bp, Unknown
  Description of Unknown: LeftRegion for integrase B9152 sequence
cgacagcaagaatgtttctgattgaaacaacctgtcgaaaaaaaagagttgtctaactcatattcaattttgagatcttcctgttctgcataaagattaaacagcaaagaatagaaactttcagcgtccatatgctcaccgcctttcaatggctagtatggactgctttttttattttcaatcaatcggaggtattttttatgagaaaaaaactgcgagtggcaggatatgctcgtgtttccactgacgaacaaaaaaaa

SEQ ID NO: 22152 - DNA, 260 bp, Unknown
  Description of Unknown: LeftRegion for integrase B9153 sequence
tgacagtaaaaatgtttctgattgaaaccatctgtcgaaaaaaaagagttgtctaactcatactcaattttgagatcttcctgttcagcataaagattaaacagcaaagaatagaaactttcagcgtccatatgctcaccgcctttcaatggctagtatggactgctttttttattttcaatcaatcggagggattttttatgagaaaaaaactgcgagtggcaggatatgctcgtgtttctactgacgaacaaaaaaaa

SEQ ID NO: 22153 - DNA, 260 bp, Unknown
  Description of Unknown: LeftRegion for integrase B9154 sequence
ttgacagcaaaaatgtttctgattgaaaccatctgtcgaaaaaaaagagttgtctaactcatactcgattttgagattttcctgttcggcataaagattaaacaacaacgaatatattttttctgcgtccatattttcaccgcccctcatcggctagtatggactgctttttttattttcaaacaaacggatgtatttttatgagaaaaaatctgcgagtggcaggatacgctcgtgtttccactgatgaacaaaagaaa

SEQ ID NO: 22154 - DNA, 260 bp, Unknown
  Description of Unknown: LeftRegion for integrase B9155 sequence
tagacagcaagaatgtttctgattgaaacaacctgtcgaaaaaaaagagttgtctaactcatattcaatttttagattttcctgttcagcataaagattaaacagcaacgaatatattttttctgcgtccatattttcaccgcccatcatcggctagtatggactgctttttttattttcaaacaattggaggtatttttatgagaaaaaatctgcgagtggcaggatatgctcgtgtatccactgatgaacaaaagaaa

SEQ ID NO: 22155 - DNA, 260 bp, Unknown
  Description of Unknown: LeftRegion for integrase B9156 sequence
ttgacagcaagaatgtttctgattgaaaccatctgtcgaaaaaaaagagttgtctaactcatactcgattttgagattttcctgttcagcataaagattaaacagcaacgaatatattttttctgcgtccatattttcaccgcctctcatcggctagtatggactgctttttttattttcaaacaagcggaggtatttttatgagaaaaaatctgcgagtggcaggatacgctcgtgtttccactgatgaacaaaagaaa

SEQ ID NO: 22156 - DNA, 260 bp, Unknown
  Description of Unknown: LeftRegion for integrase B9157 sequence
ccttgacagcaagaatgtttctgattgaaacaacctgtcgaaaaaaaagagttgtttaactcatattcaattttgatattttcctgttcagcataaagattaaacagcaacgaatatattttttctgcgtccatattttcaccgcctcatcggctagtatggactgctttttttattttcaaacaatcggaggtatttttatgagaaaaaatctgcgtgtggcaggatacgcccgtgtatctactgatgaacaaaagaaa

SEQ ID NO: 22157 - DNA, 260 bp, Unknown
  Description of Unknown: LeftRegion for integrase B9158 sequence
cgacagcaagaatgtttctgattgaaaccatctgtcgaaaaaaaagagttgtctaactcatattcaattttgagatcttcctgttcagcataaagattaaacagcaaagaatagaaactttcagcgtccatatgctcaccgcctttcaatggctagtatggactgctttttttattttcaaccaatcggaggtattttttatgagaaaaaaactgcgagtggcaggatatgctcgtgtttcaacagatgaacaaaaaaaa

SEQ ID NO: 22158 - DNA, 260 bp, Unknown
  Description of Unknown: LeftRegion for integrase B9159 sequence
tgacagtaaaaatgtttctgattgaaaccatctgtcgaaaaaaaagagttgtctaactcatactcaattttgagatcttcctgttcagcataaagattaaacagcaaagaatagaaactttcagcgtccatatgctcaccgcctttcaatggctagtatggactgctttttttattttcaatcaatcggagggattttttatgagaaaaaaactgcgagtggcaggatatgctcgtgtttcaacagatgaacagaaaaaa

SEQ ID NO: 22159 - DNA, 260 bp, Unknown
  Description of Unknown: LeftRegion for integrase B9160 sequence
ttgacagcaaaaatgtttctgattgaaaccatctgtcgaaaaaaaagagttgtctaactcatattcaattttgagatcttcttgttcagcgtaaagattaaacagcaacgaatatattttttctgcgtccatattttcaccgccttcatcggctagtatggactgctttttttattttcaatcaatcggaggtattttttatgagaaaaaatctgcgagtggcaggatatgctcgtgtttccactgacgaacaaaagaaa

SEQ ID NO: 22160 - DNA, 260 bp, Unknown
  Description of Unknown: LeftRegion for integrase B9161 sequence
aaaaatgaataagtacttagcttcaatagcaatgataaagcagatgatcaatgaagggattgtaattgaaaaagacatgccacagattaataaatactttagtgaaaaatatggtattaaagaaggcagtttatatagtcaaaataacttgataaagactccaactagagcgatgtatgtagacgaaaggagtaagaaaaatggctgaaacaataaaaataaattcattaccaacacttcccactttgcttaaagttgca

SEQ ID NO: 22161 - DNA, 260 bp, Unknown
  Description of Unknown: LeftRegion for integrase B9162 sequence
tgacagcaagaatgtttctgattgaaaccatctgtcgaaaaaaaagagttgtctaactcatattcaattttgatattttcctgttcagcataaagattaaacaataatgaatatattttttctgcgtccatattttcaccgcccctcatcggctagtatggactgctttttttattttcaatcaatcggaggtattttttatgagaaaaaaactgcaagtggcaggatatgctcgtgtttccactgacgaacaaaagaaa

SEQ ID NO: 22162 - DNA, 260 bp, Unknown
  Description of Unknown: LeftRegion for integrase B9163 sequence
ctaacagggtaacaagatcaaaggtttgcagtagactggatatcttttttataagctcctttctatccatatgatgcacctccttaaaaaaaagatgtttccatgctaacacaaagaagaaagcgatataatactttttttaacactttttacatgactaatcatgtaaacgtaacacaagaaaggatacagaaaaggaaatggaaggaaagaaaagggcggctatatatgtccgcgtatcaaccgcagaacaaagagat

SEQ ID NO: 22163 - DNA, 260 bp, Unknown
  Description of Unknown: LeftRegion for integrase B9164 sequence
gctaacagggtaacaagatcaaaggtttgcagcaggttagatatcttttttataagctcctttctatccatatgatgcacctccttaaaaaaagatgtttccatgctaacacaaagaggaaagcgatataatacttttttcaacactttttacatgactaaccatgtaaacgcaacacaagaaaggatacagaaaaggaaatggaaggaaagaaaagggcggctatatatgtccgtgtatcaaccgcagaacaaagagat

SEQ ID NO: 22164 - DNA, 260 bp, Unknown
  Description of Unknown: LeftRegion for integrase B9165 sequence
ttgacagtaaaaatgtttctgattgaaaccatctgtcgaaaaaaaagagttgtctaactcatactcgattttgagattttcctgttcagcatacaaattaaacaacaacgaatatattttttctgcatccatattttcaccgcccctcatcggctagtatggactgctttttttattttcaatcaatcggaggtaattttatgagaaaaaatctgcgagtggcaggatacgctcgtgtttccactgatgaacaaaagaaa

SEQ ID NO: 22165 - DNA, 260 bp, Unknown
  Description of Unknown: LeftRegion for integrase B9166 sequence
cttgacagtaaaaatgtttctgattgaaaccatctgtcgaaaaaaaagagttgtctaactcatactcgattttaagattttcctgttcagcataaagattaaacagcaacgaatatattttttttgcatccatattttcaccgccctcatcggctagtatggactgctttttttattttcaatcaatcggaggtatttttatgagaaaaaatctgcgagtggcaggatacgctcgtgtttccactgatgaacaaaagaaa

SEQ ID NO: 22166 - DNA, 260 bp, Unknown
  Description of Unknown: LeftRegion for integrase B9167 sequence
ctaacagtgtgacaagatcaaaggtttgcagcaggttagatatcttttttataagctcctttctatccatatgatgcacctccttaaaaaaaagatgtttccatgctaacacaaagaagaaagcgatataatactttttttaacactttttacatgactaatcatgtaaacgtaacacaagaaaggatacagaaaaggaaatggaaggaaagaaaagggcggctatatatgtccgtgtatcaaccgcagagcaaagagat

SEQ ID NO: 22167 - DNA, 260 bp, Unknown
  Description of Unknown: LeftRegion for integrase B9168 sequence
ctcgacagcaagaatgtttctgattgaaaccatctgtcgaaaaaaaagagttgtttaactcatattcaattttgatattttcctgttcagcataaagattaaacaataatgaatatattttttctgcgtccatattttcaccgccctcatcggctagtatggactgctttttttattttcaaacaaacggaggtatttttatgagaaaaaatctgcgagtggcaggatacgctcgtgtttccactgatgaacaaaagaaa

SEQ ID NO: 22168 - DNA, 260 bp, Unknown
  Description of Unknown: LeftRegion for integrase B9169 sequence
ctaacagggtaacaagatcaaaggtttgcagcaggttagatatcttttttataagctcctttctatccatatgatgcacctccttaaaaaaaagatgtttccatgctaacacaaagaagaaagcgatataatactttttttaacactttttacatgactaatcatgtaaacgtaacacaagaaaggatacagaaaaggaaatggaaggaaagaaaagggcggctatatatgtccgtgtatcaaccgcagaacaaagagat

SEQ ID NO: 22169 - DNA, 260 bp, Unknown
  Description of Unknown: LeftRegion for integrase B9170 sequence
ctaacagtgtgacaagatcaaaggtttgcagcaggttagatatcttttttataagctcctttctatccatatgatgcacctccttaaaaaaaagatgtttccatgctaacacaaagaggaaagcgatataatactttttttaacactttttacatgactaatcatgtaaacgtaacacaagaaaggatacagaaaaggaaatggaaggaaagaaaagggcggctatatatgtccgtgtatcaaccgcagaacaaagagat

SEQ ID NO: 22170 - DNA, 260 bp, Unknown
  Description of Unknown: LeftRegion for integrase B9171 sequence
tagacagcaagaatgtttctgattgaaaccatctgtcgaaaaaaaagaattgtctaactcatactcaattttgagatcttcctgttcggcatacaaattaaacaacaacgaatatattttttctgcgtccatattttcaccgcccctcatcggctagtatggactgctttttttattttcaaacaatcggaggtatttttatgagaaaaaatctgcgagtggcaggatacgctcgtgtttccactgacgaacaaaaaaaa

SEQ ID NO: 22171 - DNA, 260 bp, Unknown; identical to SEQ ID NO: 22134
  Description of Unknown: LeftRegion for integrase B9172 sequence

SEQ ID NO: 22172 - DNA, 260 bp, Unknown
  Description of Unknown: LeftRegion for integrase B9173 sequence
atattttggcattgatacgtcaagctatgatgaagcaacagacctcacactgcgcatcgagtctctgtttcacgatcttcctgttcagcataaagattaaacagcaaagaatagaaactttcagcgtccatatgctcaccgcctttcaatggctagtatggactgctttttttattttcaatcaatcggaggtattttttatgagaaaaaaactgcgagtggcaggatatgctcgtgtttcaacagatgaacaaaaaaaa

SEQ ID NO: 22173 - DNA, 260 bp, Unknown; identical to SEQ ID NO: 22127
  Description of Unknown: LeftRegion for integrase B9174 sequence

SEQ ID NO: 22174 - DNA, 260 bp, Unknown
  Description of Unknown: LeftRegion for integrase B9175 sequence
tgacagcaagaatgtttctgattgaaaccatctgtcgaaaaaaaagagttgtctaactcatattcaattttgagatcttcctgttctgcataaagattaaacagcaaagaatagaaactttcagcgtccatatgctcaccgcctttcaatggctagtatggactgctttttttattttcaatcaatcggaggtatttttgatgaaaaaaaatttacgaattggtggttatgcccgtgtatctactgatgaacaaaagaaa

SEQ ID NO: 22175 - DNA, 260 bp, Unknown
  Description of Unknown: LeftRegion for integrase B9176 sequence
tagacagcaagaatgtttctgattgaaaccatctgtcgaaaaaaaagagttatccaactcatactcaattttgatatcttcttgttcggcataaagattaaacagcaaagaatagaagctttcagcgtccatatgctcaccgcctttcaatggctagtatggactgctttttttattttcaatcaagcggaggtaattttatgagaaaaaaactgcgagtggcaggatatgctcgtgtttcaacagatgaacaaaaaaaa

SEQ ID NO: 22176 - DNA, 260 bp, Unknown
  Description of Unknown: LeftRegion for integrase B9177 sequence
cttgacagcaagaatgtttctgattgaaaccatctgtcgaaaaaaaagagttgtctaactcatactcgattttgagattttcctgttcagcatacaaattaaacaacaacgaatatattttttctgcgtccatattttcaccgccctcatcggctagtatggactgctttttttattttcaaacaagcggaggtatttttatgagaaaaaatctgcgagtggcaggatacgctcgtgtttccactgatgaacaaaagaaa

SEQ ID NO: 22177 - DNA, 260 bp, Unknown
  Description of Unknown: LeftRegion for integrase B9178 sequence
acaatataatacatttttgtcaaacttaaaagccgccctactctaccaaagcaaggcggccaagctctcgatgatacgaaagccccaaacaagcatattgtatcatcccgagcagccaaacgcaagcgaaactactgttctctgctggctgtattttttatactcatttttcatattcttaaaaaggatggtgatgcaatatgattagatgtgctctatatgacagagtttcaaccgacctgcaggcagaatatggccgc

SEQ ID NO: 22178 - DNA, 260 bp, Unknown; identical to SEQ ID NO: 18312
  Description of Unknown: LeftRegion for integrase B9179 sequence

SEQ ID NO: 22179 - DNA, 260 bp, Unknown
  Description of Unknown: LeftRegion for integrase B9180 sequence
ataactgtggtgcagactggaacgaacaggcagtaaagaaagcaaaggaatatttggactattcttctttctctcgttccgggctgattggtcagctgaaatatgaaggctttacaactgagcaggccgaatacggtgtaacccagaacggcctataattgtaatttcccgccacagcgggggcaaaggggtgaaatgcagtgcgggcgtttatctatggccgcttttccagccataagcagcaggaattaagcatagag

SEQ ID NO: 22180 - DNA, 260 bp, Unknown
  Description of Unknown: LeftRegion for integrase B9181 sequence
gacttacgctgtatgtcaggactgtggtcacagatggaaaattaaataaaaaatcccccggcgcttccaacaccgggggacgtacaccccgaagagtatacaatttattacaacaacagtatatcatcttcggacagccaacgcaatacggaactcttgttctgttggctgttatttttatacccaaaaggagggactttatgaagcaaatagcaatctatatccgtgtatctacggatacacaagccaaaaaaggggac

SEQ ID NO: 22181 - DNA, 260 bp, Unknown
  Description of Unknown: LeftRegion for integrase B9182 sequence
aaatgaagtagttcatcatatcaataaaaacaagcaagataatcgtcttgaaaacctccagctgctaactgtccatgagcactgtcagcttcattcaaaagaacgatgggcagctgtaaaagggggtgattaagtgggtattgaacgtataaaaagagctgcgatctatatccgcgtccgaaagcacttcagagcaaatgatgcatggaaagtctctggaagcccagaaagaatacctcgcaagctatgcaaaggatcat

SEQ ID NO: 22182 - DNA, 260 bp, Unknown
  Description of Unknown: LeftRegion for integrase B9183 sequence
gaggaaactttgcaggcgcggaatgatgagctggaacgccatgttgacgcaaaagcagacatgatcgagatcatgcggcgtggagtgcgtatccgcaacggcgtgattgctataatgttttttataattgttcttctcgctgcgtggtgcgtgtacattgattttcattgtatagattacggattttggagggggatttgatgatagcggcattgatgagagtggctttgataagagtggctttgtatatccgcgtctca

SEQ ID NO: 22183 - DNA, 260 bp, Unknown
  Description of Unknown: LeftRegion for integrase B9184 sequence
gaggagactttgcaagcgcggaatgatgagctggaacgccatgttgacgcaaaggccgataccattgaaatcatgcggcgcggcgtgcatatccgaaacggcgtgattgctataatgttcctcatcatcgtttttctcgctgtgtggtgcgtgtacattgattttcattgtatagattacggattttggagggggattcgatgatagcggcattgatgagagaggctttgataaaagcggcattgtatatccgcgtcacg

SEQ ID NO: 22184 - DNA, 260 bp, Unknown; identical to SEQ ID NO: 22182
  Description of Unknown: LeftRegion for integrase B9185 sequence

SEQ ID NO: 22185 - DNA, 260 bp, Unknown; identical to SEQ ID NO: 22182
  Description of Unknown: LeftRegion for integrase B9186 sequence

SEQ ID NO: 22186 - DNA, 260 bp, Unknown; identical to SEQ ID NO: 22182
  Description of Unknown: LeftRegion for integrase B9187 sequence

SEQ ID NO: 22187 - DNA, 260 bp, Unknown
  Description of Unknown: LeftRegion for integrase B9188 sequence
aaaatatggaattaaaaagatatgaaaacatagcattggttaacgaatttgaaaacgcttgttttcgcttggttaactttccggacagtgaagaaataaccgagaaatacgaaaatctcagaaaaaagctaatagacaggcttagttgtatgtagatagcagcacccgccccggaggtacgaaggaaggaagggaaataaatgaaaagagccgctttatacgtgcgagtaagcacgcaagagcagaagaacagcggattg

SEQ ID NO: 22188 - DNA, 260 bp, Unknown
  Description of Unknown: LeftRegion for integrase B9189 sequence
atcatagaacacttgacgccgaccgaggaaactttgcaagcacggaatgatgagttggaacgtcacgttgacgcaaaggccgataccatagagatcatgcggcgcggtgtacgcatccgcaacggcgtgattgctataatgtttgtcattatcgttctgctggctgcatggtgcttgtacattgattggagggggatttgatgatagcggcattgatgagagtggctttgataagagtggctttgtatatccgcgtctcg

SEQ ID NO: 22189 - DNA, 260 bp, Unknown; identical to SEQ ID NO: 22182
  Description of Unknown: LeftRegion for integrase B9190 sequence

SEQ ID NO: 22190 - DNA, 260 bp, Unknown
  Description of Unknown: LeftRegion for integrase B9191 sequence
gaggaaaccttgcaagcgcggaatgatgagctggaacgccatgttgatgcaaaggccgataccatcgagatcatgcggcgcggcgtgcgtatccgcaatggcgtgattttatttttgtttattgcggtggtactgctggccgcatggtgcgtgtatattgatctgcactgcactaactacggtttttggagggggatttgatgatagcggcattgatgagagtggctttgataagagcggcactgtatatccgcgtgtca

SEQ ID NO: 22191 - DNA, 260 bp, Unknown
  Description of Unknown: LeftRegion for integrase B9192 sequence
atttccgaacacctgacaccgaccgaggaaaccttgcaagcgcggaatgatgagctggaacgccatgttgacgcgaaagcggacatgatcgagatcatgcggcgcggcgtccgtatccgcaacggcgtgattgctataatgtttgtcattatcgtcctactggctgcatggtgcttgtacattgattggagggggatttgatgatagcggcattgatgagagaggctttgataagagcggcattgtatatccgcgtcacg

SEQ ID NO: 22192 - DNA, 260 bp, Unknown; identical to SEQ ID NO: 22188
  Description of Unknown: LeftRegion for integrase B9193 sequence

SEQ ID NO: 22193 - DNA, 260 bp, Unknown
  Description of Unknown: LeftRegion for integrase B9194 sequence
atttccgaacacttgacgccgaccgaggaaactttacaagcgcggaatgatgagctggaacgccatgttgacgcaaaggccgataccattgagatcatgcggcgcggtgtccatatccgcaacggcgtgattgctataatgtttgtcattatcgtcctactggctgcatggtgcttgtacattgattggagggggatttgatgatagcggcattgatgagagaggctttgataagagcggcattgtatatccgcgtcacg

SEQ ID NO: 22194 - DNA, 260 bp, Unknown; identical to SEQ ID NO: 22183
  Description of Unknown: LeftRegion for integrase B9195 sequence

SEQ ID NO: 22195 - DNA, 260 bp, Unknown; identical to SEQ ID NO: 22182
  Description of Unknown: LeftRegion for integrase B9196 sequence

SEQ ID NO: 22196 - DNA, 260 bp, Unknown
  Description of Unknown: LeftRegion for integrase B9197 sequence
atcatagaacacttgacgccgaccgaggaaactttgcaagcatggaatgatgagttggaacgtcacgttgacgcaaaggccgataccatagagatcatgcggcgcggtgtacgcatccgcaacggcgtgattgctataatgtttgtcattatcgttctgctggctgcatggtgcttgtacattgattggagggggatttgatgatagcggcattgatgagagtggctttgataagagtggctttgtatatccgcgtctcg

SEQ ID NO: 22197 - DNA, 260 bp, Unknown
  Description of Unknown: LeftRegion for integrase B9198 sequence
gaggaaactttgcaggcgcggaatgatgagctggaacgccatgttgacgcaaaagcagacatgatcgagatcatgcggcgtggagtgcgtatccgcaacggcgtgattgctataatgttttttataattgttcttctcgctgcatggtgcgtgtacattgattttcattgtatagattacggattttggagggggatttgatgatagcggcattgatgagagtggctttgataagagtggctttgtatatccgcgtctca

SEQ ID NO: 22198 - DNA, 260 bp, Unknown; identical to SEQ ID NO: 22182
  Description of Unknown: LeftRegion for integrase B9199 sequence

SEQ ID NO: 22199 - DNA, 260 bp, Unknown
  Description of Unknown: LeftRegion for integrase B9200 sequence
gaggaaactttgcaggcgcggaatgatgagctggaacgccatgttgacgcaaaagcagacatgatcgagatcatgcggcgtggagtgcgtatccgcaacggcgtgattgctataatgttttttataattgttcttctcgctgcgtggtgcgtgtacattgattttcattgtatagattacggattttggagggggatttgatgatagcggcattgatgagagcggctttgataagagtggctttgtatatccgcgtctca

SEQ ID NO: 22200 - DNA, 260 bp, Unknown
  Description of Unknown: LeftRegion for integrase B9201 sequence
tcaatgccgttttagctggttactgtattgtaaaaacacctaaagaatagtaaaattagattgatttaaataataaccactcagtgagtggttattatattacaaaaaaataaaaccgctttaaagcggttcgtgtatagcaattatttctgtgcagcattgctatgcttatattataacagatataaggagtatttaaaatgaaaaatgttagactatatattcgtgtatcgcatgaagagcaggttaaattcggctac

SEQ ID NO: 22201 - DNA, 260 bp, Unknown
  Description of Unknown: LeftRegion for integrase B9202 sequence
gaggaaactttgcaggcgcggaatgatgagctggaacgccatgttgacgcaaaagcagacatgatcgagatcatgcggcgtggagtgcgtatccgaaacggcgtgattgctataatgtttttcatcatcgttcttcttgctgcgtggtgcgtgtacattgattttcattgtatagattacggtttttggagggggatttgatgagagcggcattgatgagagtggctttgataagagtggctttgtatatccgcgtctca

SEQ ID NO: 22202 - DNA, 260 bp, Unknown; identical to SEQ ID NO: 22182
  Description of Unknown: LeftRegion for integrase B9203 sequence

SEQ ID NO: 22203 - DNA, 260 bp, Unknown; identical to SEQ ID NO: 22197
  Description of Unknown: LeftRegion for integrase B9204 sequence

SEQ ID NO: 22204 - DNA, 260 bp, Unknown
  Description of Unknown: LeftRegion for integrase B9205 sequence
attgcttcagtctccacctacatctcggcttcaaatccgtttttaatcaaatatattgctatatttaatccctacataagtcttctggtccttattgtagtatttagtcaataaattaaatacaatttactgcttcattctccattatatagggtgtatattacgcgaatatgctataatacttgcataggaggtaatatatggaagcactactttatacaagagtgtccaaagaagatcaagtaaaattcggtatgtct

SEQ ID NO: 22205 - DNA, 260 bp, Unknown
  Description of Unknown: LeftRegion for integrase B9206 sequence
atttccgaacggttgaccaggaacgaggaaacattgcaggcgcgaaacgatgagctggaacgtcatgttgacgcaaaaactgatatgatcgagatcatgcggcgcggtgtccgtatccgcaacggcgtgattgccataatgtttgtcatcattgttatgcttgctgtgtggtgcgtgtacattgattggagggggatttgatgatagcggcattgatgagagtggctttgataagagtggcattgtatatccgcgtctca

SEQ ID NO: 22206 - DNA, 260 bp, Unknown; identical to SEQ ID NO: 22183
  Description of Unknown: LeftRegion for integrase B9207 sequence

SEQ ID NO: 22207 - DNA, 260 bp, Unknown
  Description of Unknown: LeftRegion for integrase B9208 sequence
ctcgaggaaagtgaaagaattgagaagtaattaagccctaataaataaaacaaaacccccactaatgtgagggtaatgtataagggctgtaatgatacaacctgactcgcactcaaattgtatcatctcagcccaaagatttcaagtttttgggtatttttatacccttttttaccaacaatctgaatgaggtaaattaaatgagatgtgcaatttatataagagtatcatcggcggaacaacgccgagaaggatattca

SEQ ID NO: 22208 - DNA, 260 bp, Unknown
  Description of Unknown: LeftRegion for integrase B9209 sequence
attctatcaaaataaacgattagcctataaaaatattgaatattaacataaaacaaaacccccactatgtgagggtaatgtatagggctgtatgatacaacctgactcgcactcaaattgtatcatctcagcccaaagatttcaagtttttgggtatttttatacccttttttaccaacaatctgaatgaggtaaattaaatgagatgtgcaatttatataagagtatcatcggcggaacaacgccgagaaggatattca

SEQ ID NO: 22209 - DNA, 260 bp, Unknown
  Description of Unknown: LeftRegion for integrase B9210 sequence
gaggaaactttgcaggcgcggaatgatgagctggaacgccatgttgacgcaaaagcagacatgatcgagatcatgcggcgtggagtgcgtatccgcaacggcgtgattgctataatgttttttataattgttcttctcgctgcgtggtgcgtgtacattgattttcattgtatagattacggattttggagggggatttgatgatagcggcattgatgagagtggctttgataagagttgctttgtatatccgcgtctca

SEQ ID NO: 22210 - DNA, 260 bp, Unknown
  Description of Unknown: LeftRegion for integrase B9211 sequence
tcaatgccgttttagctggttactgtattgtaaaaacacctaaagaatagtaaaatcagattgatttaaataataaccactcagtgagtggttattatattacaaaaaaataaaaccgctttaaagcggttcgtgtatagcaattatttctgtgcagcattgctatgcttatattataacagatataaggagtatttaaaatgaaaaatgttagactatatattcgtgtatcacatgaagagcaggttaaattcggctac

SEQ ID NO: 22211 - DNA, 260 bp, Unknown
  Description of Unknown: LeftRegion for integrase B9212 sequence
gaggaaactttgcaggcgcggaatgatgagctggaacgccatgttgacgcaaaagcagacatgatcgagatcatgcggcgcggcgtccgtatccgcaacggcgtgattgctataatgttttttataattgttcttctcgctgcgtggtgcgtgtacattgattttcattgtatagattacggattttggagggggatttgatgatagcggcattgatgagagtggctttgataagagtggctttgtatatccgcgtctca

SEQ ID NO: 22212 - DNA, 260 bp, Unknown; identical to SEQ ID NO: 22205
  Description of Unknown: LeftRegion for integrase B9213 sequence

SEQ ID NO: 22213 - DNA, 260 bp, Unknown; identical to SEQ ID NO: 22182
  Description of Unknown: LeftRegion for integrase B9214 sequence

SEQ ID NO: 22214 - DNA, 260 bp, Unknown; identical to SEQ ID NO: 22182
  Description of Unknown: LeftRegion for integrase B9215 sequence

SEQ ID NO: 22215 - DNA, 260 bp, Unknown
  Description of Unknown: LeftRegion for integrase B9216 sequence
catcaatattaattttaaaaataaaagctcctgtgctggaacacaagagcttttaccacgatacttacataagcagtgcctatgatataataccgccctgaacaagctatattatatcatttgaaacaccgcttttgcaagtaggtgttatttttgtacttaaaattgttgcactggtgcaacttaaggaggaatgatatatgaaacgcgctgctatttatgttagagtatctacaaaagaacaaaaagaaaagggctta

SEQ ID NO: 22216 - DNA, 260 bp, Unknown
  Description of Unknown: LeftRegion for integrase B9217 sequence
aaggatgggctggaacaccgccttgaaaataagcggctgaccatcggcctgatggagacggagctgaacaacctacgtcattccgtaaaactatacaggtggatcatactcggtttgtcactattgatcgtcggtctcttcgcctggtgcgtgtgggtagatattcgctgcgccaattacggattttggaggggacaatattgaatgtcttacgcgcagcgctttatccgcgcgtcagtacggaagagcaggcgaagttt

SEQ ID NO: 22217 - DNA, 260 bp, Unknown
  Description of Unknown: LeftRegion for integrase B9218 sequence
ttgcaagtattattcttccttattgctttataaaaaattactttttgatggtgaaatttcagagcaagaattcgataaaattgaaaatcgtttagcaaagaaatattgtatcaaaattgatagtattattaggtcaaatgagttgataaattcctcttttagagcaatatatgtaggtgcaaaaaaggaggtaaaaacgaatgatagtaaatgaaatagtccctcaagagttagcgaataaaaggttgagagtttgtgcc

SEQ ID NO: 22218 - DNA, 260 bp, Unknown
  Description of Unknown: LeftRegion for integrase B9219 sequence
tcttgcatacaggtcgtttacgttgtataatcagcctataaatttaaaaaatccggcgcaaaacgcaccggattcatggttacttatcaaccgcaggaacggctaataatcaccgcaacaattagattatagcatacatcctgtcgattgtatagggtgtattttttataccctttttaaacagaaaaggaggctgacaaatgaaaaagagagttgcgctttatgttcgcgtgagtacgcaggaacagaaaaaacatggt

SEQ ID NO: 22219 - DNA, 260 bp, Unknown
  Description of Unknown: LeftRegion for integrase B9220 sequence
tattgcatacaggtcgtttacgttgtataatcagcctataaatttaaaaaatccggcgcaaaacgcaccggattcatggttacttatcaaccgcaggaacggctaataatcaccgcaacaattagattatagcatacatcctgtcgattgtatagggtgtattttttataccctttttaaacagaaaaggaggctaacaaatgaaaaagagagttgcgctttatgttcgcgtaagtacgcaggaacagaaaaaacatggt

SEQ ID NO: 22220 - DNA, 260 bp, Unknown
  Description of Unknown: LeftRegion for integrase B9221 sequence
cgagatggttttataataaataaaagctcctgtgctggaacacaagagcctttacctgcgacttacaattaagctgtgctcaaatgatataatcgccctaagcaagccatattatatcattctaaacaccgcttttgcaagtaggtgttatttttgtacttaaaaatgttgcactggtgcaacttaaggaggaatgatatatgaaacgtgctgctatttatgttagagtatctacaaaagaacaaaaagaaaagggctta

SEQ ID NO: 22221 - DNA, 260 bp, Unknown
  Description of Unknown: LeftRegion for integrase B9222 sequence
aaggacgggctgaaacaccgccttgaaaataagcggcagaccattgacgtgcaaaaccataccattcacgtcatggaaaagggcctgcggattcggaactgcgtgattctggttatgggcatagcaatcgtcctgctgctgtgctggtgcgtatttatggatatgcacgctttgaatatcggcttttggaggggacaatattgaatgttttacgcgcagcgctttatccgcgcgtcagtacggaagagcaggcgaagttt

SEQ ID NO: 22222 - DNA, 260 bp, Unknown
  Description of Unknown: LeftRegion for integrase B9223 sequence
gcatgcacccaaacattgggataatccagcaatgagggagaacgaaaaggttagccctcaaaaaaacaaaaatgcccccggtgtaccgagcaccgagggcattacgcagatatcggggagtaaaaagggagaacccaatttggaggaatctgcacaattattatagcgcaggccctccataaaatcaaggaggaataaatatgcgtgtggcgctgtatgcgcgagtgtccacagaggagcaggccatacacggcttgtca

SEQ ID NO: 22223 - DNA, 260 bp, Unknown
  Description of Unknown: LeftRegion for integrase B9224 sequence
cgcatatatgtacaatttattattatgatgatggcgccgatagtatgtttttatataaagacaatttatatattattttcacagatgcaagttcaacggataaacgaactctcgtaaaagaaactttagacactatacgccttaattaaaaataaaaataataatttgtttttaaacgaatcataaaaaggggtattcatatgagatgtgcaatatatataagagtatcatcagatgaacaacgaagaaaagggttttca

SEQ ID NO: 22224 - DNA, 260 bp, Unknown
  Description of Unknown: LeftRegion for integrase B9225 sequence
atttatatgctcataggcgtatgcagtattcttttgtgcgccgttgtatggtacgtcatatttgacatccaggtagagaccgccggtattttccgctcggctgggacaagcatttttgctggcgtcctcgccctgatactgaacgcctccgtcgcaaccatcatttacgccttcaaaagcattcacaaggggaaaaagaaatgagagttgcactttatgtccgcgtctccacggaagaacaagccgttcacggcctttcc

SEQ ID NO: 22225 - DNA, 260 bp, Unknown
  Description of Unknown: LeftRegion for integrase B9226 sequence
aagatacagataagctagtgacaaaaggttcgtactttttaacaattagctataacaaataaaaaaacaccccctgcgccagcagagagtgcgtggtatcagcgccaactgacaccgggtatagaaaaaatgaccaccacgtcataactttttctatacctctattttagcactttttaaaatgaatggaggttttatttatggaaatgaaaaacgcccgtttgtacgctcgtgtatctactgatgagcaaagaaaaaaa

SEQ ID NO: 22226 - DNA, 260 bp, Unknown
  Description of Unknown: LeftRegion for integrase B9227 sequence
aaagatgggctggaacaccgccttgaaaataagcggaagaccatcggcctgcaaaaccataccattcacgtcctggaaaagggtctgcggattcggaactgcgtgattttgattatgggcatagcaatcggcctgctgttgtgctggtgcgtatttgtggatatgcacgccatgaatatcggcttttggaggggataatattgaatgtcttacgcgcagcgctttatccgcgcgtcagtacggaagaacaggcgaagttt

SEQ ID NO: 22227 - DNA, 260 bp, Unknown
  Description of Unknown: LeftRegion for integrase B9228 sequence
aaggacgggctgaaacaccgccttgaaaataagcggcagaccattgacgtgcaaaaccataccattcacgtcatggaaaagggcctgcggattcggaactgcgtgattctggttatgggcatagcaatcgtcctgctgctgtgctggtgcgtatttatggatatgcacgctttgaatatcggtttttggaggggataatattgaatgttttacgcgcagcgctttatccgcgcgtcagtacggaagagcaggcgaagttt

SEQ ID NO: 22228 - DNA, 260 bp, Unknown
  Description of Unknown: LeftRegion for integrase B9229 sequence
tagatttttacattacttaaaataaaagcccctgtgctaccaacacaagagcttttaccacgatacttacataagcagtgcttatgatacataccgccctgaacaagcacattgtatcatttctaacaccgcttttgcaagtaggtgttatttttgtacttaaaattgttgcactggtgcaacttaaggaggaatgatatatgaaacgcgctgctatttatgttagagtatctacaaaagaacaaaaagaaaagggctta

SEQ ID NO: 22229 - DNA, 260 bp, Unknown
  Description of Unknown: LeftRegion for integrase B9230 sequence
tcttgcatacaggtcgtttacgttgtataatcagcctataaatttaaaaaatccggcgcaaaacgcaccggattcatggttacttatcaaccgcaggaacggctaataatcaccgcaacaattagattatagcatacatcctgtcgattgtatagggtgtattttttataccctttttaaacagaaaaggaggctaacaaatgaaaaagagagttgcgctttatgttcgcgtgagcacgcaggaacagaaaaaacatggt

SEQ ID NO: 22230 - DNA, 260 bp, Unknown
  Description of Unknown: LeftRegion for integrase B9231 sequence
catcaatattaattttaaaaataaaagctcctgtgctggaacacaagagcttttaccacgatacttacataggcagtgcctatgatataatatcgccctagacaagctatattatatcattctagacaccgcttttgcaagtaggtgttatttttgtacttaaaaatgttgcactggtgcaacttaaggaggaatgatatatgaaacgcgctgctatttatgttagagtatctacaaaagaacaaaaagaaaagggctta

SEQ ID NO: 22231 - DNA, 260 bp, Unknown
  Description of Unknown: LeftRegion for integrase B9232 sequence
catcaatattaattttaaaaataaaagctcctgtgctggaacacaagagcttttaccacgatacttacataagcagtgcctatgatataataccgccctgaacaagctatattatatcatttgaaacaccgcttttgcaagtaggtgttatttttgtacttaaaaatgttgcactggtgcaacttaaggaggaatgatatatgaaacgcgctgctatttatgttagagtatctacaaaagaacaaaaagaaaagggctta

SEQ ID NO: 22232 - DNA, 260 bp, Unknown
  Description of Unknown: LeftRegion for integrase B9233 sequence
tagcccagtgtcagactatcaatgtcacatatagctacctgaagtccttgaatcactccaaatacatacatttcattattaatataatttcgtttagcaatagtacaaaacattttattttccatactcatgccctccttttcataatataccttgaatttcaagcgaatatgctataatacttgcataggaggaaatatatggaagcactactttatacaagagtgtccaaagaagatcaagtaaaattcggtatgtct

SEQ ID NO: 22233 - DNA, 260 bp, Unknown
  Description of Unknown: LeftRegion for integrase B9234 sequence
tgaaagttattattcctcactagcagtaattaaatccatgctaaaaataaatcttatagatattgatgaatataaaaaatctgaagcattaattgcaaaaagacattgtatcaaagatgactcgatttaccgcactaattacttgataaatcctgggttcagagcgattaatgtaacgaaccataaggaggtaaaaaataatggaaatgaagataacgaaaataagcacgttaccacaattagatagaaagaaaagagtg

SEQ ID NO: 22234 - DNA, 260 bp, Unknown
  Description of Unknown: LeftRegion for integrase B9235 sequence
cttctgctggtgattgtcggctatgtggtgtttgactatagcgtgccatatgccggtctgattcaaggcgggcaggccagcacggcggcatggatcgttattgtcctgctggcggtcggcgtcggtgtaattgcgtcggcgttcttgagcgcgttaagatatgcggagaatatagcatccaaagaaagggagaacgaaacatgaaaagcaacgtgcttcgtgcggcactatatccgcgagtgtccacggaagaacaagcc

SEQ ID NO: 22235 - DNA, 260 bp, Unknown
  Description of Unknown: LeftRegion for integrase B9236 sequence
tggcctatatcgtgtgggatctctcgcaccccgggcaaggcattttgcgataaaaaaagcccccggtgtccgagcaccgagggcttttttgcagaggatcagggagataccaaatagacaccagatcaacggaatcaatttggaggaatctgcgtatatattataccgcagttcatccgcgaaatcaaggaggaattgcaatgcgtgtagcattatatgctagagtgtcaacagaagagcaggctatacacggtttgtcg

SEQ ID NO: 22236 - DNA, 260 bp, Unknown
  Description of Unknown: LeftRegion for integrase B9237 sequence
gctgttatcgtgggatatatcttttttgactaccacattccccataaggggcttattcagggcgggcaagctggtgtatttgcatggattgtctttttgcttcttgccgccggtattggcatttttgccgctattttgatgatgtatttgcgctatgcaaagaagtatacattgtcgccagataagggaggagatgaacaatgagtgtagtattgcgggcagcattatacccgcgtgtgtccacagaagaacagaaaaag

SEQ ID NO: 22237 - DNA, 260 bp, Unknown
  Description of Unknown: LeftRegion for integrase B9238 sequence
gctgttatcgtgggatatatcttttttgactaccgtatcccccaccaggggcttattcagggcggagaggccagcatattcgcatggatcgtctttttgctgcttgcagtcggtattggcttttttgccgctgttttgatgatgtattttcgctatgcaaaaaagtatacattgtcgccagataagggaggagatgaacaatgaatgtagtattgcgggcagcattatacccgcgtgtgtccacagaagaacagaaaaag

SEQ ID NO: 22238 - DNA, 260 bp, Unknown
  Description of Unknown: LeftRegion for integrase B9239 sequence
gctgttatcgtgggatatatcttttttgactaccgtatcccccaccaggggcttattcagggcggagaggccagtatattcgcatggattgtctttttgctgcttgcagtcggtattggcttttttgccgctattttgatgatgtattttcgctatgcaaaaaagtatacattgtcgccagataagggaggagataaacaatgagtgtagtattgcgggcagcattatacccgcgtgtgtccacagaagagcagaaaaag

SEQ ID NO: 22239 - DNA, 260 bp, Unknown
  Description of Unknown: LeftRegion for integrase B9240 sequence
gctgttatcgtgggatatatcttttttgactaccgtatcccccaccaggggcttattcagggtggagaggccagcatattcgcgtggatcgtctttttgctgcttgcggtcggtattggcttttttgccgctattttgatgatgtattttcgctatgcaaaaaagtatacattgtcgccagataagggaggagataaacaatgaatgtagtattgcgggcagcattatacccgcgtgtgtccacggaagaacagaaaaag

SEQ ID NO: 22240 - DNA, 260 bp, Unknown
  Description of Unknown: LeftRegion for integrase B9241 sequence
gctgttatcgtgggatatatcttttttgactaccgtattccccaccaggggcttattcagggtggagaggccagcatattcgcatggatcgtctttttgctgcttgccgtcggcatcggcatttttgccgctattttgatgatgtatttgcgctatgcaaaaaagtatacattgtcgccagataagggaggagataaacaatgagtgtagtattgcgggcagcattatacccgcgtgtgtccacagaagagcagaaaaag

SEQ ID NO: 22241 - DNA, 260 bp, Unknown
  Description of Unknown: LeftRegion for integrase B9242 sequence
gaatttcggtatcagcacttcacaactggtttcaccttaatcacacacctagcaagagctctatcaagaaactatgcatatattttaatgttgatagtagttactttttaaaagaaaatcccgattaaggctatctaatgagtccgggccccgcatcaacaaactgaggcggggcctgtttttactccggaggcatctatatgaacactaacaagcgagcagccctttatatccgtgtaagtacagaagaacaagccagg

SEQ ID NO: 22242 - DNA, 260 bp, Unknown
  Description of Unknown: LeftRegion for integrase B9243 sequence
tatagaacgctattacatgtcgcttgcacccatccaggctatggaaagaaatggtctcatattgcattctgaatttctcaaagcggaggattttttggctcaaaaatataacctgaaaaaacacaatatttataggtcaaatgacttgataaaaaccgagaaaagagtgatagatatactaccaaaaaaggaggcgcaaaatgatacaaaaaaagataacgacaatagacgctgcaccgagattagaaagactgattaac

SEQ ID NO: 22243 - DNA, 260 bp, Unknown
  Description of Unknown: LeftRegion for integrase B9244 sequence
gctgttatcgtgggatatatcttttttgactaccacattccccataaggggcttattcagggcgggcaagcgggtgtattcgcatggatcgtctttttgcttcttgccgccggcatcggcatttttgccgctattttgatgatgtatttgcgctatgcaaaaaagtatacattgtcgccagataagggaggagatgaacaatgagtgtagtattgcgggcagcattatacccgcgtgtgtccacggaagaacaggcaaag

SEQ ID NO: 22244 - DNA, 260 bp, Unknown
  Description of Unknown: LeftRegion for integrase B9245 sequence
ggctgttatcgtgggctatatcttttttgactaccgtatcccccaccaggggcttattcagggcggagaggccagcatattcgcatggatcgtctttttgctgcttgcagtcggtattggctttttgccgctattttgatgatgtattttcgctatgcaaaaaagtatacattgtcgccagataagggaggagataaacaatgagtgtagtattgcgggcagcattatacccgcgtgtgtccacagaagagcagaaaaag

SEQ ID NO: 22245 - DNA, 260 bp, Unknown
  Description of Unknown: LeftRegion for integrase B9246 sequence
gctgttatcgtgggatatatcttttttgactaccgtatcccccaccaggggcttattcagggcggagaggccagcatattcgcatggatcgtctttttgctgcttgcagtcggtattggcttttttgccgctattttgatgatgtattttcgctatgcaaaaaaatatacattgtcgccagataagggaggagatgaacaatgagtgtagtattacgggcagcattatacccgcgtgtgtccacggaagagcaggcaaag

SEQ ID NO: 22246 - DNA, 260 bp, Unknown
  Description of Unknown: LeftRegion for integrase B9247 sequence
gctgttatcgtaggatatatcttttttgactaccgtatcccccaccaggggcttattcagggcggagaggccagcatattcgcatggattgtctttttgctgcttgcagtcggtattggcttttttgccgctattttgatgatgtattttcgctatgcaaaaaagtatacattgtcgccagataagggaggagataaacaatgagcgtagtattgcgggcagcattatacccgcgtgtgtccacggaagaacagaaaaag

SEQ ID NO: 22247 - DNA, 260 bp, Unknown
  Description of Unknown: LeftRegion for integrase B9248 sequence
gctgttattgtgggatatatcttttttgactaccgtatcccccaccaggggcttattcagggcggagaggccagcatattcgcatggatcgtttttttgcttcttgcagtcggtattggcttttttgccgctattttgatgatgtattttcgctatgcaaaaaagtatacattgtcgccagataagggaggagataaacaatgaatgtagtattgcgggcagcattatacccgcgtgtgtccacggaagaacagaaaaag

SEQ ID NO: 22248 - DNA, 260 bp, Unknown
  Description of Unknown: LeftRegion for integrase B9249 sequence
cctttcaaataattactaattgctgcttctgttaatccagtttcaatagctaattctttttgagttaatttcctttctactaatttttctctaaaatctttcgcaaattcttttttattatacatataatttcactccttttcataatataccttgaatttcaagcgaatatgctataatacttgcgtaggaggtaatatatggaagcactactttatacaagagtgtccaaagaagatcaagtaaaattcggtatgtct

SEQ ID NO: 22249 - DNA, 260 bp, Unknown; identical to SEQ ID NO: 22247
  Description of Unknown: LeftRegion for integrase B9250 sequence

SEQ ID NO: 22250 - DNA, 260 bp, Unknown; identical to SEQ ID NO: 22238
  Description of Unknown: LeftRegion for integrase B9251 sequence

SEQ ID NO: 22251 - DNA, 260 bp, Unknown
  Description of Unknown: LeftRegion for integrase B9252 sequence
ctgatgaacacgaggtatttcattccacagaaggcaatgagtctatttctatttatcaatgtaaacgttgtaagcaactcgtgtttgctaaattccccgctataaattcaaaagaataaccgtacacaactcttttaatgagtccaagccccgcatcaacaaactgaggcggggcctgtttttactccggaggcatctatatgaacactaacaagcgagcagctctttatatccgtgtaagtacagaagaacaagccagg

SEQ ID NO: 22252 - DNA, 260 bp, Unknown
  Description of Unknown: LeftRegion for integrase B9253 sequence
gctgttatcgtgggatatatcttttttgactaccgtatcccccaccaggggcttattcagggcggagaggccagcatattcgcatggatcgtctttttgctgcttgcagtcggtattggcttttttgccgctattttgatgatgtattttcgctatgcaaaaaagtatacattgtcgccagataagggaggagataaacaatgagtgtagtattgcgggcagcattatacccgcgtgtgtccacagaagagcagaaaaag

SEQ ID NO: 22253 - DNA, 260 bp, Unknown
  Description of Unknown: LeftRegion for integrase B9254 sequence
gctgttatcgtgggatatatcttttttgactaccgtattccccaccaggggcttattcagggtggagaggccagcatattcgcatggatcatctttttgcttcttgccgtcggcatcggcatttttgccgctattttgatgatgtatttgcgctatgcaaaaaagtatacattgtcgccagataagggaggagataaacaatgattgcagtattgcgggcagcattatacccgcgtgtgtccacggaagaacagaaaaag

SEQ ID NO: 22254 - DNA, 260 bp, Unknown
  Description of Unknown: LeftRegion for integrase B9255 sequence
gctgttatcgtgggatatatcttttttgactaccacattccccataaggggcttattcagggcgggcaagctggtgtattcgcatggatcgtcttttcgcttcttgccgccggcatcggcatttttgccgctattttgatgatgtatttgcgctatgcaaaaaagtatacattgtcgccagataagggaggagatgaacaatgattgcagtattgcgggcagcattatacccgcgtgtgtccacagaagaacaggcaaag

SEQ ID NO: 22255 - DNA, 260 bp, Unknown
  Description of Unknown: LeftRegion for integrase B9256 sequence
tacgcgaaaaaaagagaagaacataatgctgttttctatctcaggtccatacgtccacacataagtgttgatagatcacatgctacttaaatctagatgcattattgatcataacattatgccagctagaactgtttcttctcataatataaattgattcttacgcgaatatgctataatacttgcgtaggaggtaatatatggaagcactactttatacaagagtgtccaaagaagatcaagtaaaattcggtatgtct

SEQ ID NO: 22256 - DNA, 260 bp, Unknown
  Description of Unknown: LeftRegion for integrase B9257 sequence
gctgttatcgtgggatatatcttttttgactaccgtatcccacaccaggggcttattcagggcggagaggccagcatattcgcatggatcgtctttttgctgcttgcagtcggtattggcttttttgccgccattttgatgatgtatttgcgatatgcaaaaaagtatacattgtcgccagataaggaaggagataaacaatgaatgtagtattgcgggcagcattatacccgcgtgtgtccacggaagaacagaaaaag

SEQ ID NO: 22257 - DNA, 260 bp, Unknown
  Description of Unknown: LeftRegion for integrase B9258 sequence
gctgttatcgtgggatatatcttttttgactaccgtatcccccaccagggtcttattcagggcggagaggccagcatattcgcatggatcgtctttttgctgcttgcggtcggtattggcttttttgccgctattttgatgatgtattttcgctatgcaaaaaagtatacattgtcgccagataagggaggagatgaacaatgaatgtagtattgcgggcagcattatacccgcgtgtgtccacagaagaacagaaaaag

SEQ ID NO: 22258 - DNA, 260 bp, Unknown
  Description of Unknown: LeftRegion for integrase B9259 sequence
tctgttatcgtgggatatatcttttttgactaccacattccccataaggggcttattcagggcgggcaagcgggtgtattcgcatggatcgtctttttgcttcttgccgccggtatcggcatttttgccgctattttgatgatgtatttgcgctatgcaaagaagtatacattgtcgccagataagggaggagatgaacaatgagtgtagtattgcgggcagcattatacccgcgtgtgtccacagaagaacaggcaaag

SEQ ID NO: 22259 - DNA, 260 bp, Unknown
  Description of Unknown: LeftRegion for integrase B9260 sequence
gctgttatcgtgggatatatcttttttgactaccgtatcccccaccaggggcttattcagggcggagaggccagcatattcgcatggattgtctttttgctgcttgcagtcggtattggcttttttgccgctattttgatgatgtattttcgctatgcaaaaaagtatacattgtcgccagataagggaggagatgaacaatgaatgtagtattgcgggcagcattatacccgcgtgtgtccacggaagaacagaaaaag

SEQ ID NO: 22260 - DNA, 260 bp, Unknown
  Description of Unknown: LeftRegion for integrase B9261 sequence
gctgttattgtgggatatatcttttttgactaccatattccccataaggggcttattcagggcgggcaagcgggtgtattcgcatggattgtctttttgcttcttgccgccggtatcggcatttttgccgctattttgatgatgtatttgcgctatgaaaaaaagtatacattgtcgccagataagggaggagatgaacaatgagtgtagtattgcgggcagcattatacccgcgtgtgtccacagaagaacagaaaaag

SEQ ID NO: 22261 - DNA, 260 bp, Unknown
  Description of Unknown: LeftRegion for integrase B9262 sequence
gctgttatcgtgggatatatcttttttgactaccgtatcccccaccaggggcttattcagggcggagaggccagtatattcgcgtggattgtctttttgctgcttgcggtcggtattggcttttttgccgctattttgatgatgtattttcgctatgcaaaaaagtatacattgtcgccagataagggaggagatgaacaatgagtgtagtattgcgggcagcattatacccgcgtgtgtccacagaagaacaggcaaag

SEQ ID NO: 22262 - DNA, 260 bp, Unknown
  Description of Unknown: LeftRegion for integrase B9263 sequence
gctgttatcgtgggatatatcttttttgactaccgtatcccccaccaggggcttattcagggcggagaggccagcatattcgcatggatcgtttttttgcttcttgcagtcggtattggcttttttgccgctattttgatgatgtattttcgctatgcaaaaaagtatacattgtcgccagataagggaggagataaacaatgattgcagtattgcgggcagcattatacccgcgtgtttccacggaagaacagaaaaag

SEQ ID NO: 22263 - DNA, 260 bp, Unknown
  Description of Unknown: LeftRegion for integrase B9264 sequence
gctgttatcgtgggatatatcttttttgactaccgtgtcccccaccaagggcttattcagggcgggcaagcgggtgtatttgcatggatcgtctttttgcttcttgccgccggtatcggcatttttgccgctattttgatgatgtatttgcgctatgcaaaaaagtatacattgttgccagataagggagaagatgaacaatgagtgtagtattgcgggcagcattatacccgcgtgtgtccacggaagagcaggcaaag

SEQ ID NO: 22264 - DNA, 260 bp, Unknown
  Description of Unknown: LeftRegion for integrase B9265 sequence
gctgttatcgtgggatatatcttttttgactaccgtatcccccaccaagggcttattcagggcggagaggccagcatattcgcatggattgtctttttgcttcttgcagtcggtattggcttttttgccgctattttgatgatgtattttcgctatgcaaaaaagtatacattgtcgccagataagggaggagatgaacaatgaatgtagtattgcgggcagcattatacccgcgtgtgtccacagaagaacagaaaaag

SEQ ID NO: 22265 - DNA, 260 bp, Unknown
  Description of Unknown: LeftRegion for integrase B9266 sequence
ggctgttatcgtgggctatatcttttttgactaccgtatcccccaccaggggcttattcagggcggagaggccagcatattcgcatggatcgtctttttgctgcttgcagtcggtattggcttttttgccgctattttgatgatgtattttcgctatgcaaaaagtatacattgtcgccagataagggaggagataaacaatgagtgtagtattgcgggcagcattatacccgcgtgtgtccacagaagagcagaaaaag

SEQ ID NO: 22266 - DNA, 260 bp, Unknown
  Description of Unknown: LeftRegion for integrase B9267 sequence
gctgttatcgtgggatatatcttttttgactaccgtatcccccaccaggggcttattcagggcggagaggccagcatattcgcatggattgtctttttgctgcttgcggtcggtattggcttttttgccgctattttgatgatgtattttcgctatgcaaaaaagtatacattgtcgccagataagggaggagataaacaatgaatgtagtattgcgggcagcattatacccgcgtgtgtccacggaagaacagaaaaag

SEQ ID NO: 22267 - DNA, 260 bp, Unknown
  Description of Unknown: LeftRegion for integrase B9268 sequence
gctgttatcgtgggatatatcttttttgactaccgtatcccccaccaggggcttattcagggcggagaggccagcatattcgcatggatcgtttttttgcttcttgccgtcggcatcggcttttttgccgctattttgatgatgtattttcgctatgcaaaaaagtatacattgtcgccagataagggaggagataaacaatgagtgtagtattgcgggcagcattatacccgcgtgtgtccacagaagaacaaaaaaag

SEQ ID NO: 22268 - DNA, 260 bp, Unknown
  Description of Unknown: LeftRegion for integrase B9269 sequence
gcacaccctgcattggcatgaacgctgacgcagggtgtttctctgtctgtgggaaatgcacccacccctagtgtaatcctcaaaaagtatagtggaaaatcaaaaagtatggggcaaattcagattgtatcaaagacggctattacatagactaagacatcagcgccaccaacaccaaacatcgcgccggtttcaatcagatgattgccgatgccctggcgggaaaggttgaccttatcattacaaaatcggtcagccga

SEQ ID NO: 22269 - DNA, 260 bp, Unknown
  Description of Unknown: LeftRegion for integrase B9270 sequence
gctgttattgtgggatatatcttttttgactaccgtatcccccaccaggggcttattcagggcggagaggccagcatattcgcatggattgtctttttgctgcttgcggtcggtattggcttttttgccgctattttgatgatgtattttcgctatgcaaaaaagtatacattgtcgccagataagggaggagatgaacaatgagtgtagtattgcgggcagcattatacccgcgtgtgtccacggaagaacagaaaaag

SEQ ID NO: 22270 - DNA, 260 bp, Unknown; identical to SEQ ID NO: 22268
  Description of Unknown: LeftRegion for integrase B9271 sequence

SEQ ID NO: 22271 - DNA, 260 bp, Unknown
  Description of Unknown: LeftRegion for integrase B9272 sequence
gctgttatcgtgggatatatcttttttgactaccgtatcccccaccaggggcttattcagggcggagaggccagcatattcgcatggattgtctttttgctgcttgcagtcggtattggcttttttgccgctattttgatgatgtattttcgctatgcaaaaaagtatacattgtcgccagataagggaggagataaacaatgagtgtagtattgcgggcagcattatacccgcgtgtgtccacagaagaacagaaaaag

SEQ ID NO: 22272 - DNA, 260 bp, Unknown
  Description of Unknown: LeftRegion for integrase B9273 sequence
gctgttatcgtgggatatatcttttttgactaccgtatcccacaccaggggcttattcagggcggagaggccagcatattcgcatggatcgtctttttgctgcttgcagtcggtattggcttttttgccgctattttgatgatgtattttcgctatgcaaaaaagtatacattgtcgccagataagggaggagatgaacaatgaatgtagtattgcgggcagcattatacccgcgtgtgtccacagaagaacagaaaaag

SEQ ID NO: 22273 - DNA, 260 bp, Unknown
  Description of Unknown: LeftRegion for integrase B9274 sequence
gctgttatcgtgggatatatcttttttgactaccacattccccataaggggcttattcagggcgggcaagcgggtgtattcgcatggatcgtctttttgcttcttgccgccggcatcggcatttttgccgctattttgatgatgtatttgcgctatgcaaaaaagtatacattgtcgccagataagggaggagatgaacaatgagtgtagtattgcgggcagcattatacccgcgtgtgtccacggaagaacagaaaaag

SEQ ID NO: 22274 - DNA, 260 bp, Unknown
  Description of Unknown: LeftRegion for integrase B9275 sequence
gctgttatcgtgggatatatcttttttgactaccgtatcccccaccaagggcttattcagggcggagaggccagcatatttgcatggattgtctttttgctgcttgcggtcggtattggcttttttgccgctattttgatgatgtattttcgctatgcaaaaaagtatacattgtcgccagataagggaggagataaacaatgaatgtagtattgcgggcagcattatacccgcgtgtgtccacggaagaacagaaaaag

SEQ ID NO: 22275 - DNA, 260 bp, Unknown
  Description of Unknown: LeftRegion for integrase B9276 sequence
agtacctccggtaatattattgtaattgattcactaagaaaatgtcaaataaaaaaatcctccagcactggcaatgctgaaggttgttaaagaggtgtacggcaatacaccttgtacataaaaagtatgagcactagtcatataactttttatgtactcattttatcaaatttaaatagaaaatgaaaggatgggtacttatgaaaaaagctagactttatgcaagagtatcaactgcagaacaaaagaggaagaatata

SEQ ID NO: 22276 - DNA, 260 bp, Unknown
  Description of Unknown: LeftRegion for integrase B9277 sequence
gctgttattgtgggatatatcttttttgactaccacattccccataaggggcttattcagggcgggcaagcgggtgtattcgcatggatcgtctttttgcttcttgccgccggcatcggcatttttgccgctattttgatgatgtatttgcgctatgcaaaaaagtatacattgtcgccagataagggaggagatgaacaatgagtgtagtattgcgggcagcattatacccgcgtgtgtccacagaagaacagaaaaag

SEQ ID NO: 22277 - DNA, 260 bp, Unknown
  Description of Unknown: LeftRegion for integrase B9278 sequence
tacgcgaaaaaaagagaagaacataatgctgttttctatctcaggtccatacgtccacacataagtgttgatagatcctatgctacttaaatctagatgcattattgatcataacattatgccagctagaactgtttcttctcataatataaattgattcttacgcgaatatgctataatacttgcgtaggaggtaatatatggaagcactactttatacaagagtgtccaaagaagatcaagtaaaattcggtatgtct

SEQ ID NO: 22278 - DNA, 260 bp, Unknown
  Description of Unknown: LeftRegion for integrase B9279 sequence
agaatttcggtatcagcactcaacaactggtttcatcttaaacgcacacctagaaagagctctatcaataaactatgcaaatattttaatgttgatagtagttactttttaaaagaaaatcccgattaagactatctaatgagtctgagccccgcatcaacaactgaggcggggtttgtttttactccggaggcatctatatgaacactaacaagcgagcagccctttatatccgtgtaagtacagaagagcaagccagg

SEQ ID NO: 22279 - DNA, 260 bp, Unknown
  Description of Unknown: LeftRegion for integrase B9280 sequence
gctattatcgtgggatatattttttttgactaccgtattccccaccaggggcttattcagggtggagaggccagcatattcgcatggatcatctttttgcttcttgccgtcggcatcggcatttttgccgctattttgatgatgtatttgcgctatgcaaaaaagtataaattgtcgccagataagggaggagataaacaatgattgcagtattgcgggcagcattatacccgcgtgtgtccacggaagaacagaaaaag

SEQ ID NO: 22280 - DNA, 260 bp, Unknown
  Description of Unknown: LeftRegion for integrase B9281 sequence
gctgttatcgtgggatatatcttttttgactaccgtatcccacaccaggggcttattcagggcggagaggccagcatattcgcatggatcgtctttttgctgcttgcagtcggtattggcttttttgccgctattttgatgatgtattttcgctatgcaaaaaagtatacattgtcgccagataagggaggagatgaacaatgaatgtagtattgcgggcagcattatacccgcgtgtgtccacggaagaacagaaaaag

SEQ ID NO: 22281 - DNA, 260 bp, Unknown; identical to SEQ ID NO: 22276
  Description of Unknown: LeftRegion for integrase B9282 sequence

SEQ ID NO: 22282 - DNA, 260 bp, Unknown
  Description of Unknown: LeftRegion for integrase B9283 sequence
cgaaaaaaaaaaagagaagaacataatgctgttttctatctcaggcccatacgtccacacataagtgttgatagatcccatgctacttaaatctagatgcattattgatcataacattatgccagctagaactgtttcttctcataatataaattgattcttacgcgaatatgctataatacttgcataggaggaaatatatggaagcactactttatacaagagtgtccaaagaagatcaagtaaaattcggtatgtct

SEQ ID NO: 22283 - DNA, 260 bp, Unknown
  Description of Unknown: LeftRegion for integrase B9284 sequence
gctgttatcgtgggatatatcttttttgactaccgtatcccccaccaggggcttattcagggcggagaggccagtatattcgcatggattgtctttttgctgcttgcagtcggtattggcttttttgccgctattttgatgatgtattttcgctatgcaaaaaagtatacattgtcgccagataagggaggagataaacaatgagtgtagtattgcgggcagcattatacccgcgtgtgtccacagaagaacagaaaaag

SEQ ID NO: 22284 - DNA, 260 bp, Unknown
  Description of Unknown: LeftRegion for integrase B9285 sequence
gctgttatcgtgggatatatcttttttgactaccgtatcccacaccaggggcttattcagggcggggaggccagcatattcgcgtggatcgtctttttgctgcttgcggtcggtattggcttttttgccgctattttgatgatgtattttcgctatgcaaaaaagtatacattgtcgccagataagggaggagatgaacaatgaatgtagtattgcgggcagcattatacccgcgtgtgtccacggaagaacagaaaaag

SEQ ID NO: 22285 - DNA, 260 bp, Unknown
  Description of Unknown: LeftRegion for integrase B9286 sequence
gctgttatcgtgggatatatcttttttgactaccgtatcccacaccaggggcttattcagggcggagaggccagtacattcgcatggatcgtctttttgctgcttgcagtcggtattggcttttttgccgctattttgatgatgtattttcgctatgcaaaaaagtatacattgtcgccagataagggaggagatgaacaatgaatgtagtattgcgggcagcattatacccgcgtgtgtccacggaagagcaggcaaag

SEQ ID NO: 22286 - DNA, 260 bp, Unknown
  Description of Unknown: LeftRegion for integrase B9287 sequence
gctgttatcgtgggatatatcttttttgactaccgtatcccccaccaggggcttattcagggcggagaggccagcatattcgcgtggatcgtctttttgctgcttgcggtcggtattggcttttttgccgctattttgatgatgtattttcgctatgcaaaaaagtatacattgtcgccagataagggaggagatgaacaatgaatgtagtattgcgggcagcattatacccgcgtgtgtccacggaagaacagaaaaag

SEQ ID NO: 22287 - DNA, 260 bp, Unknown
  Description of Unknown: LeftRegion for integrase B9288 sequence
acgaaggtgctggtatctcccgtgtccatgcttatgcccgtgtctccacagacagcgaggagcagctcaccagctacgaggcccaggtagactattacaccaagtatatccggtcgaagccggaatgggagtttgtaaaggtctacacggacgagggcatctcggccgtcaacacaaaaaagcgtgacggcttcaacgccatggtggcggatgccctggctgggaagattgacctcatcgtgaccaaatccatcagccgc

SEQ ID NO: 22288 - DNA, 260 bp, Unknown
  Description of Unknown: LeftRegion for integrase B9289 sequence
ctgtttggcgtccatcatccgtcaaaataacgcgatcgcaaaaaagaatgatgacattgccgagcagttgctttgggtcaataataagctcacggctttgatcaagcaaaattccggaagtgccgagaacggcaaaacgaagccatcagaacccgcagaataaagatgcacaaaataggacttgggataggaagatgcacatgacgcgcgtcgcgttatatatccgtgtatcaacggaagatcagaaaatacatggactt

SEQ ID NO: 22289 - DNA, 260 bp, Unknown
  Description of Unknown: LeftRegion for integrase B9290 sequence
gctgttatcgtgggatatatcttttttgactactgcattccccatcaggggcttattcagggcggacaggcgagtgtgctcgcatggatcgtctttttgcttcttgccgccggtattggcatttttgccgccatttttatgatgtatctgcgctatgcaaaaaagtatacattgtcgccagacaagggaggagatgaacaatgagtgtagtattgcgggcagcgttatacccgcgtgtatccacggaagaacaagccaaa

SEQ ID NO: 22290 - DNA, 260 bp, Unknown
  Description of Unknown: LeftRegion for integrase B9291 sequence
ctaggaaataaaatatatgcaatctttttatcatacggcatgttatttatgttttggacaagcaagccgttaatactgggaaacaagaaaattaccaatacattatttaattatgacggtatatttttctatgtgttaggctttatttgtattgtaattggcctatttttagataacgatatctttataaggtaattattatggataaaattaagcgggcggcattgtatatacgtgtaagcacagaagaacaagctcga

SEQ ID NO: 22291 - DNA, 260 bp, Unknown
  Description of Unknown: LeftRegion for integrase B9292 sequence
agcctatcccggagtcagagcgcaacgcactgctccagcaaatccaattcggcgaggagaaatgcgcgatgctggagcgatccatctccagcaagaaaaagatcatcctcgccatgtttttgctggccttggtcgtgctggtttatggaataacgctcgacgtactctgcgggggcatcggatttataaggaggtaacccatgccaaagcaaatacgcgccgcgctctatgtacgcgtctccagcgaggagcaagcccgc

SEQ ID NO: 22292 - DNA, 260 bp, Unknown
  Description of Unknown: LeftRegion for integrase B9293 sequence
gcctgtctcagactccgagcgcaagctcctgctccagcagatcgcgttcggcgacgagcgatgcgctatgctggagagatcaattgcaacaaaaaagaggatcattttagccctatttatcctcgcgcttgtcgtgctgatgtacggggtaacgctcgatgtactctgcgggagcatcggatttatcaggaggtaacaccatgccaaagcaaatacgcgccgcgctctatgtacgcgtctccagcgaggagcaagcccgc

SEQ ID NO: 22293 - DNA, 260 bp, Unknown
  Description of Unknown: LeftRegion for integrase B9294 sequence
agaaagggactaaccgcctaccgttgcgataacaccttacgctgtgaattatagcatttggctttttatttgtccagtaaacatgatggattttaattgcaccggattcgaggcaattaaacagggcaataaaaaatcccccaccggttgcagccgatggggaaagctattattaaagtgcatcaaaacaggaggaaactatgcaaagagcggctttgtatattcgagtaagttcggaagaacaggctattcatgggcta

SEQ ID NO: 22294 - DNA, 260 bp, Unknown
  Description of Unknown: LeftRegion for integrase B9295 sequence
taataagaataagaaatttttagatgaattgttgccttattggggcgatatgactgaagatgctcaaataagagcggaagaattaaaagcggtcgaagaagcgacgataaaacttgaatccgagaaaaaataaaacttccccaccggttgcagccgatggggaaagctattattaaagtgcatcaaaacaggaggaaactatgcaaagagcggctttgtatattcgagtaagttcggaagaacaggctattcatgggcta

SEQ ID NO: 22295 - DNA, 260 bp, Unknown; identical to SEQ ID NO: 22001
  Description of Unknown: LeftRegion for integrase B9296 sequence

SEQ ID NO: 22296 - DNA, 260 bp, Unknown
  Description of Unknown: LeftRegion for integrase B9297 sequence
cagaaccggctaaacatcgcgcaatcaattgagacaaattacgaggtggcaaaggccggaaatcgtctggtacagccggatcatgtacagccagatttggatttgctgagaaaagcgatcaaattgggaaaagaatctgctcttaacgggagaaaaacgtactccgtttttacagcagacagccagaaggaggaaggaaattgaaacgagccgcattatacgtccgcgtatcgagcgcagagcagagggatcacgggttg

SEQ ID NO: 22297 - DNA, 260 bp, Unknown
  Description of Unknown: LeftRegion for integrase B9298 sequence
gccaattccggactcagagcgcaagctgctgctccagcagatcgcgtttggcaacgagcgctgtgccatactggagcggtcaatcgccacgaaaaagaggatcatcttggctttgtttgcgattgtgctcacggtcctaatatacggcgtaacgctcgatgtactctgcgggagcatcggatttatcaggaggtaacaccatgccaaagcagatacgcgccgcgctttatgtgcgcgtctcgagtgaggagcaggcccgc

SEQ ID NO: 22298 - DNA, 260 bp, Unknown
  Description of Unknown: LeftRegion for integrase B9299 sequence
gccggtgcaggactcagaacgcaaactgctgctccagcagatcgcgttcggcaacgagcgctgtgccatgctggagcggtcaatcgccacgaaaaagaggatcatcttggctttgttcgcgattgtgctcacggtcctaatatacggcgtaacgctcgatgtgctctgcgggagcatcggatttatcaggaggtaaccccatgccaaatcagatacgcgccgcgctttatgtgcgcgtctcgagtgaggagcaagcccgc

SEQ ID NO: 22299 - DNA, 260 bp, Unknown
  Description of Unknown: LeftRegion for integrase B9300 sequence
gccgataccggactcagagcgcaagctgctgctccagcagatcgcgtttggcaacgagcgctgtgccatgctggagcggtcaatcgccacgaaaaagaggatcatcttggctttgtttgcgactgtgctcacggtcctaatatacggcgtaacgctcgatgtactctgcgggagcatcggatttatcaggaggtaacgccatgccaaatcagatacgcgccgcgctttatgtgcgcgtctcgagtgaggagcaagcccgc

SEQ ID NO: 22300 - DNA, 260 bp, Unknown
  Description of Unknown: LeftRegion for integrase B9301 sequence
gccgataccggactcagagcgcaagctgctgctccagcagatcgcgtttggcaacgagcgctgtgccatgctggagcggtcaatcgccacgaaaaagaggatcatcttggctttgtttgcgattgtgctcacggtcctaatatacggcgtaacgctcgatgtactctgcgggagcatcggatttatcaggaggtaacgccatgccaaatcagatacgcgccgcgctttatgtgcgcgtctcgagtgaggagcaagcccgc

SEQ ID NO: 22301 - DNA, 260 bp, Unknown
  Description of Unknown: LeftRegion for integrase B9302 sequence
tgattgaaacaacctgtcgaaaaaaaagagttgtctaactcatactcaattttgagatcttcctgttcagcataaagattaaacagcaacgaatatattttttctgcatccatattttcaccgtcctcatcggctagtatggactgctttttttattttcaatcaatcggagggattttttatgagaaaaaaaactgcgagtggcaggatatgctcgtgtttccactgacgaacaaaagaaatatggatattcaatacag

SEQ ID NO: 22302 - DNA, 260 bp, Unknown
  Description of Unknown: LeftRegion for integrase B9303 sequence
gaatgagtttatgaaattttataattatgaagcagaaatgctatataaaaatatttgccttacttacaattgtaaattcacaatctttgaagataaattaataacaattgaagatttgaaagtaattgaaaaaagtttgattgaaattaaagaaaaagatttaaataaataattagttttatagtaaaggagtaaattacatgttaagagtagctttatatattagagtaagtactgaagaacaagctctacacggtgac

SEQ ID NO: 22303 - DNA, 260 bp, Unknown
  Description of Unknown: LeftRegion for integrase B9304 sequence
tctactccattatataaacacaatactagtgcttaaaaattggaaaaagagcggtttaattagtgatgaagattatatcaaaatggaagcaaagacagccagaaaatttggtattaaaaatgtcagtctatatcgttcaattgacttgctatataagccttttagagtgatatatatgtgtgacaaaaaggaggaataaaatggctgagaacatcactaaaatagctgctagacctagcttaattagcaaaaaaagggta

SEQ ID NO: 22304 - DNA, 260 bp, Unknown
  Description of Unknown: LeftRegion for integrase B9305 sequence
ttagtcgaagaaatttttgaaaaaaataacattgaaaattcccatgaaatgacagatttgggttcttactgctacaaactcatgtatgccacgtcaaaattactggttagaaaagataatcgcatagatgaattccgtgcagaatgtttatcacaactaatatcagcgaaaaaagaataaatacattcaaggaggttgctatgaaacgatgtgctttatatgtccgtgtatcgacggatgagcaaaagaaacacggtcta

SEQ ID NO: 22305 - DNA, 260 bp, Unknown
  Description of Unknown: LeftRegion for integrase B9306 sequence
ccgtcttgcatctccacttgcctgcggtatctaactaattaacaaactcgtaaagggctgtggttggagcctccttgcaaccgtcacgcggtaggtgaaaataccaacccacagcatcctatacagtatagcagatttgtcttcgttcttggagaggaacgctaaaaactactacttttatattatacgaggtgttccgtatgaaaaagacgatacgggttattgaacccaccataccgcttctcaaaaagaaaaagcgt

SEQ ID NO: 22306 - DNA, 260 bp, Unknown
  Description of Unknown: LeftRegion for integrase B9307 sequence
gaggaaactttgcaggcgcggaatgatgagctggaacgccatgttgacgcaaaagcagacatgatcgagatcatgcggcgtggagtgcgtatccgcaacggcgtgattgctataatgttttttataattgttcttctcgctgcgtggtgcgtgtacattgattttcattgtatagattacggattttggagggggattcgatgatagcggcattgatgagagtggctttgtatatccgcgtctcaagcgaagaacaggcg

SEQ ID NO: 22307 - DNA, 260 bp, Unknown
  Description of Unknown: LeftRegion for integrase B9308 sequence
tgtctgtctgttcgtgcctgccacgttaggatttccattgcgtcatcctcctagttttgattatgtacacgcttcaggcactctatacaaataaaaaaggaagccgtgaccagcgacttcccttgcgaaacattgaaacaaaatatatcgcggaagaccgcccacgatgatattatgtcctttgcagccacgatgatcaggtgcttcacggcgatacgcttgaagcacaagatctgattcttgaagatttcatcaaagtg

SEQ ID NO: 22308 - DNA, 260 bp, Unknown
  Description of Unknown: LeftRegion for integrase B9309 sequence
gaggaaactttgcaggcgcggaatgatgagctggaacgccatgttgacgcaaaagcagacatgatcgagatcatgcggcgtggagtgcgtatccgcaacggcgtgattgctataatgttttttataattgttcttctcgctgcgtggtgcgtgtacattgattttcattgtatagattacggattttggagggggatttgatgagagcggctttgataagagtggctttgtatatccgcgtctcaagcgaagaacaggcg

SEQ ID NO: 22309 - DNA, 260 bp, Unknown
  Description of Unknown: LeftRegion for integrase B9310 sequence
aaatgaatcgtaatatcatcatctatcaggttatggttgaaattatcaaaacctggcttcgttcaggaaagatctcaagaaaagattatacggaaatgaacacaaaaatggctgaaaaatacggcatatctttgtcgggtatattcgttgataaatctgaaaatccatgctaatatggtatctgaaaggaggaggtttacatggaacgtttgatacaaaaaatagaaccttctgttgatatttcacataaattacaaaac

SEQ ID NO: 22310 - DNA, 260 bp, Unknown
  Description of Unknown: LeftRegion for integrase B9311 sequence
cgccctcttccgctatcagcttgttatgacatgggtgcgtttgctgctgaaacgttcccttatcaccaaggcagagtacgccaaaattgatacaatgatcgcccggaaatacggcatattttcgtgcagcatattccgttgaaaaccgttgacttttcgccgatttagagcgaatatggtaaacgaaggaggtggtttttgtggaacgaatcattcagagggttcagttccccaatgcacagaaagtaaagctgctgaga

SEQ ID NO: 22311 - DNA, 260 bp, Unknown
  Description of Unknown: LeftRegion for integrase B9312 sequence
ttagtcgaagaaatttttgaaaaaaataacattgaaaattcccatgaaatgacagatttgggttcttactgctacaaactcatgtatgccacgtcaaaattactggttagaaaagataatcgcatagatgaattccgtgcagaatgtttatcacaactaatatcagcgaaaaaagaataaatacattcaaggaggttgctatgaaacgatgtgctttatatgtccgtgtatccacggatgaacaaaagaaacacggtcta

SEQ ID NO: 22312 - DNA, 260 bp, Unknown; identical to SEQ ID NO: 22309
  Description of Unknown: LeftRegion for integrase B9313 sequence

SEQ ID NO: 22313 - DNA, 260 bp, Unknown
  Description of Unknown: LeftRegion for integrase B9314 sequence
agcgacttcccttgcgaaacattgaaacaaaatatatcgcggaagaccgcccacgatgatattatgtccttttacattctatcatatcaagccttctttcgctaccagaaagaaggtttttatatgtcttttttactccaaacccacaacttttcgggcttcgtgtagttaaatatatcagatgcagccacgatgatcaggtgcttcacggcgatacgcttgaagcacaagatctgattcttgaagatttcatcaaagtg

SEQ ID NO: 22314 - DNA, 260 bp, Unknown
  Description of Unknown: LeftRegion for integrase B9315 sequence
atagagcattatctgattgctatcacaacggctaataaaatgttagattcaaaaatcatttcgcttgaagattataaaaaaatcgagaataaaatggctcaaaaatattgtatcaaaactaatagtatttatcgtttgaataacttgataaataaaccttgtagcggtaatatcacacactgacaaaaggaggaaaaaacgtgcagataacgaagatttcagcagcaaaaaaactagaaaagaaaaaattagtgtgtgca

SEQ ID NO: 22315 - DNA, 260 bp, Unknown
  Description of Unknown: LeftRegion for integrase B9316 sequence
tcataaagggaaagaggcctgtaagggtatccggataagggatacagaacttacaggtctttctttttcggaaccaatggtagtagaggaggtaatgatagatggcgagaagcattacggttataccagcaaaagagcctacgatgctggtgaacgggcagcagatagaattgaaaaagaaagtagcagcgtactgccgcgtgtcaacggaccaagaagaacagttatcaagttatgagaatcaggtgagatactatacg

SEQ ID NO: 22316 - DNA, 260 bp, Unknown
  Description of Unknown: LeftRegion for integrase B9317 sequence
cattataacgccagtttctgatagcaatatgataaaattgaaaattccgagccttatctacggaaaggttacaaaatttgaacccgtccgagaaatttgaacccgtttttctgtaaaaataaaattgtatcagagacggcttttagatagatgagggaataacaggtactcgtgaggacaagcgtgacgagtttcagcgaatgataagcgactgccggaaaggcaagatagacaggatatatacaaagtctatcagccga

SEQ ID NO: 22317 - DNA, 260 bp, Unknown
  Description of Unknown: LeftRegion for integrase B9318 sequence
tcataaagggaaagaggcctgtaagggtatccggataagggatacagaacttacaggtctttctttttcggaaccaatggtagtagaggaggtaatgatagatggcgagaagcattacggttataccagcaaaagagcctacgatgctggtgaacgggcagcagatagaattgaaaaagaaagtagcagcgtactgccgcgtgtcaacggaccaagaagaacagttatcaagttatgagaaccaggtgagatactatacg

SEQ ID NO: 22318 - DNA, 260 bp, Unknown
  Description of Unknown: LeftRegion for integrase B9319 sequence
taaaaaagtacgacagacaattgaagaactgggcggtaccatgccagaagacctgcctacaccaaagaaaagtattaaacaaatccaacgagagcaagaaaggaaaaagctaaagtaaaaaattcaccgcccgacatttgcggggttatgcagggggaagcgcaatgtaggccgctggcatttggaaaggagcggggtttatgattcgcgcagctatatatatccgcgtaagcaccgaggagcaagcaaggcatggtctg

SEQ ID NO: 22319 - DNA, 260 bp, Unknown
  Description of Unknown: LeftRegion for integrase B9320 sequence
taaaaaagtacgacaaacaattgaagaactgggcggtactatgccagaagacctgcctacaccaaagaaaagtattaaacaaatccaacgagagcaagaaaggaaaaagctaaagtaaaaaattccccgcccgacatttgcggggttatgcggggggaagcgcaatgtaggccgctggcatttggaaaggagcgggggttatgactcgcgcagctttatatatccgcgtaagcaccgaggagcaagcaaagcatggtctg

SEQ ID NO: 22320 - DNA, 260 bp, Unknown
  Description of Unknown: LeftRegion for integrase B9321 sequence
ggaaaaaatcggtctggaaaagcgattatccaacaagcgggagacgattgatgtgcagaatcataccatcaatgtgatggaaaagggtctgcggattcgcaactgcgtgattttggttatgggcgtagcaatcgtcctgttgctgtgctggtgcgtatatgtaaatatgcacgcgctgaatatcggttttggagggaataatgagagctgcgttatatatccgcgtgtccaccgaagagcaggccaagcacggtctatcc

SEQ ID NO: 22321 - DNA, 260 bp, Unknown
  Description of Unknown: LeftRegion for integrase B9322 sequence
gaaaaggtcggtctggaaaagcgattatccaacaagcgggagacgattgatgtgcagaatcataccatcaatgtgatggaaaagggtctgcggattcgcaactgcgtgattttggttatgggcgtagcaatcgtcctgttgctgtgctggtgcgtatatgtaaatatgcacgcgctgaatatcggtttttggagggaataatgagagctgcgttatatatccgcgtgtccaccgaagagcaggccaagcacggtctatcc

SEQ ID NO: 22322 - DNA, 260 bp, Unknown
  Description of Unknown: LeftRegion for integrase B9323 sequence
tgactacaaggcagaactgaaacagctctgagtatgtaagcataagcatcaccccctcttgcggcggagggggcaagaagtcccctccgggatggaggggccaaccgcctaccgttgcgggtagcgccgaacctaggatatcatattgtcggcggaaatgcaagggagacctatggcaaggtgggggagggagcaagtttatgacgcgagcagctatatatatccgcgtgagcaccgaggagcaagcaaggcacggcctg

SEQ ID NO: 22323 - DNA, 260 bp, Unknown
  Description of Unknown: LeftRegion for integrase B9324 sequence
gaaaaggtcggtctggaaaagcgcttatccaacaagcgggagacgattgatgtgcagaatcataccatcaatgtgatggaaaagggtctgcggattcgcaactgcgtgattttggttatgggcgtagcaatcgtcctgttgctgtgctggtgcgtatatgtggatatgcacgcgctgaatatcggtttttggagggaataatgagagctgcgttatatatccgcgtgtccaccgaagaacaggccaagcaaggtctatcc

SEQ ID NO: 22324 - DNA, 260 bp, Unknown
  Description of Unknown: LeftRegion for integrase B9325 sequence
gtcagatggcttaccaggcggcgatggcgctcgcccggcgtatgctctcaaagggcttgatctccaaggaagagtacgctgaaattgatatgatcatcgccaaaaagtacggcatatcttcgtgcagtatattccgctgaaatggctggataaatcgtgcgttcagaggtaatatgtcacacaccaaggaggtgaacgacatggagagagtcatagaacgggtcgatttccagatccccatgcagccgaaggcgctgcgc

SEQ ID NO: 22325 - DNA, 260 bp, Unknown
  Description of Unknown: LeftRegion for integrase B9326 sequence
cagatggcttaccaggcagcgatggcgctcgcccggcgtatgctctcaaagggcttgatctccgaggaagagtacgctgaaattgatacgatcatcgccaaaaagtacgggatatcttcgtgcagtatattccgctgaaatggctggataaatcgtgcgttcagaggtaatatgtcacacaccaaagggaggtgaacaacatggagagagtcatagaacgggtcgatttccagatccccatgcagccgaaggcgctgcgc

SEQ ID NO: 22326 - DNA, 260 bp, Unknown
  Description of Unknown: LeftRegion for integrase B9327 sequence
gtcaccagcaattttaaaatctagatcaatgtaggatggaacttgttccatcttacatatgagaatatcttttatccttcttgattaatcaatacattttgtaattactgattttataattatgatttaattttcataagatgcttttctatatttttttactattaagtaaagaaatatagaaaggggtgtagtaaaagatgatgattaagataggaggatatttgagatgttcaactaaaaaacaaagttctcacaat

SEQ ID NO: 22327 - DNA, 260 bp, Unknown
  Description of Unknown: LeftRegion for integrase B9328 sequence
gatacagctgttattcaataagcaagagcaaagcaaaggcacaaggatatactgcttgctcaagatgttggtaaaatgaaaaaccgcccctgttgccgcaggagcgattttcgacgtgctacatgtgttcatatagatacaagttacaaacatattgtagcacgtccttatatttttttcaactttattttgggggaattatgagagttgcactatatgaaagagttagttccgaagaacaagcacttcacggttactca

SEQ ID NO: 22328 - DNA, 260 bp, Unknown
  Description of Unknown: LeftRegion for integrase B9329 sequence
taaaaaagtacgacagacaattgaagaactgggcggtaccatgccagaagacctgcctacaccaaagaaaagtattaaacaaatccaacgagagcaagaaaggaaaaagctaaagtaaaaaattcaccgcccgacatttgcggggttatgcagggggaagcgcaatgtaggccgctggcatttggaaaggagcggggtttatgattcgcgcagctatatatatccgcgtaagcaccgaggagcaagcaaggcacggcctg

SEQ ID NO: 22329 - DNA, 260 bp, Unknown
  Description of Unknown: LeftRegion for integrase B9330 sequence
cggttagaaagttatctcgcttcaatgctccaggcaaaacagatgatgtcgatggggattttaacctctgatgattacgccgctattgatacaataatgaccgaaaaatacggcatatcttcgtgtagtttgtattgcggaatcgacttgatatatgatggttttagaggtaatatgtcacactgcaaggaggtgacgtaatgtcaagaaaaataaccatcgtatcaaaaccaccaaaattggagcggaaaaagagagtt

SEQ ID NO: 22330 - DNA, 260 bp, Unknown
  Description of Unknown: LeftRegion for integrase B9331 sequence
gctcctgtgctatcaggctgccatgcacattgcccggcaatggctgagttcagggctgatcacggcggaggactgcgtaaaatttgatacaatcactgccgaaaagtttggtatatccgcccggagcatttggcgtgatattaacttgataaagctgccgactgacggtaatatgtcgcctgcgaaagggggtatctcaagtggaacgaaccattcagattgttcagcccatgaagctggctgaacgaaaagttctgcgt

SEQ ID NO: 22331 - DNA, 260 bp, Unknown
  Description of Unknown: LeftRegion for integrase B9332 sequence
cgaacgaacattgaaagctcgaaacgacgaattggaacggcatgttgacgcaaaggcagacaccatagaaatcatgcgtcgcggtgtgcgcatccgaaacgtcgttatttttattatgttttgcatcatcgtgtttctcgccatttggtgcgtgtacattgatatgcactgcctaaactatggattctggaggagataagatgagggctgcattatatattcgcgtgtcaacggaggagcaggcccggcacggcctgtcc

SEQ ID NO: 22332 - DNA, 260 bp, Unknown
  Description of Unknown: LeftRegion for integrase B9333 sequence
aatcgcccgcgcaatgatcgagaccagaataaaggctgatttgactcaaaaggagctttctgcccgctccggtattgccctgtccgatattgaagaatatgaaaacggcaacggtgatccatcacttcacacgctccaacgccttgcgaaggctatgggcaagcgtatccatgtcacatttgaagaaaggacgtgatcccatgcgcgtggccggatatacccgggtgagcacgcaggagcagaagctccacggcgtctcc

SEQ ID NO: 22333 - DNA, 260 bp, Unknown
  Description of Unknown: LeftRegion for integrase B9334 sequence
aggttagaaagctaccttgtttccatgctccaggcaaaacgaatgctgtcgatggggattataaccccggaagattacgccgatattgatacaattatgaacgaaaaatacggtatatcttcgtgtagtttatattgcggaatggacttgatatatgatggctttagaggtaatatgtcacactataaggaggtgacgttatgtcaggaaaaataaccatcgtatcaaaaccgccaaagctggaaagaaaaaagagagta

SEQ ID NO: 22334 - DNA, 260 bp, Unknown
  Description of Unknown: LeftRegion for integrase B9335 sequence
cgaggaaaccttgcaggcgcgaaatgatgagctggaacgtcacgtcgacgcaaaggccgacaccattgagatcatgcggcgtggtgtgcgcatccgcaactgcgtgatttttattttgtttatcatggttttattgttggctgcatggtgcctgtacattgacatgcactgcctaaactacggattctggaggggttgagatgagggctgctttatatatccgcgtgtcaacagaggagcaggcccgacacggcctgtcc

SEQ ID NO: 22335 - DNA, 260 bp, Unknown
  Description of Unknown: LeftRegion for integrase B9336 sequence
aacgaggaaaccttgcaggcgcgaaatgacgagctggagcgtcatgttgacgcaaaggaagacatgatcgagattatgcggcgcggcgtgcacatccgcaactgcgtgattgctataatgtttgtcatcatggttatgcttgctgtgtggtgcgtgtatgtcgacctccattgcgcagattacggtttttggaggggtctatgatgagggtggctttgtatatccgcgtgtcgagcgaagaacaggcacggcatggcctg

SEQ ID NO: 22336 - DNA, 260 bp, Unknown
  Description of Unknown: LeftRegion for integrase B9337 sequence
accgaggaaactttgcaagcgcgcaacgatgagctggaacgccatgttgacgcaaaggccgataccattgagatcatgcggcgcggtgtccatatccgcaacggcgcgattgctgtaatgtttgttattatcgctcttctcgctgcgtggtgtgtgtacattgattttcattgtgtagattacggattttggagggggctatgatgagagtggcattgtatatccgcgtctcgagcgaggagcaggcgcggcatggcttg

SEQ ID NO: 22337 - DNA, 260 bp, Unknown
  Description of Unknown: LeftRegion for integrase B9338 sequence
tgttatgctggatagtaacagcaatcgcatttattgccgcatttgtttctgttctgatttaatagcacatatgtgtccccctacacctctccactgttaacgccaacagttcgatgtgacccagtgggggacatttttattcagttaccgagaaaacctcggcaactgaaccaagctcaacactgaaaggacgtgatcccatgcgcgtggccggatatgcccgggtgagcacgcaggagcagaagctccacggcgtctcc

SEQ ID NO: 22338 - DNA, 260 bp, Unknown
  Description of Unknown: LeftRegion for integrase B9339 sequence
aagcactattcagtacagaatagccatgtcgatggcaaaaagtatgctgaacaaggggatcataaccaaggaagaatacgcaaaaattgatacaattatgaccaaaaacgctgagttatctttgggtactatattctccgaaattccttgatattactgcctttcagagcgaatatgtcacacgataaggaggcgatatcatggaaagaacaatcaagcgagtcgaccgcaaactccccaagcaggaaaaactcatacgt

SEQ ID NO: 22339 - DNA, 260 bp, Unknown; identical to SEQ ID NO: 20761
  Description of Unknown: LeftRegion for integrase B9340 sequence

SEQ ID NO: 22340 - DNA, 260 bp, Unknown; identical to SEQ ID NO: 22332
  Description of Unknown: LeftRegion for integrase B9341 sequence

SEQ ID NO: 22341 - DNA, 260 bp, Unknown
  Description of Unknown: LeftRegion for integrase B9342 sequence
cggttagaaagctaccttgcttccatgctccaggcaaaacgaatgctgtcgatggggattataaccccggaagattacaccgatattgatacaattatgaacgaaaaatacggtatatcttcgtgtagtttatactgcggaattgacttgatatatgatggttttagaggtaatatgtcacactataaggaggtgacgttatgtcaggaaaaataaccatcgtatcaaaaccgccaaagcttgaaagaaaaaagagagta

SEQ ID NO: 22342 - DNA, 260 bp, Unknown; identical to SEQ ID NO: 22331
  Description of Unknown: LeftRegion for integrase B9343 sequence

SEQ ID NO: 22343 - DNA, 260 bp, Unknown
  Description of Unknown: LeftRegion for integrase B9344 sequence
cactcccgtaagggaacttgagatgcaggatacgccgccctgccaatactcacgcagaagcgcttctggacgcaagcctatggccgccgttcaggagcgtttttctatttgccgctcccctgctgggagcgtaaataatgaaaagtggttgtttccattttggaaaataccactcatattctcagaaaggacgtgatcccatgcgcgtggccggatatgcccgggtgagcacgcaggagcagaagctccacggcgtctcc

SEQ ID NO: 22344 - DNA, 260 bp, Unknown
  Description of Unknown: LeftRegion for integrase B9345 sequence
gcactctatcctgatgcccaaaagtggaatacagagatccttcctgctatggaagccctattcgaggaatataaacaggaaatcgatttgtaccatttggcctttccgaaagattggtctgaccaactttttagataaacgcagttaccgagaaaacctcggcaactgaaccaaactcagcactgaaaggacgtgatcccatgcgcgtggccggatatgcccgggtgagcacgcaggagcagaagctccacggcgtctcc

SEQ ID NO: 22345 - DNA, 260 bp, Unknown
  Description of Unknown: LeftRegion for integrase B9346 sequence
cgaggaaaccttgcaggcgcgaaatgatgagctggaacgccacgtcgacgcaaaggccgacaccattgagatcatgcggcgtggtgtgcgcatccgcaactgcgtgatttttattttgtttatcatggttttattgttggctgcatggtgcctgtacattgacatgcactgcctaaactacggattctggaggggttgagatgagggctgctttatatatccgcgtgtcaacagaggagcaggcccgacacggcctgtcc

SEQ ID NO: 22346 - DNA, 260 bp, Unknown
  Description of Unknown: LeftRegion for integrase B9347 sequence
acgcattgttcggtacagaatagccatgtcgatggcaaaaagtatgctgaacaaggggattataaccgaggaagaatacgcaaaaattgatacaattatgaccaaaaatgccgagttatctttggatactatattctccgaaattccttgatattactgcctttcagagcgaatatgtcacacgataaggaggcgatatcatggaaagaacaatcaagcgagtcgaccgcaaactccccaagcaggaaaaacttatacgg

SEQ ID NO: 22347 - DNA, 260 bp, Unknown
  Description of Unknown: LeftRegion for integrase B9348 sequence
atttttatgctgctcggcgtttgcgccctgctgctcgtttcagtcattagctatatcatcttcgacatacagatcacgaccgccgggctgttccagtcggcaaaaacaagcacgcttgccgttttcctcggccttgtcgttctcgccgccggcggctccatcgggtacgccgttcacactatccacaaggggaggaagaaatgagagttgcactctacatccgcgtctccacggaagaacaagccgttcacggcctttcc

SEQ ID NO: 22348 - DNA, 260 bp, Unknown
  Description of Unknown: LeftRegion for integrase B9349 sequence
atcatagaacacttaacgccgactgaggaaaccttacaagcgcggaatgatgagttggaacgccatgttgacgcgaaagcggacatgattgagatcatgcggcgcggtgtccgtatccgcaacaacgtgattgctataatgtttgtcattatcgttctgctggctgtatggtgcttgtacattgattggagggggatttgatgagagcggcactatatatccgcgtatctacggaagaacaggcacggaacggcctgtca

SEQ ID NO: 22349 - DNA, 260 bp, Unknown
  Description of Unknown: LeftRegion for integrase B9350 sequence
atttatatgcttataggcatatgcagtattcttttgtgcgccgttgtatggtacgtcatatttgacatccaggtagagaccgccggtattttccgctcggccgggacaagcatttttgcgggcgtcctcgccctgatactgaacgcctccgtcgcaaccatcatttacgccttcaaaagcatttacaaggggaaaaagaaatgagagttgcactttatgtccgcgtctccacggaagaacaagccgttcacggcctttcc

SEQ ID NO: 22350 - DNA, 260 bp, Unknown
  Description of Unknown: LeftRegion for integrase B9351 sequence
gagaaaaccttgcaagcgcggaatgatgagctggaacgccatgttgacgcaaaggccgataccattgagatcatgcggcgcggtgtgcgtatccgcaatggcgtgattgctatattgttcctcatcaccgtttttctcgctgcgtggtgcgtgtacatcgatttccattgcatagattacggattttggaggggggttcgatgagagcggcattgtatatccgcgtctcgagcgaagaacaggcgcggcatggcctgtcc

SEQ ID NO: 22351 - DNA, 260 bp, Unknown
  Description of Unknown: LeftRegion for integrase B9352 sequence
atttatatgcttataggcgtatgcagtattcttttgtgcgccgttgtatggtacgtcatatttgacatccaggtagagaccgccggtattttccgctcggctgggacaagcatttttgcgggcgtcctcgccctgatactgaacgcctccgtcgcaaccatcatttacgccttcaaaagcatttacaaggggaaaaagaaatgagagttgcactttatgtccgcgtctccacggaagaacaagccgttcacggcctttcc

SEQ ID NO: 22352 - DNA, 260 bp, Unknown
  Description of Unknown: LeftRegion for integrase B9353 sequence
gaagagaccttgcaggcgcgaaatgacgagctggagcgccatgttgacgcaaaggaagacatgatcgagattatgcggcgtggtgtccatatccgcaacgccgtaatttttattttatttgtggtggtggtgttactgaccgcgtggtgcgtgtatgtcgatttgcattgcgcagattacggattttggagggggcggtgatgagagcagcactgtatatccgcgtgtcgagcgacgaacaggcgcggcatggcctgtca

SEQ ID NO: 22353 - DNA, 260 bp, Unknown
  Description of Unknown: LeftRegion for integrase B9354 sequence
gaggagacattgcaggcgcgcaacgatgagctggaacgccatgttgacgcaaaagcggacatgattgagatcatgcggcgcggcgtgcgtatccgaaacggcgtgattgctatattgttcctcatcaccgtttttctcgctgcgtggtgcgtgtatatcgatttccattgcatagattacggattttggaggggggttcgatgagagcggcattgtatatccgcgtctcgagcgaggagcaggcgcggcatgggctatca

SEQ ID NO: 22354 - DNA, 260 bp, Unknown
  Description of Unknown: LeftRegion for integrase B9355 sequence
atttccgaacacttgacgccgaccgaggaaactttgcaagcgcggaatgatgagctggaacgccatgttgatgcaaaagcagacatgattgagatcatgcggcgtggagtgcgtatccgaaacgtcgtgattgctataatgtttgccattatcgttctgctggccgcgtggtgtttgtacattgattggagtgggattttatgagagtggcattgtatatccgcgtctcgagcgaggagcaggcgcggcatggcctgtca

SEQ ID NO: 22355 - DNA, 260 bp, Unknown
  Description of Unknown: LeftRegion for integrase B9356 sequence
gtatcacaccaccctcgccctaatcgacgggttggtagaggatggctgctttacgcaggcagacaggcgtaaagcttacacaattatcaatcgcaaatacggcttatcttcggatagtatatttgccgaaaccgcttgatatatctcgcttttagagcaatatatagagtaccgaatattgatacaagggagggaaaaacatggaacgcagcataaaacagaccatattctacaagccgccgtcagagcagctaaagcgt

SEQ ID NO: 22356 - DNA, 260 bp, Unknown
  Description of Unknown: LeftRegion for integrase B9357 sequence
gaagagaccttgcaggcgcgaaatgacgagctggagcgccatgttgacgcaaaggaagacatgatcgagattatgcggcgtggtgtccatatccgcaacgccgtgatttttattttatttgtggtggtggtgttactgaccgcgtggtgcgtgtatgtcgatttgcattgcgcagattacggattttggagggagcggtgatgagagcagcactgtatatccgcgtgtcgagcgacgaacaggcgcggcatggcctgtca

SEQ ID NO: 22357 - DNA, 260 bp, Unknown; identical to SEQ ID NO: 13602
  Description of Unknown: LeftRegion for integrase B9358 sequence

SEQ ID NO: 22358 - DNA, 260 bp, Unknown
  Description of Unknown: LeftRegion for integrase B9359 sequence
aaaggatgggctggaacaccgccttgaaaataagcggaagaccatcggcctgatggaggcggaactgaataacctacgtcattccgtaaaactatacaggtggatcatgctcggtttgtcgctattgatcgtcggtctcttcgtctggtgcgtgtgggtagatattcgctgcgccaattacggattttggaggggatagtatgagagccgcactatatatccgcgtctcgacggaagaacaggcgcggcacggcctgtca

SEQ ID NO: 22359 - DNA, 260 bp, Unknown; identical to SEQ ID NO: 22351
  Description of Unknown: LeftRegion for integrase B9360 sequence

SEQ ID NO: 22360 - DNA, 260 bp, Unknown
  Description of Unknown: LeftRegion for integrase B9361 sequence
agaagaaaccctccaggcggagaaagtcggcctcgaaaagcatttgtccagcaaacggcagatcattacgatgatggagcagggcgtgaaaacccggaaccgcatcattgccgctttgctggttttattgtttttattcataacctatgcgttgtaccttgataccaattgtattcaaatcggcttttggaggggatagcatgagagtcgcactatatatccgcgtctcgacggaagaacaagcacggcacggcctgtca

SEQ ID NO: 22361 - DNA, 260 bp, Unknown
  Description of Unknown: LeftRegion for integrase B9362 sequence
gaggaaactttgcaagcgcggaatgatgagctggaacgccatgttgacgcaaaggccgataccattgagatcatgcggcgcggcgtgcgtatccgaaacggcgtgattgctataatgttcctcatcatcgtttttctcgctgtgtggtgcgtgtacattgattttcattgtatagattacggattttggaggggaatttgatgagagcggcgctatatatccgcgtgtccagcgaggaacaggcgcggcatggtctatca

SEQ ID NO: 22362 - DNA, 260 bp, Unknown; identical to SEQ ID NO: 22360
  Description of Unknown: LeftRegion for integrase B9363 sequence

SEQ ID NO: 22363 - DNA, 260 bp, Unknown
  Description of Unknown: LeftRegion for integrase B9364 sequence
gaggagaccttgcaggcgcgaaacgacgagctggagcgccatgttgacgcaaaggcagacatgatcgagattatgcggcgtggtgtccatatccgcaacgccgtgatttttattttatttgtggtggtggtgttactgaccgcgtggtgcgtgtatgtcgatttgcattgcgcagattacggattttggagggggcggtgatgagagcagcactgtatatccgcgtgtcgagcgacgaacaggcgcggcatggcctgtca

SEQ ID NO: 22364 - DNA, 260 bp, Unknown
  Description of Unknown: LeftRegion for integrase B9365 sequence
atttccgaacacttgacaccaaccgaggaaaccttgcaagcgcggaatgatgagctggaacgccacgtggacgcaaaggccgataccatcgagatcatgcggcgcggtgtccgtatccgaaacggcgtgattgctataatgtttgtcattatcgttctactggctgtatggtgcttgtagattgattggagggggatttgatgagagcggcactatatatccgcgtttccagcgaggaacaagcgcggcatggtctatca

SEQ ID NO: 22365 - DNA, 260 bp, Unknown
  Description of Unknown: LeftRegion for integrase B9366 sequence
gaggaaaccttgcaagcgcggaatgatgagctggaacgccatgttgacgcaaaggccgataccattgagatcatgcggcgcggtgtccatatccgcaacggcgcgattgctgtaatgtttgttataatcgtttttctcgctgcgtggtgcgtgtacattgattttcattgtatagattacggattttggagggggattcgatgagagcggcgctatatatccgcgtgtccagcgaggaacaggcgcggcatggtctatca

SEQ ID NO: 22366 - DNA, 260 bp, Unknown
  Description of Unknown: LeftRegion for integrase B9367 sequence
gaggaaactttgcaagcgcggaatgatgagctggaacgccatgttgacgcaaaggccgataccattgagatcatgcggcgcggcgtgcgtatccgaaacggcgtgattgctataatgtttgtcatcattgctatgcttgctgtgtggtgcgcgtacattgattttcactgcatagattacggattttggagggggattcgatgagagcggcattgtatatccgcgtgtccagcgaggaacaggcgcggcatggcctgtcc

SEQ ID NO: 22367 - DNA, 260 bp, Unknown
  Description of Unknown: LeftRegion for integrase B9368 sequence
aaaagatgggctggaacaccgccttgaaaataagcggaagaccatcggcctgatggaggcggaactgaataacctacgtcattccgtaaaactatacaggtggatcatgctcggtttgtcgctattgatcgtcggtctcttcgtctggtgcgtgtgggtagatattcgctgcgccaattacggattttggaggggatagtatgagagtcgcactatatatccgcgtctcgacggaagaacaggcgcggcacggcctgtca

SEQ ID NO: 22368 - DNA, 260 bp, Unknown
  Description of Unknown: LeftRegion for integrase B9369 sequence
atttccgaacacctgacgccgaccgaggaaactttgcaagcgcggaatgatgagctggaacgccatgttgacgcgaaagcggataccattgagatcatgcggcgcggtgtccatatccgcaacggcgtgattgctataatgtttgccattatcgttctgctggctgcatggtgcttgtacattgattggagggggatttgatgcgagcggcattgtatatccgtgtgtcgagcgaggagcaggcgcggcatggtctatca

SEQ ID NO: 22369 - DNA, 260 bp, Unknown
  Description of Unknown: LeftRegion for integrase B9370 sequence
gaagagaccttgcaggcgcgaaatgacgagctggagcgccatgttgacgcaaaggaagacatgatcgagattatgcggcgtggtgtccatatccgcaacgccgtgatttttattttatttgtggtggtggtgttactgaccgcgtggtgcgtgtatgtcgatttgcattgcgcagattacggattttggagggggcggtgatgagagcagcactgtatatccgcgtgtcgagcgacgaacaggcgcggcatggcctgtca

SEQ ID NO: 22370 - DNA, 260 bp, Unknown
  Description of Unknown: LeftRegion for integrase B9371 sequence
gaggaaactttgcaagcgcggaatgatgagctggaacgccatgttgacgcaaaggccgataccattgagatcatgcggcgcggtgtccatatccgcaacggcgcgattgctgtaatgtttgttataatcgtttttctcgctgcgtggtgcgtgtacattgattttcattgtatagattacggattttggagggggattcgatgagagtggcattgtatatccgcgtcacgagcgaggagcaggcgcggcatgggctgtcc

SEQ ID NO: 22371 - DNA, 260 bp, Unknown
  Description of Unknown: LeftRegion for integrase B9372 sequence
atttccgaacacctgacgccgaccgaggaaaccttgcaagcgcggaatgatgagctggaacgccatgttgacgcgaaagcggacatgatcgagatcatgcggcgcggtgtccgtatccgaaacggcgtgattgctataatgtttgtcattatcgttctgctggctgcatggtgcttgtacgttgattggagggggatttgatgcgagcggcgctatatatccgcgtgtccagcgaggaacaggcgcggcatggtctatca

SEQ ID NO: 22372 - DNA, 260 bp, Unknown
  Description of Unknown: LeftRegion for integrase B9373 sequence
atcatagaacacttaacgccgactgaggaaaccttacaagcgcggaacgatgagttggaacgccatgttgacgcgaaagcggacatgattgagatcatgcggcgcggtgtccgtatccgcaacaacgtgattgctataatgtttgtcattatcgttctgctggctgcatggtgcttgtacattgattggagggggatttgatgagagcggcactatatatccgcgtctcgacggaagaacaggcgcggcacggcctgtca

SEQ ID NO: 22373 - DNA, 260 bp, Unknown; identical to SEQ ID NO: 22369
  Description of Unknown: LeftRegion for integrase B9374 sequence

SEQ ID NO: 22374 - DNA, 260 bp, Unknown
  Description of Unknown: LeftRegion for integrase B9375 sequence
aaaagatgggctggaacaccgccttgaaaataagcggaagaccatcggcctgatggaggcggaactgaataacctacgtcattccgtaaaactatacaggtggatcatgctcggtttgtcgctattgatcgtcggtctcttcgtctggtgcgtgtgggtagatattcactgcgccaattacggattttggaggggatagtatgagagccgcactatatatccgcgtctcgacggaagaacaggcgcggcacggcctgtca

SEQ ID NO: 22375 - DNA, 260 bp, Unknown
  Description of Unknown: LeftRegion for integrase B9376 sequence
gaggaaacgttgcaagcgcgaaatgatgagctagaacgccatgttgacgcaaaggccgataccattgagatcatgcggcgcggtgtccatatccgcaacggcgcgattgctgtaatgtttgttatcatcgctcttctcgctgcgtggtgcgtgtacattgattttcattgtatagattacggattttggagggggatttgatgagagcggcactatatatccgcgtctcgagcgaggaacaggcgcggcatggtctatca

SEQ ID NO: 22376 - DNA, 260 bp, Unknown
  Description of Unknown: LeftRegion for integrase B9377 sequence
atttatatgctcatcggcgtatgcagtattcttttgtgcgccgttgtatggtacatcatatttgacatccaggtagagaccgccggtattttccgctcggctgggacaagcatttttgcgggtgtcctcgccctgatactgaacgcctccgtcgcaaccatcatttacgccttcaaaagcattcacaaggggaaaaagaaatgagagttgcactttatgtccgcgtctccacggaagaacaagccgttcacggcctttcc

SEQ ID NO: 22377 - DNA, 260 bp, Unknown
  Description of Unknown: LeftRegion for integrase B9378 sequence
atctccgaacacttgacgccaacagaagaaaccttgcaagcgcggaatgatgagttggaacgtcacgttgacgcgaaagcggacatgatcgagatcatgcggcgtggagtgcgtatccgcaacggcgtgattgctataatgtttgccattatcgttctgctggccgcgtggtgcttgtacattgattggagggggattttatgagagtggcattgtatatccgcgtctcgagcgaggaacaggcgcggcatggcctatca

SEQ ID NO: 22378 - DNA, 260 bp, Unknown
  Description of Unknown: LeftRegion for integrase B9379 sequence
atttatatgcttataggcgtatgcagtattcttttgtgcgccgttgtatggtacgtaatatttgacatccaggtagagaccgccggtattttccgctcggctgggacaagcatttttgcgggcgtcctcgccctgatactgaacgcctccgtcgcaaccatcatttacgccttcaaaagcatttacaaggggaaaaagaaatgagagttgcactttatgtccgcgtctccacggaagaacaagccgttcacggcctttcc

SEQ ID NO: 22379 - DNA, 260 bp, Unknown
  Description of Unknown: LeftRegion for integrase B9380 sequence
gaggaaactttgcaggcgcggaatgatgaactggaacgccatgttgacgcaaaagcagacatgatcgagatcatgcggcgtggagtgcgtatccgcaactgcgtgattgctataatgtttttcatcatcgttcttctcgctgcgtggtgcgtgtacattgattttcattgtatagattacggtttttggagggggatttgatgagagtggctctgtatatccgcgtgtcgagcgaggagcaggcgcggcatggcctgtcc

SEQ ID NO: 22380 - DNA, 260 bp, Unknown
  Description of Unknown: LeftRegion for integrase B9381 sequence
gagaaaaccttgcaagcgcggaatgatgagctggaacgccatgttgacgcgaaagccgataccattgagatcatgcggcgcggtgtgcgtatccgcaacggcgtgattgctataatgttcctcatcatcgtttttctcgctgtgtggtgcgtgtacattgattttcattgtatagattacggattttggagggggattcgatgagagcggcgctatatatccgcgtgtccagcgaggagcaggcgcggcatggcttgtct

SEQ ID NO: 22381 - DNA, 109 bp, Unknown
  Description of Unknown: LeftRegion for integrase B9382 sequence
ggcagtactgccatctacacatttttttctttgaggaggacattaatttatgaagagaattatagctatgtatttacgagtatccactttagaccaagcacgaaatgga

SEQ ID NO: 22382 - DNA, 260 bp, Unknown
  Description of Unknown: LeftRegion for integrase B9383 sequence
gaggaaactttgcaagcgcggaatgatgagctggaacgccatgttgacgcaaaggccgataccattgagatcatgcggcgcggcgtgcgtatccgcaacggcgtgattgctatattgttcctcatcaccgtttttctcgctgcgtggtgcgtgtacatcgatttccattgcatagattacggattttggaggggggttcgatgagagcggcattgtatatccgcgtctcgagcgaggagcaggcgcggcatgggctatca

SEQ ID NO: 22383 - DNA, 260 bp, Unknown
  Description of Unknown: LeftRegion for integrase B9384 sequence
gaggagactttgcaagcgcggaatgatgagctggaacgccatgttgacgcaaaggccgataccattgagatcatgcggcgcggtgtccatatccgcaacggcgcgattgctgtaatgtttgttatcatcgctcttctcgctgcgtggtgcgtgtacattgattttcattgtatagattacggattttggagggggatttgatgagagcggcattgtatatccgcgtctcgagcgaggaacaggcgcggcatggcttgtct

SEQ ID NO: 22384 - DNA, 260 bp, Unknown; identical to SEQ ID NO: 22224
  Description of Unknown: LeftRegion for integrase B9385 sequence

SEQ ID NO: 22385 - DNA, 260 bp, Unknown
  Description of Unknown: LeftRegion for integrase B9386 sequence
gaggaaactttgcaagcgcggaatgatgagctagaacgccatgttgacgcaaaggccgataccattgagatcatgcggcgcggcgtgcatatccgaaacggcgtgattgctataatgttcctcatcatcgtttttctcgctgtgtggtgcgtgtacattgattttcattgtatagattacggattttggagggggattcgatgagagcggcgctatatatccgcgtctcgagcgaggagcaggcgcggcatggcttgtca

SEQ ID NO: 22386 - DNA, 260 bp, Unknown; identical to SEQ ID NO: 22348
  Description of Unknown: LeftRegion for integrase B9387 sequence

SEQ ID NO: 22387 - DNA, 260 bp, Unknown
  Description of Unknown: LeftRegion for integrase B9388 sequence
atcatagaacacttgacgccgaccgaggaaacgttgcaggcgcgcaacgatgagctggaacgccacgttgacgcgaaagcggacatgatcgagattatgcggcgtggagtgcgtatccgaaacggcgtgattgctataatgtttgtcattatcgtcctgctggccgcgtggtgcttgtacattgattggagggggatttgatgatagcggcattgtatatccgcgtctcgagcgaggaacaggcccggcatggcctgtcc

SEQ ID NO: 22388 - DNA, 260 bp, Unknown
  Description of Unknown: LeftRegion for integrase B9389 sequence
atttatatgcttataggcgtatgcagtattcttttgtgcgccgttgtatggtacgtcatatttgacatccaggtagagaccgccggtattttccgctcggctgggacaagcatttttgcgggcgtcctcgccctgatactgaacgcctccgtcgcaaccatcatttacgccttcaaaagcatttacaaggggaaaaagaaatgagagttgcactttacatccgtgtttcgacggaagaacaagccgttcacggtctttcc

SEQ ID NO: 22389 - DNA, 260 bp, Unknown
  Description of Unknown: LeftRegion for integrase B9390 sequence
atttccgaacacttgacgccgactgaggaaactttgcaagcacggaatgatgagttggaacgccacgttgacgcaaaagcagacacgatcgagattatgcggcgcggtgtccgtatccgaaacggcgtgattgctataatgtttgtcattatcgttctactggctgcatggtgcttgtagattgattggagggggacttgatgagagcagcattgtatatacgcgtgtccagcgaggaacaagcgcggcatggtttatca

SEQ ID NO: 22390 - DNA, 260 bp, Unknown; identical to SEQ ID NO: 22369
  Description of Unknown: LeftRegion for integrase B9391 sequence

SEQ ID NO: 22391 - DNA, 260 bp, Unknown; identical to SEQ ID NO: 22369
  Description of Unknown: LeftRegion for integrase B9392 sequence

SEQ ID NO: 22392 - DNA, 260 bp, Unknown
  Description of Unknown: LeftRegion for integrase B9393 sequence
aacggaacgtggtaagcgtttttgggaagaatatcttcgcgaaaaggaaaaagaggctcaaaaaacagcctgaattctattctctgggaattttaataaaaaatgcagtttagtgctttaaatcgttgacaaattcttttgaaagtgatatactattaaataaagaaaaccaacaacgcaacgacaataaggaggtagcaatgaaggcagtaatttatgctcgttactcttgtgataaccaacgtgaagagagtatcgaa

SEQ ID NO: 22393 - DNA, 260 bp, Unknown; identical to SEQ ID NO: 22369
  Description of Unknown: LeftRegion for integrase B9394 sequence

SEQ ID NO: 22394 - DNA, 260 bp, Unknown; identical to SEQ ID NO: 22374
  Description of Unknown: LeftRegion for integrase B9395 sequence

SEQ ID NO: 22395 - DNA, 260 bp, Unknown
  Description of Unknown: LeftRegion for integrase B9396 sequence
gaggaaaccttgcaggcgcggaatgatgagctggaacgccatgttgacgcaaaggccgataccattgagatcatgcggcgcggcgtgcgtatccgaaacggcgtgattgctataatgttcctcatcatcgtttttctcgctgtgtggtgcgtgtacattgattttcattgtatagattacggattttggagggggatttgatgcgagcggcgctatatatccgcgtgtccagcgaggagcaggcgcggcatggcttgtct

SEQ ID NO: 22396 - DNA, 260 bp, Unknown
  Description of Unknown: LeftRegion for integrase B9397 sequence
atttccgaacacttgacgccgaccgaggaaaccttgcaggcgcggaatgatgagctggaacgccatgttgacgcaaaggccgataccattgagatcatgcggcgcggcgtgcatatccgaaacggcgtgattgctataatgtttgtcattatcgttctgctgtctgcatggtgcttgtatattgattggagggggatttgatgagagcggcgctatatatccgagtgtccagcgaggaacaggcgcggcatggtctatca

SEQ ID NO: 22397 - DNA, 260 bp, Unknown
  Description of Unknown: LeftRegion for integrase B9398 sequence
gaggaaaccttgcaagcgcgaaatgatgagctggaacgccatgttgacgcaaaggccgataccattgagatcatgcggcgcggagtgcgtattcgcaacggcgtgattgctataatgttcctcatcatcgtttttctcgctgtgtggtgcgtgtacattgattttcattgtatagattacggattttggaggggggttcgatgagagcggcattgtatatccgcgtctcgagcgaggagcaggcgcggcatggcctgtcg

SEQ ID NO: 22398 - DNA, 260 bp, Unknown
  Description of Unknown: LeftRegion for integrase B9399 sequence
atttccgaacacttgacgccgaccgaggaaaccttgcaggcgcgcaacgatgagctggaacgccacgttgatgcaaaagcagacacgatcgagattatgcggcgcggtgtccgtatccgaaacggcgtgattgctataatgtttgtcattatcgttctactggctgcatggtgcttgtagattgattggagggggatttgatgagagcagcattgtatatacgcgtgtccagcgaggaacaagcgcggcatggtctatca

SEQ ID NO: 22399 - DNA, 260 bp, Unknown
  Description of Unknown: LeftRegion for integrase B9400 sequence
gatgggctggaacaccgccttgaaaataagcggaagaccatcggcctgatggagacggagctgaataacctacgtcattccgtaaaactatacaggtggatcatactcggtttgtcgctattgatcgtcggtctcttcgtctggtgcgtgtgggtcgatattcactgcgccaattacggcttttggaggggatagatagtatgagagtcgcactatatatccgcgtatctacggaagaacaggcacggcacggcctgtca

SEQ ID NO: 22400 - DNA, 260 bp, Unknown; identical to SEQ ID NO: 22366
  Description of Unknown: LeftRegion for integrase B9401 sequence

SEQ ID NO: 22401 - DNA, 260 bp, Unknown
  Description of Unknown: LeftRegion for integrase B9402 sequence
gaggaaactttgcaagcgcggaatgatgagctggaacgccatgttgacgcaaaggccgataccattgagatcatgcggcgcggtgtccatatccgcaacggcgcgattgctgtaatgtttgttatcatcgtttttctcgctgcgtggtgcgtgtacattgattttcattgtatagattacggattttggagggggattcgatgagagtggcattgtatatccgcgtcacgagcgaggagcaggcgcggcatgggctgtcc

SEQ ID NO: 22402 - DNA, 260 bp, Unknown
  Description of Unknown: LeftRegion for integrase B9403 sequence
gaggaaactttgcaagcgcgaaatgatgagctggaacgccatgttgacgcaaaggccgataccattgagatcatgcggcgcggcgtgcgtatccgaaacggcgtgattgctataatgtttgtcatcattgctatgcttgctgtgtggtgcgcgtacattgattttcactgcatagattacggattttggagggggattcgatgagagcggcattgtatatccgcgtctcgagcgaggagcaggcgcggcatgggctatca

SEQ ID NO: 22403 - DNA, 260 bp, Unknown; identical to SEQ ID NO: 22360
  Description of Unknown: LeftRegion for integrase B9404 sequence

SEQ ID NO: 22404 - DNA, 260 bp, Unknown
  Description of Unknown: LeftRegion for integrase B9405 sequence
gagaaaaccttgcaagcgcggaatgatgagctggaacgccatgttgacgcaaaggccgataccattgagatcatgcggcgcggcgtgcatatccgcaacggcgtgattgctataatgttcctcatcattgtttttctcgctgtgtggtgcgtgtacattgattttcattgcatagattacggattttggagggggattcgatgagagcggcattgtatatccgcgtgtccagcgaggaacaggcgcggcatggtctatca

SEQ ID NO: 22405 - DNA, 260 bp, Unknown
  Description of Unknown: LeftRegion for integrase B9406 sequence
ttacgagcaatatttatcttcattaatggtatttaaacaaatgcttcatttgggtttgttaagtgacaaagaatataacaaaagtgagaatctccttgctaataaatactgtatcaacaaaggtaatttataccgtcaaaatgacttgataataaaggactttagagtgatatatgtaatggaaaataaggaggttcaacatggaaacgaaagttactaaaattgatgcgttgcctaaacttgaaaagaaattaagagta

SEQ ID NO: 22406 - DNA, 260 bp, Unknown
  Description of Unknown: LeftRegion for integrase B9407 sequence
atttccgaacacttgacgccaaccgaggaaactttgcaagcgcgtaacgatgagctggaacgccatgttgacgcaaaagcggacatgatcgagattatgcggcgcggtgttcgtatccgaaacgttgtgattgctataatgtttgtcattatcgtctttctggccgcgtggtgcttgtacattgattggagggggatttgatgagagcggcgctatatatccgcgtgtccagcgaggaacaggcgcggcatggtttgtct

SEQ ID NO: 22407 - DNA, 260 bp, Unknown
  Description of Unknown: LeftRegion for integrase B9408 sequence
gaggaaactttgcaggcgcggaatgatgagctggaacgccatgttgacgcaaaagcagacatgatcgagatcatgcggcgtggagtgcgtatccgcaactgcgtgattgctataatgtttttcatcatcgttcttctcgctgcgtggtgcgtgtacattgattttcattgtatagattacggtttttggagggggatttgatgagagtggctctgtatatccgcgtgtcgagcgaggagcaggcgcggcatggcctgtcc

SEQ ID NO: 22408 - DNA, 260 bp, Unknown
  Description of Unknown: LeftRegion for integrase B9409 sequence
gaggaaaccttgcaagcgcggaatgatgagctggaacgccatgttgacgcaaaggccgataccattgagatcatgcggcgcggcgtgcatatccgaaacggcgtgattgctataatgttcctcatcatcgtttttctcgctgtgtggtgcgtgtacattgattttcattgtatagattacggattttggagggggatttgatgagagcggcattgtatatgcgcgtcacgagcgaggagcaggctcggcatgggctatca

SEQ ID NO: 22409 - DNA, 260 bp, Unknown
  Description of Unknown: LeftRegion for integrase B9410 sequence
aaaagatgggctggaacaccgccttgaaaataagcggaagaccatcggcctgatggaggcggaactgaataacctacgtcattccgtaaaactatacaggtggatcatgctcggtttgtcgctattgatcgtcggtctcttcgtctggtgcgtgtgggtagatattcgctgcgccaattacggattttggaggggatagtatgagagccgcactatatatccgcgtctcgacggaagaacaggcgcggcacggcctgtca

SEQ ID NO: 22410 - DNA, 260 bp, Unknown
  Description of Unknown: LeftRegion for integrase B9411 sequence
aaaagatgggctggaacaccgccttgaaaataagcggaagacaatcggcctgatggaggcggaactgaataacctacgtcattccgtaaaactatacaggtggatcatgctcggtttgtcgctattgatcgtcggtctcttcgtctggtgcgtgtgggtagatattcgctgcgccaattacggattttggaggggatagtatgagagccgcactatatatccgcgtctcgacggaagaacaggcacggcacggcctgtca

SEQ ID NO: 22411 - DNA, 260 bp, Unknown
  Description of Unknown: LeftRegion for integrase B9412 sequence
atcatagaacacttgacgccgaccgaggaaactttgcaagcgcggaatgatgaactagaacgccacgttgacgcaaaagcggacatgatcgagatcatgcggcgtggagtgcgtatccgaaacagcgtgattgctataatgtttgtcattatcgttctgctggttgcatggtgcttgtacgttgattggagggggatttgatgcgagcggcattgtatatccgcgtctcgagtgaggagcaggcgcggcatggattgtcc

SEQ ID NO: 22412 - DNA, 260 bp, Unknown
  Description of Unknown: LeftRegion for integrase B9413 sequence
atttccgaacacttgacgccgaccgaggaaactttgcaagcgcgaaatgatgagctggaacgccatgttgacgcaaaggccgataccattgagatcatgcggcgcggcgtgcatatccgaaacggcgtgattgctataatgtttgtcattatcgttctgctggctgcatggtgcttgtacgttgattggagagggatttgatgcgagcggcattgtatatccgcgtgtccagcgaggagcaggcgcggcatggcctgtca

SEQ ID NO: 22413 - DNA, 260 bp, Unknown
  Description of Unknown: LeftRegion for integrase B9414 sequence
gaggagaccttgcaggcgcgaaacgacgagctggagcgccatgttgacgcaaaggcagacatgatcgagattatgcggcgcggtgtgcatatccgaaacggcgtgattttcattttgtttgtcgtggtcgtattgctgactgcctggtgcgtgtatgtagacatccattgcccagattacggttttgggagggggatttgatgagggtggctctgtatattcgcgtttcaagcgaagaacaggcacgtcacggcctgtca

SEQ ID NO: 22414 - DNA, 260 bp, Unknown
  Description of Unknown: LeftRegion for integrase B9415 sequence
atttccgaacacttgacgccgaccgaggaaactttgcaagcgcggaaggatgagctggaacgccatgttgatgcaaaagcagacatgattgagatcatgcggcgtggagtgcgtatccgaaacgtcgtgattgctataatgtttgccattatcgttctgctggccgcgtggtgtttgtacattgattggagtgggattttatgagagtggcattgtatatccgcgtctcgagcgaggagcaggcgcggcatggcctgtca

SEQ ID NO: 22415 - DNA, 260 bp, Unknown; identical to SEQ ID NO: 22395
  Description of Unknown: LeftRegion for integrase B9416 sequence

SEQ ID NO: 22416 - DNA, 260 bp, Unknown
  Description of Unknown: LeftRegion for integrase B9417 sequence
ttacgagcaatatttatcttcattaatgatatttaaacaaatgcttcatttggatttgttaactgataaagaatataacgaaagtgagaatctccttgctaataaatactgtatcaacaaaggtaatttataccgtcaaaatgacttgataataaaggactttagagtgatatatgtaatggaaaataaggaggttcaacatggaaactaaaattactaaaattgatgcgttgcctaaacttgaaaagaaattaagagta

SEQ ID NO: 22417 - DNA, 260 bp, Unknown
  Description of Unknown: LeftRegion for integrase B9418 sequence
gaggaaaccttgcaagcgcgaaatgacgagctggaacgccacgttgacgcaaaatcagacacgatcgagattatgcgtcgcggtgtgcatatccgaaacggcgtgatttttattttgttcatcgcggtcgtattgctgactgcctggtgcgtgtatgtcgacatccattgcccagattacggtttttggagggggatttgatgagggtggctttgtatatccgcgtttcaagcgaagaacaggcacgtcacggcctgtca

SEQ ID NO: 22418 - DNA, 260 bp, Unknown; identical to SEQ ID NO: 22401
  Description of Unknown: LeftRegion for integrase B9419 sequence

SEQ ID NO: 22419 - DNA, 260 bp, Unknown; identical to SEQ ID NO: 22369
  Description of Unknown: LeftRegion for integrase B9420 sequence

SEQ ID NO: 22420 - DNA, 260 bp, Unknown
  Description of Unknown: LeftRegion for integrase B9421 sequence
atttccgaacacttgacgccgactgaggaaactttgcaagcacggaatgatgagttggaacgccacgttgatgcaaaggccgacaccatagagatcatgcggcgcggcgtccgtatccgaaacggcgtgattgctataatgtttgtcattatcgttctactggctgcatggtgcttgtagattgattggagggggacttgatgagagcggcattgtatatacgcgtgtccagcgaggaacaagcgcggcatggtctatca

SEQ ID NO: 22421 - DNA, 260 bp, Unknown
  Description of Unknown: LeftRegion for integrase B9422 sequence
gaggagaccttgcaggcgcgaaacgacgagctggagcgccatgttgacgcaaaggcagacatgatcgagattatgcggcgcggtgtgcatatccgaaacggcgtgattttcattttgtttgtcgtggtcgtattgctgactgcctggtgcgtgtatgtagacatccattgcccagattacggtttttggagggggatttgatgagggtggctctgtatattcgcgtttcaagcgaagaacaggcacgtcacggcctgtca

SEQ ID NO: 22422 - DNA, 260 bp, Unknown
  Description of Unknown: LeftRegion for integrase B9423 sequence
atttccgaacacttgacgccgaccgaggaaaccttgcaggcgcgcaatgatgagctggaacgccacgttgatgcaaaagcagacacgatcgagattatgcggcgcggtgtccgtatccgaaacggcgtaattgctataatgtttgtcattatcgttctactggctgcatggtgcttgtagattgattggagggggatttgatgagagcagcattgtatatacgcgtgtccagcgaggaacaagcgcggcatggcctatca

SEQ ID NO: 22423 - DNA, 260 bp, Unknown; identical to SEQ ID NO: 22354
  Description of Unknown: LeftRegion for integrase B9424 sequence

SEQ ID NO: 22424 - DNA, 260 bp, Unknown
  Description of Unknown: LeftRegion for integrase B9425 sequence
gagaaaaccttgcaagcgcggaatgatgagctggaacgccatgttgacgcgaaagccgataccattgagatcatgcggcgcggtgtgcgtatccgcaacggcgtgattgctatattgttcctcatcaccgtttttctcgctgcgtggtgcgtgtacatcgatttccattgcatagattacggattttggaggggggttcgatgagagcggcattgtatatccgcgtctcgagcgaggagcaggcgcggcatggcttgtct

SEQ ID NO: 22425 - DNA, 260 bp, Unknown
  Description of Unknown: LeftRegion for integrase B9426 sequence
gaggagaccttgcaggcgcgaaacgacgagctggagcgccatgttgacgcaaaggcagacatgatcgagattatgcggcgcggtgtgcatatccgaaacgccgtgatttttattttatttgtggtggtggtgttactgaccgcgtggtgcgtgtatgtcgatttgcattgcgcagattacggattttggagggggcggtgatgagagcagcactgtatatccgcgtgtcgagcgacgaacaggcgcggcatggcctgtca

SEQ ID NO: 22426 - DNA, 260 bp, Unknown
  Description of Unknown: LeftRegion for integrase B9427 sequence
atttatatgcttataggcgtatgcagtattcttttgtgcgccgttgtatggtacgtcatatttgacatcaaggtagagaccgccggtattttccgctcggctgggacaagcatttttgcgggcgtcctcgccctgatactgaacgcctccgtcgcaaccatcatttacgccttcaaaagcatttacaaggggaaaaagaaatgagagttgcactttatgtccgcgtctccacggaagaacaagccgttcacggcctttcc

SEQ ID NO: 22427 - DNA, 260 bp, Unknown; identical to SEQ ID NO: 22369
  Description of Unknown: LeftRegion for integrase B9428 sequence

SEQ ID NO: 22428 - DNA, 260 bp, Unknown; identical to SEQ ID NO: 22351
  Description of Unknown: LeftRegion for integrase B9429 sequence

SEQ ID NO: 22429 - DNA, 260 bp, Unknown
  Description of Unknown: LeftRegion for integrase B9430 sequence
gaggaaactttgcaagcgcgtaacgacgagctggaacgccatgttgatgcaaaagctgataccatcgagatcatgcggcgcggcgtccgtattcgcaacgttgtgattgctataatgtttgtcatcattgctatgcttgctgtgtggtgcgtgtacattgatttacattgtatagattacggattttggagggggattcgatgagggcggcactatatatccgcgtgtccagcgaggaacaggcgcggcatggactgtcc

SEQ ID NO: 22430 - DNA, 260 bp, Unknown
  Description of Unknown: LeftRegion for integrase B9431 sequence
agaagaaaccctccaagcggagaaagtcggcctcgaaaagcatttgtccagcaaacggcagattattacgatgatggagcagggcgtgaaaacccggaaccgcatcattgccgctttgctggttttattgtttttctccatatcctatgcgttgtaccttgatttcaattgtatccaaatgggcttctggaggggatagtatgagagccgcactatatatccgcgtctcgacggaagaacaggcgcggcacggcctgtca

SEQ ID NO: 22431 - DNA, 260 bp, Unknown
  Description of Unknown: LeftRegion for integrase B9432 sequence
atttccgaacacttgacaccgaccgaggaaactttgcaggcgcggaatgacgagctggaacgccatgttgacgcgaaagcggacatgatcgagatcatgcggcgcggcgtgcgtatccgcaacggcgtgattgctataatgtttgtcattatcgttctgctgtctgcatggtgcttgtatattgattggagggggatttgatgagagcggcgctatatatccgagtgtccagcgaggaacaggcgcggcatggtctatca

SEQ ID NO: 22432 - DNA, 120 bp, Unknown
  Description of Unknown: LeftRegion for integrase B9433 sequence
tgtgtggtgcgtgtacattgattttcattgcatagattacggattttggagggggattcgatgagagcggcattgtatatccgcgtctcgagcgaggagcaggcgcggcatggcttgtct

SEQ ID NO: 22433 - DNA, 260 bp, Unknown
  Description of Unknown: LeftRegion for integrase B9434 sequence
gagaaaaccttgcaagcgcggaatgatgagctggaacgccatgttgacgcaaaggccgataccattgagatcatgcggcgcggtgtgcgtatccgcaatggcgtgattgctataatgtttgtcatcattgctatgcttgctgtgtggtgcgcgtacattgattttcactgcatagattacggattttggagggggattcgatgagagcggcattgtatatccgcgtgtccagcgaggaacaggcgcggcatggcctgtcc

SEQ ID NO: 22434 - DNA, 260 bp, Unknown
  Description of Unknown: LeftRegion for integrase B9435 sequence
gaggaaactttgcaagcgcgcaacgatgagctggaacgccatgttgacgcaaaggccgataccattgagatcatgcggcgcggtgtccatatccgcaacggcgcgattgctgtaatgtttgttatcatcgctcttctcgctgcgtggtgcgtgtacattgattttcattgtgtagattacggattttggagggggctctgatgagagcggcattgtatatccgcgtctcgagcgaggagcaggcgcggcacggcttgtcc

SEQ ID NO: 22435 - DNA, 260 bp, Unknown; identical to SEQ ID NO: 22374
  Description of Unknown: LeftRegion for integrase B9436 sequence

SEQ ID NO: 22436 - DNA, 260 bp, Unknown; identical to SEQ ID NO: 22412
  Description of Unknown: LeftRegion for integrase B9437 sequence

SEQ ID NO: 22437 - DNA, 260 bp, Unknown
  Description of Unknown: LeftRegion for integrase B9438 sequence
gaagagaccttgcaggcgcgaaatgacgagctggagcgccatgttgacgcaaaggaagacatgatcgagattatgcggcgtggtgtccatatccgcaacgccgtgatttttattttatttgtggtggtggtgttactgaccgcgtggtgcgtgtatgtcgatttgcattgcgcagattacggattttggagggggcggtgatgagagcagcactgtatatccgcgtgtcgagcgaagaacaggcacgtcacggcctgtca

SEQ ID NO: 22438 - DNA, 260 bp, Unknown; identical to SEQ ID NO: 22409
  Description of Unknown: LeftRegion for integrase B9439 sequence

SEQ ID NO: 22439 - DNA, 260 bp, Unknown
  Description of Unknown: LeftRegion for integrase B9440 sequence
gaggaaactttgcaagcgcggaatgatgagctggaacgccatgttgacgcgaaagcggataccattgagatcatgcggcgcggcgtgcgtatccgaaacggcgtgattgctataatgttcctcatcatcgtttttctcgctgtgtggtgcgtgtacattgattttcattgtatagattacggattttggagggggattcgatgagagtggcattgtatatccgcgtcacgagcgaggagcaggcgcggcatgggctgtcc

SEQ ID NO: 22440 - DNA, 260 bp, Unknown
  Description of Unknown: LeftRegion for integrase B9441 sequence
gaggaaaccttgcaagcgcggaatgatgagctggaacgccatgttgacgcaaaggccgataccattgagatcatgcggcgcggtgtccatatccgcaacggcgtgattgctataatgttcctcatcatcgtttttctcgctgtgtggtgcgtgtacattgattttcattgtatagattacggattttggatggggatttgatgcgagcggcgctatatatccgcgtgtctagcgaggaacaggcgcggcatgggctgtcc

SEQ ID NO: 22441 - DNA, 260 bp, Unknown; identical to SEQ ID NO: 22348
  Description of Unknown: LeftRegion for integrase B9442 sequence

SEQ ID NO: 22442 - DNA, 260 bp, Unknown; identical to SEQ ID NO: 22401
  Description of Unknown: LeftRegion for integrase B9443 sequence

SEQ ID NO: 22443 - DNA, 260 bp, Unknown
  Description of Unknown: LeftRegion for integrase B9444 sequence
atttccgaacacttgacgccgaccgaggaaaccttgcaggcgcgaaacgatgagctggaacgccacgtcgacgcaaaggctgacacgatcgagattatgcggcgcggtgtccgtatccgaaacggcgtaattgctataatgtttgtcattatcgttctactggctgcatggtgcttgtagattgattggagggggatttgatgagagcggcattgtatatacgcgtgtccagcgaggaacaagcgcggcatggtctatca

SEQ ID NO: 22444 - DNA, 260 bp, Unknown
  Description of Unknown: LeftRegion for integrase B9445 sequence
gaagagaccttgcaggcgcgaaatgacgagctggagcgccatgttgacgcaaaggaagacatgatcgagatcatgcggcgtggcgtccatatccgcaacgccgtgatttttattttatttgtggtggtggtgttactgaccgcgtggtgcgtgtatgtcgatttgcattgcgcagattacggattttggagggggctgtgatgagagcagcactgtatatccgcgtttcgagcgaagagcaggcgcggcatggcctgtca

SEQ ID NO: 22445 - DNA, 260 bp, Unknown
  Description of Unknown: LeftRegion for integrase B9446 sequence
aaaagatgggctggaacaccgccttgaaaataagcggaagaccatcggcctgatggaggcggaactgaataacctacgtcattccgtaaaactatacaggtggatcatgctcggtttgtcgctattgatcgtcggtctctccgtctggtgcgtgtgggtagatattcgctgcgccaattacggattttggaggggatagtatgagagccgcactatatatccgcgtctcgacggaagaacaggcgcggcacggcctgtca

SEQ ID NO: 22446 - DNA, 260 bp, Unknown
  Description of Unknown: LeftRegion for integrase B9447 sequence
atttttatgctgctcggcgtttgcgccctgctgctcgtttcagtcattagctatgtcatcttcgacatacagctcacgaccgccgggcttttccaatcggcaaaaacaagcacgcttgccgttttcctcggccttgtcgttctcgccgccgtcggctccatcggatacgccgttcatacgattcacaaagggaggaagaaatgagagttgcgctttacatccgcgtgtcaaccgaagaacaagccgttcacggcctttcc

SEQ ID NO: 22447 - DNA, 260 bp, Unknown; identical to SEQ ID NO: 22421
  Description of Unknown: LeftRegion for integrase B9448 sequence

SEQ ID NO: 22448 - DNA, 260 bp, Unknown
  Description of Unknown: LeftRegion for integrase B9449 sequence
gaggaaaccttgcaagcgcggaatgatgagctggaacgccatgttgacgcaaaggccgataccattgagatcatgcggcgcggcgtgcgtattcgaaacggcgtaattgctataatgttcctcatcatcgtttttctcgctgtgtggtgcgtgtacattgattttcattgtatagattacggattttggagggggattcgatgagagcggcgctatatatccgcgtgtccagcgaggaacaggcgcggcatggtctatca

SEQ ID NO: 22449 - DNA, 260 bp, Unknown; identical to SEQ ID NO: 22421
  Description of Unknown: LeftRegion for integrase B9450 sequence

SEQ ID NO: 22450 - DNA, 260 bp, Unknown; identical to SEQ ID NO: 22374
  Description of Unknown: LeftRegion for integrase B9451 sequence

SEQ ID NO: 22451 - DNA, 260 bp, Unknown; identical to SEQ ID NO: 22350
  Description of Unknown: LeftRegion for integrase B9452 sequence

SEQ ID NO: 22452 - DNA, 260 bp, Unknown
  Description of Unknown: LeftRegion for integrase B9453 sequence
atttttatgctgctcggtgtttgcgctcttctgctagtttcagtcattagctatatcgtcttcgacatacagatcacgaccgccgggcttttccggtcagcaaaaacaagcacgcttgcggtgttcctaggccttgtcgttctcgccgccgtcggctccatcgggtacgccgttcacacgatcaacgtagggaggaagaaatgagagttgcgctttacatccgcgtttcgacggaagaacaagccgttcatggcctttcc

SEQ ID NO: 22453 - DNA, 260 bp, Unknown; identical to SEQ ID NO: 22445
  Description of Unknown: LeftRegion for integrase B9454 sequence

SEQ ID NO: 22454 - DNA, 260 bp, Unknown
  Description of Unknown: LeftRegion for integrase B9455 sequence
gagaaaaccttgcaagcgcggaatgatgagctggaacgccatgttgacgcgaaagccgataccattgagatcatgcggcgcggtgtgcgtatccgcaacggcgtgattgctatattgttcctcatcaccgtttttctcgctgcgtggtgcgtgtacatcgatttccattgcatagattacggattttggaggggggttcgatgagagcggcattgtatatccgcgtctcgagcgaggagcaggcgcggcatggtctatca

SEQ ID NO: 22455 - DNA, 260 bp, Unknown
  Description of Unknown: LeftRegion for integrase B9456 sequence
gaggaaactttgcaagcgcgaaatgatgagctggaacgccatgttgacgcaaaggccgataccattgagatcatgcggcgcggcgtgcgtatccgaaacggcgtgattgctataatgttcctcatcatcgtttttctcgctgtgtggtgcgtgtacattgattttcattgcatagattacggattttggaggggggttcgatgagagcggcattgtatatccgcgtctcgagcgaggagcaggcgcggcatgggctgtcc

SEQ ID NO: 22456 - DNA, 260 bp, Unknown; identical to SEQ ID NO: 22364
  Description of Unknown: LeftRegion for integrase B9457 sequence

SEQ ID NO: 22457 - DNA, 260 bp, Unknown
  Description of Unknown: LeftRegion for integrase B9458 sequence
atttccgaacacttgacgccgaccgaggaaaccttgcaggcgcggaatgatgagctggaacgccatgttgacgcaaaggccgataccattgagatcatgcggcgcggcgtgcatatccgaaacggcgtgattgctataatgtttgtcattatcgttctgctggctgcatggtgcttgtacgttgattggagggggatttgatgcgagcggcattgtatatccgcgtgtccagcgaggagcaggcgcggcatggtctatca

SEQ ID NO: 22458 - DNA, 260 bp, Unknown; identical to SEQ ID NO: 22348
  Description of Unknown: LeftRegion for integrase B9459 sequence

SEQ ID NO: 22459 - DNA, 260 bp, Unknown; identical to SEQ ID NO: 22420
  Description of Unknown: LeftRegion for integrase B9460 sequence

SEQ ID NO: 22460 - DNA, 260 bp, Unknown
  Description of Unknown: LeftRegion for integrase B9461 sequence
gagaaaaccttgcaagcgcggaatgatgagctggaacgccatgttgacgcgaaagccgataccattgagatcatgcggcgcggtgtgcgtatccgcaacggcgtgatcgctataatgttcctcatcatcgtttttctcgctgtgtggtgcgtgtacattgattttcattgcatagattacggattttggagggggattcgatgagagcggcattgtatatgcgcgtcacgagcgaggagcaggcgcggcatgggctatca

SEQ ID NO: 22461 - DNA, 260 bp, Unknown; identical to SEQ ID NO: 22411
  Description of Unknown: LeftRegion for integrase B9462 sequence

SEQ ID NO: 22462 - DNA, 260 bp, Unknown; identical to SEQ ID NO: 22350
  Description of Unknown: LeftRegion for integrase B9463 sequence

SEQ ID NO: 22463 - DNA, 260 bp, Unknown
  Description of Unknown: LeftRegion for integrase B9464 sequence
atttccgaacacttgacgccgaccgaggaaactttgcaagtgcgaaatgatgagctggaacgccatgttgacgcaaaggccgataccattgagatcatgcggcgcggcgtgcatatccgaaacggcgtgattgctataatgtttgtcattatcgttctgctggctgcatggtgcttgtacgttgattggagagggatttgatgcgagcggcattgtatatccgcgtgtccagcgaggagcaggcgcggcatggcctgtca

SEQ ID NO: 22464 - DNA, 260 bp, Unknown; identical to SEQ ID NO: 22401
  Description of Unknown: LeftRegion for integrase B9465 sequence

SEQ ID NO: 22465 - DNA, 260 bp, Unknown; identical to SEQ ID NO: 22421
  Description of Unknown: LeftRegion for integrase B9466 sequence

SEQ ID NO: 22466 - DNA, 260 bp, Unknown
  Description of Unknown: LeftRegion for integrase B9467 sequence
tcgttcgggatttccgaacacctgacgccgaccgaggaaactttgcaagcgcggaatgatgagctggaacgccatgttgacgcaaaggccgataccattgagatcatgcggcgcggtgtccatatccgcaacggcgcgattgctgtaatgtttgttatcatcgtttttctcgctgcgtggtgcttttggagggggatttgatgagagcggcgctatatatccgcgtgtccagcgaggaacaggcgcggcatggtctatca

SEQ ID NO: 22467 - DNA, 260 bp, Unknown; identical to SEQ ID NO: 22369
  Description of Unknown: LeftRegion for integrase B9468 sequence

SEQ ID NO: 22468 - DNA, 260 bp, Unknown; identical to SEQ ID NO: 22420
  Description of Unknown: LeftRegion for integrase B9469 sequence

SEQ ID NO: 22469 - DNA, 260 bp, Unknown; identical to SEQ ID NO: 22348
  Description of Unknown: LeftRegion for integrase B9470 sequence

SEQ ID NO: 22470 - DNA, 260 bp, Unknown; identical to SEQ ID NO: 22421
  Description of Unknown: LeftRegion for integrase B9471 sequence

SEQ ID NO: 22471 - DNA, 260 bp, Unknown; identical to SEQ ID NO: 22374
  Description of Unknown: LeftRegion for integrase B9472 sequence

SEQ ID NO: 22472 - DNA, 260 bp, Unknown; identical to SEQ ID NO: 22466
  Description of Unknown: LeftRegion for integrase B9473 sequence

SEQ ID NO: 22473 - DNA, 260 bp, Unknown
  Description of Unknown: LeftRegion for integrase B9474 sequence
gaggaaaccttgcaagcgcgcaacgacgaactggaacgccacgtggacgcaaaagcagacacgatcgagatcatgcggcgcggcgtccgtatccgaaacggcgtggttgctataatgttcctcatcatcgtttttctcactgtgtggtgcgtgtacattgattttcattgtatagattacggattttggagggggatttgatgagagcggcattgtatatgcgcgtcacgagcgaggagcaggctcggcatgggctatca

SEQ ID NO: 22474 - DNA, 260 bp, Unknown; identical to SEQ ID NO: 22421
  Description of Unknown: LeftRegion for integrase B9475 sequence

SEQ ID NO: 22475 - DNA, 260 bp, Unknown
  Description of Unknown: LeftRegion for integrase B9476 sequence
ttcttttgtacttttattctttttcttttgtacttatgtacctcttttgtatttttgtatatctctttggtacgtttatatcttatcattccgcgtcgatttacgcaatcaattttcctcgcatttttcgacatatcttgacattttcccttgcatcacttatgatgcagttaagaccaccaagaaaggagtgtatgtatatgaaaaaagttggtctatatgtgcgtgtatccacgcaggagcagaaattgcacggtatc

SEQ ID NO: 22476 - DNA, 260 bp, Unknown
  Description of Unknown: LeftRegion for integrase B9477 sequence
ttttgtacttttattcttttttcttttgtacttatgtacctcttttgtatttttttgtatatctctttggtacgtttatatcttatcattccgcgtcgatttgcgcaatcaatttccctcgcatttttcgacatatcttgacatttccccttgcatcacttatgatgcagttaagaccaccaagaaaggagtgtatgtatatgaaaaaagttggtctatatgtgcgtgtatccacgcaggagcagaaattgcacggtatc

SEQ ID NO: 22477 - DNA, 260 bp, Unknown
  Description of Unknown: LeftRegion for integrase B9478 sequence
tcttttgtacttttattctttttcttttgtacttatgtacctcttttgtatttttgtatatctctttggtacgtttatatcttatcattccgcgtcgatttgcgcaatcaagttccctcgcatttttcgacatatcttgacattttcctttgcatcacttatgatgcaattgaagccataaaagaaaggagtacgtgcttatgaaaaaagttggtttgtatgttcgtgtgtctacacaggaacaaaaactgcatggcatc

SEQ ID NO: 22478 - DNA, 260 bp, Unknown
  Description of Unknown: LeftRegion for integrase B9479 sequence
tcttttgtacttttattctttttcttttgtacttatgtacctcttttgtatttttgtatatctctttggtacgtttatgtcttatcattccgcgtcgatttgcgcaatcaagttccctcgcatttttcgacatatcttgacattttcctttgcatcacttatgatgcaattgaagccataaaagaaaggagtacatgcttatgaaaaaagttggtttgtatgttcgtgtgtctacacaggaacaaaaactgcatggcatc

SEQ ID NO: 22479 - DNA, 260 bp, Unknown
  Description of Unknown: LeftRegion for integrase B9480 sequence
actatatctcctatctaaattcattaaatttctttaaaaagatgctattttgcaaggtaattgacgagaaagagtatgaaaaagcagaggatttgcttgctaaaaaatactgtatcaataaagggaatttatatcgtcaaaatgagttgataaataagtcctttagagcgatatatggtgatgaaaaataggaggtaattatggacaaaaagataactgtaattgatgcccttcctaagttagaaaagaagctaagagta

SEQ ID NO: 22480 - DNA, 260 bp, Unknown; identical to SEQ ID NO: 22224
  Description of Unknown: LeftRegion for integrase B9481 sequence

SEQ ID NO: 22481 - DNA, 260 bp, Unknown
  Description of Unknown: LeftRegion for integrase B9482 sequence
atttatatgcttatcggcgtatgcagtattcttttatgtgccgttgtatggtacgtcatatttgacatccaggtagagaccgccggtattttccgctcggctgggacaagcatttttgcgggcgtcctcgccctgatactgaacgcctccgtcgcaaccatcatttacgccttcaaaagcattcacaaggggagaaagaaatgagaattgcactttatgtccgcgtctccacggaagaacaagccgttcacggcctttcc

SEQ ID NO: 22482 - DNA, 260 bp, Unknown
  Description of Unknown: LeftRegion for integrase B9483 sequence
acaagatcatgcagtacaaggcagcggtgcaaattttgaaaacgcttcttgctgaacgaaaaataacagaagaagattatcggcgtgtgcatgacatcttagccaaggaatgcggcataaactcgtgcagtatattccttgactcttgtccgatcatacggtaatatgtcatcggaaagggggaggttatcacggcacgagtgatacaaaaagttgtatttccgcagaaaaagcagtttccattgaaacggacggcagcc

SEQ ID NO: 22483 - DNA, 260 bp, Unknown
  Description of Unknown: LeftRegion for integrase B9484 sequence
cgacgcactgagatacaaagaactcattatgaagctcgcaaaaacaaagcgagtgatcacgcgcaaagatgtggtagaactccttcatgtttccgggccgcaggcgtatcgtcttttgaaaaaactggaaggcgagggcagtctgcgctgtgaaggaacaaccaggaacgcacaatatcatatcgtctagggagaaaactatgaacgcagttatttatgcacgatactcctctgataaccagcgtgaagaatccattgag

SEQ ID NO: 22484 - DNA, 260 bp, Unknown
  Description of Unknown: LeftRegion for integrase B9485 sequence
atttatatgctcataggcgtatgcagtattcttttgtgcgccgttgtatggtacatcatatttgacatccagatagagaccgccggtattttccgctcggctgggacaagcatttttgcgggcgtcctcgccctgatactgaacgcctccgtcgcaaccatcatttacgccttcaaaagcatttacaaggggaaaaagaaatgagagttgcactttatgtccgcgtctccacggaagaacaagccgttcacggcctttcc

SEQ ID NO: 22485 - DNA, 260 bp, Unknown
  Description of Unknown: LeftRegion for integrase B9486 sequence
atttatatgcttataggcgtatgcagtattcttttgtgcgccgttgtatggtacgtcatatttgacatccaggtagagaccgccggtattttccgctcggctgggacaagcatttttgcgggcgtcctcgccctgatactgaacgcctccgtcgcaaccatcatttacgccttcaaaagcattcacaaggagaaaaagaaatgagagttgcactttatgtccgcgtctccacggaagaacaagccgttcacggcctttcc

SEQ ID NO: 22486 - DNA, 260 bp, Unknown; identical to SEQ ID NO: 22482
  Description of Unknown: LeftRegion for integrase B9487 sequence

SEQ ID NO: 22487 - DNA, 260 bp, Unknown
  Description of Unknown: LeftRegion for integrase B9488 sequence
atttatatgctcataggcgtatgcagtattcttttgtgcgccgttgtatggtacgtcatatttgacatccaggtagagaccgccggtattttccgctcggctgggacaagcatttttgcgggcgtcctcgccctgatactgaacgcctccgtcgcaaccatcatttacgccttcaaaagcattcaaaaggggaaaaagaaatgagagttgcactttatgtccgcgtctccacggaagaacaagccgttcacggcctttcc

SEQ ID NO: 22488 - DNA, 260 bp, Unknown
  Description of Unknown: LeftRegion for integrase B9489 sequence
atttttatgctcctcggtgtttgcgctcttctgctcgtttcagtcattagctatatcgtcttcgacatacagatcatgaccgccgggcttttccggtcagcaaaaacaagcacgcttgcggtgttcctgggccttgtcgttctcgctgccatcggcgccatcgggtacgccgttcatacgatccacaaagggagaaagaaatgagagttgcactttacatccgcgtttcgacggaagaacaagccgttcacggcctttcc

SEQ ID NO: 22489 - DNA, 260 bp, Unknown
  Description of Unknown: LeftRegion for integrase B9490 sequence
atttatatgctcataggcgtatgcagtattcttttgtgcgccgttgtatggtacgtcatatttgacattcaggtagagaccgccggtattttccgctcggctgggacaagcatttttgcgggtgtcctcgccctgatactgaacgcctccgtcgcaaccatcatttacgccttcaaaagcattcacaaggggaaaaagaaatgagagttgcactttatgtccgcgtctccacggaagaacaagccgttcacggcctttcc

SEQ ID NO: 22490 - DNA, 260 bp, Unknown
  Description of Unknown: LeftRegion for integrase B9491 sequence
atttatatgctcatcggcgtatgcagtattcttttatgtgccgttgtatggtacgtcatttttgacattcaggtagagagcgccgggattttccgctcggcggggacaagcgtttttgcgggcgtcctcgccctgatactgaacgcctccgtcgcaaccatcatttacgccttcaaaagcatttacaaggggaaaaagaaatgagagttgcactttacatccgtgtttcgacggaagaacaagccgttcacggtctttcc

SEQ ID NO: 22491 - DNA, 260 bp, Unknown
  Description of Unknown: LeftRegion for integrase B9492 sequence
atttatatgctcataggcgtatgcagtattcttttgtgcgccgttgtatggtacgtcatatttgacatccaggtagagaccgccggtattttccgctcggctgggacaagcatttttgcgggtgtcctcgccctgatactgaacgcctccgtcgcaaccatcatttacgccttcaaaagcattcacaaggggaaaaagaaatgagagttgcactttatgtccgcgtctccacggaagaacaagccgttcacggcctttcc

SEQ ID NO: 22492 - DNA, 260 bp, Unknown
  Description of Unknown: LeftRegion for integrase B9493 sequence
atttatatgctcataggcgtatgcagtattcttttgtgcgccgttgtatggtacgtcatatttgacatccaggtagagaccgccggtattttccgctcggctgggacaagcatttttgcgggcgtcctcgccctgatactgaacgcctccgtcacaattatcatttacgccttcaaaagcatttacaaggggaaaaagaaatgagagttgcactttatgtccgcgtctccacggaagaacaagccgttcacggcctttcc

SEQ ID NO: 22493 - DNA, 260 bp, Unknown
  Description of Unknown: LeftRegion for integrase B9494 sequence
atttatatgctcataggcgtatgcagtatccttttgtgcgcagttgtatggtacgtcatatttgacatccaggtagagaccgccggtattttccgttcggctgggacaagcatttttgcgggcgtcctcgccctgatactgaacgcctccgtcgcaaccatcatttacgccttcaaaagcatttacaaggggaaaaagaaatgagagttgcactttatgtccgcgtctccacggaagaacaagccgttcacggcctttcc

SEQ ID NO: 22494 - DNA, 260 bp, Unknown; identical to SEQ ID NO: 22482
  Description of Unknown: LeftRegion for integrase B9495 sequence

SEQ ID NO: 22495 - DNA, 260 bp, Unknown
  Description of Unknown: LeftRegion for integrase B9496 sequence
atttatatgctcataggcgtatgcagtattcttttgtgcgctgttgtatggtacgtcatatttgacatccaagtagagaccgccggtattttccgctcggctgggacaagcatttttgcgggcgtcctcgccctgatactgaacgcctccgtcacaaccatcatttacgccttcaaaagcattcacaaggggaaaaagaaatgagagttgcactttatgtccgcgtctccacggaagaacaagccgttcacggcctttcc

SEQ ID NO: 22496 - DNA, 260 bp, Unknown; identical to SEQ ID NO: 22316
  Description of Unknown: LeftRegion for integrase B9497 sequence

SEQ ID NO: 22497 - DNA, 260 bp, Unknown
  Description of Unknown: LeftRegion for integrase B9498 sequence
gattgcggagaaaaagccgaagcctcttctgcacggaacgcggctggtgcgaatatggaagggaaaaaagtatgaggtgactctctgcgacgagggtaaatttgaatacaacggcatcttcttcaaatcgctctcggcggtggcaaaagcaatcacgggaacgcactggaacgggaaaaccttcttcggagtgaaataatatggataaagaaaacaaggcagtacgttgcgcaatctatacgcggaagagccacgaggag

SEQ ID NO: 22498 - DNA, 260 bp, Unknown
  Description of Unknown: LeftRegion for integrase B9499 sequence
ataagatcattacgtatcaaaccactgtttcgattttgaaaagctggatgcgtgctggattggtcacgccggaggaattccaaaaaatcaacaccataatcgccgaacgttccggtttatctttgtgcagtatattccttgactcctgcccgatcgtacggtaatatgtcatcggaaagggggagattatcacggcacgagtgatacaaaaagttgcgtttccacagaaaaagccgttcctgttgaaacggacggcagcc

SEQ ID NO: 22499 - DNA, 260 bp, Unknown; identical to SEQ ID NO: 16310
  Description of Unknown: LeftRegion for integrase B9500 sequence

SEQ ID NO: 22500 - DNA, 260 bp, Unknown
  Description of Unknown: LeftRegion for integrase B9501 sequence
gtctgtttgcctaccagatggcgatggcactcgcccggagtatgcgttccaaggggctgatctcagccaaagagtacgctaaaattgatacgatcatcgccaataaatatggcatatcttcgtgtagtatattccgctgaaatcgctggataactggggcattcagaggtaatatgtaacacacctaaggaggtgaaccgatggatagaattataaaacgggtcgatttcccgaaaatcatgcagccgcagtttttgaaa

SEQ ID NO: 22501 - DNA, 260 bp, Unknown
  Description of Unknown: LeftRegion for integrase B9502 sequence
agtatctgagatgcaggatacgccgccctgctaacatccaaatagttaggcagacaacctcggttgtctgcttttttgttgcatactatagaacacgcaaaattggcatgcaaaaacagcggattttaagtcgatgacgttttgccggtgtcggcaaaatgttggcttagccccatgctgtggtcacggaaaggacgtttatgaggatagctttatacgctcgtgtgagcaccgaagagcaggcgattcatgggctttcg

SEQ ID NO: 22502 - DNA, 260 bp, Unknown
  Description of Unknown: LeftRegion for integrase B9503 sequence
ctgcgcaatgctggatcacctcggccgagcgggggaactggacgcccaaacccgtgaacgggcaaatgccgttctcgccatgaagaccggcctgaaacgggacagcattttcctttaaattcgtcatgatatggacttgctatatcctccgaaacgagcaatatatgtagctgacgatacttgatacaaaggagaagaccatgccgagaaccgtagaacaaatccaatttactccccacatgccgaaagcccttcgggtg

SEQ ID NO: 22503 - DNA, 260 bp, Unknown
  Description of Unknown: LeftRegion for integrase B9504 sequence
gcagcaaagaagattgatgtggtgattaccatgagggctgccacgattgcccgtaactggggacagtttatggagttcatgctgatttgcagtaagagaaatgtggaagtgttgtgcattgacaaggtagaggatgcacaggccattttccaaaggattcaggagtttaagaaaaggttttttgaaggaagtgatgtaacgtgcgagtaaaagtgattaacaaacgaccagcttcggttttacaaaagaaaagggtttat

SEQ ID NO: 22504 - DNA, 260 bp, Unknown
  Description of Unknown: LeftRegion for integrase B9505 sequence
acttactaggtcttagtgaagtcagaaaaccagaagtcttagttttgtcagaaaaagagaaaatcctcattgacgcataccgtactgctaatgacatgggacaattaaacataatctatgtctgcatggatgaaatgaaaaaagcaaaaggggaaggcgtacttgtagggtaattgatttcatagaatggaggaagaaccatgtatgaggatataaaaacagcctgcctatacgttagattctcaagccataaccagact

SEQ ID NO: 22505 - DNA, 260 bp, Unknown
  Description of Unknown: LeftRegion for integrase B9506 sequence
aaaagtcaaagaatacaataccgccctcgccgtcatcagagaaatgcgctccaccgggattatcaccgatgaagatttcggcataatatgcacagttctggctgagaaatacggtctaagttcgtgcagtatatttgccggaatcgacttgataaccgcccggactgacggtaatatctgaccgataggaggtattatctatggatagaatcatagaaaaaatgcggtttgacgtgccgacgcagcccaaggcaaaacgg

SEQ ID NO: 22506 - DNA, 260 bp, Unknown
  Description of Unknown: LeftRegion for integrase B9507 sequence
ggtcacaatctacttttctaaaaacagaaataaccatgttgaaaggaatattctcgaaaaccttttggatacatttgagaacagaatgaacgcacagattggatgctgaatttctttaagttcattttcagatttcgctggatattatagaaattatgtagtattgttggtttgcaaaaatcgtatgaaagggtgatgaaatgaaaagagtatattgcttgtacagagtatcaaccaaaggtcaggttgataaagatgat

SEQ ID NO: 22507 - DNA, 260 bp, Unknown
  Description of Unknown: LeftRegion for integrase B9508 sequence
acttctccattcaaagttatgattcgcaaggccgtggcgatcttttggtaaatacgacggacaaatacgacggcaaagtaatcttaaatgatccgatcatttttcaggtctcagccgtcggcgattggagtataactctgaactaatcttaatttaagagccccaccgcaaggggctcttgtcaaacgcaggagggctatatgagagcagcgttatatgagagagtatcgacggatgagcagcggattcacggcctgtcg

SEQ ID NO: 22508 - DNA, 260 bp, Unknown
  Description of Unknown: LeftRegion for integrase B9509 sequence
tttgttcggtggttgcattgtagcaggaggcagaacggctgtcaactatcaaaattggtaaaaagcggtttcagtacatatacatgtaccgatttttgcaaagttgcacaaatcgaatttttgatttcttaatttgcacccctgttacgaaattttgtagccatgttgccaaacttcgtaaaaggagaacggagaaaaacatgaaagcagcgttatatatcagagtaagcacagaggagcaggccatacacggcctgtcc

SEQ ID NO: 22509 - DNA, 260 bp, Unknown
  Description of Unknown: LeftRegion for integrase B9510 sequence
atgccgtcgagcagctccgcaagctgggtgaattgcgggatagtggtatcctgagtgatgaggagtttgcggcgaagaagtccgtattgctcgacaagataaaataaaaaatcccccggctgttggcgcagcgcaagggggatcagaggtgggtgcttctccgcctccgattctatcatatatggaggatattgtaaatcatgcgagccgcattatatgagcgcgtttccaccgaggagcagaaaatgcacggcttatcg

SEQ ID NO: 22510 - DNA, 260 bp, Unknown
  Description of Unknown: LeftRegion for integrase B9511 sequence
attttggtgtgacattattaaaatgcaaatagaaatagctttgaggccttggtggtttatgctgccagggccttgatttttttcttttgttgtgttcgcgcagacaaaaaataaatggccttgaaaccgttaatttactttactttctgggcgttcagagtgatatatagactacaaaaatttgaaaggagtgagcttttatgcgacttagaaagattgagccgattgaagcaaagactaagaagataagagtatgcgct

SEQ ID NO: 22511 - DNA, 260 bp, Unknown
  Description of Unknown: LeftRegion for integrase B9512 sequence
tgattacggtgcggttcagaagcgagtaaacgaaatgttattataagtttgggcctgggaggagtaatccttccgggttctttttttgtattttaccagttcggtcataccgataattatacccttgaaaccgctaaattgcttgacttatagcggaacaagagcgttaataggactaccaaaaaggaaggagaattcgcatgaaacttagaaaaatagaacctttaaaacctaagcaaaaaaagcttagagtatgtgct

SEQ ID NO: 22512 - DNA, 260 bp, Unknown
  Description of Unknown: LeftRegion for integrase B9513 sequence
gtacggaaggacgtgattagggacatgaaagtagcactttatgtccgtgtcaggtatcgacactagaacaagcagaagaaggttactcaattaatgaacaaaaagataagcttaaaaagtattgcgaaatcaaggattggacgattgttaaagagtacgtagatcctggtcgctctggatcaaacatcaatcgtcccagcatgcaacagcttatcaaagatgcagatacaggattatacgatgctgtgcttgtctataag

SEQ ID NO: 22513 - DNA, 260 bp, Unknown
  Description of Unknown: LeftRegion for integrase B9514 sequence
tgattacggtgcggttcagaagcgagtaaacgaaatgttatcataagtttgggcctgggaggagtaatccttccgggttctttttttgtattttaccagttcggtcataccgataattatacccttgaaaccgctaaattgcttgacttatagcggaacaagagcgttaataggactaccaaaaaggaaggagaattcgcatgaaacttaggaaaatagaacctttaaaacctaagcaaaaaaagctaagagtatgtgct

SEQ ID NO: 22514 - DNA, 137 bp, Unknown
  Description of Unknown: LeftRegion for integrase B9515 sequence
tcgtgggctcggagatgtgtataagagacagggaataaacaataaaagcagtcggatatgcacgattttcttcttcaatgcaacgagaagaatctataacagctcaaaaaagatatatgatgatgtatgctaaaaga

SEQ ID NO: 22515 - DNA, 260 bp, Unknown
  Description of Unknown: LeftRegion for integrase B9516 sequence
gttacttacgggcctttcttttacagagccaatggtagttgaggaggtgtttgagaatggcgagaagcattacggttataccagcaaagcagcctacgataatggagaacgggcagcagatagaattgaagaagaacgtagcagcgtattgccgcgtatcaacagatcaagaagaacagttatcgagttatgagaatcaggtgcgatattacactgaggtgataaccagaaatgcggagtatgaactggttgatatttac

SEQ ID NO: 22516 - DNA, 260 bp, Unknown
  Description of Unknown: LeftRegion for integrase B9517 sequence
attcactgatattgtcctgttattaacaggtatgttctcatagttgattcggatgttctaggaatcatcctcatagttgattcggatgttctaggaatcatcctcatagttgatttagaccttgatgatttttattagacacgtttaaatacactacctaaagcgatacaatctaggtatcagttttgaggtggtaaacaatgaaacgtgtcatttcatacattcgtttctcatcagagaagcaagctaaaggcgactca

SEQ ID NO: 22517 - DNA, 260 bp, Unknown
  Description of Unknown: LeftRegion for integrase B9518 sequence
cattatttgatttgcatataatctctacaatacaatatagatgaggtatatataccatcaacatcatagaggagaattatcagaataaaatactaagagctggtttatttgagcgtgtatcaacagaagaacaatcgaaatttggttatagtattgccacacaagtagaagcacttgaagaacatgcggcaaagaatagaatgaagatagtagaccattattgtgacgctggtgttagcggaggtatagcatacaagaaa

SEQ ID NO: 22518 - DNA, 260 bp, Unknown
  Description of Unknown: LeftRegion for integrase B9519 sequence
cactaccagtttgtcatgtcatgggttcgctccctattagccaagtcccttataacaaaggcagagtacgccaaaattgatataatgatggcacagaaatacggcgtatcttcgtgcagcatatatcgctgaaatctgcgtaaaatcgttgactaatctccgaatagacggtaacatggtaagcgaaggaggtgtgctgtgtggagaaaaaagaacgaatcgtagagagggttcaattccccaatgcacagaaagtaaag

SEQ ID NO: 22519 - DNA, 260 bp, Unknown
  Description of Unknown: LeftRegion for integrase B9520 sequence
ttgtggccaatatatatttgcattatataactatgaggattactccaagaatacattttaaaataaaaaactcccccggctgctccaacagccgagggaaaattgaatacaattacacctgaagcataaccgcatcaaccgcatcttgattataccacgcttcaggttaactttgctatacctaaaggagcctgtttttaatgtccaagaattgtgttatatatgcccgctactcttctgatcgccaaagagatgaaagt

SEQ ID NO: 22520 - DNA, 260 bp, Unknown
  Description of Unknown: LeftRegion for integrase B9521 sequence
gaggtttacgatatctcccccgacgaagtcaaggagtcttatcttgaaggcgaagacctgaatgataacgccgtagttcttgatgatatcgcatgggcagaacggtatggcaagaactttgattggaaaatttttgctgtcgagcaaggcgctccggtgcaaacaccgacggtgcctttgtttaatacgctgagataataatgatgcggtggcggaataggtatacgcttacaaattacagttcggatgtcgcccagaaa

SEQ ID NO: 22521 - DNA, 260 bp, Unknown
  Description of Unknown: LeftRegion for integrase B9522 sequence
agaactcgccttcatcacggactctcacacgttgagcgtgctggcggggcggggcgtgctcacacccgcagagtatcagcgtgctcaccggttgttatggaaggcgtggacgccgatctatcaaccacagattgtgggcgaaacgactggataaacaccgcctttagagcgtgtatagacctaacgcgaaaggagaaaacgtggcacacatcagtgtggtgacaccagttcggccgccgaccccgaaactggtcaacgtg

SEQ ID NO: 22522 - DNA, 260 bp, Unknown
  Description of Unknown: LeftRegion for integrase B9523 sequence
agaactcgccttcatcacggactctcacacgttgagcgtgctggcggggcggggcgtgctcacgcccgcagagtatcagcgtgctcaccggttgttatggaaggcgtggacgccgatctatcaaccacagattgtgggcgaaacgactggataaacacttggtttagagcgtgtatagacctaacgcgaaaggagaaaacgtggcacacatcagtgtggtgacaccagttcggtcgcctgccccgaaactggtcaacgtg

SEQ ID NO: 22523 - DNA, 260 bp, Unknown
  Description of Unknown: LeftRegion for integrase B9524 sequence
cacaatgcaagctcaaagattgagccatcattaaaatttgatgttcagctcatttcgtttccatcaacgctgtttgctcaagttgaaccttgggattagggtttggtgttgcaataagctcgtcatcttattaggtggcgggctttttcaaattgaccaattatgtaattgattaaataagtaatttggaggtgattcgtttggcgagaaagaaatcaaagctcaacgacaacaacctcgccatcgcgtactaccgctac

SEQ ID NO: 22524 - DNA, 260 bp, Unknown
  Description of Unknown: LeftRegion for integrase B9525 sequence
cctttaaataaaggttgttttatggtactatgtgcaaaaatatgttagtatgtttttatgtgttaacaaacggtgcattgtgagtccatagtcctgttgcagcatgttggacagtgaaagaagttataaagaaaaaattttaggcgcaaggacgatgatgtctttgcgtctttttcttaattgacgagagatatgatttgatgaaaaaaatcagattggttttaccacctccaaaagaacagaaaaaactgagagtagca

SEQ ID NO: 22525 - DNA, 260 bp, Unknown
  Description of Unknown: LeftRegion for integrase B9526 sequence
ttcaaggctatggattactatgacacacatagcataaattaaaacagccgcttccaacatggtcgaaattgactggtttggaagcggctattttatcaattcgttgacttcacccaaacaaaggctatactgtagtcaaagaatacgtcgatgaagcgaaaagcggacgcagtaccttaacgcgtgacgcatacaatcagatgatggctgatgctatggagaacaaattcgacgttattattttccataaaatcgaccgc

SEQ ID NO: 22526 - DNA, 260 bp, Unknown
  Description of Unknown: LeftRegion for integrase B9527 sequence
aatgttaaaacttactttcaatttttgcacactttagtgtttacagtgaacacctatagattatataatcgtcttagcaaacgttgtggtaccaacgtttagcggggaaaggagtcgaaatttggatggcatttactgacaatttgcaggcgcttatgagcgcaaaagggatttcccgtcgaaaattggcgaaattatgaatggcatacgcaatgtacttgagaaaatctagaaaggacgatgacactggcatcgaggac

SEQ ID NO: 22527 - DNA, 260 bp, Unknown
  Description of Unknown: LeftRegion for integrase B9528 sequence
gtaatgattggcgaattagaaaatagtaattctggtaaagtgataaaagcaaaagaatttaagctaaacagaaaaggtaaaatgattttgtaggaggtagggaagatgaatgctgatacagtaaaaataataaaagttgaatcaaatgtatataacttaatcgaggaactatattacaaattgaaagagcaaaaattaaaatgaagaatgctattatatatgttagagtttctacagaagaacaggcaaaaaatgactta

SEQ ID NO: 22528 - DNA, 260 bp, Unknown
  Description of Unknown: LeftRegion for integrase B9529 sequence
tgcatctcgcccgactgcccatagaaatagtcaaacatcctgacttcctcgcttgttctgccttgtcacatccttgacacctccgttcgtagtatgatgaaatatgatgtatgactatcgttatttttctttataaagatggcctgccatgctacaatagccgcatctacggccaccggacaacaggaaaggagtatctcatggccagaaccgccgacaccattgccatctattcccgcaagtcccgctataccggcaag

SEQ ID NO: 22529 - DNA, 260 bp, Unknown; identical to SEQ ID NO: 14013
  Description of Unknown: LeftRegion for integrase B9530 sequence

SEQ ID NO: 22530 - DNA, 260 bp, Unknown
  Description of Unknown: LeftRegion for integrase B9531 sequence
taaggacaagtaaatcaccgatgttgaaataaggagctgaaaggcttcttattttttgctcccgataccgttaacctgagagatatataccatttaagttaacggttttcatattttcacgatataatagaattcgccggctccgagctgcggtgtgggcttatctgcccacataatctgcggcaggaggaggtgaacctatgaagataacgaagaaacaaccacttcgacctcgcggtcgcagcgaggataaaaggcag

SEQ ID NO: 22531 - DNA, 260 bp, Unknown
  Description of Unknown: LeftRegion for integrase B9532 sequence
taatgacaagtaaatcaccgatgttgaaataaggagctgaaaggcttcttattttttgctcccgataccgttaacctgagcgatttataccatttaagttaacggttttcatattttcacgatataatagaattcgccggctccgagctgcggtgtgggcttatctgcccacataatctgcggcaggaggaggtgaacctatgaagataacgaagaaacaaccacttcgacctcgcggtcgcagcgaggataaaaggcag

SEQ ID NO: 22532 - DNA, 260 bp, Unknown
  Description of Unknown: LeftRegion for integrase B9533 sequence
ataactttctacttttcactactattaaactgtattcagttttgttgcgttatttttgcaacctatttctcaaaatagtggcataaccgattgtattattatgttaactccgagcaaacaaaattcatccatatattataattatgatagaatagaagggtatgtctatcaaataatatgaataaagggagcgaagagacatggctattaagaagggtgacgatggctatcttattaatgacatgggtgaagtatggggc

SEQ ID NO: 22533 - DNA, 260 bp, Unknown; identical to SEQ ID NO: 21584
  Description of Unknown: LeftRegion for integrase B9534 sequence

SEQ ID NO: 22534 - DNA, 260 bp, Unknown
  Description of Unknown: LeftRegion for integrase B9535 sequence
gctgctgataagaaacttgatttctttttcattattccagtataaaagttttgcaattatagccaaatttgtattattaacataatatgttgtttctgcgacagttctttttaccacgatttcatacctattattttgcttattatactacaaaagaaatgtttgtttgcttcttctgaattttgtggtatcgttgacgcatgaaaaaagctgtattatatgcaagagtatcaagcaatagacaggaaaaagagggtttt

SEQ ID NO: 22535 - DNA, 260 bp, Unknown
  Description of Unknown: LeftRegion for integrase B9536 sequence
caaataatcaaaacatacgagaaataaaggtagggcgagcgatcgcccttcttttttgcccttgtagcgcaagatatggtggtaaaaccgcaccacatgttgatatacagcgatataataaagtagcgccgcctccgcatgcgtcagggtcgatgtcggcaatcgatcaaatctgtggcgcagaaggaggtgatgcattcttgaagaagattaaaatcgacagagctatacaagagcgccctgctacgcgaaagcagaca

SEQ ID NO: 22536 - DNA, 260 bp, Unknown
  Description of Unknown: LeftRegion for integrase B9537 sequence
aaataatcaaaacatacgagaaataaaggcagggcgagcaatcgcccttctttttttgcccttgtagcgcaagatatggtggtaaaaccgcaccacatgttgatatacagcgctataataaagtagcgccgcctccgcatgcgtcagggtcgatgtcggcaatcgatcaaatctgtggcgcagaaggaggtgatgcattcttgaagaagattaaaatcgacagagctatacaagagcgacctgctacacgaaagcagacg

SEQ ID NO: 22537 - DNA, 260 bp, Unknown; identical to SEQ ID NO: 22535
  Description of Unknown: LeftRegion for integrase B9538 sequence

SEQ ID NO: 22538 - DNA, 260 bp, Unknown
  Description of Unknown: LeftRegion for integrase B9539 sequence
gcaacacgcgagcgcaccgagcagagcttctttgttccgaagcaagaaatcgttgacaacggatacgacctctctattaataagtataaaaagatggagtatgttgctgaagagtacccttccacagatgaaattctgtcgaagatcgaaaagatagagcaggagattgtttctgggttggcagaattgaggtcaatgttatgattaagcggaacattcttgattgcatgacgcttgttggcggaacgcctttgcgcttt

SEQ ID NO: 22539 - DNA, 260 bp, Unknown; identical to SEQ ID NO: 21913
  Description of Unknown: LeftRegion for integrase B9540 sequence

SEQ ID NO: 22540 - DNA, 260 bp, Unknown
  Description of Unknown: LeftRegion for integrase B9541 sequence
agccatgagccatgacaacgaataataggaagccttcgggcttcttatttttttgctcagaatacatacggattgaactgcaaatatcgctcaaatatgatgcttttgcactataattaaagggcgccggctccgtgctgccgtagcctgtggatttcttgccacagttacaattctgcagcgggaggaggtgaacccgtatgaaaataaccaagaaacaaccacttcgaccgcgtgggcgcagtgatgagaaaaggcag

SEQ ID NO: 22541 - DNA, 260 bp, Unknown
  Description of Unknown: LeftRegion for integrase B9542 sequence
tgtaacgatgaagctaaaaaaaacagagagcaattagaagataatatcatagatttatttgtatcttattttaaaaataatacatataaaaattaatatagaaaatcaagagatacttcggtcatttcttgatttttttactagttattataaaatataatcaatggttatagaaaatataaatatggagctgtcttattatgactttgttttcaactaaaaataaatataacaaaacattaaagaatgctgatgtcatt

SEQ ID NO: 22542 - DNA, 260 bp, Unknown
  Description of Unknown: LeftRegion for integrase B9543 sequence
caaatgaaaaagagaatattaatacatataaagctaatattgaaaacctaattatcgctatgctgtttgattacattaaaaataaacaataatttcaacaagcaggatgatatatttctatcgtcttgcttttatctatgtgtgattataaaatatatacatagcgttataaaaggtatacgaaaataatggaggttatcatggtgatggatgaaaatttattctcaaaagaaaacaaatataaaaaaatgcagaggtca

SEQ ID NO: 22543 - DNA, 260 bp, Unknown
  Description of Unknown: LeftRegion for integrase B9544 sequence
cgttcttttatgacaggtacccgcccgctcctgatgcgcccgcgtctccggcatcctccacatccccgacttcctctacacccgtgaacaaggcgggcagtggagtggaacacaaggccgacaactgagacaccgtgtggacaaacacaggtaggagagggcgagatggaagtacctgacggaggcagaaaggaggagcgatgaagccgggaacagttgtaaagaagcttgatcagcaggctttgtttgagaaaggctac

SEQ ID NO: 22544 - DNA, 260 bp, Unknown
  Description of Unknown: LeftRegion for integrase B9545 sequence
atggaggatgcacgtgcagggaaatttgatctgctgattacggaatccattgaacgctttgccccgactgctgaagagacgatgcagtgtacagaggaattgagggatctgcccaaacctgttatggtgaggttcctgaaagaccggatagattcggagacagtccattcaattattccgattatcagggggtggcgcccttgaaggacatcagaaaggctgcggaagatcgtgccgcccatccgagcaacacaccggca

SEQ ID NO: 22545 - DNA, 260 bp, Unknown
  Description of Unknown: LeftRegion for integrase B9546 sequence
taatttgaattgaccgacgcgaaaatagatctttcttcaacttaaatcgcaaaactatgctagtaaaaacctttggagcggcagttcaaggaattaacgctactatagctacttatatacaactactatttacaattatttatatatctttgtattcagaaatcagatacaaaactaatcaataataaataattaacaccatgaaatcagctgaaaattcaaataaaagagtttgtttctatttaagaaactcaactaat

SEQ ID NO: 22546 - DNA, 260 bp, Unknown
  Description of Unknown: LeftRegion for integrase B9547 sequence
cgtggtctggcgcaaccgcgagtggaccgatgccgagtgggccgagttcctgcgactgctcttcggcccccgaccacctgccaagtgatccgagccgtcgtcaactgctgccgccctgcgctaccttgactccagacgcaaacgtgcgccaggggttccagcccctggcgcacagcgaccgactgtgaaggagtcgagtcatgcctagtctaaccatgcccgtggccactggtgtgcttagggccgttgactacaatcgg

SEQ ID NO: 22547 - DNA, 260 bp, Unknown; identical to SEQ ID NO: 13121
  Description of Unknown: LeftRegion for integrase B9548 sequence

SEQ ID NO: 22548 - DNA, 260 bp, Unknown
  Description of Unknown: LeftRegion for integrase B9549 sequence
gaataaatatacattataataatatgtatcaagcatataattatttaataaataaattgtaaatgatgtactgcacataacaaacggttactactgcgggtgctgttcgcgctctcggggttcggtcagctaggtcagtcgctacttattatctaattgacaacattctcagatatatattattctatagggagaagattatgggtaagtcaattcaggtaaaatctggtataatgggaatctacgtcagaacgtcagta

SEQ ID NO: 22549 - DNA, 260 bp, Unknown
  Description of Unknown: LeftRegion for integrase B9550 sequence
aaatgaaaagagatataatcttggcttgagaatggcaaataatctccttgataaaggcttaatttccgagcaagattacctcgaaattaacgataaattggcgcaaaaatatacccctatctttggttaatttatgctcataaaatcgttgataaattgtatcaacagagttaatatgtaccacagaaaggagtgatacaatggctacaaaaatgacagtcattcaacctaaaaagataaaagagttcaaagaacttcgt

SEQ ID NO: 22550 - DNA, 260 bp, Unknown; identical to SEQ ID NO: 13135
  Description of Unknown: LeftRegion for integrase B9551 sequence

SEQ ID NO: 22551 - DNA, 260 bp, Unknown
  Description of Unknown: LeftRegion for integrase B9552 sequence
agtctcaaaagagcaaaaagaagagatatacaaagaaatcatgaagttatatcttaatatgtaaaaaaagcacctcaaaagagatgcttcaaaggattgtgtttcgattgtcttgcttgatgctttgaaattcttcggcagtataaaaccacgaagagcgagtctttccgtctgcttcgtgctttcgagcaattcgattgatgcagtcatacacattcaagagatgttgtctgttcataagagcgcaccgccttttgatt

SEQ ID NO: 22552 - DNA, 62 bp, Unknown
  Description of Unknown: LeftRegion for integrase B9553 sequence
cgctcgcgtccgctggcgggggtgcgtcatacgcattgcccggggcgcggaccgagcgcgca

SEQ ID NO: 22553 - DNA, 260 bp, Unknown
  Description of Unknown: LeftRegion for integrase B9554 sequence
ataaattgcttcaaataagccctccggctctttcaatctttggtggatttatggtgcaaaatcaccaagaattgacttgctattagttctcacctacggcaatattaccacaacccgaaggtttgaaggtacagaccaggggcagcgcaggaagcacgaaacttcatagagaagtacatacatgaaaggaggtactccatatgggtacaacagagggaaccacagaaactatgattgagcagaaggcaatcagacagcct

SEQ ID NO: 22554 - DNA, 260 bp, Unknown
  Description of Unknown: LeftRegion for integrase B9555 sequence
tgatgaagaaactatctatcagaagtacatgcgcaaaagtaaagaagtccaagctcggaaagagcagaagggggagaaagggatctaatcatggccaatcaaaacaaaccgattcaactttcagagcaagaaatcagcgagcgcgagcgccggattgctgagatcttagttcaagtgaaacggcggctagaatcgaaaaaatgactcctctattgccacctggcacaagaatagggctttttatccgcgtttcgacggat

SEQ ID NO: 22555 - DNA, 260 bp, Unknown
  Description of Unknown: LeftRegion for integrase B9556 sequence
aaggggtcagacccggcatgtgaaaattttgagagagcaaatggacgacgaattggatgaactagctgcctttttggcagacatgatcgcaaaatatatattaaaaattcaataatggtaggggcgtggcttcggctgcgccccctattttttgtgtcttcttgcaattggtgatatatttacactaggagagaagacatatgaaaacaaaggtttatatttatacgcgtgtgtcaaccgcaatgcagacagacggatat

SEQ ID NO: 22556 - DNA, 260 bp, Unknown
  Description of Unknown: LeftRegion for integrase B9557 sequence
agtatttctatataggtaatttagagaataagtatccaattgctagactgcaagatatggtaaactaatattttaagtgtatttaattttttctactaacatcacaacaaaataacatataaatatatttagagtattagtttagcatataaatgcttctaatactcttttgtgtttttatgagaaaggagacgatataaatggattcaaagaatcaagaagaaaaaagaattgctggtatttatattcgtgttagtaca

SEQ ID NO: 22557 - DNA, 260 bp, Unknown
  Description of Unknown: LeftRegion for integrase B9558 sequence
attttcctgtagtgatcttataatgaaacttataaatgaacaattaatttgggaaaaagaacaagaaatattattagaacaaaatattgcaaaataattatttaaaatgtagaggagtttacttcactacatttttattgttattaataataaatacggttaaaatatacacagtaatataaacaattggaggatatatattgattaattatattgaaaattataatcttaattctttagatgatttaaattttcttaaa

SEQ ID NO: 22558 - DNA, 249 bp, Unknown
  Description of Unknown: LeftRegion for integrase B9559 sequence
cattggcataggcactgcgatcttgccgacaaatggtaagaaactcctgcagtgtgaactcttcgtccttggcagcttcataacgctggcgatagtgatcgaatatattcatggcatgccgtccttttgtataatctgggaacatttgtgaatcagcacttttagcttaattcttcaacgggataaaaaatgctccgtcctatatgttatgagagagtttcaacaatctatcaagcagtgatggcaaat

SEQ ID NO: 22559 - DNA, 260 bp, Unknown
  Description of Unknown: LeftRegion for integrase B9560 sequence
gatgctttggtggcagaggtagccaagaaaccctcagatatcaagaaaatcacagccgatgacggcaacacgctccacttccacttggcggatggcagtgtggttacccgcatttgggcagaccgctccagagcagaatcctggacggctgaaaagcgcgaggcagcaagacaaaaagagatagaaaggagacaagccgaatggcacgagcaatcacagtaattcctgccaccaaagataaattcacggcactgccaacc

SEQ ID NO: 22560 - DNA, 260 bp, Unknown
  Description of Unknown: LeftRegion for integrase B9561 sequence
tatgcatcatcagggcggttggaatcacaaggaattctggtggtgcggaaaacgagtaaagcaaggaccgcaagcctgtgagggagtcagggttccggctacggttgcagatacttggaaatttgaagggtgcatatatgtaacggaaggagaggatgagaatggtaaaaaatgttacagttatcaaagcaaatccgaggatgacggtaacggatgcgaaggttaataagaaacttcgtgttgctgcctactgccgagta

SEQ ID NO: 22561 - DNA, 260 bp, Unknown
  Description of Unknown: LeftRegion for integrase B9562 sequence
ttggcgcttcagtacctctcttgccagtttcgtgtacaagactcggagtgtcatctgcaacatcttttacccctcttttctcactttaaaggatattaattacatttacacactaccggatgattggctttctgtcagctcttttatgtacgccctaaaatctatatacttgatacataagcgtgataggatgatggtgtatggataagattttagttgcgggttatagacgagtaagcacgaaaagccttgaccaagca

SEQ ID NO: 22562 - DNA, 260 bp, Unknown
  Description of Unknown: LeftRegion for integrase B9563 sequence
cgtgtcgaagaagagtcatgagatttccctgtgtgccagacttctggcacagcaggagcacccgattgggatttactttatttctgaggatattttcaccctggcgtcctattatctggaggacatgaaagacagttatttcaaatacgaccctgatgtagcggtaatttccgatagggcagtctcaagggagatgcttcatgattgattatgcagcgcaggagacgagaaagaagaagcgagcaaaaattaaacagcgt

SEQ ID NO: 22563 - DNA, 260 bp, Unknown; identical to SEQ ID NO: 22553
  Description of Unknown: LeftRegion for integrase B9564 sequence

SEQ ID NO: 22564 - DNA, 260 bp, Unknown
  Description of Unknown: LeftRegion for integrase B9565 sequence
atatttttcatctttaaatattttattgcaagtatcataaatttgttgcagcttttctttagttaaaggttttttataaaatgtaattttcatttagtacctcctttaataaattgtatgaaatatgtattcatccagaacttttcaataacataattaaagtttactatttgaagcgataaaaaaggagtggtaaataaatgaaatcccaagatgatgttcttatgtatttcagaaaaaatcgtgaagatgaagaaata

SEQ ID NO: 22565 - DNA, 260 bp, Unknown
  Description of Unknown: LeftRegion for integrase B9566 sequence
attatatttgtcaataggaaataacaagtatttttatatttgttgcaaataaaatccgcccgggtgcggcaacacccggacggaagcaaatgacccaaccaccacagaagggacagtctgcccatttatgataccatggcaggctgttctcgtcaagcaaattcgcaagcgcttgcgaatttcagaaaggagtattctacatgcgtattcccggagcttttattaatgccagatattctacagacaatcagaatcccgac

SEQ ID NO: 22566 - DNA, 260 bp, Unknown
  Description of Unknown: LeftRegion for integrase B9567 sequence
acaatttctgaaaagaaagctatcctaaaaatgataaaagaactgaaagtagcacttcgcaattcaaaccaataatcaaaattgaataaaaagttatcttgaaaatcgactacaggttaatacttaacctctggtcgatttctttttatgcccagaaaaatataataggtatgtaataatcggcaaaggatggtctcacgatgaaagagaaagaagaacgcataggcaacgccgcctcccaaaaggaaaagataagacaa

SEQ ID NO: 22567 - DNA, 260 bp, Unknown
  Description of Unknown: LeftRegion for integrase B9568 sequence
aggcaagatgacttgcggtcaatgtactgctggttgaacggggtcttatgattttgacccaaattcaaagtgttcctacaaatatattttttcaaaaataaactgcaggatataacgctatcctgaggtttattgattccggaagtgctgctttttatcataatgctgtgcctttgcaacttaaggaaaaggagaaaaccatgaccgaagcagaaagacaattaggaacccgcgatgagcagaaagaacgaatccggaaa

SEQ ID NO: 22568 - DNA, 260 bp, Unknown
  Description of Unknown: LeftRegion for integrase B9569 sequence
gtccagagatgctcaagaaatggcgatttgcgcaagaatgctcgctgctcgcaagcctcctgttggcatctacttcatatcagaagatctatacactttggcatcgtattatcgtgacgatcttcgagagccttgttttctcccaacccctgactggaagatcctgcctgatgacgagctggatatgagaggtgcgcttcatgagtaaatcagccaagaaagcagctgatcaagcagaacgtgagaaagtacataagcga

SEQ ID NO: 22569 - DNA, 260 bp, Unknown
  Description of Unknown: LeftRegion for integrase B9570 sequence
taaccaaacaagaatttgcaaaagaagttgtttctttattaaataaaactgatggaattgctgaacaagaaaaagcactacttgttcaaactttaaatcttatttgttctgataaagaataagaacactcgttctttatgtgcttaatatataaacaaaatgtgttataaaaatgaaattaattaaaaggaatgatgaatatgatgtacaacatgaatgactatcagatagaacttgataaattaggaaagattattatt

SEQ ID NO: 22570 - DNA, 260 bp, Unknown
  Description of Unknown: LeftRegion for integrase B9571 sequence
tatgatggaactcactttactcgcacgatatttcgcagcgttgccccaccctattggaatgtacttcgcatcagaagacatcttcacgcttgccacctattatcgtagtgacacttcggacaaagatttcttcttcccgtccgagaactggaaactccttcccgacgataacgaagaacccctaaaaggaatagcgcaaaatgattgatatagaaaaaagagaactcctcgcccaaaagaaggcgaagacccgtcaacgt

SEQ ID NO: 22571 - DNA, 260 bp, Unknown
  Description of Unknown: LeftRegion for integrase B9572 sequence
cattgaggagtatcggaaattgaagccagagcagagggcgctcacatcaataattttctcactcttggcgcaggacaacgcaaacggtttcctcattgcccgcgccctattcgatggcaaggagatcgcgagcgacagcacctccgtcgtctatggagccgtcagcatatctgggagcgtcccgcttgaggaatacctccttgaacactccggaaaatcctgacacggcgccgcgttgcgccatctactgccgctattcc

SEQ ID NO: 22572 - DNA, 260 bp, Unknown
  Description of Unknown: LeftRegion for integrase B9573 sequence
acaagcgggtaacgccggaggggctcttgctcctcctccgcacggcggcgattgcagccgacaagctgggattcgaggacgtttatgcgggtctggccgagatgatccagactatcgacaagctaaaaggttaaactaacgaagccgccgggttgcagcccgacggcttctttcatgaacgctgacacgggagcgctcacatgagcaattctaacggtatgggcgggagacgctacacccgccgcaaaaaggaagaccag

SEQ ID NO: 22573 - DNA, 260 bp, Unknown; identical to SEQ ID NO: 18422
  Description of Unknown: LeftRegion for integrase B9574 sequence

SEQ ID NO: 22574 - DNA, 260 bp, Unknown
  Description of Unknown: LeftRegion for integrase B9575 sequence
aagaattgacaaaagaaataacacaagatgaatattttgctctaaaactattagaacaaatgacgcaaaatcaaattattccgagcagaatgtttcaatcaataatagaagattatcgtgggaagattgacttcaaagaattttcgtgttatgatgatagcaaaatacatcaaagagtgaatatctaaaggagtctatctatgagtgatttacggagaaacccattatattatttaaggtcaaataaagatttacaagat

SEQ ID NO: 22575 - DNA, 260 bp, Unknown
  Description of Unknown: LeftRegion for integrase B9576 sequence
tgaaatgcaagaacaagaacaagaacaaggaaatatttagggagagtaaagcgcattatataattatcaatggttaattgtaaatggttaatgataactgataactgcctaaagcattcctttggtgaacggtataatcattttgtagtttaaaatgtttaggctatttttgtatcacaaaactactaataaataccgatatgaaagcagctttattgttaagagtgtccactgagcaacaggatttagacagccaaaag

SEQ ID NO: 22576 - DNA, 260 bp, Unknown
  Description of Unknown: LeftRegion for integrase B9577 sequence
gaggagatcgacttcgacttctgcccccactgcgccctcgaactcatcgagaaatacggcgtggacgacgccttcgtcaggggccttgacggagacctgacgttccgcatcgggtccgaaaagacgccgttcagcttcttcagcatggagaagatagcctacgtccacagcatcggatgccaacttgcggaggatgagatatgacacgctgcctcatctacgcaaggcaatcgtccggcgacaacgagcaaagcgaatcc

SEQ ID NO: 22577 - DNA, 260 bp, Unknown; identical to SEQ ID NO: 13265
  Description of Unknown: LeftRegion for integrase B9578 sequence

SEQ ID NO: 22578 - DNA, 260 bp, Unknown
  Description of Unknown: LeftRegion for integrase B9579 sequence
aaataatataatcagtgatgaagatggcgcattgattattataaatatcttatatgaacaaggcattattaataaaagaacttatgataatattttgaaaaagtataagattacataatatagaaaaatactgttgaaaataaggcttattttatatataatagtatataaaataggctttatttttgaaaggagataacatggataattatataacgtccctcgatagaaatagaccaagaaatattgctttttatgga

SEQ ID NO: 22579 - DNA, 260 bp, Unknown
  Description of Unknown: LeftRegion for integrase B9580 sequence
ttattattatcttttattaaatattgaaattatagaatatattttaccacaaaatgtaaattttgtcaagcaaatttattacccttatttttatagtaatattgttcttgcattgattttgattttatattatacttctgtatgtaacatttatgttggattgtttcataaacattgtgttaaatatttgaggttaaattatgaatcaatatgcagaaaaagaattatctggtttagtctttcaaacatttgaacaactg

SEQ ID NO: 22580 - DNA, 260 bp, Unknown
  Description of Unknown: LeftRegion for integrase B9581 sequence
aggattaaatgatttatagtattagtcattgctaactaataaataaaaaataggggcatacaaatagctattgctaaatgtacgccccttatttttttacacgattttcatcatgtttaattttgacttgacaagttatttcaaatatgttacactaataatggatttgtgtagctatctgattgcaaggagtttgataaatgaatatttatgaaatcatgaatcaaatgcgtgttgaacgaaaacgtattgaagatttt

SEQ ID NO: 22581 - DNA, 260 bp, Unknown
  Description of Unknown: LeftRegion for integrase B9582 sequence
gagatatgcaaagcgaaaaggtaaacacgcatgatgaaacactatttgccgccttgaaattaatccaaaacctatataggaggaattttatcagttcatacatgtacaataatatcctgtctgaatacgaagactgtattgacattacagattttcagtgctaagataatatacataattaggaaaacggggtggcaataatgtattgttacgaaaataatgtagcaaaaccacgcaatgtcgtcgtgtacgcgagagta

SEQ ID NO: 22582 - DNA, 216 bp, Unknown
  Description of Unknown: LeftRegion for integrase B9583 sequence
  modified_base (139)..(156): a, c, t, g, unknown or other
caacgacgagtttttctcgcgaaaaactcgctactgctcaatccacggacatccttgtccgttctgaaaagctttttgccgtaagccttttgcaaataggcggtacagatacaaggcgcgagcacaaattaaccgcagnnnnnnnnnnnnnnnnnnatgtccataaaactttactttatacaaaagtatgttatactggaggatatggaagtgctc

SEQ ID NO: 22583 - DNA, 260 bp, Unknown
  Description of Unknown: LeftRegion for integrase B9584 sequence
aatactgaacagtatttaatatcatttcaacacgcaaaaaacatgtttaatcaaagcataatttcttatgaagaacttactaaaattgaagagaaattaagaaaaaaatattgtatcaaaattaacagtttatatgtcggaattgactggatatgtactccttttagaggtaatatgtgacacacgaaaggaggaatattatgcaagtaacaaaactaccgtcattaccacaattaccaaagaaaagaaaagtggctgct

SEQ ID NO: 22584 - DNA, 260 bp, Unknown
  Description of Unknown: LeftRegion for integrase B9585 sequence
aatatggcactataatatataccaaaacggcaatataagaatttcggcaacgttgtcttgaaaagctcatgaagtgcagtgaatatcacaaatagcattcttaaactggtaaaattaggaacttcactacaccgacagctaatcacttttgactgaaaaacagcattgcataaaacatgtgggaggaaggcttttagacaatgaatgatgtagcatggactcagacagaaccaggattacaacaacagatatatcgacca

SEQ ID NO: 22585 - DNA, 260 bp, Unknown
  Description of Unknown: LeftRegion for integrase B9586 sequence
ttaagcgatgaagaaaaagacaagatatacgcagcgctgaaactgattgaaaacctacataaacagggcttggtaaagaagcatattttcaaaaacattttgaacgattacagagattgtattgacttatccgaattcaaatgctatacttaataggcatacatacataacaaaattaggaattgtagggaggataagcaatgtaccaatatggctaccaagccccaaagcaaagaaaagtcgctgtgtatgccagagtt

SEQ ID NO: 22586 - DNA, 260 bp, Unknown
  Description of Unknown: LeftRegion for integrase B9587 sequence
gcgcaggctggactttgtgccggaaacggcctcttagggtttggagagtagcgtaatgggtaagcgtcacaaggcacctgatccgcctgatgacattgacgaagccgcagtcacgcggtttatcgaggttttggcgcggatcgcggcgaggcacgactacaacaaactgaaggaagcgcagcagcgcgcgaggcacgataatgaacaaggcaaccgagcccccccacaaaagggccgtcacctattcaaggttctcaagt

SEQ ID NO: 22587 - DNA, 122 bp, Unknown
  Description of Unknown: LeftRegion for integrase B9588 sequence
acttttataacgtaaaaatgccgattttattgcctgaatataacttaaagatatataagaatatgaaagctgcatttctgattagatgctcgaccaaaaaacaagattacgagcgacaagta

SEQ ID NO: 22588 - DNA, 260 bp, Unknown
  Description of Unknown: LeftRegion for integrase B9589 sequence
tatctggcggctcgtgagatcgcggagggcttcctgaaaaagggcctgctgaccgaggaggaattcaccaaaattgacgccttcctgaccgagaaattctccccacagatgggcaaactaatcgcggctacaggccagaattaacttgctatgcaccccttttagagtgatatatggtacgggaaaggaggcgaaaagccgtgaaaactgtaaagaaaatcgaggtcacgaggccggtcctgcctacccgaaagaaggtc

SEQ ID NO: 22589 - DNA, 260 bp, Unknown
  Description of Unknown: LeftRegion for integrase B9590 sequence
gtgggtttcttgcctaccggtccgagagacagtagaatgactgaggatgtgcacaaactagccgagaggttcaccgtcgtcaaccagcacggcgaactctccgacgaggcgatccacgggatcgccaacctgctgatcgagcacgtccgtgtcgtcgagcccaacctgctggacctgagcaagaaacccgaggtccgaccatgatctcaccaccacccaccgcgatgccttgctgtgagtattacagaatgtccacgtta

SEQ ID NO: 22590 - DNA, 260 bp, Unknown
  Description of Unknown: LeftRegion for integrase B9591 sequence
ccttcagcacaggcacaggccgcggcgtcgtcgtcaccagcgcccttggattatcaccgagccgcagcgcaaactgcagcatgtcccacgtctcctgcccatgtttccatttaccgagttcgctgcactagtgaatttcatgcacttgcagcgttttttaaccccggcctgctatagggctgagaacacagagcaaaacgatggctaaagcagtggcaagaaccaaagcatactcatacgtgcgtatctcatcaaaagga

SEQ ID NO: 22591 - DNA, 260 bp, Unknown
  Description of Unknown: LeftRegion for integrase B9592 sequence
gtcgccatcaaaaagacctccttctttttgaaagtgcaaagctataccttgcatcttcattatatgcaatccagccccctttgtaaagccgcctgtgcaactttcacgtaaaaaacgcacaaacccctccagccgtttccaactggaggggtctgccccgtcgccaaaaggtaaggataaaaacaagaaggtttctttccatgcgttgcctgcccttacagcatagcacgctttttggatatgggcaagcaaaagccccg

SEQ ID NO: 22592 - DNA, 260 bp, Unknown
  Description of Unknown: LeftRegion for integrase B9593 sequence
catcttctccgtagaaaagacagggcgttttggaacgagttgaacctaaacgtgcaactctacttatataaatggctcccagatatgatatttcggaaatgaatttaactttttgactgttgaaagtgtggaaagatttattttccccagaacttgcaacggcttgcaacaaacttaaaactacttgaaaggtggtatttatgcctcgcaaaaagaaactgcaagaggtaggcggactgcggctggtggcgtactatcgc

SEQ ID NO: 22593 - DNA, 260 bp, Unknown
  Description of Unknown: LeftRegion for integrase B9594 sequence
tcgacgtgatggaccatatgagcccctgcaaaaaatgtgcaataaatgcatttaattttgaaagtgtaccgaattggtttacaagaaagtaaaaaataccccccggtgctgtaacaccgggaggccgtgcaaccccacccaaccaatcacgaaaggggagatctgcccttttatggtagcatccccggaaaggaaagtcaatggcaaaaagaatcccgggcgcatttatctgcgccagatactccacagataaccaatcc

SEQ ID NO: 22594 - DNA, 260 bp, Unknown
  Description of Unknown: LeftRegion for integrase B9595 sequence
aagaaactgacgaaagagatcatattacaaatgatgagttaatacttttaagcgcactaaatcatatgtgcgaatctggaaaaatatcacacagcctatttacttctgtccttcgtgattataaatcaaaagttgacatatctaagttcacatgctataatcataattacaaatgattataattatatgtgaggttagttatgagagtagaaaataatcaaccaagaaacatagctatatatgcacgagtatctacagaa

SEQ ID NO: 22595 - DNA, 260 bp, Unknown
  Description of Unknown: LeftRegion for integrase B9596 sequence
cgtcgccgggttgtggcggcgttctcagttgtttggcgtagaacagatgtgctatcaaggtatcatgtgtgaccgtgttcgtcaactacttgtggcgaacgggatagatccagtatcacgagtacatcgttttacgacaagtcgtgaatgtgcgatagagggacgttctgtcgcatcagtgcagggaagggcagggagaaatggagggggtgttagagccggcggcggcgtacgtgcgtggctcgacgctgatgcagaag

SEQ ID NO: 22596 - DNA, 260 bp, Unknown
  Description of Unknown: LeftRegion for integrase B9597 sequence
ccttagagatttccaaggaggtatataggaagaaatgaataaaactattaataagaataatgaggcagctgtatcagaagaattaataaatagtttattagagatttttgtaacagagtttattaacaaagagcttgatgcctctaatactcagcgttacacttcatatccaattagtgagacaaaggaggatagcatagatggaacaaatgttcagtagcccatcatcaataaaaagggtatgtgcttatggaagagta

SEQ ID NO: 22597 - DNA, 260 bp, Unknown; identical to SEQ ID NO: 13353
  Description of Unknown: LeftRegion for integrase B9598 sequence

SEQ ID NO: 22598 - DNA, 260 bp, Unknown
  Description of Unknown: LeftRegion for integrase B9599 sequence
accacgacgccacagaggccgcacatcgcggcctcttctttcggttggaccgttcgttcgaccgcgccccgaacgcccgtgcgggccacccgtgcgcccacaacacccgcgctggaggcctgcggccaaggcgaggtaactgtgtggtcggcgcggtacgtcgcccgccaaacgaacgtccacgaacccgaggagaacccatgagcaagaacggaaccaagccggcggtcggctatatccgcatgagcaccgacaagcag

SEQ ID NO: 22599 - DNA, 260 bp, Unknown
  Description of Unknown: LeftRegion for integrase B9600 sequence
gggcggcgagccgggcgcgagcgcgggcaagtcggaatgaacgttacgtcaaatggttaacgcttccttaactggtggaactgtaccaatgtcgcgtcgcccgccgaaagacccgattctggccctggcgtatcatctggcctacgaggcgggacagcgcgagttcttgcgcgagcacatggagctgaaggagcttttccgtgacatcgacaagaaagcccgccgcgaagaactcagcgcttcgattggtcgacgacgtg

SEQ ID NO: 22600 - DNA, 260 bp, Unknown
  Description of Unknown: LeftRegion for integrase B9601 sequence
atatggaagaaagctcgaaaaacgcacttactaagacagcgctactcaactactataatcaggttctatatgataatggcttaatcagcgaagatgaaagaaacagaatgtcacggttaatcaatgaacgtagttgacaagagtgtgcatgagacattataatataaacatgatacatcgaacaaagtgaggtgtagaccgtggacatattttctacaaggcagctactcagaacgatgtcgatctatgatattcctctg

SEQ ID NO: 22601 - DNA, 260 bp, Unknown
  Description of Unknown: LeftRegion for integrase B9602 sequence
tcatgcaacgtaatggaccaaggcagaacagggggtagaatccgggcagcccacaagccggatagcgaggcccggattctccgctgtggacaagtgaacagccgctggggatcggcgcatgaccccaccagcccacaagccggatagcgaggcccggattctccgctgtggacaagtgaacagccgcccgggggcagcgcatgctcccaacccattcaccggtcccgatgctggctgtcgcctattcccgctggagctcc

SEQ ID NO: 22602 - DNA, 260 bp, Unknown
  Description of Unknown: LeftRegion for integrase B9603 sequence
aagcgcgtgacgccggaagggctgatactgatcctacgcacggcggcgattgcagccgacaagctgggattcgaggacgtttatgcgggtctggccgagatgatccagactatcgacaagctaaaaggttaaactgacgaagccgccgggcatgcactcccggcggcttccaccatgaacgctaattaggagccttcacgatgattactgattctaaacggcgggacgcccgccgcaagcgcgtcattctctatttgagg

SEQ ID NO: 22603 - DNA, 260 bp, Unknown
  Description of Unknown: LeftRegion for integrase B9604 sequence
gttcaagatccattgtgccctttgcggttcaaggctcacgaggcacgtcaacacgaaaagcggacgggtcacgtggatgtgcaataggtacaagcatcatggccccgatcagtgtccggggatgcggatattcgatgatgagattaggaaatggatgcccatagaggctgacatatatatcacggaaaggaggaccccagatggcaagaaatatcacagttattcctgccaaagagaagaaaatagcgactaatgctccc

SEQ ID NO: 22604 - DNA, 260 bp, Unknown
  Description of Unknown: LeftRegion for integrase B9605 sequence
ctattgttgaaaaataaatcagcaacgcaaacagaatatattatgcttaaaattatggaagtgttatgtaggcaaggaaatatatcaaaaaaaacattttgtagtatcttgaaagactataaagataaaattgattattctgatttctcatgttataatgatagcaacaaacggaataatgtgatagcataaggtgtaatatgagaacggatgacagcaagaaaaggaatattgtaatttatgcaagagtctcgacagaa

SEQ ID NO: 22605 - DNA, 260 bp, Unknown
  Description of Unknown: LeftRegion for integrase B9606 sequence
cgcagaaatcgagagcggctgtattgccgtggtcgtggtggacggtacagaagggtttttaaaacaagtcgagttcggtgagaattccacctcgcttcactcgttcaatccgtattatcccgacatggagtttgtagatgccgaccagaaacgtttgcactttatcggtcgcgtccgggaaatgaagcggaggttctgatatgcctcagaagtttaaaatcgacctctctatgctgaccccagaagaacagcagcagttt

SEQ ID NO: 22606 - DNA, 95 bp, Unknown
  Description of Unknown: LeftRegion for integrase B9607 sequence
aacaagtaattgattttattgaaaaggtgtagattatggctcagaagttatacagttatcagcgttggtcgagtgctgtacaggccgatggaaca

SEQ ID NO: 22607 - DNA, 260 bp, Unknown
  Description of Unknown: LeftRegion for integrase B9608 sequence
ctgagcttcggcgacagaggccgggttactgcgctagtggctgagttggatcgctggaagttcctccgttccgccggtgccgccacgccgtcgtagcagcattcatcgcaatgcctcacatgttgtagaacagcctccgcccaggctccgttcacaacccgcgtattattcgcaatcattatcacttaggtttcaaaagcatgaccaagaaacggtgtgtaattgacaactctcagggggccatcgtcggatatctccgc

SEQ ID NO: 22608 - DNA, 260 bp, Unknown
  Description of Unknown: LeftRegion for integrase B9609 sequence
cgtgaaaaactttatcaggccaccatgaatgtctttgatggcatgctcaaaaagggcctgatcacagaggagcaatacgccataattgatacaaaaatgctggaaaaatacaggccattattgggtacattatttcgccaaattgacttgatataattcgcttttagagtgatatatagtagcggaaaggagctgattttatgcgaaaaatcaacaaaatcgagccgttgatgccgaccttgccaagtcgcaaaaaggtc

SEQ ID NO: 22609 - DNA, 260 bp, Unknown
  Description of Unknown: LeftRegion for integrase B9610 sequence
ggcctgcgtggggccacccctataggatgcagattaatcgtcgccgattgtctgccccagcagccgctgcacatcgcgcgcgttgtcgatggcgtagctgccgaagttgttgttcatcagtgacaacacgtcacttctgttatactcacgctatcagtcctgatacaggtgagagagcggacgtggaaggggccaggacgatgacagcgacaaggccagggcagggcacagcgggcatacaggccacgacaggcgcgaca

SEQ ID NO: 22610 - DNA, 260 bp, Unknown
  Description of Unknown: LeftRegion for integrase B9611 sequence
gatgtcgtcccgtaacccgggaccatgaaaccgaaaccgctcgtcatcgaagaggtcttcaaccccaactctgttgaaggtcaccgcgcgcacatggcagcgctccagaccctgatcgagatcatcctggacaacgacgccaggtacggcgtgccggagaaagtagacgcccagccagtcgcgtaatacaatgggcaaccatggcacccaagcagtctgccgccaagcggcgcgtgcaccttgttcccctgtcgcctgtt

SEQ ID NO: 22611 - DNA, 260 bp, Unknown
  Description of Unknown: LeftRegion for integrase B9612 sequence
ggcttcggatctaccggttacaaataacaactttaaacttgaaatattacgattttcgagatataaaagaatgaaaacgcttgacgcagacatacaaaatttaataaggcagccaatcgatccggaagaactggccgaaatgtcgcgtatgtttacgggcgcgatcaatagtttaattaaatgtcttgtggaagcgaagcatgaaggccgtaatattaaccagggtatcgacgaaagaacaagaggaaggacacagtctt

SEQ ID NO: 22612 - DNA, 260 bp, Unknown
  Description of Unknown: LeftRegion for integrase B9613 sequence
atttacatgacagtacttgggaacattcccaagttttgacaagacactcagaatttgaaaaatctcacgaatcctattatattataagaaaaaggagtataatatgagtagttatcacagagaagcttggaaacacttttatcctgatggaaatggtaaagcattagaacggacatgttctacatcacatcaattacttaatgaaatatgaagatcctaaacgttacagacaatggaacgttgaagacttggtaatggtg

SEQ ID NO: 22613 - DNA, 260 bp, Unknown
  Description of Unknown: LeftRegion for integrase B9614 sequence
cttgtaggccataacaatctcgcaactggtggtctgtgtctctaaattgatgccgaaaaatatgtcacgcaccaggcacagattgagggcgccactgatgccggggacatgcaaccagcgtggcgtgtgggcgatcggtgtctcgcccgtcgcgtctcgtgtcacgtatcaccacctcttttgtagaaaggatacctcacatggccgccgcaccccacgccaccacccggctcgtcgccatctatgtccgcgtctcgacc

SEQ ID NO: 22614 - DNA, 260 bp, Unknown
  Description of Unknown: LeftRegion for integrase B9615 sequence
ctttgccacatcaggatcatggccaccagacaccgcctgtgaccaggtgtttgcaactgcagaacaatcagcccgactgaatcagcttggcttatgggtaccaacgatcacccctgtgctttacattcccccagctgccatatctaccagctcaggcattatctcaggaagcggatcgaattgcgatccatcctaccctgatgtatgcattccacgatacccgcctgatctcgattgcagtcagatcccataccgccgtt

SEQ ID NO: 22615 - DNA, 260 bp, Unknown; identical to SEQ ID NO: 13417
  Description of Unknown: LeftRegion for integrase B9616 sequence

SEQ ID NO: 22616 - DNA, 260 bp, Unknown
  Description of Unknown: LeftRegion for integrase B9617 sequence
accaacacgagcgcgctcgtcgagacctggcccgtcggcgacccgcgcactaccgcgcgcctgctcgcccagatcctggtgcgtcgcgcgctggtcgacctggggatcgtccccgatgatccgcgccccgaaaggcagcaccggactaaatatccggcccgctcgggcgttaccttgccggagccggaggaagatcaccgatgatggtccgcacgtaccgtcgacgctcgaagaacgacgaaggcaagcagcagttcagc

SEQ ID NO: 22617 - DNA, 260 bp, Unknown
  Description of Unknown: LeftRegion for integrase B9618 sequence
tcgaacccaagaatgtaattacggtaataatagtgtgatagggagggttgcaatgggttacacacgaactgaaaagaaggaagaagccaaacgcacggcaaacaaactcctgatccgctcgcgggtggagtatgtcgtcgactcggaacgggtcgatcagggattgcgcctgatcttacgtcgcgtgatgggagaacccgatgagccgcaaccgcttccgagacccggagaagacccttgcccggtacgacgaacaagat

SEQ ID NO: 22618 - DNA, 260 bp, Unknown
  Description of Unknown: LeftRegion for integrase B9619 sequence
caggaaaagctctaccaggcgaccatgagcatggtcagaaagatgcttgcggaggggcttatcaccgaggaagagtaccgtcagattgatacaatgttcctggcaaaataccgccctcttttcggcacattattctctgaaatctgttgactttacagccttttagagtgatgtatagtagcggaaaggagcgtgatttcatgccgaatttaagaaaaatcgaagcggctgtacccgccatccgggaaaagaagaaggta

SEQ ID NO: 22619 - DNA, 260 bp, Unknown
  Description of Unknown: LeftRegion for integrase B9620 sequence
tcctcttcagaactccgcttctgttttaaggatggcagaaccgtaagccgcaactggcagccgccggaacgtgtggggcggccttggactgaggagcagagggcaaaatttaaggaatccattaagggcgcctatacgccagagcggcgccggcagatgagcgaacacatgaagcaattacggaaggagcgtggagacaaatggcgcagagaaaagtaacggcgatcccggcgaccatcaccaaatatactgccgttcct

SEQ ID NO: 22620 - DNA, 260 bp, Unknown
  Description of Unknown: LeftRegion for integrase B9621 sequence
cggaggccggcagaccggcgtgatgagatggaatacatcatcgggaaaaccttccggcactgttccctgcatgaccagatggttatcctcgcggccatggctccatacctgtccccggatgaatcccggcggctggtggatgagtacaccaagcggcgaggggatgaaaccagcgagattgtgatccggattcggaaagaatgaccatgcggaaagatattgatccagaggcgagaaaagccgccctttatatccgagta

SEQ ID NO: 22621 - DNA, 260 bp, Unknown
  Description of Unknown: LeftRegion for integrase B9622 sequence
cggagccgcgtcgctatctcacggagggcctgcagcggcgtatccaccaggctgcaggcaaggtcgcggagcttatcgacatggcgggctttcagcaggtagtcgtcacttatcttggacccggcaaatggtcggcggatttgaaatacctggagacggaagcgtgatggagcagatgtcgacatgaccacgttgatgatatgagcgtccgagctgcgatcatcgtccggctttcccgtgaggatctcaaccagcccgga

SEQ ID NO: 22622 - DNA, 260 bp, Unknown
  Description of Unknown: LeftRegion for integrase B9623 sequence
ggacgttgggatgtcccttgctgagtttcagcaggcattccgtgattacgtgaagaaaaccccagttgaccccgagcactggaagggggacgttgtaatcagctggccttggatgtagttataccaggcatttctgcgatgtacttgaccggtggcagtgcccacactacggtgatcgaagtacattgccggtttgggacgtggacagggatctgggcttcaaggcaggcacgatctggtctttcgagagggtctctcat

SEQ ID NO: 22623 - DNA, 260 bp, Unknown
  Description of Unknown: LeftRegion for integrase B9624 sequence
cgttgcgatgacagcatgagggccggctggggggggaaaagccgattaaataaataccggccggaaatcgtcgcgttattgaaaaacggaagtcccaaaacgtttgtcgctcaaaggtacggtgttgacccggcgacattgtataatttcatagaaaagcaccacctggacgttacaccagggcctttactggagcagccatgaagtcgaaaccgaaagcagtaatttatcttcgggtctccactcctgctcaaatgaag

SEQ ID NO: 22624 - DNA, 260 bp, Unknown
  Description of Unknown: LeftRegion for integrase B9625 sequence
cggtcgaagaccgatcgccacgatggtccacgcgctcggcaccacccacgcgaagtacatcatccccttgctgctgctgggtttcgcgccggtcggaatgagcttgagctggtcgccaagccgaaggtacgggtgttgcagtgtggccctgcacggggccgagttggacaggccccgagcaccacggatcggaggtcgccatgcccaacgtcgtcacgtactgccgcgtctcctcggacgagcaggccctgaaggacctg

SEQ ID NO: 22625 - DNA, 260 bp, Unknown
  Description of Unknown: LeftRegion for integrase B9626 sequence
gcagcagtgcttggtaacaacgtgaccttccacttccgcgacgggcatgaggtgacaaagagcttcaagaaaaaacggcaaggcacaaaatggactgaagaacgccgtgaaaagcaaacccaagcaattagagccagctggaccgatgaacgccgggcggcagcaagtgaaaggatgagagaaataaggagtgaaaagaaatggccaaaaccgtaacgactataccggcgacaatcagccggttcacgtcttcgccaatt

SEQ ID NO: 22626 - DNA, 60 bp, Unknown
  Description of Unknown: LeftRegion for integrase B9627 sequence
gtcgagcagcggcccggacaccttcgcctgatagtccgcggcacagcgcggtgcccgcgc

SEQ ID NO: 22627 - DNA, 260 bp, Unknown
  Description of Unknown: LeftRegion for integrase B9628 sequence
ctgcactgcgggcacactggcaccggcggcaggaggcccgcctgacgcagtcgagtgcgacggacacgctccagggaggcagacggcatggggcggtggcggctccccataccgtagcggctgtcggactagagatgctgttttgagaagagtccgttcaggcagcgcctaaggtcaatgcaatggatcagacgaggcccatgctgggagtgccctactccagaattagctctgccggccaggtgtccggcctcggcctc

SEQ ID NO: 22628 - DNA, 260 bp, Unknown
  Description of Unknown: LeftRegion for integrase B9629 sequence
ttatagggcatacaaaagataaagaaaaacagcgtttaaaacgagacaattatatggagggacaattaatggaaaaagctatattgtatgccataaatgaaagaatgttctcgctcggtctgatagacgagaaaacaagagataaaattaaagctgaaatcagcattagaaagtaacgacaatgtattgagtggatttatatgaggtgttatactttatatgattccactccctgtttattaagggagaaatgcactatg

SEQ ID NO: 22629 - DNA, 260 bp, Unknown
  Description of Unknown: LeftRegion for integrase B9630 sequence
gccacgatcctcgaccacacggtaacctttcattttagggacggccatactgaatccagagatttcttggataagcgccacggtacaccttggactgaggaacgcaaggaaaaagcgagagcgtccatgaaagctgcttggacagacgaacgcaaggaggcaatgagcgaaagaatcaagaaaataaggagtgaaaagaaatggccaaatccgtaacaaccataccggcgacgctgtcacgcttcacagcggcaccgatc

SEQ ID NO: 22630 - DNA, 260 bp, Unknown
  Description of Unknown: LeftRegion for integrase B9631 sequence
ttatagggcatacaaaagataaagaaaaacagcgcttaaaacgagataattatatggagggacaattaatggaaaaagctatattgtatgccataaacgaaagaatgttctcacttggtctgatagatgagaaaacaagagataaaattaaagctgaaatcagcattagaaagtaacgaaaatgtattgagtggagttatatgaggtgttatactttatatgattccactccctgtttattaagggagaaatgcactatg

SEQ ID NO: 22631 - DNA, 260 bp, Unknown
  Description of Unknown: LeftRegion for integrase B9632 sequence
cgtcaccaacgccgattccgccgggcgctggcgcgagctgctggccggcgcaggcgtgcgccgcgccgcggtggccggatcgggcgtcttccgcgacgaggcgtccgacgcgcgcctgcgccagatgttcttcgacggggtgatcgacgcgttcctggtggttttgaatgtgcaaacacttttctgcgaggaaaccgcgaatgagtgatgcgcacatcaagcccggcacagtggcctactcgtacatacggatgagtacg

SEQ ID NO: 22632 - DNA, 260 bp, Unknown
  Description of Unknown: LeftRegion for integrase B9633 sequence
gctggaatcatttgacgaaacggctttccgtgagcagattgcctgcattcatatcgttgctccgtttcaactttccatccgcttctttgacgggcatacctttgaagcggcatgggaaaataagcgaaaaatgcccaagcatacggagcagcgcaagcagcatatgcgggaagtaatgatacagaaatggagggaaaaatgtggcgaaagtaacgactataccggcgacgataagccggttcacggcaacgccgatcaat

SEQ ID NO: 22633 - DNA, 260 bp, Unknown
  Description of Unknown: LeftRegion for integrase B9634 sequence
tgcacccttgaaggcgctggcccagcacaaccggagggcgtggtgagcgaggcggtgcggctcccgctgctccgggtggaagtggctctggccccggtccccatgtcctttgaccagctcgaggcttggctcgaccgctatctcgagtacattctagaacgccgtcctcccccctcgctcccgacgcccgaggtcgccgcgtgactgacactccttcggatcggagtttgggagcgaccgacaccgtgtgctatctccgg

SEQ ID NO: 22634 - DNA, 260 bp, Unknown
  Description of Unknown: LeftRegion for integrase B9635 sequence
ctaactgttggccaagcagcagcttacgggctcttgcctcacgcgcgcgcgtcattatacggctagctttccttcgttcaacatccagcgccgattttctcgccgccgtacttctccaaaccaccgtttgggcttgcgaattgccccagctggggcatatttccctttgacaattcgcgtgcagttgacctcggatgccaatggataccaacgcctacatagcgtattttcgcgtctccactccccgccaaggcgtcagc

SEQ ID NO: 22635 - DNA, 260 bp, Unknown
  Description of Unknown: LeftRegion for integrase B9636 sequence
gatttcacgatggacagtgtacctgagcggccgttcgagacgatcgaggtggtcaacgagcacctcacgatccgacgggtctacaagccagacaaggaccgctgcgtcgcagccaccgttctcctgctgcgcgccgctgcgcaggctcgcgctaccaggctcgcccgcgaagccgccgagcagagcgccgaggccgagcgatgagcgcgcggcgcggcaggggcgggctgatcccgctcaccgatgagttcgtggcctac

SEQ ID NO: 22636 - DNA, 260 bp, Unknown
  Description of Unknown: LeftRegion for integrase B9637 sequence
aatgcctgcctgttcctgcgaaggcaggccgtttggggcgttgggggaacatcattggtttcgacggtatcgacggtcgcctatctggggctggaagcgcgcggcgtggaggttcagtgccagctcgtgcccggcctccccaatttcatcaatgtataagcgcaaacactgattaacgattacagcgttaaggtgtttgaatggacgcgattatctatatccgctggtcgtcgttggagcagaccaagggtgacagctat

SEQ ID NO: 22637 - DNA, 260 bp, Unknown
  Description of Unknown: LeftRegion for integrase B9638 sequence
atcagcagaagcacgctactcaagatcgaagccggcgaccaccagccacacccgcctaccatccgcaagctcgcgcgcgcgctggctgtcgatcccgtccagctcacgaccgagtaaaaaaaggttgccccgcgctgcgagtctaaaacagccggggcagtggcagatcgtaggagtgtgaaaggactgatagacctgcaatgcctactgtacaaccggcggccgacggtcgagctgtgaaaaccatcggtgtgctggtc

SEQ ID NO: 22638 - DNA, 260 bp, Unknown
  Description of Unknown: LeftRegion for integrase B9639 sequence
agtctaccccccacgccgccgccagccgacgacgagcggccgagccttcgcgaggcacttggcgacatcctgctggacctgattgaggctggttgcctctacgtccgcgaccacccagccgtcaagatccgcatcagtcggcacgtcggcgagaacgtcgtccagatcgaggtcgagcaccagcgcgccgagggcgaagcatgagcgcaccgcggctgctgcgtggacgcacggcgccgctcgacgacgtcacgatcgcc

SEQ ID NO: 22639 - DNA, 260 bp, Unknown
  Description of Unknown: LeftRegion for integrase B9640 sequence
ccgactgagtcctccccaccgggccggtcggcctgctacgatggtgacgaaatgccatcatccgtgcgctgtggcgcaaaaaacgttgacacgggcgcatcgtctgcgcagactcccgggcatgacgccggacgaccgcttgcgcgccatcctggccgagttgtacgcgccgctgctcgacgtcgccaaggaggttgcggatgagcggccggggctcgagcccgccgcggcgtaccaggagatccgccatcggctacgtg

SEQ ID NO: 22640 - DNA, 260 bp, Unknown
  Description of Unknown: LeftRegion for integrase B9641 sequence
ggttatagtgttcttccttgatttgacctgttgtcagtaaatacttagcccaggcttcaaaaatttgctgtttcacaaaatcactccctatgaaagtcttgactaggatagcctattctatactatctataacgatttgtgattttccctattgacaaactaatcacggtattgtataattgatatagggtggtgataaaatggatatttataatatcgctaatgaactgaaactttctcataagaccattcatgatatt

SEQ ID NO: 22641 - DNA, 260 bp, Unknown
  Description of Unknown: LeftRegion for integrase B9642 sequence
gtttcgaaaaatctcaaaggattaaacgtgaaaaaagtggtcggtcttataagctatttttaaactaatccagttattacttaattataactgggtaattttaaaaccataaaaagaacgtatgttcaatatattgtaataatatacctgttaaactaaacatataaatattctatactaatagcatgaggtgataacaaatgaaagcagcaatttattctcgtaaatctaaatttactgaggaaggtgaatcaatagaa

SEQ ID NO: 22642 - DNA, 260 bp, Unknown
  Description of Unknown: LeftRegion for integrase B9643 sequence
ctggagctgctgcgcgtggtcgaggacaacacccgtatcctgcgcgaggtcctcgagcacctgcgcgatatcgatgcccgcctggcgcgtatcgaggggcgtacgctgccccccaccgaaaattgagccccgtgccgcttcagttcggcacggggctcgcgcagatcaaccgcagtgtaggaaagaggaattgatccgcaatgaagagtgtatccaaacacgaacgactgaacgggcatagcaacccgctcgtcggtcct

SEQ ID NO: 22643 - DNA, 260 bp, Unknown
  Description of Unknown: LeftRegion for integrase B9644 sequence
gtcgagaatttgacttttgaatgggctaaaacaaataggcatacagaaacgcaactgcgcacaatgacaaaaggcgcaggtcacacacacggcagcacagtggaatcatgaggttacagagcacgtggaatcaggaaagcgcaggtcaatatcaggaatgacagcagcacggcaccaggcacaaggggtgggggctcggcatggatggaccgccatcggccatggagggggagggtaccagaatatctgcaataaaacct

SEQ ID NO: 22644 - DNA, 260 bp, Unknown
  Description of Unknown: LeftRegion for integrase B9645 sequence
gcccggcgggccgcgttgtcatcccacaaacgcggcaaaaacgaacaatgaaccgtcgaaatggacgctgcgtcaattggttaacgcttccttaaccgccggaactatagcaatgtcgcgtgagtccgaatccgaggcttggctagaactggcaagagccatcgggcgggcggcggcacgggatctatttcggcggacttatggggttgttcatgtcgacgaaaaagagggcggtgatctacgcaaggttctccaacgag

SEQ ID NO: 22645 - DNA, 260 bp, Unknown
  Description of Unknown: LeftRegion for integrase B9646 sequence
atttatcaagcccgccgttcccccccggggcgcgatgtgcggaacttcatttgcccgcgcccctgcatgcccaccatggtggttgattttccaggttgattttccggttaagattcgcaattacgactcccggttaagattcgcccgccctttccttccgccgttccctatctcctaatctcctaatctccctatctcctatgcgcgcagcgctctacatccgcgtctccaccgaccgccaggcctccgagggcatctcc

SEQ ID NO: 22646 - DNA, 260 bp, Unknown
  Description of Unknown: LeftRegion for integrase B9647 sequence
cgtgctaccgcagcggttgtagactgcgggcatgccgaaaggaacgaacgtggcgatcaccgtccgcctccccgccgacgtccaccgcgacctggccgagctcgcccgcgagcagcgccgcagcctcaacaccgccatcatcgtggccgccgagcggtacatccggcagatgcgtgcgcggcagccgaaggaggcgccggatggccgctgagcccggccccggccggcgcggggacgcctacctgcgcaagtcccccggc

SEQ ID NO: 22647 - DNA, 260 bp, Unknown
  Description of Unknown: LeftRegion for integrase B9648 sequence
gatgggggaatgtacaatgcgtgttgcagaaaccgtcattatcttacaccgacaaatagctcttaatcaacgattacacaaaaaagggattataccttacactgtctattcaaaggttaacgatgaattgcaacgacgattgcaacataccacaaaatatgatatacttgtataacacaacatgaaaaggaggcagttacatgacttcaaagttgctgaatatcaaaaatgctttaaatgcgggtatttctatttttgat

SEQ ID NO: 22648 - DNA, 260 bp, Unknown
  Description of Unknown: LeftRegion for integrase B9649 sequence
ggtgaagaccgacggagcgaagatcgtgttcaccgcgccgctggtgaagcgcttctacgggcagcccgtcggcaatctgctcaactgggcgatccccttcggcggcctgcggcatacaacctgggaatcggcgcaaaaatcaccgatggggtgaaatattattgacgtgcgcatgtagtcgtgcaaaactggaatccatgatgcaaccaaacgaacttccccccgaggtaatttcccttatcagattcagcaccgccgag

SEQ ID NO: 22649 - DNA, 260 bp, Unknown
  Description of Unknown: LeftRegion for integrase B9650 sequence
tgggtaaaaatttatggcgactaagaaaccgagtcaaggtacacttaaaggcgttgcgacggtactactggaaatcggcgcgcagagaacagaacaacttcgccaaataagagttctgctgcaagagagtaaagatgttgaagctctcgacgccatgcgggaatacctcgcgatgaatccagcaacaaggaacccaagggatgaaaacgaaagacaagcaagctgaaccgaagaaggcggcgattgagctgattcgggta

SEQ ID NO: 22650 - DNA, 260 bp, Unknown
  Description of Unknown: LeftRegion for integrase B9651 sequence
catcgttccgcgattggcagcgttggtgacgaacatgacgtcagccaagttgaccagtattggtttcaagaaccgttggtcatgctggagcggcggcgcgcactcgagcaactaacacctgaacaattggcgactcgcgcagtgttactcgagcggatcggccgcggtgaactatccgctgaggaatttgcgagcctgcaatgaagacgcgcgctcgcacggtgacgaccagcaccaccgcgtcctaccagaccaatatc

SEQ ID NO: 22651 - DNA, 260 bp, Unknown; identical to SEQ ID NO: 13634
  Description of Unknown: LeftRegion for integrase B9652 sequence

SEQ ID NO: 22652 - DNA, 260 bp, Unknown
  Description of Unknown: LeftRegion for integrase B9653 sequence
accggcgcgtcgtctattttcgataagtgcgccgaaaaaatactgtggctaacgtattttaataacaaaatgctaagcgaaggacagatcacgaaagaagaacatagaaagatacaacagaagatttccaagattgacgcttcatgaatatcgtagtaaaataataatgactataatgacggaagcggtgtgatttcaaaatggaagatttctataaaatcaaagaagctctcaagattatgccgattactcaaataccc

SEQ ID NO: 22653 - DNA, 260 bp, Unknown
  Description of Unknown: LeftRegion for integrase B9654 sequence
ttattgcgaaattaacgggtaacccgtaaaagtgaaggtgatttgcatgggtgagaggcaagtcaggtcagaccctgacccaaccgatccgagaagcctcgaccacccctcccacaaggagcaatggcttgcgttagcgcgtgcgctggggcggctggatgcaaggcgagattttgagacacttcgcaaggggaaaaccggtgaccaaacttcaactcgtaaggccaagcccgatccttagaggggcaatctacgcgcgc

SEQ ID NO: 22654 - DNA, 240 bp, Unknown
  Description of Unknown: LeftRegion for integrase B9655 sequence
gttcggcatagtcgaaatcggccgcgccctcggccacccggaagcgcgagcggggcgcgccggtgaagctttgcagcagctcgatcacctcgtcgggggtctgcaccagcaccgcgccttcgcggatacgcgttgtgacagtagcacaaaactctggaatgtgcttttctggagtttgcaatgacaacacccgcttacatctacgcccgcttttccagcatggaacagggcaaaggcacc

SEQ ID NO: 22655 - DNA, 260 bp, Unknown
  Description of Unknown: LeftRegion for integrase B9656 sequence
tccgatacgcttgttttgtccgcaaacggagagaccaacggtctgcaaaatctgtttgaagatatccgcttcgggcaaatcgatggcgtcataattgaagatacaatcttttttggcgaaaattctacccgcttgacgcagattatagacttttttgccgctcatcaaacccgcatccaagtcgtcagggagaccgtgccatgcccgaaaaaataatcaattgtgccatttatacccgtaaatctactgaagaaggcttg

SEQ ID NO: 22656 - DNA, 260 bp, Unknown
  Description of Unknown: LeftRegion for integrase B9657 sequence
tacgtcacggtgcttgtgcgcttcgggatcgaagaccggcaggcagcgtcgcagctcacgccgggcgatctcgtggagatcgtgcggtcatgaatcccgacctgcgccgcctcgtcgagcttctcgcacgaatcgccgctcggcgtgctcgcgaacgccgcgagttgccggccctcccctcccgcccctagagtccgaccgtgcgcgcagccctctacacgcgatactcgaccgaagaccagtcgtccacgcccgcgcag

SEQ ID NO: 22657 - DNA, 260 bp, Unknown
  Description of Unknown: LeftRegion for integrase B9658 sequence
acttccaacgtcgtgctgcccgccctgaggagtttgccgagacgactcaaagggcaccggaagaatctcgcactttaactacagaagcctcagcacccacaagataaagcaccctctctgaatatcttcaaaagccgccctacgggcggcttttctgctatactaaaaacgcatcacccattttgctccaagaaaacgccatgaacgcccaacatccccttcccccaggcacccccgtcgccgcctacctgcgcgacagc

SEQ ID NO: 22658 - DNA, 260 bp, Unknown
  Description of Unknown: LeftRegion for integrase B9659 sequence
ccagccactgataggatgtacgccgatgatgatctgcttctcttatgaaagaagcagatcatcagttccccctcctccaccctgggctgtcgcgcctatcctcgactcgcacctcaacacgtacaacggcaactgctaaaaatgcggttgctctctttttaacctggacgcagatactttgggttaacaggacgcccaaaatgacagacgcccccaagcctaaagcataccgctatcaccggttcagcacgcccgagcag

SEQ ID NO: 22659 - DNA, 260 bp, Unknown
  Description of Unknown: LeftRegion for integrase B9660 sequence
ctgtatgagccatcatctaagtgcaatgacagcgagcgtgatgcttacgttcaggaactccagcgtttgcttgcttgctatcagcttgccagctcggatgataaaaatgtcgtttgggcagtgctgaacaaatatgcaccgcatatcgacacgatatagccccaggcatggggcttttcttgttgtatgggaaaaacattatgagaaataaatcattggcaggaagagccaataaccgggcagaacgccctcgtaaggtt

SEQ ID NO: 22660 - DNA, 260 bp, Unknown
  Description of Unknown: LeftRegion for integrase B9661 sequence
gagagaggccaacccagagaaggcccgggagatgaacgctgcgcacaaccgggactacagacagagggccaagggccgcccagagcagtgaacaacccccgtccatgagggcgggggttcgctgtttccgctggtcaagcctggtgtaccctgtgggggagccgctaaggcgtagcccccacgggggataccatcggaccatgagactaggagtcgtgaccggtatggacgtccacgccggagtgtatggccgccagtcc

SEQ ID NO: 22661 - DNA, 260 bp, Unknown
  Description of Unknown: LeftRegion for integrase B9662 sequence
aaaagttttagagaaattcaaaatatctgatgaggaattagatattcttatagaagcaggggttgaagaattgaataggttaaaaaatattgaaaacaataaactatcaacataagagggtaataccctcttttttcttgcattaacataagtaatgttatataataagtgtaatacaaaatgatgtgaggagtgttaatatgaatatccttgaaatgcgggatttgttattaaatcaaggaaaaacaatttatgattta

SEQ ID NO: 22662 - DNA, 260 bp, Unknown
  Description of Unknown: LeftRegion for integrase B9663 sequence
tcaagccacatacataccagtatcacatcttcacaatcaaagagtgtcaggaactcttgctacttgcaaagaacggacatataggagaaatcaacaaccgcatacagcacgctacggctcgtttccttgcggataattcccctgacaataaaaatattgctgtttgagataaagcccctgcatggggcttttcgttttatatggaggtatatattatggcgtacaacgcacaaaacaagaccggtgcaagggtggctatc

SEQ ID NO: 22663 - DNA, 260 bp, Unknown
  Description of Unknown: LeftRegion for integrase B9664 sequence
  modified_base (98)..(98): a, c, t, g, unknown or other
ctcgctgctggcgctcggcccggttcgggtcgatttcgacggcatcaaagacgccgttattcattgtattcaaggtgatgaatgtccccccccccccngtatatccattttgtctataattacgaagcagctccgggaccacggagctgcttcaacgataaagggggactatcatgaaaaaagggattgctctccgcaccgtgaaaaagactgcggaggagctgctcaacaccatcaaggtggcgatctatatccgggtc

SEQ ID NO: 22664 - DNA, 260 bp, Unknown
  Description of Unknown: LeftRegion for integrase B9665 sequence
acaggagtacggcatgatcactcacgccaaggagcggacctacgaaggagtagcgcgtgccgcatgggccctggcgcagcaggaggccagcgccctggagcggatagagcactttctggaaaatggggattctgaaagtgcgctcacggccatgaaagacttcttcggtcagaaaaaaccgagcgcgagggctcaactgtatgacaccgaggaaagaaaacgagtcgtttgaccggattccggtcgtagcgctgattcgc

SEQ ID NO: 22665 - DNA, 260 bp, Unknown
  Description of Unknown: LeftRegion for integrase B9666 sequence
cctgccggagtttgacgaggagcttttcaatcagcagctggcttacgcaacggtgcccgcagacaatcagattgtctttcacttccgggatgggcacgaggcttccagaaccttcgtccagaagcgccaaatgccacgccagaccgaggagaggaagaagcacatgagcgaggtcatgaaagcgaaatggagggaacgccatgccgaaaacgactaagaagattaccaccatcccggctacgctgacccgcttcacagct

SEQ ID NO: 22666 - DNA, 260 bp, Unknown
  Description of Unknown: LeftRegion for integrase B9667 sequence
cacgccggagcaggaagcggcaaaacgccgggagctggaacagcagctttatgaggtgttccgcaaatatgccgacaaacggcagagtgaggaagccggagcataagattttccgaagccatcgttgatttgcggggctgctgacggtataataaaggtgtcagcagctccgtttcttttttaagaaaaggagcgacaatatgaataatcgaatagacgcaatctatgcaaggcaatcggtagacaaaaaggacagcatt

SEQ ID NO: 22667 - DNA, 260 bp, Unknown
  Description of Unknown: LeftRegion for integrase B9668 sequence
cctgccggagtttgacgaggagcttttcaatcagcagctggcttacgcaacggtgcccgcagacaatcagattgtctttcacttccgggatgggcacgaggcttccagaaccttcgtccagaagcgccaaatgccacgccagaccgaggagagaaagaagcacatgagcgaggtcatgaaagcgaactggagggaacgccatgccgaaaacgactaagaagattaccaccatcccggctacgctgacccgcttcacagct

SEQ ID NO: 22668 - DNA, 260 bp, Unknown
  Description of Unknown: LeftRegion for integrase B9669 sequence
ccaccccgcccggaccccggcgaggcaggatggaaccatggatctccgaatcttcaccgaaccccagcagggcgccacctacgagaccctgctcaccgtggcgaaggccaccgaggatctcgggttcgacgcgttcttcggaaccggtaccgtatctacccatggagctagttgccctgggggacagggaccaccaagacatggtcagggcagtgacctacggccggcagagccacaagagcgagactgacagccaggca

SEQ ID NO: 22669 - DNA, 260 bp, Unknown
  Description of Unknown: LeftRegion for integrase B9670 sequence
cgccgaccgatgtaacctcttccaacatcaccagatcaggcgactccgtggccagcgaccagggcgggaccggccccacagctgaatgttacgacggcacgacaagctacagccatcatccgagtgggacgtgctcccaccacggtggcgtcgccacctgggatgatacgttgccgcatgcgagccaataggccgcctctttgaccatacaacgtcgcccatcctcctccgacccgccgccgcccggcaccccggccgcg

SEQ ID NO: 22670 - DNA, 260 bp, Unknown
  Description of Unknown: LeftRegion for integrase B9671 sequence
cctgccggagtttgacgaggagcttttcaatcagcatctggcttacgcgacggtgcccgcagacaatcagattgtctttcacttccgggatgggcgcgaggtttccagaaccttcgtccagaagcgccagatgccgcgccagactgaggagaggaagaagcacatgagcgaggtcatgaaagcgaaatggagggaacgccatgccgaaaacgactaagaagattaccaccatcccggctacgctgacccgcttcacagct

SEQ ID NO: 22671 - DNA, 260 bp, Unknown
  Description of Unknown: LeftRegion for integrase B9672 sequence
aggtcttcgggagagtgtaaacccgtccacccttgagatttgttggtttacagggtatgcttggagtggacaatgaaacaggggcttccctggtggaacaggaaaacccctcgaccccgcaggaacgtgacttcactgcgattacctccattatcgcacatggtcacgtaccagggtagaaagcacagtacgtgactgctatgctcgccacttcaacgctgcccattgatccgcctagcggagaatgggagtatctcttg

SEQ ID NO: 22672 - DNA, 260 bp, Unknown
  Description of Unknown: LeftRegion for integrase B9673 sequence
gcggctacttcaattggcggcactgacgatcgtggccgatcacgaacgaacgtaacgtcaaattggttaagcttccttaaccccttggaatgtagcaatgtcgcgtgagtccgaatccgaggcttggctggagctggcaagagcaatcgggcgggcggcggcacgggatctgtttcagcggacttatggggtagtccaccatgacgaaaaagagagcggcactttacgcgaggttctcgagcgatctgcaaaaagatcga

SEQ ID NO: 22673 - DNA, 260 bp, Unknown
  Description of Unknown: LeftRegion for integrase B9674 sequence
gttacatcccacaaacgcggcgaaaacgagcaatgaaccgtcgaaatggacgctgcgtcaattggttaacgcttccttaaccgccggaactatagcaatgtcgcgtgagtccgaatccgaggcttggctggaactggcaagagccatcgggcgggcggcggcgcgagatctgtttcagcggacttatggggtagtccaccatgacgaaaaagagggcggcactttacgcgaggtattcgagcgatctgcaaaaagatcga

SEQ ID NO: 22674 - DNA, 197 bp, Unknown
  Description of Unknown: LeftRegion for integrase B9675 sequence
cccttaaaaacacgaaaatcgttttttaaagttgaaggctaaatttttttggaaaaaacaaaagtttctttgtagaaagtttggtaatttccaaaaatatacgtacctttgcatcagaattttaaaaattgacaattatgaagaaagtaatcggttatgtaagggtaagcactgacaagcaggacttacaaaggcaa

SEQ ID NO: 22675 - DNA, 260 bp, Unknown
  Description of Unknown: LeftRegion for integrase B9676 sequence
acctcacccctcacgccaacgccattccccccgcaatggcccaccaataaattgtgcgtagggcagcgccatttcggcatgtcccggaagacccatttcgtgtgccatgccttacggggcaggggccagtatcctcattacagtgattcgctggatttggcaaaaagccaccagtaacattgtaacgaggagaacataccgtgaaaaaccagcaaaaaaccgcctatagttatgtccgcttttcaaccccccgccagcag

SEQ ID NO: 22676 - DNA, 260 bp, Unknown
  Description of Unknown: LeftRegion for integrase B9677 sequence
ccaaaaggcgaataagcgaccacggcattatgtggtgtaagtctttgggtaaatgtataacataaacgacttagacaatgatttgataaatgaattcaagactttaggaatcagtgatgaaaatgatatgataatcatactgaacggacttgatggcttggctgaaataggatacacaatttacaaaaagggaagaaacgatgattaagaaaacaaggaaacttagccacgatgaaaagatagtggagaaaaggaaacaa

SEQ ID NO: 22677 - DNA, 260 bp, Unknown
  Description of Unknown: LeftRegion for integrase B9678 sequence
gagcttgctggtcgcgaagcacccaaacaggcgcaaggcataccgatctacaccgagaacgagcaacgcattatcaatgcctacagatcggcgacgccccaggggcgagcggccatagaggcggtggcacaatcacaagaggggatggtggggaaacctacgtctgatctcgcagacaccggctaaatggacctaaaagaatgcgccgcccgacctcgcaaatcgggcggcgcagcgtgcctattggcgtaggcaccatg

SEQ ID NO: 22678 - DNA, 260 bp, Unknown; identical to SEQ ID NO: 13960
  Description of Unknown: LeftRegion for integrase B9679 sequence

SEQ ID NO: 22679 - DNA, 260 bp, Unknown
  Description of Unknown: LeftRegion for integrase B9680 sequence
aaccctagaaagatttataaagaataaacttatgataaaagaaaagatggaaaaggaagctgattactttgcaagtgaacttctgttatctaatattgatgactatgtaattgaaggattaacttgcactcagctttctattttattatctgttcccgagaaatatgtaaagtataaattagctaaataaggagggtatcatgctagctgcaatttattcccgtaaatctaagttttctgagaaaggagaatcagttgaa

SEQ ID NO: 22680 - DNA, 260 bp, Unknown
  Description of Unknown: LeftRegion for integrase B9681 sequence
atccgcgaaggtcgaactcgaagcaccggaagcctcgtgactgcgccggcgaacaggcccgtgcgcatcgcgcgcgcaacgatcaccgaggtcgagacgcagaaagttctcgtgttcgatcctgttcggcgacagcgccagctcgcggcgttgatgaagctgctcgacagcggcgacgttccgcgcgagggttcgaagccgtgagagccgtcgtgtacgcgcgcgtgagctcggcgatccaacgcgatcgcgagaccatc

SEQ ID NO: 22681 - DNA, 260 bp, Unknown
  Description of Unknown: LeftRegion for integrase B9682 sequence
atggaaatcgaacatgaatatgtaataacagatatagaagaagctatggaagtgattttaaatcaagaaaacttaattttgcgtggagaaatcctagatgatgaatcaaagattcagctatcaaacagtataaaaatggccttacaatttgctgttgaagcacaaaaacgaaataataaattgatataaggggtgctcttatgattgctgcaatatattcacgtaaatctaagttctccgagaaaggagaaagtgtagaa

SEQ ID NO: 22682 - DNA, 260 bp, Unknown
  Description of Unknown: LeftRegion for integrase B9683 sequence
ttgtcggtgtaacaaatgtcgaaactcctaatccaaactttccggaagatatacttctccttgttcaagcatacactcgtgcctcagatgctgataaaacagttttatgggcattatttgacaaatatttgtccccgcttgataaagatgtgcttaatgaggttttatcgaataatgatacaaattaagggttttacgatatgaataaaataattgatacactaaatacacaaaaagcggctatctatattagagtatct

SEQ ID NO: 22683 - DNA, 260 bp, Unknown
  Description of Unknown: LeftRegion for integrase B9684 sequence
cgaccttggccttactaatgttttgtattatgtaaatggttcttgtctttccgaaatcgacccggacaaatattccggatggaaatatgctatttatctcaggattgacgattccatccagcagacgcttgatgatcttccttccgatccatgaagatttaacgttctaatctgattattccgaaaatgtcggaggtaatatgaaaaaggccgccgtcccgtcctgctctccccgcaccgccgtcgcctatgcccgctat

SEQ ID NO: 22684 - DNA, 260 bp, Unknown
  Description of Unknown: LeftRegion for integrase B9685 sequence
agaagatatgataaaaaagaaaaaatatggattactttaagatttgaaaaagaacatgatcaaaaaaatgttgataatattattgattgtattgttaataatctataaaatgacttgtcctattgacaagtcttttttatttatggtatatatgattcaaatatgtaatatagaacaaaacacaaccaaggaggaaaaatatgtttaatatacaaggtaaaaaagctgttgcactatacagagtgtcaacagaaagacaa

SEQ ID NO: 22685 - DNA, 260 bp, Unknown
  Description of Unknown: LeftRegion for integrase B9686 sequence
ttcttcatcggtggaccttgcagcgatcggaagccgggccgggcgacgatagcccagaaaatctcgtcgcaatactattcacgtaagtttttccgttacctggctttgcgtcgcgccgttcaacaaaagcgcccgaccataccacatgctcgtcaatggccgcaagaccaagtttcaacaggatttaggttcgtttaactatgccaagcgtccaaaaaacaggcaaaggcaataccccccgtccttgggttatctacaca

SEQ ID NO: 22686 - DNA, 260 bp, Unknown; identical to SEQ ID NO: 14095
  Description of Unknown: LeftRegion for integrase B9687 sequence

SEQ ID NO: 22687 - DNA, 260 bp, Unknown
  Description of Unknown: LeftRegion for integrase B9688 sequence
agtggctttctttaaatctgccgcgtgatatgcgggcgcaatatgaaaacgacccgttatttgctgcgcaaaagaagaaaaccgctatacattggaaagcaacccttgcgggcgtatctgatattgataaattcaaagatttaatcgtcgtggcttgtcgccctgcgcctgctgcgtcgtaatagaaaggataaaccacgatgaaagataataaggcgggatttgacgggcgtattacggctttatatacgcgcgtttcg

SEQ ID NO: 22688 - DNA, 260 bp, Unknown; identical to SEQ ID NO: 15072
  Description of Unknown: LeftRegion for integrase B9689 sequence

SEQ ID NO: 22689 - DNA, 260 bp, Unknown
  Description of Unknown: LeftRegion for integrase B9690 sequence
ccggggacagatttttagaagataatgaagattcgcaggaagatcgcggcggtttcgaggaagagctgcgccgtctttccgtgtgctacaggtatgcttccgccgctgatcgtggcgtaatatgggctgtattgaacaaatacgttcctatgctaacggctgacgggctcctgtaatctatttccggctgccgaaagaaaatggcaagcctatacaaagaagaggctggcactccgctgcttaaggtcgctatctatatc

SEQ ID NO: 22690 - DNA, 260 bp, Unknown; identical to SEQ ID NO: 14114
  Description of Unknown: LeftRegion for integrase B9691 sequence

SEQ ID NO: 22691 - DNA, 260 bp, Unknown; identical to SEQ ID NO: 14111
  Description of Unknown: LeftRegion for integrase B9692 sequence

SEQ ID NO: 22692 - DNA, 61 bp, Unknown
  Description of Unknown: LeftRegion for integrase B9693 sequence
gatgacgcaaagggccgcactgtacgccaggttctcgagcgatctgcaaaaggatcgaagc

SEQ ID NO: 22693 - DNA, 260 bp, Unknown
  Description of Unknown: LeftRegion for integrase B9694 sequence
tgatcaatataaaatgtgggttgctttagaattcccattggaaggagacaaagaaatagataaaacaataactcaaatgttgagtgatgcatatattcaaaactgtcttagataagacagttttttctttcttgactcatatgcaaaatgtatgttaaataagacataatgaatacataattaaggctggtgtaatagctatggcgaatggattaatcaagaatcacaatcaaaatctacaattaaaacgtgtagctgct

SEQ ID NO: 22694 - DNA, 260 bp, Unknown; identical to SEQ ID NO: 13552
  Description of Unknown: LeftRegion for integrase B9695 sequence

SEQ ID NO: 22695 - DNA, 260 bp, Unknown
  Description of Unknown: LeftRegion for integrase B9696 sequence
ggctactggctgtaaaatgctggtagccctcattttttagttgtatctagtatataaggggtgtataatagatagaaactgaaaacagcctcataaagccctctattttatcgagggtaaagaagtctacacctaatatataaaaatggctgtatgaggcacacaggagctcacagaactattacaggagggtaaacaggatggcatacaggaaaataacggatataagagatactattggtatgagagcggtattttat

SEQ ID NO: 22696 - DNA, 260 bp, Unknown
  Description of Unknown: LeftRegion for integrase B9697 sequence
aaataatataatcagcgatgaaaatggtgcattgattattataaatatcttatatgaacaaggcattattaataaaagaacttatgataatattttgaaaaagtataagattacataatatagaaaaatactgttgaaaataaggcttattttatatataatagtatataaaataggctttatttttgaaaggagataacatgaataattatatagcgtccctcgatagaaatagaccaagaaatattgctttttatgga

SEQ ID NO: 22697 - DNA, 260 bp, Unknown; identical to SEQ ID NO: 13552
  Description of Unknown: LeftRegion for integrase B9698 sequence

SEQ ID NO: 22698 - DNA, 260 bp, Unknown; identical to SEQ ID NO: 14186
  Description of Unknown: LeftRegion for integrase B9699 sequence

SEQ ID NO: 22699 - DNA, 260 bp, Unknown
  Description of Unknown: LeftRegion for integrase B9700 sequence
accaccgaccgccgcgggccgcagtcgcggcttgaccgccggatgacatgacactacgatgggagggacatgaccgatgcgtcggcgcccgagtagaccccgaacacggccgccggggggagagacgatctatgtagatcgcccctggccgacgcccgagaacctcgccgcattgcggcgactgctggagtccgtatcccatggcacggaagacgaccccgaccgcgaagggactggccgcgacctacagccgggtgagc

SEQ ID NO: 22700 - DNA, 243 bp, Unknown
  Description of Unknown: LeftRegion for integrase B9701 sequence
tcagtctcgcaataaaaacacatacggggcatcgcagcagcggtgccctaaaactatatctaacggttacgttacgtttacggtataggttacggttacggtatggttacggttatacacggaacgtccgtggatttttggtcggacgttcctatggaatatcccgaaaaaggaggacttcgtatggcttctcgcatcgccgagaaactggccgcgaagaaggcggccatctatattcgcgtc

SEQ ID NO: 22701 - DNA, 260 bp, Unknown
  Description of Unknown: LeftRegion for integrase B9702 sequence
cgcattctgcactacagtgcaacgctggcggtctttcggacatgggtacgcaatggctggatcacggaagacgattttcggttgctggaagctaagatggcggaacgctacgggctatcaaacaacagtatatatcgtcaaaccccttgataattctggctttcagagcgaatataccatgaccgaagggaggaatcggcatggagcgaatcattacaagggttccagtacaaaactcacaagcgctcaggcttaccaag

SEQ ID NO: 22702 - DNA, 260 bp, Unknown
  Description of Unknown: LeftRegion for integrase B9703 sequence
ccgcaacgtcatcatcaacgtcgagcgcggctatcccctgccgcggcccaagaccattcgcaagctcgccgccgccttcgacgtgtcggtcgcgcagctcaccgagggcgagtaaaaaagacagagaaaagccccgcgccgctcgtgttcggccggggccatggcagatccaacagtgtgaaaggactgaacctgcagctatgagtgtaatcggtgtcctgatccgcaattcaaccgctaagcaggtcggcaactaccgc

SEQ ID NO: 22703 - DNA, 260 bp, Unknown; identical to SEQ ID NO: 13390
  Description of Unknown: LeftRegion for integrase B9704 sequence

SEQ ID NO: 22704 - DNA, 260 bp, Unknown; identical to SEQ ID NO: 13390
  Description of Unknown: LeftRegion for integrase B9705 sequence

SEQ ID NO: 22705 - DNA, 260 bp, Unknown
  Description of Unknown: LeftRegion for integrase B9706 sequence
ttgacagcccggccagcgcgccgggcttttttgtcgcccgctatatgaatggcggggagagcgccgccgaatttgcgtcaagccacaaaattcaggaacgaagtaacagtcccaggcggcttatattttcggaccccttcgccttcgcagttgttgcctcatatatgatggccacggctccacttacatctgtcccgaccatgaagctccaacccttcgtcatcagctacgcccggtactcctccaccgctcaacgcgag

SEQ ID NO: 22706 - DNA, 260 bp, Unknown
  Description of Unknown: LeftRegion for integrase B9707 sequence
actaaggcactatgaaaaaagcaccagctctacaggtcgaagaaatcagcggcaatcaatatccagatcttgatgcagctcaacgagcagcattgtcgctgatttctgctgagcttcagtctgttattcaaagcctgttagagcaaggtgtattggtaaatatcaatggcaagatcatccccaatcaacaaggataatgcatgaaagatcattactcctctcccccgcctggacttcccgagcgatcgcgtgtatgggct

SEQ ID NO: 22707 - DNA, 260 bp, Unknown
  Description of Unknown: LeftRegion for integrase B9708 sequence
gcccactacgaaagagttctttgctttcagttttatagtctgccccgtcatcaaatcccagggagtccagaatctcacacactgagttcatgcttgccagagcgggcggctataatcgaaccctagcaagtcgaattatagcataagcccgctcaattttatagggcttattttttgtactcatttttaggggtagtgctatgatcgataatatcaacagccggaagactgccctctatgtccgtgtctcgaccgtttac

SEQ ID NO: 22708 - DNA, 260 bp, Unknown
  Description of Unknown: LeftRegion for integrase B9709 sequence
acggagcacgcggggagccccgctccacacccgctcatccgcctccccttcccgcttgagcaggttgagccgaccggcccgcaggcgccgcaggcgccgcaggcgccgcacaggtaccgcgctctcgtgcggtccctggccgctctcgtggtggccgatctcaccgaccccaaggacgtgtagcttcaaggccctccctcatgcgcgccgccatctacgcccgccgctcgaccgatgagcaccaggccgccagcctcgac

SEQ ID NO: 22709 - DNA, 260 bp, Unknown
  Description of Unknown: LeftRegion for integrase B9710 sequence
gcgctgcgctgcgccgacttgaccaacgacactatcgcccgcctgtggccaaagatctgcgcccgcctcgcccacggcgtcgcgctgctgcccgtgccggcgaaagccgtgcagtgattgaccagtggagcgatctaacctggccgcgaacctgaaagcgcgtcttgcccccgaattgacatgggtggagccgcgtgacgatgatgccgcgcgtcgtgctgaggcggcgctcatcgaactcgtcgaggcaatggccgtgc

SEQ ID NO: 22710 - DNA, 260 bp, Unknown
  Description of Unknown: LeftRegion for integrase B9711 sequence
actcctctctttgatgtgttcttcattgatggttaaatagcaaaagacggacgatcgcaaagagccatcctccgtctttatatatattatgattacggtatataggttacgattccgtttacggttacggttgcgccggaatttccgtggaaattccgtggaaattcctgtgattttccataagataaggtggtgtcagagtggatgcatccagaagcctatcgaaaaagaaggcggcaatatacactcgtgtttctaca

SEQ ID NO: 22711 - DNA, 220 bp, Unknown
  Description of Unknown: LeftRegion for integrase B9712 sequence
gccgcgagatcctgtccgacgacatgcggccgcgcgaggtcatttaggaagcggctgatccggcaccggcctactaccactgcagaccggacaacggccgaccccgaggggtcaaggggacgactgttgtagaccatatatcaccctgctatcatgagacatgagcaacgcagcagaaaccggctacgctattgtttacgttagatgttctaaagatgag

SEQ ID NO: 22712 - DNA, 260 bp, Unknown
  Description of Unknown: LeftRegion for integrase B9713 sequence
ctggatgactgtgctgcatttgaaaaagcggtggcatctctgattgcctgcctgagaagctaatatatatatcttcttatagatttatctataagaagtggttacggttaggttacggttacggttagacgaggatttccaaaatttttccagcggatcgtccgtgtgacaacccacggacagtcacatttggaggcaaaatggcttatttgaaagacttcacagcccggaaggtggcaatctatatccgggtttctaca

SEQ ID NO: 22713 - DNA, 260 bp, Unknown
  Description of Unknown: LeftRegion for integrase B9714 sequence
tcggccaatgtcagcattgcggaatcttttttctggccaaacgcgaacatcccagagggagacttcgcacagaaggttgtagcaaagatcatgcagacgctcacaacaaagaggctgacaaagaaaaagctcgaacacgcgctcgtaagcagcgaagacgccagaaagaatcgaaatcgcgtgccaggaggagaagctaaatgagagcggccctatacggtcgattcagcactgaccatcagcgactggaatccattgca

SEQ ID NO: 22714 - DNA, 260 bp, Unknown
  Description of Unknown: LeftRegion for integrase B9715 sequence
ccccgcgcccggtggatatccgtcgccgtgtggggactggatatttcgccggatgatccgcgtttttctgctcaaaagaacaaacaggcgcggttctggaaggcttcaatccgcgacgtgtccgatctgtctgattttgacgacgttgttgtcgcgtcctgctgccagaatatgaactaatatcagaaaaggatcaagccatgaatgaaaagaaaaagattgtcgcattatatacccgcgtttcgaccggatatcagatc

SEQ ID NO: 22715 - DNA, 260 bp, Unknown
  Description of Unknown: LeftRegion for integrase B9716 sequence
gaagaagggtcgaatatcgcgatggcatagcgcatatcattgtggacgcgtccaggcggccgccgtgatgatcatttcggaagacataaaaagcccgttccggcatagccgaaacgggccgcaaaaccagccaacaccacttgtccgatttgcatatatattatatcgcgggcgtggcgtgaagtcaaggagaataatagatgaaacgctcaaattccacgcataaaaatacagatccggtaaatccggccaggacgaag

SEQ ID NO: 22716 - DNA, 260 bp, Unknown
  Description of Unknown: LeftRegion for integrase B9717 sequence
aacctccgtactgtcaaattttgtgtcactgtttataacaaactgtcccattacagtactggcgaaaaccagtgtcaccagaatacagattacttttttcattatactttcaatttaaacgttacacccctataaccaaaaaaaactgcgattttctgcaggtcaaacgttaaaaattgttaaaaattttaggcggctatttgacaagaaaaactgtaatttgttggaacataagtagtagaccattgttgcatccttat

SEQ ID NO: 22717 - DNA, 260 bp, Unknown
  Description of Unknown: LeftRegion for integrase B9718 sequence
gcctcactttcaaaaacacctttgaaagtaatatagcacttttttgtaaaaaaatcaagtaatatgatagaaaaccgcacaaaagttgtgaactcagccgaactagccccccaacacacatatccgcgtgcgttggggaattttttatttgctacaatggggatagaacatctgacagtctccgaaaggaggctggctctatgccaagagcaaagaaagcggcgatatactgccgtgtatctaccattcatcaggtagac

SEQ ID NO: 22718 - DNA, 260 bp, Unknown
  Description of Unknown: LeftRegion for integrase B9719 sequence
tgtaaacatatgtattgtctggctatggagcttggtctcctggatggacttccggtctatgataaaagatcggcttcctatgatcctgattctgaattgaagagatatcgttctctgtatgaaagtggtcagatcagcgcggatgcatatgtgaaagtctgcagcgcgcttgcgaaattgaagaaataaaaaaccgcccggtgctaccaacaccaggcgacctgttcttccttgcggaagctgtaaactctacgaataaa

SEQ ID NO: 22719 - DNA, 260 bp, Unknown
  Description of Unknown: LeftRegion for integrase B9720 sequence
gaaattaactcctacacttcaatcaaagcttcttatatatctaaatggaatggtagatgctttgtctcctactgtatcaactgacatagaaaaaaggttatcagtatagaaaaatataaagaagaaaataaaacgcccatataggctgtaataaccatgtacaacactttataaatataccggatgggagttaaaataaaatgcagaatagttctgataaaaatataaatagagttgcaatatacatacgagtctctaca

SEQ ID NO: 22720 - DNA, 260 bp, Unknown
  Description of Unknown: LeftRegion for integrase B9721 sequence
taaacgcattatcaagagtttttttgggatgattcttgtcgatggtaaaaatcatcttaaatatgtaattgataatacattttcaattattgatgagttgcatgaacaaattgataaactcaacaaatgtaaacctttcttaaaaggtcaatattacgatgagacaacaaataatacagtaacctacgaggtaattaaatatgagggacattaaagttattgaatccaaacaatcaaaaggatcaaaacatattatcaaa

SEQ ID NO: 22721 - DNA, 260 bp, Unknown
  Description of Unknown: LeftRegion for integrase B9722 sequence
ggccgacacgggcatcttcatcaagaagcgtcgcaagtgaaattaatttcatgggcaaggtcatcaagctgacaagtcgggggccggagaaagtcccggcccccaagaaactcacaccgcagatgattgcgctgataaaggcccttgccagagaaggggcacgtgaggaccatagggcatcattgaaaaatgggtagcccatgaatcgtgcagccatctacgctcgtttttcgactgaccagcagaacgaaaagtccacg

SEQ ID NO: 22722 - DNA, 260 bp, Unknown
  Description of Unknown: LeftRegion for integrase B9723 sequence
cgccaaggtcaagatggatatggtctccgcctggtggttcgggacgatcgtttaaaatcccgcgtgcaccggcagcctgcgcaattttcaacacggcctgacgcacttcctcttctgtgccatgaaatataatcggtgcttgggtgatcattaagcctcctgaatatgatctctaaatatttgttctaattataatccacatgaataaccattcctttcccccaggtagcctggcagcggcctatttccgagactcgggc

SEQ ID NO: 22723 - DNA, 260 bp, Unknown
  Description of Unknown: LeftRegion for integrase B9724 sequence
ggggatttttaatgcagttctttggggtcagggattgcgtataaacgacctttctgccagtttggtgtcgcggtcaatccccaataaaatcaacgatttagaccattatgtgaaaaagaacaaaagaattcttgacttctgattgacataatgggatattgtccacgttaagacggtcaaacgaaaataaaaaactgaatatgaaaaacgcatacagttacgtcaggtggtcaaccctttcacaaggtgaaacgggtcgc

SEQ ID NO: 22724 - DNA, 260 bp, Unknown
  Description of Unknown: LeftRegion for integrase B9725 sequence
ttaaccgggggattgctgttgaccattggtccatggtattatgagcaagagcgaacacaaacggtgcgggctaattcggaaagtcagcccagctaacccgcgcagtttggagcatccaagtcacggggatgctttgggggaattggcagaggcccttggccgcgcacttgcggacaagcttgcaaaagaaatgaccaatgatgaaacgcgcagcactgtacgcccgattttccagcgacctgcaaaaagatcggtccata

SEQ ID NO: 22725 - DNA, 260 bp, Unknown
  Description of Unknown: LeftRegion for integrase B9726 sequence
gagaaaataaaatcccccattttgaaacccccatgatacattgatatcatggggtttttaatgatatgaatatggtgtccaaatagaaagttggacgaatccatcttttcaagtggacacataggacaatccttgatataattgggtttcaggtggtttgtccacctgaacacacaacttgagaggatgaaacacacatcatggcagaccatattgaaatgtttaaacagattaaaaaagtagcaggatttttgaggata

SEQ ID NO: 22726 - DNA, 260 bp, Unknown
  Description of Unknown: LeftRegion for integrase B9727 sequence
tgatttcgccacgcttgaaagaatcgccgatttcttcggtgtcgataccgattatcttatcgggcgatctgtccgttctgttgccctggataaggcggaagtcgatctgattgaaagattgcgcctgctgcctgaaggcgaaaagaatatgattcttcgggctgttgggattattgactaatatttgaaaggatcaaaccatgaatgaacaaaagactatcgcaatatatacccgcgtttcaaccgggtatcaggtcgac

SEQ ID NO: 22727 - DNA, 260 bp, Unknown
  Description of Unknown: LeftRegion for integrase B9728 sequence
tagagtactttaaaaagcaatgattatgaaacagacagtagaagaagcagcaaaggaaaacatactgtttaatcacagaacagttgacagaactttgttgggtaaagatttggcaaggtttggagaaattaattaagctaataacttttatgattaaatttaaagtgctatatttgtgctgaaattcaagcactaagaagatgaaacgagcagcattattgctaagatgtagcaccaatatacaggattataaccgtcag

SEQ ID NO: 22728 - DNA, 260 bp, Unknown
  Description of Unknown: LeftRegion for integrase B9729 sequence
acaaataaggttccgcctcctatatgtccccctgctaaccgtggcaaaattggcatcattcgacacctgcctgttgatgatccccgcaatccgaaccacccgagccatgatgacaagtggttggagttggcaaggtctctaggtcgggcaatggcagattttgaatgggatcggctcaacggtcctaatgggaaaacaaaatgaagaccgcagttatttatgcgagatattctagcgatcttcaaaaagatcgttctatc

SEQ ID NO: 22729 - DNA, 260 bp, Unknown
  Description of Unknown: LeftRegion for integrase B9730 sequence
tttaagtatacggcgcgggcgcgttggatttctgttgatgttttgggattaaatatttcggcttcggatcccttattcgctgcgcaaaagaacaagaatcaaaggttttggaaggctgcaattcaggacgtgtctgaactttcgaaatttgatgatattgttttttcttcttttcaaaagaattccgggggattgatttaatgaacgaaaacaaaacagtcgccatttatacccgcgtttcgaccgggtatcaggttgac

SEQ ID NO: 22730 - DNA, 260 bp, Unknown
  Description of Unknown: LeftRegion for integrase B9731 sequence
tttaagtatacggcgcggtcgcgttggatttctgttgatgtttttggattaaatatttcaccttcggatcccttattcgctgcgcaaaagaacaagaatcaaaggttttggaaagctgcaattcaggacgtgtccgaactttcgaaatttgatgatattgttttttcttcttttcaaaagaattccgggggattgatttaatgaacgaaaacaaaacagtcgccatttatacccgtgtttcgaccgggtatcaggttgac

SEQ ID NO: 22731 - DNA, 260 bp, Unknown
  Description of Unknown: LeftRegion for integrase B9732 sequence
tcatactgcctgaccgggaaggtgtccagagtctcggacatcattgtggaagcgggcctgtgcgcgggcaactccaactgcgtcctgtgcgggaagctcatggaaaacatcgaaaaaggaatttttgttgcagttgcaaaagacgggatgccactggatatgtgacatcccgtcatctttaacagaaagcggaggacctattgcctgatatcgaaagaacccccttgcagaacagagcggcaatctacataagggtatcc

SEQ ID NO: 22732 - DNA, 260 bp, Unknown
  Description of Unknown: LeftRegion for integrase B9733 sequence
gatcctttgagaccgctcccgccggagctgactggcctggtgagggagcgggcgaagctgtatggcgacagcttcatgctggacgtcgcgccctacacgaccgctttcatgcatcacgacctggcgcccgtctccgatgaggagaggccgtcgcccgcccgcctgtttccggaccgcctgtgggcgccgcgcagcgagccatgacccccgccatctacgcccgatactccaccgatctgcagcgcgaggaatccattgag

SEQ ID NO: 22733 - DNA, 260 bp, Unknown
  Description of Unknown: LeftRegion for integrase B9734 sequence
ctcataaacaaaattaatacctttgtgaacagcacatggataatgatagcatcgttagtaatatctatacttattttattttggaaatagaaacctgctttggcaggttttttattcaagttttttatataattattattttaatttattgctttttgtgatataatataaataaatacacattatcaaaggtgattataatgagcgataaattgaaagttgtggcgtatgcaagggttagtacatcgtcaaaagatcaa

SEQ ID NO: 22734 - DNA, 260 bp, Unknown
  Description of Unknown: LeftRegion for integrase B9735 sequence
ctcggcggaatcaatgccgacagcgtcacaaagaaaaccaacttccttgttttgggaaataatgacctgtgttcctcaatcaaagacggcaaaagttccaaacataaaaaagccgaaaagtatattttgggcggcgcagacttgtctattatcccggaaaatgttttttatgatatgttagacgaataaagggtgattgtatgcgggcttttatttactgccgattttccagccataagcagcaagagcttagcatagaa

SEQ ID NO: 22735 - DNA, 260 bp, Unknown
  Description of Unknown: LeftRegion for integrase B9736 sequence
gtcggcacatggaaaaatgatggtgaagattaccttctttctctcaacatggatcatcccgtgaaatggtatgccatgctgatagacggtttcctttttgtacgtcctcatgattccccggatcatcttctgcgtttcagacctctctgtacattctctcctgatactgattatctgcagatcccgtaaaggaggccgccatgaatcccgaatataaaccggctgtcatatatgcccgttacagcagctcctcccagact

SEQ ID NO: 22736 - DNA, 260 bp, Unknown
  Description of Unknown: LeftRegion for integrase B9737 sequence
gtcgctcgcggcgtcggagtgcccactccgaaaacgtaccgctcactcccattgacaacgattcctgagtgatagtagagtctcaatcgttctagagaaactaagggcgcgcggctcctcaacaagacaactctcccttgtgtgagccgcgcgcagaaagtggaacgagtgagtgtcggaccgccagcctggtctcgtggatgcgttactcgaagtgggacggcagcgccagcaagtcctcgcgaatcttcgaagtgctc

SEQ ID NO: 22737 - DNA, 260 bp, Unknown
  Description of Unknown: LeftRegion for integrase B9738 sequence
cgagcgtgagctctaccatctcctgtccgtgctggcctgtgatgccgaagatcccaagagcgccgccctactggcaaaactgctgcccatgccacaagctacaggtcaacggcctggggatgtgtgtgtgtttgacaccacatcgcgaacgcggtgtactctcaaacacgtacatccgcgatctagggagagcgtgtggcatgccccctgtagatacaccgctaagaagaccagctcgatgcaagcgcgccatcatctac

SEQ ID NO: 22738 - DNA, 260 bp, Unknown
  Description of Unknown: LeftRegion for integrase B9739 sequence
aggagcaatgcgaagcgcttgtctgaagcgcccgtctcctaaggcatcccggatggttttcatccgccgctttgctgcggatccgcccgacgagctggcggagcacgtgcggatcgtctttgagccctggctcgccgcgctgtcgccggcggccggtgctacaatcaaagcggatccgaagcccacgacaggtgatcaacatgaagcaagcgggcgcgctgatccgcgtctcgacctcccgccaacttgagggcacgagc

SEQ ID NO: 22739 - DNA, 260 bp, Unknown
  Description of Unknown: LeftRegion for integrase B9740 sequence
gatgggggatccgtgaccttccagaaaggcgagcatcgggtcacggctctaatcatcctcggcaatgatgcagacgaacttgtcgccgattggagtttcaattctcccgaggccgactccgccttcgaggccggatgggatgcctttcgtaatgtctgggaaggcaagagcgttccaacgatgcaagaaggaggtgaaggatgagcaacgcaaagaagaccctctcaccttacgcgattagctacctccgattctcctcc

SEQ ID NO: 22740 - DNA, 260 bp, Unknown
  Description of Unknown: LeftRegion for integrase B9741 sequence
ggcggctatgaagaaggctgcagaggacgccggcgccaagttgacgcgcggcgatgccgacgccatcgtggagatcgcacggcagcgtgcggagcttctgcgacgagtgcaggaagcgctgctggcgaccgacgagcccaccgcggtgcgcctgatgcggcagtattgtggaatcgatcctgaagaggaaaccaaccccgatgagcgcagcgaaaagcagcagtcctagactcgatgccatcggcatcgtacgcgtcagt

SEQ ID NO: 22741 - DNA, 260 bp, Unknown
  Description of Unknown: LeftRegion for integrase B9742 sequence
taaaaggctgggagccttattttttttgccttttctattgctatttttatataggtggtgtataatagataggaactgagtaaaaagcggttttaagcccctcttttgatgagggtaaggaaatatacacctaagagcttaaagtggctgtacgaggcacacaggagcccacaggggcacttataaaggagagttacaggatggcttacaggagagtaaaggatcttatagatacgataggcttaagagctgtattttat

SEQ ID NO: 22742 - DNA, 260 bp, Unknown
  Description of Unknown: LeftRegion for integrase B9743 sequence
cgcagccttggccaacaggagcgatgaatgactctcgaaatccactggggaaaggttgctcgtcatctcaaggatgacgccgagcaaatcagagaacgcgcgataaccgcgtttcacggggacatcgctacgcagaaggaaatgcagacccgcgccgcgatcctggaatcgttggcgaacgcactttggtacggcctagagtgaaacgcgccgcgatctacgcccgcttctcaagcgacctacagtccgaccgctcgatc

SEQ ID NO: 22743 - DNA, 260 bp, Unknown
  Description of Unknown: LeftRegion for integrase B9744 sequence
aaccggcggccaactagtcagccccctgctcgacacattcgaatacatcggcatcgtggcgagcagcttctggcctcataagcgcacctgaagctcggcgcgtctcgtcgaattcgaatcaagtcggcgggccaccgaacaccaatattgcacctttcgtggcgcagtctcgcgtctgcaagtcaagcaggacagtgtccatgcagctagccgcacctcccaaagacgtcacgacggcaggatcgaaagctgctcagtac

SEQ ID NO: 22744 - DNA, 260 bp, Unknown
  Description of Unknown: LeftRegion for integrase B9745 sequence
tcaacgcacgacagaaaggtatctaaagaaatgaaaccttgctttaacgtgatttacgaagatgataacctaactattccagaaatcgacgactatgatttacttcattttggtctgtattttatgaagatatttgaacgtgaaattcagaaaacagaaccagaatttaaaattttaaatttttgatatagaatatcattatgaagattgcagtcgtttatattcgtgtttcgacagaagaacaatcgaaacacggcttt

SEQ ID NO: 22745 - DNA, 260 bp, Unknown
  Description of Unknown: LeftRegion for integrase B9746 sequence
ctacgggccgcgccatccgccacgccgaagctggcgacgggctcgcacctgattcgcgtctggcaaggcgatacacaccaggtcactgtgctggacgatgggtattggtatgccggcaagcgttggggcagcctgtcggccatcgccaaggcgatcactggcaccgcctggtctggacccgtgttcttcggaatcaagtcgtgaaacgtggatctttcgcctgtgcgatctacacccgtaagtcgtccgaggaagggctt

SEQ ID NO: 22746 - DNA, 260 bp, Unknown
  Description of Unknown: LeftRegion for integrase B9747 sequence
ctgaagcgtgtggccgcagaggccatgggggtaaaagcttttgatgaggatagatttcgggagaaagtggaatatatcgaagccggaaagccaaattgcctgactgtccattttaaggatgggagaacagaagagatttcttatacacctacgccgtccaagcgacgttccaaggcacggagaaaggagagcagagaaaagtggcgaagacagtaaggaccatcccggctaccatcagccgttatacggcggccccgatt

SEQ ID NO: 22747 - DNA, 260 bp, Unknown
  Description of Unknown: LeftRegion for integrase B9748 sequence
aggcgcattgagtcaaatcttaatattaacttagcacgggagggaagtaggttttcttcaggagatggaataccagatgaaaataacaaaatattgcggcttccattgattgctcaggcattgccgccccgtcgagctgtgccattgctcatcgttctatttgcaattgtttttgttttgttcattgttactcaattaggatggatttaatattgagctatctccctcccccatccactcttcctcctggctcgatcgta

SEQ ID NO: 22748 - DNA, 260 bp, Unknown
  Description of Unknown: LeftRegion for integrase B9749 sequence
ggtaaccacagttattaatcaggatgtagaaaattgggttgaagaggtgatatcaactaaagaattttatgattttgcagctacattaatgtacaagtataaaaaagcataaggtaaaacaagtatacctgtttttcccatggtatacttgtgcttatatacagacataaaagataaagcaatatggaggttatgatctattgcttatattaaagggagatcaaaagctaagtacggacaatataatgcatttgattggc

SEQ ID NO: 22749 - DNA, 60 bp, Unknown
  Description of Unknown: LeftRegion for integrase B9750 sequence
gcgcatcctagcgataccatacctatacgcggtcgtttttctattgtttcagtcatgagg

SEQ ID NO: 22750 - DNA, 260 bp, Unknown
  Description of Unknown: LeftRegion for integrase B9751 sequence
gcattgggaagaactcttttaccgttggtttctgggcatggtggcgcattggagggggatggaccgtcagcatggcaacagtacttcgcctttgctggtgggttcacaaggattccggaaatccacttatgttaagttttcaaagttataccttgctattgaaaatactctttatctttgcatcaaagataagataaacaatgaaaagagttataggttatattcgcgtctccactgataatcaagaccttgaaaggcaa

SEQ ID NO: 22751 - DNA, 260 bp, Unknown; identical to SEQ ID NO: 14780
  Description of Unknown: LeftRegion for integrase B9752 sequence

SEQ ID NO: 22752 - DNA, 260 bp, Unknown
  Description of Unknown: LeftRegion for integrase B9753 sequence
catttgggtgcaacgccgggtgcccttacaggagcccagcaaagcgctgcgggatgcagcagctgtaaacctcccgttttcgaccgtgcggcgggtgcgggcagctgcgatttagccagtgctggcctccagtctcggtagcgctgtcctagttgcccaatatgttgttaatgcaggatggcgctacataatgggcaacaatgaaaagcccagtcacggcctacagctacgagcgcgtcagccagcctcagcaagccaag

SEQ ID NO: 22753 - DNA, 260 bp, Unknown
  Description of Unknown: LeftRegion for integrase B9754 sequence
tataattgctaattcaatatataataaacctgaatttcaaaaactattacagggagctttaaatcctagtaatatataatataaaggaatgtgcattaattgcatgttcttttatattatatatatgatataatcaacatagaatgatttaaattaataaggaacggtcagataaaaagtccaaaggggatgtgcatacaatggagaagaaattagaaagaattaaaatagcttgctatataagagtaagtacagataag

SEQ ID NO: 22754 - DNA, 260 bp, Unknown
  Description of Unknown: LeftRegion for integrase B9755 sequence
ggcaatgaccaaagaacaactgcaagcggaaatggcatatcacgcatcgttggagccgttcgcttgtctcctaaaagatggcgtgatcagtgaagaggattacgccataattaagacaattttgaccaagaaataccgccccatatttgtcggatatatatctccaaaacaactggataataatccgattcagaggtaatatgtacgctacgaaaggggtgagaaccatgaaaaatgtatttgatatcacaccacagcaa

SEQ ID NO: 22755 - DNA, 260 bp, Unknown
  Description of Unknown: LeftRegion for integrase B9756 sequence
tgttcggcatttcggtctatgatatttctgatctgccgccggagccggagatcgtgaaccggagcaatcggcttatgaaggcgttggaagatccgatgtttgatatcgtcatccgcgcgtgggatcagctctccggtgcgaataagggcgagttgatcgagttcatccagtccaaactcaataagcgcgagggctgacgcatgccgacaaaaaaacgccctgccgccgctgccggtcaccggtactgcatctacgcgcgg

SEQ ID NO: 22756 - DNA, 260 bp, Unknown
  Description of Unknown: LeftRegion for integrase B9757 sequence
tacggaaaaagccgcttgatggtgaaaacatcaatattcctgaattttgtcagactcttttattcttctttgaaaactgtgatgcacctggtcaactgcgcataatccaattagccatgaatgaatatgaccgaacacaaaaagaaaaaacaaatccaacgaaagactctgctatcggctaagatcatcgacctatctgaatggagaaagacgctatgaaaatcacgaaatttcccattgacctctccatgctgaccgaa

SEQ ID NO: 22757 - DNA, 260 bp, Unknown
  Description of Unknown: LeftRegion for integrase B9758 sequence
cacagtgccgttgctattcgatctgttgattcatggctacatcggttcagaaccatcaaaagaagggttttggtttgactttgggatattggttgctgagtggatcgtagtccgatatgggctttcttggatatggaagaagatttctggcgggaaataaaaggtcctttatgtatggatgccttagaaagggaaacgatatggatgaatttgctgcccgcccggtagccgatattctggcccggtactcaacagacaat

SEQ ID NO: 22758 - DNA, 260 bp, Unknown
  Description of Unknown: LeftRegion for integrase B9759 sequence
gatgggcgttacgctttataatcagctcgacggcattgataaaggaaaggccgaagcctttatgcaagggcttctcgcgcaagacaagtacactgttcagcctgatgtcgggaaaaaacacgcgtaattcgtgcgcgtgacggaaccacggttagggccgtatacgacagaaacattattcgtcttgtgagggaaggaacatggtaaaaattaaatacaacggaacggcttggcaacagtcgtacggccccggtgaattg

SEQ ID NO: 22759 - DNA, 260 bp, Unknown
  Description of Unknown: LeftRegion for integrase B9760 sequence
aggagttcagcgagcagtgccctgagtgcaaggaggctggcgtcccgaagagcgagtcgacctacgacacaccccagggcttcggcgcccaccgcaaggcggcacacggcgtcaccggctcagccggcaagtaacccactgctgagagcccggtcccccttgaggcggaccgggctctcggcatttccgcaggtcagacgatgtgcagttttatgagccccacgttcgtcgggcgtagtaaagtgcaccccaccacgctc

SEQ ID NO: 22760 - DNA, 260 bp, Unknown
  Description of Unknown: LeftRegion for integrase B9761 sequence
ggacgacaaccgagaggacgcgaacgccatgatcgccatccccctgacccgtggccgagtggcccaccgaggcagatatcgcgccagcgacagacgctccgacgaccgcatcctcacgcccggcgagggccttctgctctgcctcgtcgtcatgatcgccctgtactttgccgtttgggctggctggaaggcggtgttcggtggctaacctggcgacgttactcccggagatcaagtcgctgggcgacactccgctggag

SEQ ID NO: 22761 - DNA, 260 bp, Unknown; identical to SEQ ID NO: 14693
  Description of Unknown: LeftRegion for integrase B9762 sequence

SEQ ID NO: 22762 - DNA, 260 bp, Unknown
  Description of Unknown: LeftRegion for integrase B9763 sequence
ctttgctgagactacgcttgttattaacgtagctttctaccacatgattgctggtatcgacaccaaaatccagttcacgactatcgattttgataccggtgaaattatcacctccaatagccactaacatttatcaaacgaacacaatgagccccctccatcggccgtagcctggaggggataaaagaaaggagcgccatatggaccggatacccggtgcgtttatcaacgccagatactccacagacaatcagaatcct

SEQ ID NO: 22763 - DNA, 260 bp, Unknown
  Description of Unknown: LeftRegion for integrase B9764 sequence
gctggccacatacgaaacccccgtgcaatgcctcgaaaatagagcgatcgcggctaaacaatccaccaacaccgatcggcattttatctgcttgccttccagtcaaaccataaaatatatacccaagctaaaataaccactggatcggttcgccgttatatgaataatagaaaccacccaacacaccaaaggtgtaacccatgaccaccgccgccatatatgcccgcttttcatcttccaatcagcgtgatgcgtcaata

SEQ ID NO: 22764 - DNA, 260 bp, Unknown
  Description of Unknown: LeftRegion for integrase B9765 sequence
cccgttctttctaccgcgcagtcgagcgagcgcccaaacaatggaaaagccggctaaaaatcgcaagcgcgatctagtcttcgagcgtcccgcgaacgacacgagcgccgaaacaatccagctaagcgcaaatacgcgcgaacgcgtcgcgcaagtgctagcggaaatcgtcgccgaaagtatgctgcggcgagcaagtaatgacgaagccaagtagcacttttcccgcgggaacgcgcgtcgtgttgtatctgcgtcga

SEQ ID NO: 22765 - DNA, 260 bp, Unknown
  Description of Unknown: LeftRegion for integrase B9766 sequence
gctaccgaacaccgggctgagcccggcgagccacacgggtagcttatgcggcacccccggcaacccctcaaaagcggccctccggagcccaagccggcgccgcccgcgcctgtggttaacgtcgccagggccattgcccggatgatggcccgcgaggatcatgaccgcgaggccgatagttttacccaaaccgacccaaaatgacccgcgccgcgatctacgcccgcttctcctccgagctccaaagcgatcgctcgatc

SEQ ID NO: 22766 - DNA, 260 bp, Unknown; identical to SEQ ID NO: 14916
  Description of Unknown: LeftRegion for integrase B9767 sequence

SEQ ID NO: 22767 - DNA, 260 bp, Unknown
  Description of Unknown: LeftRegion for integrase B9768 sequence
cgcgttggcaactggaacccatacggtcgaattggtgaagatggacggcgacaatcccaccatttacaagaaagcagaatacaaagtggcataaaaagtgcgccgcccacttgtcttggcggacgcgggcggcgcttgccttgaacgaaaccgaaacgcacaccgaacggcggacgttccgaaaggcggtttaattatacatggcaaccaggcgaattcacaccaatagtgaaacatgcgtgcgcgtggcggtatacgcc

SEQ ID NO: 22768 - DNA, 260 bp, Unknown
  Description of Unknown: LeftRegion for integrase B9769 sequence
cgtgcaatgccgctcgcgcccggcctgcggctggtgcgcgaatggcagggcaaggtgcacgtggtcactgtcgatgataccggcgcgatccaatggaacgggcagcgctggaaaagcctcagcgaggtagcccgcgccatcaccggtacgcgctggtcgggtcctgccttctttggcctcaaacagcgaaaggcagcggcatgaagaaggtccgctgcgcgatctacacgcgtaaatcgagcgaggaaggcctcgagcag

SEQ ID NO: 22769 - DNA, 260 bp, Unknown; identical to SEQ ID NO: 15063
  Description of Unknown: LeftRegion for integrase B9770 sequence

SEQ ID NO: 22770 - DNA, 260 bp, Unknown; identical to SEQ ID NO: 14679
  Description of Unknown: LeftRegion for integrase B9771 sequence

SEQ ID NO: 22771 - DNA, 260 bp, Unknown; identical to SEQ ID NO: 14965
  Description of Unknown: LeftRegion for integrase B9772 sequence

SEQ ID NO: 22772 - DNA, 260 bp, Unknown
  Description of Unknown: LeftRegion for integrase B9773 sequence
ggcggcgggcgcagtagcgctaatcgcacttttgcttacgagggtaaagcggacttagcatgattaatatagcacatctttacttaaaagtcaaccaaagtgtggacccggagggggtcgaaccctcataagcgaatgctaagtccgctttgttcccatcaaccgggcccacgccttgattgtatataaaaaacggcaatatgacaatccctccctttccccctggcgaccgggtcgccggctacttccgtgactccggc

SEQ ID NO: 22773 - DNA, 260 bp, Unknown
  Description of Unknown: LeftRegion for integrase B9774 sequence
gtcaattacctatgccctctccctacctcacccaactccaaactgaccacacagatctcacccgcattcttcaatatcaccaaaacaacacccatccacgggatactccttcagggcgcatcctgcgtggcatttacctgatgatcctggaagatgcgctgaaagtggtcaactcattacttcaaattcccgatctctaaatgtacctccctcccccatccactcttccccctggctcgatcgtggattcatatcgccgc

SEQ ID NO: 22774 - DNA, 260 bp, Unknown
  Description of Unknown: LeftRegion for integrase B9775 sequence
gcctactggctggctgcaattggcttttttgccggtctccttcttctggtgtttggattgtggtattgcagcgtaattctgattcctgccggcgccctggctgccataacgcaaactctaaaaatccgaagcctacaagaacaaatcggcggatatgatgcagccatccgaaatgcccgcgtatacctgcgtacgatactatgaacgctcatccttttcccgccggcagcctggtggcggcctatttccgtgactcaggc

SEQ ID NO: 22775 - DNA, 260 bp, Unknown
  Description of Unknown: LeftRegion for integrase B9776 sequence
gatacccctcctgaaacagatactcttatggttgtcattgttgatgacgaagaaggatttgttaagaaaatcagcattgatgaagatactgtgacccttcgctcttttaacccacactatcctccccgtgtttttggcggtgttgaaattggacgattgcgctttgtcggtagagtcatggagttaaaaaggagatttgcatgaaaaaatttccaatcgacctctcctgtctgacagaggaagaaatctctcaatttcag

SEQ ID NO: 22776 - DNA, 260 bp, Unknown
  Description of Unknown: LeftRegion for integrase B9777 sequence
attatagatgaacacctgtttagaaaagtacagattataagaaatgaaattgccgtcaagcaacatcgttataaaagccccgggccaattaaggaacttaggcttattacaaattaccggtcggagaaagtagaaaagaagtatgatgatccataccgacaagccgcatatgcatatagtaaaattaaggaggtgtaacagtgactgctaacgttactattattccaccaagaaaaatattaggaaacacggcagataaa

SEQ ID NO: 22777 - DNA, 260 bp, Unknown
  Description of Unknown: LeftRegion for integrase B9778 sequence
cgctatcaggtgatggccggtttgcccatggagatcgaggtgtacctcggtggccgctacgtggccacgatccgtggccacgtggattcgatccgggggtcgggcgggtcgatggccacggcgctgcgtgtcgtggccacggacatgaccatggccatggtcactgagccggcggtggccgtggccacggagggggagtcatgccaaggctgagttcgagggtgtccgggcggacgctgaccgctgcggacgtgcagcgg

SEQ ID NO: 22778 - DNA, 260 bp, Unknown
  Description of Unknown: LeftRegion for integrase B9779 sequence
gacgacgtctccgttgacgcaccgactcccacacactccaagctgcgaccgcagttgagacgaacgctccgtatgcagcgagtggatcaatttcagtcatcgatgtctccgcgcgtgcccgagaccacctgtcatcttgcccttgctgagcttccgtccggcacggtagtcatgactgtaacggtcgaaaggaggccggcatgcccgtacggtgcgtcgtctactcgcgcgtgtccacagatgcgcaggagcgggatgga

SEQ ID NO: 22779 - DNA, 260 bp, Unknown
  Description of Unknown: LeftRegion for integrase B9780 sequence
gtaaaaccatcatttcagaagggtcactttacgaagataagctattacgatacttctctttgtgtgacgcagaaggtaaacttcgagtcatccaatgtgccatgaacgagttcgatagaacccaaaaagaaaaaacagaagttgaagaaccgattgctgtcggctaaggttatcaaccttatcgaatggagaaaaatactatgaaactacctatcgacctctcctgtctgacagaggaagaaatctctcaatttcaagaa

SEQ ID NO: 22780 - DNA, 260 bp, Unknown
  Description of Unknown: LeftRegion for integrase B9781 sequence
tcaagctgtgaccgatatcaaaacgaagcaccgtagttgtttaggatggtgctggtggcttttgctggccatttgtacccttggcctaatcctgatcatcccgatcttgaccaacagtaaaaccaagtcgaaaactcacacggaggcgctatgccaggattgcggccatcgctggaaggtataacctaaagacatccaagatgaccaccccccctttcccccccggcgaccaggtggccggctacttccgagattccggc

SEQ ID NO: 22781 - DNA, 260 bp, Unknown
  Description of Unknown: LeftRegion for integrase B9782 sequence
ggctgatcgacgtcgcgctggaggaggccgagcgcgagaagcccctgtgggacgcgctcgacgccgccgtagacgcccacggcgccgaggccgtacgccacgcgctcctgaggctcgccgccgacggggccccctccgcccgccgcgccgcctagcccgtagggctgccctacattccggctccacccctcccgctgcccatgcccccgccgctccccgtcgctcaactgttgagggtgtccaccgaagggcaggccgac

SEQ ID NO: 22782 - DNA, 260 bp, Unknown
  Description of Unknown: LeftRegion for integrase B9783 sequence
aacaaacgaattgtatatgctgcatcctatgcgttgctgaaaagatttgtccgcaagggctttataacaacgcagacctttgaaaaattgaatatggctatggccgattgtcaagtatgcgatgtgatcatttcgcatcattgtgaaaaagacgagaaaaagtagaatgaaattaatgaagcgaaagagaggtaaaagaaatgttagctgagaaaaaagttcagatcctaaaaggcaggagaagttcggctaatgatgta

SEQ ID NO: 22783 - DNA, 260 bp, Unknown
  Description of Unknown: LeftRegion for integrase B9784 sequence
ttgatttcaattgatttcgattgcatacaactgtccgcaggctgccgacagcggcgaacaaccggcggcagatggtatacaaatagtaaaaaaatcccccgttcggctcctaccccgaacgagggaaacgcaataccacgaatcagtgtccctatgaaacacacgtactctcaaacaccaattaaccgggggattgctccttgattatagcacttccccggcaaagaatcaaggggaatgccatggcgaggaaacagaag

SEQ ID NO: 22784 - DNA, 260 bp, Unknown
  Description of Unknown: LeftRegion for integrase B9785 sequence
cttcgatcaagggcttatgacggtcttgcctgatcttacaattcaggtctcggactacgtgaaggacggctacgacgaccaaaatacgagagactggctactcggcgtagagggtacaaaaatcatcaggccgaagaggttcgcaccaaatcgcgacatgctggcctaccacaatgagtttgtattcctgaggtgatttcatgcagcgagcagtgatatacgccagatacagccctgggccaaatcagacagagcagtca

SEQ ID NO: 22785 - DNA, 260 bp, Unknown; identical to SEQ ID NO: 15062
  Description of Unknown: LeftRegion for integrase B9786 sequence

SEQ ID NO: 22786 - DNA, 260 bp, Unknown
  Description of Unknown: LeftRegion for integrase B9787 sequence
gagaaaattattaattgtaacataaaatgcaaaatgccttctgccagcattccgaataagtattattacacaacactggaaaaatgcacatgccaaagctatatatacaacaacaaagaaggtctgccctgcaagcacatgatagctcttgccatagcaacaaaagtaatacaaccagctaacaccgaaaggaacacgtcatgccctactgcctctacgtaagaaagtcccgagccgatgctgaagcagaagcacgcggg

SEQ ID NO: 22787 - DNA, 260 bp, Unknown
  Description of Unknown: LeftRegion for integrase B9788 sequence
gttccgtgaaagcggttgcacaacaaaccctgaaggtatcagaaagtttttatctattcacgggcaccttccattcgaggcagaagatttctttaccgatgtcggggaggaaaacgggattgttccaatcccactcgaaagcgaggattgtgacccgatcatcttagcagtgtacaggctaatgcgtgtcctgaattatcatggccaataaagtagcaatttatgtccgcgtatcaacgcaatatcaagtagaccgagag

SEQ ID NO: 22788 - DNA, 260 bp, Unknown; identical to SEQ ID NO: 22720
  Description of Unknown: LeftRegion for integrase B9789 sequence

SEQ ID NO: 22789 - DNA, 260 bp, Unknown
  Description of Unknown: LeftRegion for integrase B9790 sequence
caggaggcggcgggagaggatatgcggtccatgaatgcggagctggtctggctgctcaacgaagcgctggagcgccgcgcagccaggcggcaacgtgccgagcagcagggcaccaacgacgaccagcccaggtaacatgctgccccgacgcctgggtgaacaggctcggggcgcggtgagacctgttgaggagatcccacatgaccagtgtacccgagcgaccctcgatcggcgggccgcctgtctacgacatctacaag

SEQ ID NO: 22790 - DNA, 260 bp, Unknown
  Description of Unknown: LeftRegion for integrase B9791 sequence
agaagaaaatgaagactttattattataatgtctgatgaaccggaacatattaaagaaaaaaattactatgatttaaaaaaatatatcattaaaattttaaataatattgataaatacaaggataataaagtaccagtgtagaaataatctatactggttatttttttatttatctaatttggacaaagggagtatgattatgaatttatgtattgtttatgtcagagtaagtacaattgagcaaaagaaaggttatagt

SEQ ID NO: 22791 - DNA, 260 bp, Unknown
  Description of Unknown: LeftRegion for integrase B9792 sequence
gttcgcggtttcctgcaacttctgaaagaacagaagaaagccttggtggagttcgatccgctcgtctggcaagcggccgttcattatatgattatatatgaagactgcacggtgaagttcgtattcagagacgggacggaactgccgtgggtaatcaaccccggagtcaagacctacaaaaagaaaaaggcggtggaattatgccggatgtccgaataataccgtcaaggcagaagaaaacggcaaaaaagcgaatggca

SEQ ID NO: 22792 - DNA, 260 bp, Unknown
  Description of Unknown: LeftRegion for integrase B9793 sequence
ctggtgcccgctcaccagcaaatggtgccatgccgatacgctactgatgacagccaacaaatgaacacccccgcgcggatcagccgagagccggtgcccgagctcctcgcgctggtccgcgccatcgcccgcgcccaggccgagaccgacatggcccagtggcttgccaaacaggatgcatcgggccgaaaagcaacggcgtgacacgcgccgcaatctacgcccgctattccagcgatcggcaatctgagttctcggcc

SEQ ID NO: 22793 - DNA, 260 bp, Unknown
  Description of Unknown: LeftRegion for integrase B9794 sequence
ttggcattgttgtagtaaagtaattatttttgctatgtattcttcattcatatgtagcccctttcccaaacatggaacaaacgttctgaaactattatactatctgacaattcagatatatagtggaaattgttgttaattttgttatacacctaatgttgaaaaatgtgtgtcgaattttgttaggaaggatgttaagaatgtataaacaatttgaaatcaactttacacccgaggaagttatcgactatttaaggaaa

SEQ ID NO: 22794 - DNA, 260 bp, Unknown
  Description of Unknown: LeftRegion for integrase B9795 sequence
caagcagatggttgatgttttgtcaggctctcctctgacaatatccattgcttggaggccaaaaagtcatcagaaagaacttgctattattcggattcagaggtatatatgggtcggaaccctttgcaccttgaaaaccgaatatagcgcgttacaaactgtgcagacatgcctccaccacgaataaaggaggaactccaatgaagcgagttttgtgtctgtacagagtatctacaaaaggtcaggttgatccgaaggat

SEQ ID NO: 22795 - DNA, 260 bp, Unknown
  Description of Unknown: LeftRegion for integrase B9796 sequence
ctcggcggaatcaatgccgacagcgttacaaagaaaaccaactttcttgttttggggaacaacgacctgtgttcctcaatcaaagacggcaagagttccaaacataaaaaagccgaaaagtacattttgggcggtgcagacttgtctattatcccggaaaatgttttttatgatatgttagacgaataaagggtgattgtatgcgggcttttatttactgccgattttccagccataagcagcaagagcttagcatagaa

SEQ ID NO: 22796 - DNA, 260 bp, Unknown
  Description of Unknown: LeftRegion for integrase B9797 sequence
gggcaaatgaacggacgggtcactgcaacggaagaagtgtttcattgggaaagtctcgacggttcgcaacagttcaagatcagcgcgcacaacgaggtccttgtcatcaccgcagaggataaggccctcggcacatcgagctgcgtcactctagccaccacgtccgcgcgtgcgctcaaagcttggttcaacgtgcgaccatgatcgccgccatctacgcccgctattcatcggaccttcagtccgagcgctcgatcgat

SEQ ID NO: 22797 - DNA, 260 bp, Unknown
  Description of Unknown: LeftRegion for integrase B9798 sequence
gccgccgctgccgagcggtatgccggcctgaacgatccaacgccggcccacaggctggcactgctgcggcagaagctggagctggagccggagaacgaagaaaccctgtgggaactttttgagtcggcagtaacccatgtgtgcatcggcaaaggcggagagatcagcctatcccaaaaagatcaaaaggagtgtgcctcatgaacatacagaaaaccgcccccacccccaaactggtcactatgattccggctgaccct

SEQ ID NO: 22798 - DNA, 260 bp, Unknown
  Description of Unknown: LeftRegion for integrase B9799 sequence
aaaaaaagaattatcgatactatcctggacatgttggaacgacataacgttgagaaagccgccgcgggggagtaggtacctcaaaagaagtggtttctctttttacctcgaacgctgcggcatatttaccgctacctgctggcaaataaaagaaaatagggtacagaagattttcccatgtttttattttggaggttattatgaggttaaagaaaattaaagtggctatttatatccgcgtaagcactcatcaccaggtg

SEQ ID NO: 22799 - DNA, 260 bp, Unknown
  Description of Unknown: LeftRegion for integrase B9800 sequence
agacctcacccaactccccgcggacggactgatcctgctcgtcgcccgcctctgcacccgcctcgacgacacgctctgcctcgtcagggagatctccccgccccggccgcccgccgcgcacccatagctcgggtaccggtaatcacgattgtggggcgacaaacctggttagggacaccagaagcggctagcattcccgcatgccgtatgcgcccgaatacctgcacctcgtcatccccggcccccgcttcgaagcctgg

SEQ ID NO: 22800 - DNA, 260 bp, Unknown; identical to SEQ ID NO: 13129
  Description of Unknown: LeftRegion for integrase B9801 sequence

SEQ ID NO: 22801 - DNA, 260 bp, Unknown
  Description of Unknown: LeftRegion for integrase B9802 sequence
gacacacctcctgaaacagatactcttatggttgtcattgttgatgacgaagaaggatttgttaagaaaatcagtattgatgaagatactgtgacccttcgctcttttaatccacactatcctccccgtgtttttggtggtgttgaaattggacgattgcgctttgtcggtagagtcatggagttaaaaaggagatttgcatgaaaaaatttccaatcgacctttcctgtctgacagaggaagaaatctctcaatttcag

SEQ ID NO: 22802 - DNA, 260 bp, Unknown
  Description of Unknown: LeftRegion for integrase B9803 sequence
gccaacgttgggagcgactcgcggtggccctggtctacctggcctgggccgccgtgtggggcgggctgatctggtacggggaaacccgggaggccggttgggcctgggggttcggtgccgtcatcatgattgcgcccctggtgctgctgtccctgctgaccggtaggatctcggacggcctcgacgaggggccctagagcatgcccgctgactgccccctgcccgccggctcgaccgtggccggctacggccgcgactcg

SEQ ID NO: 22803 - DNA, 260 bp, Unknown
  Description of Unknown: LeftRegion for integrase B9804 sequence
tacagttttaaaataactattatttattatgtccaaaattatataaaaatcagcacatagctttagcagagattgtataaaaaaagagcaatagagagaaatctttattgctctttttatttgtaaaaaaaattaagatgggtataatttaattaatatatattaagttacgcccatttaaagaaagtgggagtataaagatggaaacaaaattaataaaagtagcctgctattgcagagtatcaactaaaagtgaggaa

SEQ ID NO: 22804 - DNA, 260 bp, Unknown
  Description of Unknown: LeftRegion for integrase B9805 sequence
ctgacggccgacggcgcccgagcttctgaggccgcgccgtgaaaccccgcgcagccgcgcccgagatcctggaccccgcgatcgtgcgggtgatcgaagctcttgcgcggcgccaggctcggttggactatgaggccgcccagaacaggagcgtcacgcccatgtcatccgcctcgccggcccgcgcgcgcgcctgacgcatgcgcgtcgccctctatgcccgctatagctccgagcggcagaacgagcgctcgatcgag

SEQ ID NO: 22805 - DNA, 260 bp, Unknown
  Description of Unknown: LeftRegion for integrase B9806 sequence
actgactaactaacggtttgcccatttggtatcacctctagggcgtacattccggaaatctcacgaaagtgtcggaaaatcccgacaaaaaaccaaaaaaaccggaatatacaattaggcggaattaacagctgaatgggtctatatagcttgacttgtccgaggggttgttataggggtgttgtaaagaaaggaaaacgatgatcgcaccagtccaagataagaaaagaaaacgattcattatttacactcgatgctcc

SEQ ID NO: 22806 - DNA, 260 bp, Unknown
  Description of Unknown: LeftRegion for integrase B9807 sequence
ggcatcagcgacatgacgctctggcgctggatgcacgatgagcgggtcggctttccgcggcccacggtgataaaccggcggcgctactttcgcgagtccgacattgcggaatttcaatcccgcgcaacggaatccccggtgggttcagaggccagatcgctgccgcctcaatcccgcgaactggccactaaacgcccctgatgcgcgtcgccctctacgcccgctacagcaacgaccgccagaacgagcgctcgatcgag

SEQ ID NO: 22807 - DNA, 260 bp, Unknown
  Description of Unknown: LeftRegion for integrase B9808 sequence
tgttaaaggcaagattgccagttttaccggaagtgatggcggagttgcttataagactaccctcaagaagtgctcatgcccggattttgcgaagcgaggtgtgccttgcaagcatatgttttatctggcggatcgttgcgatctgattgaccgataagcgcgatgatctttaaggtcatagttttcgagaggtttataccatgccaaagaaaaatgaaatacccacagagcagagcgagggcggcattaaggccgtaatc

SEQ ID NO: 22808 - DNA, 260 bp, Unknown
  Description of Unknown: LeftRegion for integrase B9809 sequence
aaacgacaggggagactatatgactagattgaaggatcggttagaagcggattaccttctagaattcatgggcgaggaaactcaccctgctaatctactgaacaaagaaaatcctatgtatagaaatatgggattaaagtaattttgttttacctaaccaccattgaccaactcacaaagttggttttttgttatgtcgtatgaaattaatcacatatcttagggtctcgactgatagtcaagattcagggcttgaaatg

SEQ ID NO: 22809 - DNA, 260 bp, Unknown
  Description of Unknown: LeftRegion for integrase B9810 sequence
tcattgacccccaccatttttgaatcccccacgccctccccaaccccggagtgtaactgctcaatcgattacaactgccctgattttgcgcgcccggccgatgctcaattttgcttcactcaatgcggtggatccacgtcatccaactgggccgggcttgatgccgatggcgacgggtatgcctgtgaatacaaaccctaatgtctgaagcacccttccccctcaactcccgcgtggtggcttacctgcgcgattctggt

SEQ ID NO: 22810 - DNA, 260 bp, Unknown
  Description of Unknown: LeftRegion for integrase B9811 sequence
ccgttaactctattcacaatggttcccacgggggcggcgggcgcggtctgttcgtgcgccggtgattcactcaattgtaatgatttttccagccatgctgcagcgcaggcgtgtttcgattattgcgtatcacagggcgcgggggatatccacaaactggaccagaacaacgacggcaacgcctgcgagagtttatagccatgcgcctcgaaccgcctccctccaccctgccgcccggctccaccgtttgggcttatctg

SEQ ID NO: 22811 - DNA, 227 bp, Unknown
  Description of Unknown: LeftRegion for integrase B9812 sequence
tttgatatgtcgggggcttgagcttctggattctgcatacccgtcccagccctgtcaatgcatttgcatgcataattagggcccctgcgaggcaccctctatgtacattgttgcaatcggctggctaactgcaatgaaaagtacacattccatagccatggcataaaatgaccaccatggccaatgtatatagctacctccggttctcttccctcaagcaggctgct

SEQ ID NO: 22812 - DNA, 260 bp, Unknown
  Description of Unknown: LeftRegion for integrase B9813 sequence
cgcggcccggcgatccgagccaaggccagccgctggcgtgccccgccgcagggccactcttgacgatccggccagggccgcgtccctaagatcatccggagcgtaggcgcaggtcaggggctgggcaagggctcattccaaatgcagtagttcacggacgtgcgtggacacgaacactcgccaactgctacatttggcccatgacaccactgaagcgccggcagacccgccgtgaccaggacaaacgagcccaggccgcc

SEQ ID NO: 22813 - DNA, 260 bp, Unknown
  Description of Unknown: LeftRegion for integrase B9814 sequence
gcacgatgccggctggcttttcgacctgaccgataccgaggttcggcgcgggctgccctgcccggtctgcaatgaaatcccgggggagcgtaaagcataatggctgaaatcgaccctcgcctactggacttcgtgagggcattggcaaaagctgatgcccgccgcgagcgcgcgcgtggattgattgattgtgaggaagcatgcaaatcagacgagccggcatctatgcccgcttctcgaccgaccttcaaaacgatagg

SEQ ID NO: 22814 - DNA, 260 bp, Unknown
  Description of Unknown: LeftRegion for integrase B9815 sequence
cagcgattcagcagatcacggcgcaggaacaaggcgaggcgaaggcgctgacatccacattcgagggctgctggtttctgcagaatcacacattgctgtgggggtggcacgacggtttggtgtggggcggaatcgcattggcgctgatcgtccttggcatgcttgcattggcctacatataaaaaactgggatcctaaaaatgaaacgagcagcgacctactcacgattctcaactgacaagcagacggaggcctcgatc

SEQ ID NO: 22815 - DNA, 260 bp, Unknown
  Description of Unknown: LeftRegion for integrase B9816 sequence
ccactacgtgaggatcacgtggcgaggggccgaaggggcccggacgtggacggtggttcccagcccgtatgagaagcatccaggcgacggttacaagatcctggagaccggggagatccggcagaagctctagatcccctgggtttctctgatgtgcggaaagtatggagcatcggcatgctctgtgatttactcactggatggtcaccaagaaaaccgggaagacagccgtcgtttattgccgcgtaagcggcaagggt

SEQ ID NO: 22816 - DNA, 260 bp, Unknown
  Description of Unknown: LeftRegion for integrase B9817 sequence
ttacctctaaatactctttccatattcacctccatttaaagcaccgggacaggcgccgtttactattgtaatataacaatcggcattgtcacctgcgtgcggaatatcacggaattttaaatctagattaaatagtctaatcatttgcaatatcggctattttcttgtaaagtggtctcaaaggaggaggaaagtaaccaatgttcaaagaatatccagtattttacaactacaaaacaaaagagtatggaagaaaatct

SEQ ID NO: 22817 - DNA, 260 bp, Unknown
  Description of Unknown: LeftRegion for integrase B9818 sequence
ggaggtgcggcgtaaaaatgagaaaagcgccctcatcggacgctcttgcacaataccaatatatcacgggtaaacggtagcgacttctaccggcgcgctaatctatttctattattcgtccagttttcaaaaagtatttgtgtgcgcactttggttttggttataatcaacttacaaactaaaggcgaggtgagatgcacatgctcaaaactgactacttaatcagtcttggaatcgaacacatcatcaactatctgcgg

SEQ ID NO: 22818 - DNA, 260 bp, Unknown
  Description of Unknown: LeftRegion for integrase B9819 sequence
caacagttcacatgaaaataaaaaattaacccctgctcaaataagattaaaactagcgaatgacaaaagaatggtatgtttgaaaggttcagatatgaaacccattggaaaagccattaaaatagatatttcgcagaatgaaatccttttggatattctcaatcgagtttctaaacaccctgaagacgaggagagttccgatgaatgaaaattttaaacaccaaacagctttaatttatgttcgattgtctagtaaaaaa

SEQ ID NO: 22819 - DNA, 260 bp, Unknown
  Description of Unknown: LeftRegion for integrase B9820 sequence
cttgcagttatatactttctccatactcacctctctataagcaccggggcaggtgccgattactattgtaatataacaacgttcattgtcacctgcgtacggtatatcacggaattttaaatctagattaaattatcaaatcatttgcaatatcggatacttttctgtaaagtaagacaaaaggaggaggaaattaaccaatgtataaagaatatccaagattttacaactatgaagtactagactacggaaggaaatca

SEQ ID NO: 22820 - DNA, 260 bp, Unknown; identical to SEQ ID NO: 15376
  Description of Unknown: LeftRegion for integrase B9821 sequence

SEQ ID NO: 22821 - DNA, 260 bp, Unknown
  Description of Unknown: LeftRegion for integrase B9822 sequence
tcatgcacggccagcagcgcctcggtgatttggctttttagatgatcaatctctatcatataaggggcccctttcactgggaacgtgtgttccgttattcatatattagaataacaaaaacagttcacacttgcaatataatagaaaaaatgcgtaattttaagataatttaagcatttacaaaaagggagtagaaaaaaatgtatttaccacccaaaattgactttgcgccagaggaggtcctcgactatctgcgaaag

SEQ ID NO: 22822 - DNA, 260 bp, Unknown
  Description of Unknown: LeftRegion for integrase B9823 sequence
gttccattttgatactcatatactttattcatattcacctctttacaacaccgggacgtttataactattttaatataataaatattattgtcacctacgtacggttttcacgtaattttaaatctagattaaaatatcaaaccatttgcaatttcggctatattcttgtaaagtgggtacaaaggaggagaaatataacatgtataaagaatatcctaagttttacaactacgaaacactggactatgggaggaagtct

SEQ ID NO: 22823 - DNA, 260 bp, Unknown
  Description of Unknown: LeftRegion for integrase B9824 sequence
accttcctttcattaaacgctatgtaaaaatcgcgaaaaagtaagaccctatgtgggccttgcttttatcataactgatctccgattttctccatgaaaaattcataagcttcaagaacgttatctgtgagtgttccaaaacattataaaatatgaaattgtctgacacaacgagaaatatttaccaagaggagataattatgtataaagaatatccggtattttacaattacgaaactttagaatatgatcggaaatca

SEQ ID NO: 22824 - DNA, 260 bp, Unknown
  Description of Unknown: LeftRegion for integrase B9825 sequence
aacatttactctaaaagtcgaagctggaaaaacatatggcatttgttccagctgcgatgggaagtatacggtcaaataaaaatcccccgttcggctcctaccccgaacgagggaacgcaataccacgactatcacgaattcagcgggggattgctatttcattatagcatacccccaggcaaaaaacaaggagggtatgtatgccaaaggcaagagcagcgaagcaggacaccggcttcaccgctgccatctatgcccga

SEQ ID NO: 22825 - DNA, 260 bp, Unknown
  Description of Unknown: LeftRegion for integrase B9826 sequence
cgggatcattcagcaaaccacgggtggacccccagaccttcgcacgtttcgcaccacgccgcccaaggctaagcgcgtagcgaaggcatgagcctggagcaagtgctcgcgtgggttgtgattccgatgcttaccggctcggcttgcgcagcgatcggattctacttcggaaaaaagataacaaaactcaaggatggcaaatgaaacgagcagcgacctacgcacgattctcaaccgacaaacagacggaggcctcgatc

SEQ ID NO: 22826 - DNA, 260 bp, Unknown
  Description of Unknown: LeftRegion for integrase B9827 sequence
ttatttgatgaaccttttcaaagtgatgtgtcaaatattctttatcaaatgcacaaagatggtaaattggaaaaaacaaagcatggcaaaagttacattttacattataaagaataaataattgtactgcacaaataaaggtggtgatgcaaaaaaatatgccccagcaacaagaaaaaacataaaaggaaggtgaaaatatgtataggtatgaaaaaattgaattcagaccagaagaaattcttgactatttgagaaag

SEQ ID NO: 22827 - DNA, 260 bp, Unknown
  Description of Unknown: LeftRegion for integrase B9828 sequence
ggccgtaaagcatcaggtcgaacctcatggcgatctcgcgcgattcgcactcgtggcacgggcccatgcgaccaccaccgtaagtaagaagccggttacttaacgtgataccacagggagggacagggcctctggcctggggaaataggcgggtgcactttgccgttggcgactaatgccgtgggtggtaatctgcacccatgaccccacacgaagatgacgccgtaattcggcgcccgcgccgcacactgagacccaag

SEQ ID NO: 22828 - DNA, 260 bp, Unknown
  Description of Unknown: LeftRegion for integrase B9829 sequence
gcttgtatcctgatatccaaccccataccggcctccttgttcttgcctatatatacagagcgcctcgatatggccgaaatgtttcactgctaaaaaaaataaaaataattcgcttgatatatcgcggggttcgctgtagggttgcccccctgtttgaaacaaatggggtgtagacaggcgctataagagaggaggaactcatgggaaaaaagagcgaggttgtccagaagattagaagggcctgtggcctgtatctccgc

SEQ ID NO: 22829 - DNA, 260 bp, Unknown
  Description of Unknown: LeftRegion for integrase B9830 sequence
tcgacgcctcgccggatggcaaagtcaaagccgaatggctaggcagattaaacgggctggatttcaccatctacgattacaaatcgcccatatcgccggaagagtgccaagaatggcacatcggcggcagaaacgcgatgatagcgcctttggttatcgcgtatttcaaaaccgtgctgggcacaaaataaaacactcttatgaaagccgcactttacgcgcgtgtatcgtcgcaaggccaagcggacaaggatttatcc

SEQ ID NO: 22830 - DNA, 260 bp, Unknown
  Description of Unknown: LeftRegion for integrase B9831 sequence
gccgaaaattgttcgacgcagccgctctcaatagagaaattcaagttcttctgaatcaagaatgaaggaagccctagcaagccccaaaccttgctagggctttttttgtgcccaaatcttagcctagagaaagctagacttgcacgcccttaactgaaagtctaggctagaataaagcccctacccttggagaaacaatcatgagttttgcctattcctacatccgatttagcacgaaaaagcaaggaaaagaaggaaga

SEQ ID NO: 22831 - DNA, 260 bp, Unknown
  Description of Unknown: LeftRegion for integrase B9832 sequence
gcaatggcaaatgctcctatgagcgaaaagcagatgggatgtatttgacagatgaggtttggacgttttaaaaaagtgctcccgcatccgtgcggccacactgatgcgggatatacagtacgtctggtaagcaacttttacccatagcgtctgcactaccattatagcagacgccgcacaaaaatgcaaggagtctgcctatggcaaaaaagaaggaaaaaccgcaaccggttcaaacggctgccatctatgccaggtat

SEQ ID NO: 22832 - DNA, 260 bp, Unknown
  Description of Unknown: LeftRegion for integrase B9833 sequence
ccctctggttgtcctgctcctggtctgtatcggccttatcctctattttcgcctcagatcccgcctgccacattcgcccgccgaataatgcactcccgcctcttggcgggtttttgttttgtcaaaatttttgttgcattttctctttttcgtggtatccttcaggtatactccagtcaaaaaaagaaagggggttccccatgccctcgcctgccgcctcccctgtggtggctggtgtttatgcccgcaaaagtaaatat

SEQ ID NO: 22833 - DNA, 260 bp, Unknown; identical to SEQ ID NO: 14775
  Description of Unknown: LeftRegion for integrase B9834 sequence

SEQ ID NO: 22834 - DNA, 260 bp, Unknown
  Description of Unknown: LeftRegion for integrase B9835 sequence
gcgctttcttccgctgcctgatcggtgggatcttcggctggcattacttctacgttggcaggattggccgcggattcctctgctggatcactgtcggcaatttctgcgtcgttggcaacatcatcgacctttggaagatccaccagggcaaatttaaggataacgtcgggcagtatctccgccagtaagggaggtgtgctatgcctgtaagcataacattcagtgcagatcttaaaaaggcgaagggcgaaccgatcctt

SEQ ID NO: 22835 - DNA, 260 bp, Unknown
  Description of Unknown: LeftRegion for integrase B9836 sequence
aactcaaagagagttatgaggccctatatgatgcgtacaacgcgctgcataacactgtgctgtcgccatctggaagtatcagttccttcggcgccgctgtgtccgatacacttaaagctttcgtcgcagcggacgatgatcttgcgctctgggtagaataagaagatcaaacatatccaaagagggaaggagaatgtgccgtgcctaagaagaacgctgggcagccggtaaaaccgaagcgtgggcaaaagctcgatgca

SEQ ID NO: 22836 - DNA, 260 bp, Unknown
  Description of Unknown: LeftRegion for integrase B9837 sequence
ggagttggagatcgagtacctccggcggcacggctacttgctcgacggggaggaggagcggttcctggcggcggaggacgactaaggtcggttctcattgcacaccctgccggttgccgatataatggcggagccggcggggacttgcgatcccgagccggctcctcaccacaacgcaaacctagcaggaggttcgcatcatggctcacggcattctacccgagaatgcggcggttctctacctccgcatgagttccgca

SEQ ID NO: 22837 - DNA, 62 bp, Unknown
  Description of Unknown: LeftRegion for integrase B9838 sequence
agcttacacccgaagaaatattagactacctaagaaaatcaaggtctgatgatccacttttg

SEQ ID NO: 22838 - DNA, 260 bp, Unknown
  Description of Unknown: LeftRegion for integrase B9839 sequence
ctgtgcatagcggcctttttggtaagctgttcggatacagcacagtaactgtgagcacagccggcaccgctggtaccgagtatatctttaccaaggtagccaatgcggaagaattccaacaaaagtacatcgagattgcaaacagataatctatcattttcgtgaagtcacgaaaatggcaagaaagagaggtgacaccgttgactacgcccaagcatccgccaaaaccgaaacgtggtaagaagattgaagccgaagcc

SEQ ID NO: 22839 - DNA, 260 bp, Unknown; identical to SEQ ID NO: 15702
  Description of Unknown: LeftRegion for integrase B9840 sequence

SEQ ID NO: 22840 - DNA, 260 bp, Unknown; identical to SEQ ID NO: 15508
  Description of Unknown: LeftRegion for integrase B9841 sequence

SEQ ID NO: 22841 - DNA, 260 bp, Unknown
  Description of Unknown: LeftRegion for integrase B9842 sequence
attaccgcaaactgaccggtgcagatatcgttctgtccgattaaaatcccgctttgtaggtactatgcacaaacttccttttacccctggctatttggatttgtttgcgtataatgttcgttaccgagggaaaagaggttacgcctacattttgttacaaacctccctcactcaaaatctactgaaaggagtcagcgaaaatgcctaaagcggtactcatttcgcccatcacaaaacaaggcattcagaagataagagtt

SEQ ID NO: 22842 - DNA, 260 bp, Unknown
  Description of Unknown: LeftRegion for integrase B9843 sequence
agataacagacggaacaggttgctatgacgtttatgacaatccggatggcaaactgatccacagcggcatcactggcaaatcatacaatgtcactgagattggaaagatcacttttgatgatggaaacatcctagaactcgtcaacagcacattcatcttctacccttacaccgggatctttcactgattggagaaaaccatgaaaaagcagcccgaaatcctgaacgcggtcatatacgccagatactcatcccactcc

SEQ ID NO: 22843 - DNA, 260 bp, Unknown
  Description of Unknown: LeftRegion for integrase B9844 sequence
aggtattcctggtctttcgtttagttggaagcgggctgtcggtatttccggcgcgaagtcaaaaatatcacgggcaaccgggatacccacaacaaaatcaggcagaagaagaaaagcgggggcagcaatgggttgcttactaccaattttactcatttttacaatgacaatttcaatgatcttgattttctagcggaataatgccctctgacgcccctttccccctcaattcccgcgtggtggcctacctgcgtgattca

SEQ ID NO: 22844 - DNA, 260 bp, Unknown
  Description of Unknown: LeftRegion for integrase B9845 sequence
aaccggaactgtcccaaaaagaaaaacggcttcttcaaatgttcagacagatggaagaaaccgtttcggaggactgcttgcggtattgcgaatttgcgcttttcaagcaggaagaagaaaagaaaaaagcggcacaggtcggttgataaaaacacagggaaacattttatacgtagactttagaccggaggaaacgcgtaatggctgtaagcataacctataacgcggacttgaaaaaggcaaagggtgaaccgatcctc

SEQ ID NO: 22845 - DNA, 260 bp, Unknown
  Description of Unknown: LeftRegion for integrase B9846 sequence
aatccaaaagggttattttgagagggctatcagtgtaagggctgatagccctattttttttttgtctaaatttcaggagatttctggttattactcaaataataagtaatatgggtttacatagtatcaaaaagatgtataataagtatgagatattatgacaaacctgtacaaaatctaatcaacaggaggaaaacaggatggtacaggagaaattaagagcggtattttatgcaagggtatctacagaggaagagaga

SEQ ID NO: 22846 - DNA, 260 bp, Unknown
  Description of Unknown: LeftRegion for integrase B9847 sequence
atgcccgcaagcggggctgttcgcgatggataacgcctgataggcatccaacaagatgcctatcgcaccgaaacagaaaatcccgcttaccagcgggcctttttcggccgggatcgatatagatagcagagactacgggcacccaagcgacaccatacctatactcggaggcttggcgttcgcggcagaaggggttcggggtgagtcgtccatcggtctatagctatctgagattttcggacccccgccaagcggcgggg

SEQ ID NO: 22847 - DNA, 207 bp, Unknown
  Description of Unknown: LeftRegion for integrase B9848 sequence
gcgttgccggtcaggatacgccttgctccggcaaagaggccttctgtcgccctccacgggctgatgtgaaccatattaattcattctgcgcagttgtgtgccttcatttatccagttaacaactggcgtcacaggtgaggaacacgcatgaaagcaatcgcttacgtccgctggtcgagcaaggaccagaaaaaaggcgactctgaa

SEQ ID NO: 22848 - DNA, 260 bp, Unknown
  Description of Unknown: LeftRegion for integrase B9849 sequence
gagcctgccgagcctgccgagccttccgatgctgaaaaactccgtgccgagaacgcggcccttcgtgcgcagcttgcccagcagcagaaatccctgcgtatgcaccggcttgttacgctcatcctcttgggcattctttcgctgtgtgcccttgtgcttgtggccgacgtgctcatcccatcaatcggctggattcgcacatgaaaattaccgccccggcccgatcagccagagcggtatctttggaggcttttgtggat

SEQ ID NO: 22849 - DNA, 260 bp, Unknown
  Description of Unknown: LeftRegion for integrase B9850 sequence
ggtaaacctagcagcttatgtcggtaactgcattcaacaatatcttgatgaggaatagtgttctattattccccaatactgttctaaatgtcttatttttacctttttgctatatttttctcaagaaaattatatcagaatggtaaaaatatattatctttgcattatcgaaataacaacaacttaaaaactaaacgattatgtcaaaggttatattgctttcacgagtcagtaccgcacaccaggatctgactcaacaa

SEQ ID NO: 22850 - DNA, 260 bp, Unknown; identical to SEQ ID NO: 13521
  Description of Unknown: LeftRegion for integrase B9851 sequence

SEQ ID NO: 22851 - DNA, 260 bp, Unknown
  Description of Unknown: LeftRegion for integrase B9852 sequence
tttgatggctctccaatcccaactcaaaaacgatgtatctgccttgctcgatcagctcattcagaccgacatggagcttgtcttccatcttgaggaaaaaagcggttcgagcgaaacggcgtgatatacgttgactttcaaaggaaatagcattttcttgcgccctccggctcggagagcgccttttttcggaggtctgtatgccttattgtatttatcttcgcaaaagccgcgccgatctcgaagcggagtcccacggc

SEQ ID NO: 22852 - DNA, 260 bp, Unknown
  Description of Unknown: LeftRegion for integrase B9853 sequence
gtctacacctatttgatgcgaaagttcgaggatcagcagtattatgacgaggagatggagccgcacaccataccgcacggtgctcagatggtggccagcgtctctctttccggttctgagctccgcgttgagttcccggatgatgatgtgaccgccttgcttgatgctcacggtgtcaaccgttgcagggggtggaagccgtgaaaaagaaaaaagaggtcgctgccggatccgttccggctgtgatctatgccagatat

SEQ ID NO: 22853 - DNA, 260 bp, Unknown; identical to SEQ ID NO: 13964
  Description of Unknown: LeftRegion for integrase B9854 sequence

SEQ ID NO: 22854 - DNA, 260 bp, Unknown
  Description of Unknown: LeftRegion for integrase B9855 sequence
gtctacacctatttgatgcgaaagttcgaggatcagcagtattatgacgaggagatggagccacacaccataccgcacggtgctcagatggtggccagtgtctctctttccggttctgagctccgcgttgagtttccggatgatgatgtgaccgccttgcttgatgctcacggtgtcaaccgttgcagggggtggaagctgtgaaaaagaaaaaggagaccgctgccggatccgttccggctgtgatctatgccagatat

SEQ ID NO: 22855 - DNA, 260 bp, Unknown
  Description of Unknown: LeftRegion for integrase B9856 sequence
ccgcatgacgagcctgccgagccttccgatgctgaaaaactccgcgccgagaacgcggcccttcgtgcgcagcttgcccagcagcagaaatccctgcgtatgcaccggcttgtgacgctcatcctcttgggcattttttcgctgtgtgcccttgcgcttgtagccgacgtgctcatcccatcaatcggctggattcgcacatgaaaattaccgccccggcccgatcagccagagcggtatctttggaggcttttgtggat

SEQ ID NO: 22856 - DNA, 260 bp, Unknown
  Description of Unknown: LeftRegion for integrase B9857 sequence
gtctacacctatttgatgcgaaagtatgaggatcagcagtattatgacgaggatatggagccgcacaccattccgcatggtgctcagatggtggccagcgtctcgctttccggttctgagctccgcgttgagttcccggatgatgatgtgaccgccttgctcgatgctcacggcgtcaaccgttgcagggggtggaagctgtgaaaaagaaaaaagaggtcgctgccggatctgttccggccgtgatctatgccagatat

SEQ ID NO: 22857 - DNA, 260 bp, Unknown
  Description of Unknown: LeftRegion for integrase B9858 sequence
ttgagcggttctttcagaattcaatgtccagcacggctggacggttgaccgcgatgttcgtcttcatatcagcatcctattcgttgccctttttcgctgcggtgataaagcgcataggtgaagtgcgtgcgttgccagcgcaggccatcagttccccactgaagcgctaaccgcaattcccagcaacggaaagcctggacatgccgcctgtcccaagagtcgctctatccggggtcgccctctattgccgtgtctccggc

SEQ ID NO: 22858 - DNA, 260 bp, Unknown
  Description of Unknown: LeftRegion for integrase B9859 sequence
ggctactggctgtaaaatgctggtagccctcattttttagttgtatctagtatataaggggtgtataatagataggaactgaaaacagcctcataaagccctctgttttatcgagggtaaagaagtctacacctaatatataaaagtggctgtatgaggtacacaggagctcacaggactattacaggagggtaaacaggatggcatacaggaaaataacggatataaaagatactataggtatgagagcggtattttat

SEQ ID NO: 22859 - DNA, 260 bp, Unknown
  Description of Unknown: LeftRegion for integrase B9860 sequence
tttgtctgacatggtgcgccgcctttcttccgtagggaatgcatgttcgttttaaaaccatgataatacaaaatagttacaaaaactattctataaaaaatagttctaaaattcaatcaagatattttcacgcttttttatggatttttgctttttccgcgaaaatccaatgcatattgtcgaagaatggggaataaaaaatgtataatagcaaaatcgaattactaacaattgacgggatctatatttatttacgaaaa

SEQ ID NO: 22860 - DNA, 260 bp, Unknown; identical to SEQ ID NO: 15638
  Description of Unknown: LeftRegion for integrase B9861 sequence

SEQ ID NO: 22861 - DNA, 260 bp, Unknown
  Description of Unknown: LeftRegion for integrase B9862 sequence
acagtcagagactactacaggtacttgcgtttgaacgcagacctggcacacgacgagattttaaccatgatccagtcgggtttagtgagtcagatcggaacaaagaaccggacacctgtgtacagctttaccgaaaaggtaaaggagctaaagcagtcctgacatcattccgtgtcccggcgacattcatctacgctcgggtgtcgacccgagagcaggctgagaacggagtcagtatcgaaactcaggtagcgaagtgt

SEQ ID NO: 22862 - DNA, 260 bp, Unknown
  Description of Unknown: LeftRegion for integrase B9863 sequence
gcggtcaccaggctggccgatctcccgaccggggtccggggtttctgctaccatgacgatgatggccggtgctatgtcatcctgaacgcccggctgtcatcggagcaaaacgcccgttcttatcagcatgagctggaacacatcagccgggatgacctgagcgcgcccggctatcgtgagtatacgcaggaggcgcagccatgaaaaagcagcagcagcggacgcaggaaccgccgcaggatgtagcggtgatctatgcg

SEQ ID NO: 22863 - DNA, 260 bp, Unknown
  Description of Unknown: LeftRegion for integrase B9864 sequence
aatatcattatacataatccaaacaacatggataaattcaataattattattcatctgtcattattgatacaataaaaaaaatagcataaatataaaggtgtccgacaatggcaaatattgtcggacacctttatatttattgacttttttcagaaaatatgctataatgaaagactatctacaaaaaggagacatataaatgagaatagcaatatattcaagaaaatcaaaatttacaggcaaaggtgaaagtattgga

SEQ ID NO: 22864 - DNA, 260 bp, Unknown
  Description of Unknown: LeftRegion for integrase B9865 sequence
tatcacaactgcagaacgcgagcaaatcgctatgaaaacagaggaaaaattgcgaaaaaataattgctaattctttgtgtttcttcggttttgggctggactttttgcaattattctggtatctttgtccctgccttaaaaaggcggggacaaaaattttacgcaggttcaaacccagaactatgaaaggagaaaaagcaatgaaaaaacgcgcagtggcatacatcagagtatctacggcaagctcggcgcagctgcac

SEQ ID NO: 22865 - DNA, 260 bp, Unknown
  Description of Unknown: LeftRegion for integrase B9866 sequence
attaaatcaatcggcgaaaatgttgttagacgcatatatggcgatatgcgaagcagattaccaattggaacaaattggcgcaaccaaagaggaacttcgcacggagttggaacagctgttactctatgacgatgattatgcggtattggatgaagatgtaatcccttttcttcttaaacttataatccgtatcaagtaagatggaaaaggctataatttgggtacgagtcagcactaaccaacaggacatagaggaccaa

SEQ ID NO: 22866 - DNA, 260 bp, Unknown
  Description of Unknown: LeftRegion for integrase B9867 sequence
ggagaagaaaataactccaaatgcttatatgtacctactttatcaaaatatgtgcgatatcaacgaaacctattaatactaaagcttttcgacgaaggttataggagcaatcagattaaaaaacacataaagagagaattatgtgaggacataagtattcgccacatagatcgtatttgtttaaaaagtaaaatgaaacgatgactgataaaaccgcaataatatatgcccgtgttagctcagctaaacaggcagaagaa

SEQ ID NO: 22867 - DNA, 260 bp, Unknown
  Description of Unknown: LeftRegion for integrase B9868 sequence
tatacaatcgtggcagcatttgcgtcctgttattatattgttttcaagtagattagtcctcgttatcggtggctcttgcattacctcggtgcagagcgcagttttacttcgcgttgcgggtgctggtatcagattgtcttgaagcgcccagactacgtctaatatataatcccccctctatagcgcgtgcgggggtctaaatgtcgacgtcagtcggaattgtctacagctatctccggttctcggatccgcgtcaggcg

SEQ ID NO: 22868 - DNA, 260 bp, Unknown; identical to SEQ ID NO: 22706
  Description of Unknown: LeftRegion for integrase B9869 sequence

SEQ ID NO: 22869 - DNA, 166 bp, Unknown
  Description of Unknown: LeftRegion for integrase B9870 sequence
tcatcctcgtcttggagtatcctaattatttctatcattttaccccctcccttaatggtataatctatgcaccactaaagttgtcctaagacaaggaggcgtaaatttgaagatagacgctttttatggtaggaattcgacggacgagcaagctgaaaaggggacg

SEQ ID NO: 22870 - DNA, 260 bp, Unknown
  Description of Unknown: LeftRegion for integrase B9871 sequence
ccctgacgaggacgaggatgtgctggagctgcagcgccttctcgcctgctatcaggtggcgagcgtggacgaccgcaaggtggtgtgggctgtcctgaacaagtatgcgccggtcgttaccttctgacggcggcaggcgcaagacagcgatctacatccgggtctccaccacctaccaagcggataaggactcgctgccgatgcagcgcaaagacctcatagcgtactcggagctgatactcggcatcccggactacgag

SEQ ID NO: 22871 - DNA, 260 bp, Unknown
  Description of Unknown: LeftRegion for integrase B9872 sequence
acggggggagtagagtcctcctgcgttcgtagtacgaacagagtttttttgcgacagggtggggaggagggggaccatggggaagcgaactgacatgcggcaggagcagcggcgggagatcgtcctgatccgggagttcgtcaacgatcaggcggcggtgcgccgcttctatcagatactgctctccataggggctgaagatgaaagaggcgacagcgaagcgggtggcgttgtacgtgcgggtgtcggggacggagcag

SEQ ID NO: 22872 - DNA, 260 bp, Unknown
  Description of Unknown: LeftRegion for integrase B9873 sequence
aagcaagcaatgtttctttttcgttcatgggtgtttcctttcttccatctagggaatgtgtgttcgtataaatataataacattacttttgttttaaaagtattatatataataaaattcaaaaattaaacacaaataatacgcataattgataaaaatatttgctttttcggcaaaaattatatatggagggattcaaaatgtataacaataaaatagagtttgaatatagcgaaataataatatatttgagaaagtcg

SEQ ID NO: 22873 - DNA, 260 bp, Unknown
  Description of Unknown: LeftRegion for integrase B9874 sequence
aagtgtctacagagcagcgtgataccattcccaaaaactttgaaaagacaccgtatttcggcaattgctaacaatctgtgttcttttggttttggactggatttcctcctacctttctgatacctttgcccctgcctctaaggcgggggcaaaaaaatttaagcatgttcaagtccaatacatagaaggaggaagaaacaatgggaaagcccaaaaagcgtgtggtcacctatgttcgagtatcctcttcaagtaaagct

SEQ ID NO: 22874 - DNA, 260 bp, Unknown
  Description of Unknown: LeftRegion for integrase B9875 sequence
gttttataacaacttttctcttatttctcatataacattttactcctttttataaccttatttgttatattaatctatcaaactatcatagtcaatatattttacttattatttttattatgttaatatatatttaggaggtgatagcgatgtagtaattaaaaaggttataagaaataaattaaaaggagtgatatgatatgtctagtatatcaagaacaattgaaagaagtcgaacaagaaaaacagcagttgcttat

SEQ ID NO: 22875 - DNA, 260 bp, Unknown
  Description of Unknown: LeftRegion for integrase B9876 sequence
agcaatcatgaatgtagtgataccgggcaaagtaaaagccatgaacacatacatggagaagctgaacaaagaccttgtaaaagctgttgaggaattaggcggtgatgctgccattggtctgcagtattggtctttcaagaatgacttttatgttgcaggtaccgctgttaagttcaaataattgttaggaggtttgccgcatggcaacaaagaaaaagaaaattgaatcaggtgtaggtgccatctatgccagatactca

SEQ ID NO: 22876 - DNA, 260 bp, Unknown
  Description of Unknown: LeftRegion for integrase B9877 sequence
cgaacagattggcgcggaaattaaacgacgccgaaaagaaaagaaacttacgcaggaacaactatccgaattaaccggaatcgggcgcaccgctattgctaaatacgaattaggaacaatagagctcggcatctcccacttttctataatttgtgatgccctgggatgcactccggcggaattttggcgggggttagacaatgagcaagaataacgcggtaatttacgcccgttattcatccagcgggcagcgggaagaa

SEQ ID NO: 22877 - DNA, 260 bp, Unknown
  Description of Unknown: LeftRegion for integrase B9878 sequence
aaccgctacatcgacacgctggtgatggccggcctcaagcccaaggtgatccaggagctgatccagaaggagctgaaggaaaagctcacgctggtgcaggttcgcaagatgagcaacaagcgccgcgctcgcctctcgggtgaagccgatggcggctctcagtcgcaaccgcagcccgccatgcctacagtgccgccacgatgaaacgggccgtcatctatgcccgcgtgagcacggagcgccaggcggatgaggggctg

SEQ ID NO: 22878 - DNA, 260 bp, Unknown
  Description of Unknown: LeftRegion for integrase B9879 sequence
attggcaaagatgaatcagttagagttcgtatgcctccattttcaaaatttcgtcgattccaacgtaatcaacttattaagcagctttctgcggaagggttacgtacagaccagataaaaaaacatatcaaaaaacacttatgtgaagatgtaagccttcgtcacatagatcgtatttgtgcgaagagtaaaataaaaaaatgagtgaaaaaaccgctgttatttatgccagagtttctgataaaaaacaggtcgaaaat

SEQ ID NO: 22879 - DNA, 260 bp, Unknown
  Description of Unknown: LeftRegion for integrase B9880 sequence
tggcggcgccgatacacagcggctcaccgagcgccaggtcaagatcatcgaagaaatctgggcaatacacttcgcgtgaactcgccctcccttctcctgcgcatgatcgcgagacggatcgcagccgatctcactgccgaattcgcggggcatgacatcgaggtacaatcccccgcggccgaccaccgaagaggcgcccattgcgcgcagcaagctacgcccgttattccactgacaagcagcgcgaaacctccgtcgaa

SEQ ID NO: 22880 - DNA, 260 bp, Unknown
  Description of Unknown: LeftRegion for integrase B9881 sequence
ggagcctttttccgttgcctgataggcgggatctttggctggcactatttctatgtgggccgtgtgggccggggcctcatgtgcattccgactttcggaaacttctttattgtcggaaacatcctcgacctttggaagatcagcagaggaaagtttaaagataacgtgggacagtatctccggcaataaggaggtttcctatggcggtcagtatcagttacaacgcggacttgaaaaaggcaaagggtgaaccgatcctt

SEQ ID NO: 22881 - DNA, 260 bp, Unknown
  Description of Unknown: LeftRegion for integrase B9882 sequence
aacggttcccgcatccccgacatcaacgctatccttacgtttgcagacttctttggcgtgcgagcggagtggatgttcggcatcgaacccgtggaaaggtacgaagatgtggcagacgaagaccgcaaaagaatcgacctgttcaagttggcttccgaaaacgacaaggcagtcatcgacttcatactgtcgaagtacaaatgaaagccgctatctacactcgtgtctcgacgacccatcagattgataaagacagcctg

SEQ ID NO: 22882 - DNA, 260 bp, Unknown
  Description of Unknown: LeftRegion for integrase B9883 sequence
cggtcgtctgccacccgcgccgggccggaaggacggcggttatgcacctggtgaatgggcacggcggcgactgatggatttttaccggcccgccgctcgcagcatgctgatccgactcctcgcggagcggatcgtggcggaatggctggacgagacggcagctcttgaggcggtgcccgatcggccgcacaatgttacacatgaccaaatcacttccccccttgctgcgcgcggcttcctacagccggtacagctctgac

SEQ ID NO: 22883 - DNA, 260 bp, Unknown
  Description of Unknown: LeftRegion for integrase B9884 sequence
agaatgccacctatacacacgggagtgcagaggctgttcttgtatgcgatggtgactactgggattctagtaccgacaagacaggcaccgcagaaaatggatactatggcagagacatcatcaagcacgactatgagaaagtcagctctgtcgaggatgcaatccaatacatttatgatcatcaaggataggagatatccatgccgaagcgcgagagacaacagccagccttgaccgccgccatctatgcccggtactcg

SEQ ID NO: 22884 - DNA, 260 bp, Unknown
  Description of Unknown: LeftRegion for integrase B9885 sequence
attgcggagttttacggcgttagccttgattattttggcgttgcaacaactgaggaagtgtttgagattttggcaagggcaaaagatgtttttgcatctgatgtgatcagcaaagacgaaaaagagcagttatataaagagcttatgaaattgtatttgcaattaagtgaataagcacataaaaaggggatcagaggaaaatgagaaaaacaaaacaagagaaaaagcaatcatatatcagagcagttatatatatccgt

SEQ ID NO: 22885 - DNA, 260 bp, Unknown; identical to SEQ ID NO: 22758
  Description of Unknown: LeftRegion for integrase B9886 sequence

SEQ ID NO: 22886 - DNA, 260 bp, Unknown
  Description of Unknown: LeftRegion for integrase B9887 sequence
actccataggcggcttcggctgcgattccttcactaaaaagacggatttcctgataacaggatatcagaatcccggagttctcgccggtaaagaaaaatcgagcaagcgcatcgccgctgaaaaaatgcttgcgtctggaaaatcgatcgagataataccggaagaagattttttgaaaatgctttaattggagatgaacatgaaaaaacaatcctccgccagaaatgcttcgcagcctctgaacgcggtcatctatgcc

SEQ ID NO: 22887 - DNA, 260 bp, Unknown
  Description of Unknown: LeftRegion for integrase B9888 sequence
tgtggtggcaacagcgtgggccgtcctgcaatcgccgcgccatcaccttcgcgaacatcgagcttcggaagatgggctatctaccgcacgagcgcgcggtagcatgaagcacgatcccgccttgatcactatcgtgaaggcgcttgcgcgcgccgctgcggcacgggactatgcagccagccgaaaaaaggaacagaacagtgcggacggtaatctacgcgcgattttcgagccagctacagaatagccgctcaatcgac

SEQ ID NO: 22888 - DNA, 260 bp, Unknown
  Description of Unknown: LeftRegion for integrase B9889 sequence
aattcggtatttatattccctttctcgttcaacgaatccaagaagacaaggagcgaactggaggtaaatatgaattaaagaacattgaacaatttataattcaagtacatgacattgagtcggttttattcaggaaattaactcatctctatgatgatgacgatttttgatccccgttaaaagaaggtgtgattactctaatgagaattgaagatctagagggcttgcctggtattctctatctacgtaaatcgagaaag

SEQ ID NO: 22889 - DNA, 260 bp, Unknown
  Description of Unknown: LeftRegion for integrase B9890 sequence
agcttggaaacaggtatttcgtgtctctgtcggataaggaattggctaaaaggcagaagaaaacaaagaaaacagaagtggaaagtgaataaaaatcctccgcgttgcgcataacgcggaggaaagggtcagtcaacaccacttgtctaaacccataattatattaccattatgccaggtatttgtcaaggagaaatcttatgaacgcagtcatatacgcgcgctattcgtcgcataaccagaacgagcagtccatcgag

SEQ ID NO: 22890 - DNA, 260 bp, Unknown
  Description of Unknown: LeftRegion for integrase B9891 sequence
ttcaatattactaaaatctactaaaaaaaataaatatggatattatattagtatgagaataccaaataaaaatgaagaaaatgatagatttaaagaaattacagaaaacttttttatgagagagattatttagtctctcttttcctttgttcttttttatgttataataattttattattagacattaggagtattacacatggataaaaaacgtgtttggacattatatagagtttcaacaaaagcacaagtcaataaa

SEQ ID NO: 22891 - DNA, 260 bp, Unknown
  Description of Unknown: LeftRegion for integrase B9892 sequence
caagatcgaattgacagagccatgagtggtgatcttactccgaagtgggtagatgagaaaggtaagatcgcgcggtttgttggcagtggtggtaaagagtataagactacgcttaagaagtgttcttgtcctgactttgcaaagcgtggtgttccttgtaagcatatgttttatctcgccggtcgttgtggagtgcttaaatgaagaatgtcaatcagtcgttaatacccgcggtgatctatgcaaggtattcaagctct

SEQ ID NO: 22892 - DNA, 260 bp, Unknown
  Description of Unknown: LeftRegion for integrase B9893 sequence
ttcaatacttcttgaatcaattcaaaaaaataagtatggatattatatgagtatggaaataccaaataagaacgaagaaaatgataaatttaaaaaaattacagaagaattttttatgagagagattatctagtctctctttttatttatagttttttatgttataataattttattattagacattaggagtattacacatggataaaaaacgtgtatggactttataccgtgtttccacaaaagaacaagttaaccac

SEQ ID NO: 22893 - DNA, 260 bp, Unknown
  Description of Unknown: LeftRegion for integrase B9894 sequence
gtggatcaatacgctcagacgcttgccgatatgacaaagctgagcgcagcggaagtgcaaaggtcctgcgtgtgtagcttctccaccgcgtcccaaatcatggaccgcctgaagctctacggcctcgcggcagaaaagcagaccagcatttatgaatggaccgacaaggcctattctctgggcgcagaaggggtgaacgggtgacaggggtaatgtcagtagatattaagtggaacgtgcctcagaagggcaaggaaggc

SEQ ID NO: 22894 - DNA, 260 bp, Unknown
  Description of Unknown: LeftRegion for integrase B9895 sequence
atagtcctgtacgattgtccagtggctcataacgatctccttccgagatttaccgggttccgccggctcgggagattgattcctacaatcaaattatacgcccaatgggcgcaattgcaatagtatatttacagactaattcgggcatcctaacgacactatacctatacttttcggactcgacatgacaaactgcctgaatggacaatccgaaagtatacagctatctccgattctccgacccgaagcaggcggctagc

SEQ ID NO: 22895 - DNA, 260 bp, Unknown
  Description of Unknown: LeftRegion for integrase B9896 sequence
atccagaactcggccgtcgtgcagggaaacaatgccacgacgctgatcgtccggaacggatccgtcgagcggaaggagctcagcgacgaggaggtcgagctgctgcggatcttcgaggctcttgatgtgaagggccggacggcgctgctgtccgctgccttcgatctcgaggagctgatcccgccgaaggagggcgactgatggccgcaaaaaaagcgcccgccggcggcgaggccatgcgggcgtacatttacgggaga

SEQ ID NO: 22896 - DNA, 260 bp, Unknown
  Description of Unknown: LeftRegion for integrase B9897 sequence
actccgggaactatgattattatgccgaatacgtcaccatgggcaaccgtgacttcgtatatctgatagcagaagaaagacaataaaaaaatgcccgccccggtttcccaggacgggccgcaaaatcagccaacaccacttgtccgatttgctattccattatagcgcggcgagggttatttgtcaaggagcgaaaacgcatgaaaaccgttaaaacccaaagcggcgcgacgaaagcggtaatctatgcccgctattcg

SEQ ID NO: 22897 - DNA, 260 bp, Unknown
  Description of Unknown: LeftRegion for integrase B9898 sequence
tgattcgctgcttggttgtttcttcagaagcaaacaaggacttttaatatttgttaatgaaaatatatccaagcaggatcagaataaggtaattgaaattattaaagaaaagactgatgaatgcaagactgctgatttaggcattgtaaaagcaggctttaaatatcgttgcggcggatcatgctgcaagtataaaggggatggaagtattgaatgttgcagcttatgtccgatattcaagcgagaatcaaagacaggaa

SEQ ID NO: 22898 - DNA, 260 bp, Unknown
  Description of Unknown: LeftRegion for integrase B9899 sequence
ttactccgggaactatgattattttgtcgaatatgtcaccatgggcaaccgtgatttcgtgtatctgacagccgaagaacggcaataaaaatgcccgccccggtttcccaggacgggccgcaaaatcagccaacaccacttgtccgatttgctatttcattatagcgcggcgagggttatttgtcaaggagcgaaaacgcatgaaaaccgttaaaacccaaagcggcgcgacgaaagcggtaatctatgcccgctattcg

SEQ ID NO: 22899 - DNA, 260 bp, Unknown
  Description of Unknown: LeftRegion for integrase B9900 sequence
atgaagtggaagaaagccagtgctaaggaagaaatgtctgagtaaaagacggcgtgccgcacgcgccttcaatcgtccttcaaaagcaaaaagcccacaccgcgggtccagcgcgatgtgggcggcagagtactctatggcgtgaggtgtctgcatgtttattatagcagacaccggccggaaaggcaaggtgtttgcctatggcaaaacgaaaaaaggaagttcagcagccagcacaaattgccgcgatctatgcccgg

SEQ ID NO: 22900 - DNA, 260 bp, Unknown
  Description of Unknown: LeftRegion for integrase B9901 sequence
gatatgcaggtcgattcggtcgagcagcggcccggacaccttggcctgatagtccgcggcgcagcgcggtgcccgcgcacaggcgaggccggcatcgccgagatgaccgcaacgacacggattcatcgccgcgatcagctggacgcgcgctgcgacgcacgtaaacaaatgggcaacacctgacatctacggggtaggctatgtctcaaaatgcaatcatctacgcgcgcttttcaaccgcggagcaaagcaagggttat

SEQ ID NO: 22901 - DNA, 260 bp, Unknown
  Description of Unknown: LeftRegion for integrase B9902 sequence
acggccaaatccgttcggcaacgcccacggcaggacccgttccgtcaaagtgaccagttccgtacccgaaaacagccggcaggaggactgtccagcggagagtaaaaaggggcgcgcgcagagagtgtgtgggcggaggtctccggctaccccgtttactcgttctcccgcctattccgcctgtcaaggaagcccagaccatgcccgccgaccgtcccacccctaccccgccgaataatgaggtcaacccttccctgccc

SEQ ID NO: 22902 - DNA, 260 bp, Unknown
  Description of Unknown: LeftRegion for integrase B9903 sequence
ttactccgggaattatgattattttgtcgaatacatcaccatgggcaaccgtgatttcgtgtatctgacagccgaagaacggcaataaaaatgcccgccccggtttcccaggacgggccgcaaaatcagccaacaccacttgtccgatttgctatttcattatagcgcggcgagggttatttgtcaaggagcgaaaacgcatgaaaaccgttaaaacccaaagcggcgcgacgaaagcggtaatctatgcccgctattcg

SEQ ID NO: 22903 - DNA, 260 bp, Unknown
  Description of Unknown: LeftRegion for integrase B9904 sequence
caaagcagtatttgacctaaaaacccccaaagccaagataaaaagaatcgagaaatttgcgacgatagtttctgaatacaaacagaagatgaccgacccttcaagcgtgagtaaagttgagcaaaaaatagaaaagctgctcaagcaaaccgaaaatgaattggttgtaaaaaaatcatagttcttgtccccctatttcaatgcccaactcccctttcccccccggtgcccacgtcgctgcctacctgcgagacagcggc

SEQ ID NO: 22904 - DNA, 260 bp, Unknown
  Description of Unknown: LeftRegion for integrase B9905 sequence
gtggtgattggtggcctcttgctcttgatcagcttgattgatcaatccatgtcgcctaacaggccgacagcgctttacatccttggcggctgctttgtgacctatttcatggtcagcatcgcctccgatgtccacagggtagcgtactatacgcgcaagatcgccgaagcgaccgagaagcagcccgaagaacctaaagcatgaaagcagcagaaccgcttcgcaccgccgtcatctacgcccgctactcctccgcgcag

SEQ ID NO: 22905 - DNA, 260 bp, Unknown
  Description of Unknown: LeftRegion for integrase B9906 sequence
aagaaattagggaggcccgtcatggaaattaagaaatgtaaaatagatataaataaaatccctaaagaggataaagagattatagggcgtaggtttttggcttgtgtaaaggactattttaaaaagcccggcgtagaggaggagtacaaactatggctcgctcaacgtaataaaaattttgtttgatttataatttatttatgaataacgccgtaacctataatagattttctccgggccctaatcaaagggaggagagt

SEQ ID NO: 22906 - DNA, 260 bp, Unknown; identical to SEQ ID NO: 15830
  Description of Unknown: LeftRegion for integrase B9907 sequence

SEQ ID NO: 22907 - DNA, 260 bp, Unknown
  Description of Unknown: LeftRegion for integrase B9908 sequence
tatagacaagttcaatgagatattcaagagttgcgacaaactagaagaattcaatgaagagatctgcaaactaatgctagaagaaataatagtaatgagcagaaacaaattgatatataagtttagaaatggatacagagcagagatagaagtcattgactactacctagaaagagatgaaattggggaggtggaaatttatgcttgcgcctaatgtaagagtgatacaaccaacaaaaataatagatgatacatcaatg

SEQ ID NO: 22908 - DNA, 260 bp, Unknown
  Description of Unknown: LeftRegion for integrase B9909 sequence
gttattttaagagtggggagattgctattaaaggggtagcaatctccccttatttttttttgcctaaaaagtgaggagaaatgccgttatcactcaggtgaaagaggtgtatttacattctttcaaaaagctgtataatatgtttgagatactttgtaaaacctatcaaatatctcaaggagaacacaggaggaaacaggatggaaagagcggtattttatgccagagtgagcactgaggaggagaaacagcttaatgct

SEQ ID NO: 22909 - DNA, 260 bp, Unknown
  Description of Unknown: LeftRegion for integrase B9910 sequence
aaatatattatactcgactattggtcttatatgtacttctttagggatgacattaattaatacaaaaccgcctcaactataatgcattgattactaacacattaagagtataaaatccgtctaaattgttttagtcatctatttttattttatactcttagtttttttcatacatttgggtgtatttaaaccacaaagttatgaaaaaatgcatcatttattctagagtctcatccgaccatcaggattattcatctcaa

SEQ ID NO: 22910 - DNA, 260 bp, Unknown
  Description of Unknown: LeftRegion for integrase B9911 sequence
tcaatcgctaatggtttaatcacatttgaatataaggggccggaagaaaaactcgtacatcgccagcgtgatcagtccggtgatgatttccctggccgtgattagttccatttctgcacctccttcagagagaggatagcatattttacaatattcttcaatctttttacaaaattattgtattttgtacggaggtttctatgaataataacgccgctgtgatttatgcccgatactcttcgcaccgtcaggatgaacag

SEQ ID NO: 22911 - DNA, 260 bp, Unknown
  Description of Unknown: LeftRegion for integrase B9912 sequence
gctttagaaaatggttacttaggaagtgtaagagataataaattttctgctccttataattaatattagcccttcggggcttctctttttacacaaataccgaacaaatgtatataaataatcacatatttgttctattaagtgaaaacattactactaattatataaaaatgtgaactaatatttttggagggtttataatgaataatacaactgcagcaatttatgcacgtttcagttctaataaccagagagaggaa

SEQ ID NO: 22912 - DNA, 260 bp, Unknown
  Description of Unknown: LeftRegion for integrase B9913 sequence
gattgtggatctatatcgctctcaacagtccaatcatccataaggcgagatatagccaccaagccagaacccaatgagcttgttgaggcgtccacaaatcgagatcagttcttttcgctccggcccgctctctgtacacatttcgtgtaggtccaagcgtcaagcagcgaagctaaactttcgcgctcgacggaggttcaatgcgagcgagggtttacagctatctcagattcagcgacgccaagcaggccacaggcgcc

SEQ ID NO: 22913 - DNA, 260 bp, Unknown
  Description of Unknown: LeftRegion for integrase B9914 sequence
caactcttttgaagtaatgtgagtattaaattcaataattcgatatcgttacattcttgtaactgttttgtgattgcttctacgtaaacattgtgcatgagcaaaccccctgtaagaacatatgctctatattatggtatataattgttagaattatgtgtaacgtgtgaattttatatgacaactaaggagatgggaaaatgtataaagtatatgagccgctatcggcagaagaatgtttagagtatttgagaaaatca

SEQ ID NO: 22914 - DNA, 260 bp, Unknown
  Description of Unknown: LeftRegion for integrase B9915 sequence
cacgtttcgccgtgggtaaaggccaccatcgcacgcgcgaaggaggataaatgaacaacctccaaaccctaatccgcctcctcgccaaacaagccgtgcgcgatcatttgcaggcgcagcagcccgcgccgtgcggcaagccggccgagcgttcaaatcgcccggttcaaatcccggcccgcgcgcgttaatctccgcccatgcgacccgccgcctactgccgtttttcgtccgacgcccagcgcgaagcctcgatccgt

SEQ ID NO: 22915 - DNA, 260 bp, Unknown
  Description of Unknown: LeftRegion for integrase B9916 sequence
cacacataccgcccgccccagcaccctgcgcaagctggctcaggcgctgggcgtcaagcccacccagctcacgtcgaaccagtaaaaaggtgaagaaaaagccccgcatcgttccgtagacgaccggggcatggcagaccctttgggattgaaaggactgaatctgcaatgagcactctactacgaggtgggccgaccgggtgagcgtcatcgacctgcacacacggcaacccgtcgatgagcgcccaggcgtcgtcctg

SEQ ID NO: 22916 - DNA, 260 bp, Unknown
  Description of Unknown: LeftRegion for integrase B9917 sequence
gtttgtcggggttctctggatcattgaaaccataaaggaaacgaaatgaccaactaccaccagattcttatccgcctgctggcccgccaagccgtgcgcgagcgcgtgacacagcaaacgcccgcgccgtgcggaactcagccgatccgttcaaatcgccccgttcaaatcgccgagcaaacaaagtagtcttgaagattatgagaacagccgcctactgtcgattcagcagcgacgcccagcgcgaggcgagcatccgc

SEQ ID NO: 22917 - DNA, 260 bp, Unknown
  Description of Unknown: LeftRegion for integrase B9918 sequence
ggtggatattatccgccgccggatccgcagccctacattgttggccattcagaatgtctggatacggcataccggttttctttttggtaaagaaaaagccccggctttcaccggggcatcccatgagttgtgctcatgtaatctcgcaaattatagtatagcactgctccgggatattttgaagtattccgggcatttttatgccctttttaggaggttttgctgtgcattttggaatttatggaagaaaatcatatttt

SEQ ID NO: 22918 - DNA, 260 bp, Unknown; identical to SEQ ID NO: 17524
  Description of Unknown: LeftRegion for integrase B9919 sequence

SEQ ID NO: 22919 - DNA, 260 bp, Unknown; identical to SEQ ID NO: 15922
  Description of Unknown: LeftRegion for integrase B9920 sequence

SEQ ID NO: 22920 - DNA, 260 bp, Unknown
  Description of Unknown: LeftRegion for integrase B9921 sequence
aaagcgggaggaggtcatactggccgtgctggatgccatccagcgttccggcggctccgcgcttcaggttgacgtgaaggcttcacttccgagttggatgtccgattacttcgacgatgccgtgcgcgagctgtacgaaactggacggattaaaacgtccaaggacggcgctcgcgtccggctggaattggtataagcctatggaagaactgactcaggagccttgcttcgtctacgctcgctattcctctcacgcgcag

SEQ ID NO: 22921 - DNA, 260 bp, Unknown; identical to SEQ ID NO: 15606
  Description of Unknown: LeftRegion for integrase B9922 sequence

SEQ ID NO: 22922 - DNA, 260 bp, Unknown; identical to SEQ ID NO: 14687
  Description of Unknown: LeftRegion for integrase B9923 sequence

SEQ ID NO: 22923 - DNA, 260 bp, Unknown
  Description of Unknown: LeftRegion for integrase B9924 sequence
taaaatacttgaaaagaaacacgatcttcatccaagcctcaaagatggttttctaaaattatatggctacacaaatcgtgaaaacgggattcgacatgcaatattcgatgaggaaccaaatctgactaatcaggatgcaaagtttttcctattgtcttgtaccagttttatcaattatctaaaatctaagctttaatcaaatgaatgttgagcatcaattttctccaagagtatttgtagccgctcaccttcgcgattca

SEQ ID NO: 22924 - DNA, 260 bp, Unknown
  Description of Unknown: LeftRegion for integrase B9925 sequence
gctttagaaaatggttacttagggagtgtaagagataatgaattttctgctccttataattaacattagcccttcggggcttctctttttacacaattaccgaacaaatgtatctaaataatcacagatttaatctattaagtgaaaacattactactaattatataaaaatgtgaactaatatttttggagggtttataatgaataaaactgcagcaatctatgcacgtttcagttctaacaatcaaagagaggaatct

SEQ ID NO: 22925 - DNA, 260 bp, Unknown
  Description of Unknown: LeftRegion for integrase B9926 sequence
ctgaaaatattctatctcggagcggatgatcaaatacttgacgatttcagattaatcagtatcgggtatgacacataaaaaactcccgcaccgtgcgccaacacgatgcgggatgaacagtccgcaggaataaccacaagcccacgtctgctacaccattatagcagacgcattcccatttttcaaggagggattctgctatggcaagaaaaaagtctcaggagaaagcggcggcaactgcagcgatctatgcccggtac

SEQ ID NO: 22926 - DNA, 260 bp, Unknown
  Description of Unknown: LeftRegion for integrase B9927 sequence
atcaggcgatgatacggcagagattcgatttcgcttaccgcgattcaaaaagtacctgaaacaccaacgtaatttatatataaaatctcttgctgaagacaagaacatgccaactgtccaaatacagaagataattgagcatgaaaaccatgaaaagctgagtccgaattacatcaggcgcctgcggagaccccagtaatatgaaaacagctgttgtctatgctcgggtgagcgaagcacgcaattcagaggatggtttg

SEQ ID NO: 22927 - DNA, 260 bp, Unknown
  Description of Unknown: LeftRegion for integrase B9928 sequence
gcccctgtaactgacggcaagtaggtcccatgcacttctccccgggcggtctcactgtcccggggagaagtgcaatctgggccaggttgtccaacctccacgaccgcatagggtggtcgtggaggtgcccgccatgaacaaaccaagccagcagaccctcctgagggccctgcgctggctcaagaatgaggtgcactgtcatgggctcggtgatcgtcctgctggtcatgatctacctgcgggtctccacaagggatcag

SEQ ID NO: 22928 - DNA, 260 bp, Unknown
  Description of Unknown: LeftRegion for integrase B9929 sequence
tttttttgtcatgcattcctccatacaggccgggtgcgtacattacgtcagaaaacaatgccagtaagagtaggaaaccacaaaataaaaacgcgtctttggcggaaacaaagacgcgcacgcataatcagccaacaccaattgtccgatctgctatttcattatagcgcggatgatatgtgaaatcaaggagtattcatatgaatgcagtcatatatgcccgctattcctcgcatggacagacggagcaatctatcgaa

SEQ ID NO: 22929 - DNA, 260 bp, Unknown
  Description of Unknown: LeftRegion for integrase B9930 sequence
acgcaataggcgtttttacctccagcggtaaacagttaggcaacgtcagcgccgaccttgccggtgatctgcttaaaaaatacggtaacaatccaatgcaagtaactattgccggaattactggcggcggtgataataactacggctgcaatcttcacgttgtaatatatgcaatgccgcaacaataaggggcgttatatatgaatgacgataaattgacaacgggctatatttacgcccgctatagtccaggcccccag

SEQ ID NO: 22930 - DNA, 260 bp, Unknown
  Description of Unknown: LeftRegion for integrase B9931 sequence
cttgactataacttcgataaagaaaagtatcttgtcagcgctggcgtttctgatattggttatctttctgctgctgccgcaaaggttgtcgaagaatgcggcgaagataacgtttctgtttatgtcgctgccgtatcttctgacgacgaaggaaccgacgaagtatcggtttacatcttcccgaaaaggaactgacagcaatgaagcaatcaacccaacccacaacaaacgcggtcatatatgcccgttattcgtcgcac

SEQ ID NO: 22931 - DNA, 260 bp, Unknown
  Description of Unknown: LeftRegion for integrase B9932 sequence
gacatgtcccggctcgacgccgccggcctcatcctcctcgtcgagcgactccgcggacggctggacgacatgctgcacctcctcgacgaagtgacgccccccgactgacccgaaagccgtcccgcccaatagggggtctcacttcgactcgcgcacgcgaacaccaccagacacccactttaagccgctagggtgacgggatgccgctcgcacccgaatacctccacctcgtcttccccgaccaggtattcaacgccctc

SEQ ID NO: 22932 - DNA, 260 bp, Unknown
  Description of Unknown: LeftRegion for integrase B9933 sequence
gtggaactatattatctaaattccaaatatatactgacaatggagatatagaaaaactgcaataaataaaaaatccccattgctacgccaatagcaaaagggattgatgagtgttatgatataacaccaaaaaccaaatatattatatcataacactccgataaatacaagaaaaatcaaattaaaggagtgtttttttaatgcaaaaaaataataaaagtataggtaacagatgtgtaatttatgcaagatattcttgc

SEQ ID NO: 22933 - DNA, 260 bp, Unknown
  Description of Unknown: LeftRegion for integrase B9934 sequence
cgccgtgccggcgcaggtgagccttgacgatttggcagaagttcacttcctgccgagcgatcagcgcgtgctgatcgaaaagtttatcgcgctgaaacccgccgtgcggcaagggatcctcgattattttctcgaagtcgccgcggtcgtcaacgcgggcaaaactctataacttgacaagttagacgcgggtggtgagcatgatggatgcagatatgcaaaattgcgttatatacgcgcggtattcctcgcacgcacaa

SEQ ID NO: 22934 - DNA, 260 bp, Unknown
  Description of Unknown: LeftRegion for integrase B9935 sequence
tatatcggcctgcattatgtctatgtcggtaggtacggaaaagctatcttatactgttgcaccttaggcctgtgctttttcggttggtggcatgatcttggcttgattctcaaaggaaaatttcaggataatgttggcgattatctgagagcataaaaaatgcccccggcagagccggaggcaagagaggaagtgaacacatggaagtcctaaaacacccaaattatccatgggcggcggagaaaatcaacgcagttatt

SEQ ID NO: 22935 - DNA, 260 bp, Unknown
  Description of Unknown: LeftRegion for integrase B9936 sequence
aatattatcgggaaagaagccgcaaaccaaacacattttgaggtcgggcgaaaagtcagaaaaacgattgctgaacttggaggaacaatgccagaagacttgccaacaccggcgaaaagcattaagcaaatagaaaaagaacagcagcgtctggaacagaaataaaaatcgccccgatgtaatagaaagaaggtgaccccatgaaccgcaaccgcacaaacttaaatcccaacggcctctactatgcctatctacgcaaa

SEQ ID NO: 22936 - DNA, 260 bp, Unknown
  Description of Unknown: LeftRegion for integrase B9937 sequence
agcaaaacgaacaatgttctcgttcatggctcctacctcctaagaatgtgatgcctgtaaatattactaaagtatttcatcacaaattcgactttgttacagaataaccagatgggttatggaaatgcaggtttggagggcaaacttgctgaaatcggagcattttgtacaactacacttgtacgtgagggggcgcgcgcatggccaggaaaaaggcagagaagaccgatggcaacatctgcgtggtgtatgccaggtat

SEQ ID NO: 22937 - DNA, 260 bp, Unknown
  Description of Unknown: LeftRegion for integrase B9938 sequence
tgaagaatttaaagtaatttatcgtaatcaatacggaatagagttatcccttgcagaagcgacaaagcaggcgaactgtttaatccgattgtataaagcggtattaccgccattaaagaatgaaacttcaatagttaaagatactaatcttaaaaatacagcttgatttataatttatcatgtgaataatctacattgttatgatagaaaaggttaaaagtccaataaagtattttctctatgctcgaaaatcttctgaa

SEQ ID NO: 22938 - DNA, 260 bp, Unknown
  Description of Unknown: LeftRegion for integrase B9939 sequence
attagtccgtaagcaatctacagcggaaatgggacaaactataattgcaagaataggtgatgaagtaacctgtaaacgattttatattaaaaacggacttccggtattagaaccagccaacttaaagtataaaacaatagagccaagggaattagagatagtaggaatagtaacaaaaataatcaaggagttggagtagtgtggtgcggggagtaatttatgctaggtattcatcagacaatcaaagagaagaatcaata

SEQ ID NO: 22939 - DNA, 260 bp, Unknown
  Description of Unknown: LeftRegion for integrase B9940 sequence
attggttcgtaagcaacctacagcagaaatgggacaaactataattgcaagaataggtgatgaagtaacctgtaaacgattttatattaaaaacggacttccggtattggaaccagccaactcaaagtataaaacgatagagccaagggaattagagatagtaggaatagtaacaaaaataatcaaggagttggagtagtgtgttacggggagtaatttacgccaggtattcatcagacaaccaaagagaagaatctata

SEQ ID NO: 22940 - DNA, 260 bp, Unknown
  Description of Unknown: LeftRegion for integrase B9941 sequence
tcattcatgggatgcatcctttcttgcatttaggaatatatgttcgtgtttatacaaaaaaaataatgcagaaactactgttaaatatattataatttaataatttataaaatcaactataattatttcacgttttacaagtatttaccaagatagattgcgcatgttgtcgcacgttgtcggaaatgggagatgaaaaaatgtatacaaacaaaattgaaggcttgtccgttgatggaatcataatatatttaagaaaa

SEQ ID NO: 22941 - DNA, 260 bp, Unknown
  Description of Unknown: LeftRegion for integrase B9942 sequence
agaatgcgaaaggtcaatcattaccaacgttaaacgttacctgtccgcattgcaagactgaattaacaatcaaaaaataaaaaaagccccgcaactgtttggagcagtcacggggtcagtagtgttatggaacaccaattaaaaacatatatattctaccataacattacttgaaaatcaagttaagaggtgttatttttatgaaaaaaattaaaaatcaagtacaaagagcggttatatatgcacgttattcgtgtagt

SEQ ID NO: 22942 - DNA, 260 bp, Unknown
  Description of Unknown: LeftRegion for integrase B9943 sequence
cacaagcacgacctcaaggcggcgctcgcctagcgccggcaccgcccgacagcacgaccgaacgcccccaatccatgaggatcacacctcgcgggttgggggcgtttcgctgtctccgcacgctcgacacgcggagtgcgagccgatcacgcgacgactccaatgatgagcgtacactccgtcatgtgaggattcttggagtggtccggctctcccgcaccgacgccgcgagcacgtcgatcgagcgccagcgcgaggag

SEQ ID NO: 22943 - DNA, 260 bp, Unknown
  Description of Unknown: LeftRegion for integrase B9944 sequence
tacgaggggatcgtgcatcgggtcaaggtgctcgaacgcggcttcgagtttgagggctcgttgcaccgtagcctgtcggggatcgcccggcagatcaccggccggagctggaacggctacgtgttcttcctcggccgtgaccagggcgcggcggagtccgaatctgaggcagcgcccgaggtgcacgctgaggtgtcgcgatgaggcgcaggaagccggcgccggtcgccgccgcgcacctcgaggcgaagcgctgcgcc

SEQ ID NO: 22944 - DNA, 260 bp, Unknown; identical to SEQ ID NO: 16040
  Description of Unknown: LeftRegion for integrase B9945 sequence

SEQ ID NO: 22945 - DNA, 260 bp, Unknown
  Description of Unknown: LeftRegion for integrase B9946 sequence
tcaaatttataatagcgagatatgtgtatatttatattataccatatattttattacatatcaagagataaataaaaaaaaacgccccaaaagatgctggaacatctctcggagcgcaggagaatgtggtacattcaccattctttcaatgtgaattataccatatcctcctccaaatgtcaaggagtgataacaaatatatgaaaaccgccgtaatatacgcccggtattcgtccgacaagcaaacggagcagtccatc

SEQ ID NO: 22946 - DNA, 260 bp, Unknown
  Description of Unknown: LeftRegion for integrase B9947 sequence
ctgcaggcggcagcacttgctcatgctcaggtaatacctataactgctcggatttttcaagtcattccagcgcacaggcatgttttacttactgcgttcaacaaggcgcaggcgatatccataagctggatcgagataatgatggactcgcctgcgaaaacaactgatcattaatctccaatctccaatctctgcattttatgaacctcctcccgcctccctccacgctcccgcctggctccaccgtttgggcatacctg

SEQ ID NO: 22947 - DNA, 260 bp, Unknown
  Description of Unknown: LeftRegion for integrase B9948 sequence
ctctcaaaggtgtctaatcgaaaaaaatcttgctttttttgaaagatttttcaatttcttatttctgttgaaaatttgatagttacgtaaaattatagtgtaactccatcgttgtttgttatagcgaatgataataaagttacactataattcaaaattatttcgtatctttgcaccataatttgaaaggagtaaagactatgaaatcaattttaatttgcagaacatcaacaagccgtcaagaaattgacaaccaaatc

SEQ ID NO: 22948 - DNA, 260 bp, Unknown
  Description of Unknown: LeftRegion for integrase B9949 sequence
aacatggaacgttgaaaaaattataaaaaaacttttagagtatgaagagttcaacgggggctgatgcaacgccctttttattttaaaatgcttacggattttagaagcaatctgtgaataaacggttcccaaaatccactggttatgatatagtaacaaacatagtaataccaacgtttttgaagggaaggaaaaaaacaatgacaacaacaaagaaaaaacaaggcgcaatttacggaagaaaatcaagggaaaatgaa

SEQ ID NO: 22949 - DNA, 260 bp, Unknown
  Description of Unknown: LeftRegion for integrase B9950 sequence
tggcactgcagtttgaacggatggtcatagatggttagaggaggatttatgaccatcgaagaccggaaattaattgacaatgaattccataatgctactattaatgagctcgagtttgacaaagatctgattgttcctcagttactagaattcgcagccgtctatgagaaacgaatcaaaatcatagaggagcgccaaaaatgcaatcttcattagaaatccagatcgccgaaaagattgaaactgcccgcaatcataag

SEQ ID NO: 22950 - DNA, 260 bp, Unknown
  Description of Unknown: LeftRegion for integrase B9951 sequence
caagtagggttatttaagactatttgatttttagactctaaacctgtaaccagctccccatacagtttcgatatattgataatttggttctttttgtgtttttattaatgttcctttcgtgtcgtacgtttctacgtattgtacgaaaggaacataacatgttataatatataaaatgttaacctttggaggaattttatttgtctaacctaagaagaaaagctaaaagcattcaaattgatcctaataaagttgctatt

SEQ ID NO: 22951 - DNA, 260 bp, Unknown
  Description of Unknown: LeftRegion for integrase B9952 sequence
cctcttgagaacaaaggagtcaaggcgaatggcttctcaaactcagtccggtctcatcgatgctctcgtcgaaatcggcagagagcggcagcgaatcctcacgaacctgcgaacagcgtacgaagcgcacgacctcgacggggtcctacacttcgtggcggaaattgtgggagtcgaagaaaaaatcgaggaggcgccgcgtgaaaaaagtcattgagctcatccgggtctcgacgtccgagcaggctgccgaggaccgt

SEQ ID NO: 22952 - DNA, 260 bp, Unknown
  Description of Unknown: LeftRegion for integrase B9953 sequence
aatttagagaattataaaattgccatgaatttaataaaaacaatgcaaaacttaggtattttatcagaaaacgacctaaataagatgggtagagttttaagaaaaaaatatagtatcaaaccaagttctatttatgtcgatgatgggttgaattcctagccgtttagagtgatgtatatgactaaggaggtataaagaaaatggaagaaaaaagcattgaaaaaagactcggtatgccgtccttagttcataagaaaaaa

SEQ ID NO: 22953 - DNA, 260 bp, Unknown; identical to SEQ ID NO: 17524
  Description of Unknown: LeftRegion for integrase B9954 sequence

SEQ ID NO: 22954 - DNA, 260 bp, Unknown
  Description of Unknown: LeftRegion for integrase B9955 sequence
cagagaagaatggaaggctgagttaaggaattctttgttttgtctttcggcaaaataccctgcaatcagtttctctggaattggtttccccaatgattggaaagatatcttcctgaatactgatgatattactttgcgtcccgtctccattgagaaaaaggaaatcccacatttagcccctcttccggaaggaggatctcatgattgctgaaactttgaatgcggtcatctacgcccgctattcctcccactcccaaacc

SEQ ID NO: 22955 - DNA, 260 bp, Unknown
  Description of Unknown: LeftRegion for integrase B9956 sequence
taaattaattaataagtaatcatgaacttagaagcaatagatatagcagccgagttatcagaaattagggaaagacaatctatggaaggtgtcatactagtgatgctatcgcaagcgcaaagattaggtgggattaaaatgccccctgaaattgaagaaagacttgcaattgccttcccaagtcatgctaaaatcgactaatgaaatacttcatatattgtagaaaatcaacagaggacgctgaaagtcaatcattatct

SEQ ID NO: 22956 - DNA, 260 bp, Unknown
  Description of Unknown: LeftRegion for integrase B9957 sequence
aaggaatgaacgacgcgcagaaagaagcagttcttgaatacgcgcagcgggtgattgcgtccctgatcgacggcgacgggatcgaagcgaaggttgccgcgtatcgggaagaattgctttcggaaaaagatacccgaacgttatcagcttcacagactggaaacggaacaaccgactgaagtaattgaaggtggcacacaatgaaacagcagtcaaccgttaacgcggtcatttatgcccgctattcgtcgcatagtcaa

SEQ ID NO: 22957 - DNA, 260 bp, Unknown
  Description of Unknown: LeftRegion for integrase B9958 sequence
aagcgtacaacaggcaccctgttttgggttcaactcttcaaccgttaagagttatatttaaattttctaaaaatatatatataaataagccttttagcggttgaaaaaacggttgaaaacggttgaaaccgcttcaaccgctgccaaccgccgaacgatgaaaagcgccagcgctggcgcttatgaaggaagggatgcagatgccgaccgcctatacatacgcacggttttcgtcggaccggcagcacgagtccagcatc

SEQ ID NO: 22958 - DNA, 260 bp, Unknown
  Description of Unknown: LeftRegion for integrase B9959 sequence
attaaaatatcggatttcttagaggtgagtttggattggttgattgatggagataagacagaagacatctcattggatgacttacaaactgaactactagaaattcttaattcgttaagtgtaaaagataaggtgagcttgttatcgtttgcatatgaacttcaaaataataaatctaaaaataaggagtgattcaacgcatgaaagcagttggttatttacgttactcttctgatagtcaaagtgaaggatattcaatc

SEQ ID NO: 22959 - DNA, 260 bp, Unknown
  Description of Unknown: LeftRegion for integrase B9960 sequence
aagcgacttacatatattcggaatcggatcctatataactatgaacttggaataaatgaaaataagccaaaatggtcaccagagacgattaaagtgctgcaccagctcaaccgcattatattaaacagaattcattacagatattatggcacttagtcatctgcttaagtaatcgttgttaaattataggagtgattgcggtgtacaagttgccagacggagaatattgtgcctacctacgaaaatcacgggctgatctg

SEQ ID NO: 22960 - DNA, 260 bp, Unknown
  Description of Unknown: LeftRegion for integrase B9961 sequence
aaatttttttaaggttatgtttttcattttcaattccatcactccctatttttattatagggagatgattcaaaaacataacttagtgttgttcgttcgatatatcgaactaaaagaacaatcccgcccctgcttgatttttggatgaccatatcattattattaaaatatagtcaaaccaaaaagagggagagggaaaaatgtatcagcttccagcgagagtcaaaagaattattttatatgttcggaaatcccgacaa

SEQ ID NO: 22961 - DNA, 260 bp, Unknown
  Description of Unknown: LeftRegion for integrase B9962 sequence
tcgctttttgtgatctatggctgaggggtgagtgagccccgcctgagcgccctccccgccggtgtcccgcaagacgctggtggggagggcttcgtcgttcctgcgtcccgctgcctggtgtcctttagaactaaggtgcatccatggatgcgccttagtcgttacactctgtgtcgagcagtaggcacggaggggtgagcatggccgtactgaccacagctgaggccgtcatggacgaggccgtcactcgggcggcccgc

SEQ ID NO: 22962 - DNA, 260 bp, Unknown
  Description of Unknown: LeftRegion for integrase B9963 sequence
tcctgttctatcaaagtccagcgcaaccggaaatggactaaggagaaggcacggaaaatgagcgaacaggatgtaatagaagtgtaccaggaaaaagattactggaaagtccttgataatctgacaataatgaaagaagacgattccgaggccgattatctactggataaattgaaagtcctgaaggtttggaaaagcctatgaccacagccgccgtctactgccgtgtcagcaccgaggatcaggagagggagggttcg

SEQ ID NO: 22963 - DNA, 260 bp, Unknown
  Description of Unknown: LeftRegion for integrase B9964 sequence
cgaaggcgtctattacatcatggacagcccgtccccggactatgtgaacctgaagcccgtccgcctgattgacggcgacctgtatctgcacatcttcaagtcgcaatatgtgaagttccacaagatgatccaggtggaggccggtgaatgcgtccttgacaccaacatgccccctctggggccgcagggggagtgatcccatgcccgcgaagagcgccgtgcagccctccaccgtcaacgccgtgatctacgcccgctat

SEQ ID NO: 22964 - DNA, 260 bp, Unknown
  Description of Unknown: LeftRegion for integrase B9965 sequence
ttactcatattgacggagaagaatttgtgttgccgaaaaaggtcgctgaatacgcaaataaatactttgatgttcctgccgaagttggtgaaaactgcgaaagcctgatcttttataaataaagaccgcttaagatgtactgaaaacagcccatcataattataaaattaccgaattattttaattaacggagtagatcaatggataatgccgtcatatacgcgcgcttctcgtcatcgaagcaacaggaacagagcata

SEQ ID NO: 22965 - DNA, 260 bp, Unknown
  Description of Unknown: LeftRegion for integrase B9966 sequence
tggatttcgaagcaggatgctccgactgtagccgatatgataaagaagcacgagtgctcgtattctcttcaagtagaaaagggagcgtacaagcatctcgtatatgatgcagatgcagataaatataaggtcgttaccgagtcggattctgaatacttcgcggaagtatttatcatctataaagtcgaggatgctgcagaatgaaagctgtaatatacgcgagatattcttctcacgctcagcgtgaggagtccatagaa

SEQ ID NO: 22966 - DNA, 260 bp, Unknown
  Description of Unknown: LeftRegion for integrase B9967 sequence
ctcacctcctccccgccggtagccacgctgaccacccgcagcgaagggttcgagccgctgaccagcggcgttacaccggtaacgcggtcgccccgccgcgcgatacaggccagcgaagctgacccaacgaggtgcattacaacccggtagtggtcttgcccactcggcggttgtaatgcacatggaggagtatccgcgccatgggcaccaccaccgccgtccgcgccgtcatctacctgcgactttccgatctgcgactg

SEQ ID NO: 22967 - DNA, 260 bp, Unknown
  Description of Unknown: LeftRegion for integrase B9968 sequence
taattattttgtttttctattttattacttaattattacttaattattacttaattaaaaattttctttttatattattttgattatctaaaaaattgaaattaaaaattgatttcaaatattataaataattttataataaataaattacttttatataattttacttttaataaagataatatctagatttactaaaaatggctaataatacaaaaaataatgaaattttaaaaaatgataatgcacaacaaatgcaa

SEQ ID NO: 22968 - DNA, 260 bp, Unknown
  Description of Unknown: LeftRegion for integrase B9969 sequence
ccttcgacagtttaacaaggcactggcggcaacgaaggaagatataacggcactagacgataatctcttcacggcgattgtacgaagggtggttgtaaatagccgagaggaaatcgtctacgaacttaaatcgggagacaatgcaatagtcagcatcgaatatggctacagagacaaagatataataggaggtataaggtatgagtcaagtaaataaagtgcgagtgatacccgccgcgccgaagcataacacctacgaa

SEQ ID NO: 22969 - DNA, 260 bp, Unknown
  Description of Unknown: LeftRegion for integrase B9970 sequence
caggtctcagtcgactttgatgagtcgcgccttgccgcactgtgggagcgatccatgtctcagttagcctccgttcctggctatccggatgtgaccgctgccgtcgagttcggctccgggtatgtcatgcccgtttcctcttataaagatttcgagtgttcgtataatgcgctcacggtctcgtgggaggtgctccccatatgagggccgtcgcttactgtcggttctcctcggatatgcagcgggacgggttctccatc

SEQ ID NO: 22970 - DNA, 260 bp, Unknown
  Description of Unknown: LeftRegion for integrase B9971 sequence
agagattttggcgcatggaggtttggccacaggggcacccagcaaaaagactaattatctggttgtaggcacttatggcgatttcggggatgactacatatccagtaagcaacgaaaagtaatggagtataatgcagcaggtgcgcacattgtcataatcagctacgcagacctgtttgccatgatggaggaaggctctaatgcctaacaccgccgtcatctatgcccgctactcctccgcacagcagcgggatgtgagc

SEQ ID NO: 22971 - DNA, 260 bp, Unknown
  Description of Unknown: LeftRegion for integrase B9972 sequence
aacactctcctacttatcaatttaatgattttaatcatcttattctaattatatcaaaaaagttacgtttgtatacatcttttataataataaatatcaattttaataatttttttagttctaaaaaggataactatcctctcatgtagaatactattctataatattgtgctttgatattttaattaaggagtattttaatgtctaaaattaattcttattcgtccccacagcaaaatatttacaaaataatttgttat

SEQ ID NO: 22972 - DNA, 260 bp, Unknown
  Description of Unknown: LeftRegion for integrase B9973 sequence
ctttcgttgcagctcgggatcagcgaagacaagctcgccgcctatgtcgagatcgtggagcgcgcggcatgaatccggcccttcgagagcttgtcgagctgcttgctcgagccgcctaccaggagctccgggacgcgccgcctccgcccccggacgcgcaaaagttgatcgagagctgcctgtcatcataaggtgacgcgatgcgcgccattatctacgcccggtattcgaccgaacatcagacggaatcgacgatcctc

SEQ ID NO: 22973 - DNA, 260 bp, Unknown
  Description of Unknown: LeftRegion for integrase B9974 sequence
ctctcgttacagcttgggatcgccgaagacaagctcgacgcctatgtcgagatcgtggagcgcgcggcatgaatccggccctccgagagcttgtcgagctgcttgctcgagccgcttataacgagctccgggacgccccgccgccgccccaggatgagcagaagttgatcgagagccgcctgtcatcataaggtgacgccatgcgcgccattatttacgcccgatattcgaccgaacatcagactgaatcgacgatcctc

SEQ ID NO: 22974 - DNA, 260 bp, Unknown
  Description of Unknown: LeftRegion for integrase B9975 sequence
aggaggggcgcggcgggtggactctcgcgagatccatccctggccggaaacccgccgcgccctctccaatctagctggccacctgatcgtgttcccggggaggtaggaaagtaccgtcccgcaagcggctgcccggtatcggccgggcatgcgaccctggacaccaccccctacctcccacgctccgccaggaggccgccgtgcccccccagctcaccgccgaccccatccccaccatcggctacatccgcgtctcgatg

SEQ ID NO: 22975 - DNA, 260 bp, Unknown
  Description of Unknown: LeftRegion for integrase B9976 sequence
cgtttggcgagcacgataccgaggagctttctgactactggcattttttgaggtctgttccgccgcacggaaaagcatccgattaccatttttctttgagcgattacacggcatggccgaaggacgagcttgctatagagccgatgaatggaaagcggcaaaatttgcattttgggatcgctgcaccataaggtgacaggatgaaagccatcgtatacgcccggtattcgaccgaacatcagacggaatcgacgatcctc

SEQ ID NO: 22976 - DNA, 260 bp, Unknown
  Description of Unknown: LeftRegion for integrase B9977 sequence
gtgccaagtgcaaataaggtatcacagtgagtacgctaaattttgcaaaaaattagttaattatttcaactcactaaatgcaccaacgagcgctttagaaattcacaatgaaatcaattactacatcaatgaaatgaatagtaatttagcaagagtaaatgacctgaaagaaaaattgatcatcttacaagacagagtaaatgataatatataacaaacaaaaaagccccacgctctcaaactttggcgagtctgagcgt

SEQ ID NO: 22977 - DNA, 260 bp, Unknown
  Description of Unknown: LeftRegion for integrase B9978 sequence
ataaagcaacgatgtcaaaggcaaaactgatgctaaagcaaggattgattactgccgatgagtatgctgaaatcgaaacaattatagccaataaatacggcttaaattcgtcagttatatatcgttaaaaagtgcctgaaacccttgactttactggcttttagagcgaatatggtataaaccattgtaaggaggtagaaatggatagaatagtacaaagggtgaagtttgaagcacccaagcaagaacggctgttaagg

SEQ ID NO: 22978 - DNA, 260 bp, Unknown
  Description of Unknown: LeftRegion for integrase B9979 sequence
atgttctcccgtgaacgcagtttgggttgaaactacttccggcgaaaaatattcattgaatggaaatgcaatgaatttattaaaaagcgattcaactcataaaggaagcacaaatttgattctaaaaaaaggcaaaaccgatattgaaatattaaacaaaggttttgaattgtgtaaaaataaataattgaggaataataatgactatatacgatgccgtaatatatacaagggtttcgtctgatgaacaaagacggagt

SEQ ID NO: 22979 - DNA, 260 bp, Unknown
  Description of Unknown: LeftRegion for integrase B9980 sequence
gccgctggttcaaccgtagattgattcaggcgagaacccagccatgactgaaccagcgcgtgccggccgctcggcgctgatcgagatcatcgctcgccaaatcgtgagggcgcatctggcggcccaggttgccgggcagccccctcaaggtcacaatcccggccgacccgccctccagccagccgccagatagccaacccatgcttgtcgccgtctactgccgctacagctccgatcgccagcgcgaaacctccatcgct

SEQ ID NO: 22980 - DNA, 260 bp, Unknown
  Description of Unknown: LeftRegion for integrase B9981 sequence
cgtaagcgctcaggcccgcgacgagttcttcgatcagatctcgcgcatggtcgaagagggctggtggatccagaactggccgggccggtagcaacgtagcgaacccgcagccgccgacctgcgggtttaatacggcatttccccgggctccgatctagcaaagcccagcgaagtgcagtgctcttgtgccaggctgaagcatggccatcgacgcacccggcatccccacccgcgccatcatctactgccgcatcagccgc

SEQ ID NO: 22981 - DNA, 260 bp, Unknown
  Description of Unknown: LeftRegion for integrase B9982 sequence
actgatataaccatgcgccaggcccgacgcagccaaatgaaagcctttattaaacaattgaccaagcaggaccagctgctaactgagtttgacgaggggctgtggtcggccacacttaatgcaatggttgtcaaatcagagcaggaggtagtatttcagtttaaagacggaaccgaactaccctggagactggaatcaaaatgagaaacatcaccgaagtcacccgccaaccaaaatctcttttcctcactgacagactc

SEQ ID NO: 22982 - DNA, 260 bp, Unknown
  Description of Unknown: LeftRegion for integrase B9983 sequence
gattatcgatgaggatatgtttagacaagtacaacaaataaggcatgagaatgctatcaggaatcatcgttataaagagcctaagccaataaaggaaattcggcttattacaagctaccagttagaaaaggtagaaaagaaatacgatgatccttatcggcaagcagcatacgcttacagtcaaatcaaggaggtgtaaaatgagtgccaacgttataattattccaccaagaaaaatagcgggaaatacggtagataag

SEQ ID NO: 22983 - DNA, 260 bp, Unknown
  Description of Unknown: LeftRegion for integrase B9984 sequence
cgcgcgaaaagctcgacggcctcggacactcgatctcgggcctgttccttttcctccattgtggatctcctttcatcggaactcgtcgacggcagattcattataacatatcctccgcgccgtgtctcgcaaacggcatataaaatcattctcaagcgcacccctccgctcagggtgtataatgaaaggttggtgagagcgtggcgaaaagaaaacgggatccgaacgccccgaagctcggcgtgatctatgcccgctac

SEQ ID NO: 22984 - DNA, 260 bp, Unknown
  Description of Unknown: LeftRegion for integrase B9985 sequence
cggaatttccccctgaatttcgggagaaaatagaatcgctaacggagtttcaggtatatgtacttctccgccagattaaggcggactggaaatctgaggatgttgtcggggaatcggaaaaattgttttgctgaagatgtgcccgctccgtgcgggcgtttttttcttgacttttgccgatattgggcaatcatgaacgcatgaatcccgccgatattcagcgaaaaatcaattcagcatcagtccccgcgttcgcatac

SEQ ID NO: 22985 - DNA, 260 bp, Unknown
  Description of Unknown: LeftRegion for integrase B9986 sequence
gcacacgatatgttcccgaaagaaatcaacgaacttctggaagggtatcgtccattcatcaacgagaatctagggaaggcaaaaccatacgaaaacctttctttcttctattatctggacatccataaggtcatagaaaatcttccagaactctgcactgttattgcaagctttgtacagaccgtgaaagaggcatcagaatgaacgagaaagtcgcaatatacatccgtgtctccacgaaataccagattgataaagat

SEQ ID NO: 22986 - DNA, 260 bp, Unknown
  Description of Unknown: LeftRegion for integrase B9987 sequence
caacgaagccgccgaggcccggaacgtcaacttctcgcaggtgctccaggaggccctgcgttcccaaatcggcatataaaaaagcccccgcccggctggaccccggacgggggaaacgcaatacacgaaagattgagaagaacctcgggcattgctatacacattttagcatataatcagcccggaatcaaggagggctcatgggaaggatcaaggaaaacgggctatactgcgcctacctgcgcaagtcccgccgggac

SEQ ID NO: 22987 - DNA, 260 bp, Unknown
  Description of Unknown: LeftRegion for integrase B9988 sequence
ttgtaacagtttcaagtattgtttttcttatgtattcaatatattgtttcatgttgcaccatcctttccaagaacatccgttcttgtttcaaaaatacatcattgttgtgatgaaatcatcataaaatcttgaacatttttttacaatattttttatacaaaaaaaatcaagaacaatcgacaaaaaaggggaaaatattatgttatacgatattaaacaaatcaaaattgaagatttaatcatctatttaagaaaatca

SEQ ID NO: 22988 - DNA, 260 bp, Unknown
  Description of Unknown: LeftRegion for integrase B9989 sequence
gaaaagaactatagactggcacttacaattgccaagactatgttaaataatgacctgatttcacctaaggaatacaagaaaatcgatgcgatgttaattgccaaatatcagcctattatagcgagtttgagggtctaattgacttgctatttacctcgaaaagagtgattaatggtgtagttggataggagctgatttaggtgcgaacaataaccaggattgaaccaaaaacttttataatcccaacaaaattaagagtc

SEQ ID NO: 22989 - DNA, 260 bp, Unknown
  Description of Unknown: LeftRegion for integrase B9990 sequence
ttacaaaaatgtaataggtgttcttataagccttgttgtattatggacagttggttatataggaacaattacagagggagaagattatggatatggaataggaacaataatacttattattaacctcccatactggcttttcagtaaacatggattcaaaaaacttttgaaggaatccagaaacaagaaaggatgattaaatgtattacaacgaattaagacactacctaccagaggaaattttagtgtacctcagaaag

SEQ ID NO: 22990 - DNA, 260 bp, Unknown
  Description of Unknown: LeftRegion for integrase B9991 sequence
ggaaaacccggggagctctgggcgcggcggggtgccatgctttcgcctccgtccccctagtatgggttcggacggccccgtgtcttcgacaagttttcgacgctcgggcgcagttggcacggttgcaccaattgtgacggacagggcgagtacggcgcaattttgcgtgcccccgacccccactccgataatcgccgaatgtgagcccctcgccctcgcccgccctccgttggatctcgtactgccgcgtctcgaccgat

SEQ ID NO: 22991 - DNA, 260 bp, Unknown; identical to SEQ ID NO: 16263
  Description of Unknown: LeftRegion for integrase B9992 sequence

SEQ ID NO: 22992 - DNA, 260 bp, Unknown
  Description of Unknown: LeftRegion for integrase B9993 sequence
gggatttgtttatgataatagattcgaatacctttctccgtttggaaatataatagtttatcgttcatagtctataccctaaaccgatatccggccccccaaactgtttctacatattgtacgaaaggaacatatatggtatgcttgtattaagtatttaatgctaattatatcatataaaactttggaggaattcatatatggcaaatttaagagcaaaaacaaaaattataaatattgatcccaataaagttgctatt

SEQ ID NO: 22993 - DNA, 260 bp, Unknown
  Description of Unknown: LeftRegion for integrase B9994 sequence
ataaagaacatcctcgcggattgtgggggggaccttgcaggtgctttcccgcagattatggagaagcagaacacgctcaaggccaagaccgcctctatcctcgacagcctcttgcaggccgacgttgcggccttaaaggatagcaacaagtaacctttcggcctgcgctccggcgcgggcctttttgtttggaggttatcatggagcagtatctcatatacctgcgcaagtcccgttctgaccttgaggccgaggcgcac

SEQ ID NO: 22994 - DNA, 260 bp, Unknown; identical to SEQ ID NO: 16348
  Description of Unknown: LeftRegion for integrase B9995 sequence

SEQ ID NO: 22995 - DNA, 260 bp, Unknown
  Description of Unknown: LeftRegion for integrase B9996 sequence
cgtgacaattgcttatcgcattaactcgcttgattatcctgtcaatctggtgttcaccacacgacgtccgtcggatgcagaaccggcagtctgggtgatcacactgacggaataaacaaccggcgcaactggcaggcgcgccggttgtttattccggttcattactccggatcgttccatatgtcaagaataatcatatcatgaacctctccccattctcccgcggtgacaaagtcgtcgcgtactgcagatattccggc

SEQ ID NO: 22996 - DNA, 260 bp, Unknown; identical to SEQ ID NO: 22989
  Description of Unknown: LeftRegion for integrase B9997 sequence

SEQ ID NO: 22997 - DNA, 260 bp, Unknown
  Description of Unknown: LeftRegion for integrase B9998 sequence
gtgcaagcactgaaggaaagtttattatcatacagacttgcatgaaccaaaaagaagcatcaaagagcagtgccgtataataccgtttaaatctcgttaatctgagattctcagactgtctatataatttctctatatatttaatatataagagactttatagtacctgtctgagattctcagactggaaaggaatttctatgtacgaagatattaaaaaagtctgtctatatgcaagattttcaagccataatcagaca

SEQ ID NO: 22998 - DNA, 260 bp, Unknown
  Description of Unknown: LeftRegion for integrase B9999 sequence
agtgcaagttttatattcaggaagatacagggctcaaacatatcatagaacaaaaaattgactttacagatttgaaagtatccataagattatactatgagaatgaggtaatttgttttccaagtgatagatagtgtgtatactaaatactgtctatcataatggacagtttgcttggtatacattaaaatgggggtactatgaaactaagatgttatgtgcgaatttccacagaagggcagcaagacaattattctatc

SEQ ID NO: 22999 - DNA, 260 bp, Unknown
  Description of Unknown: LeftRegion for integrase B10000 sequence
aacacacaaggccaaatttcggttctcgtgatcgttgattacgccgaggagcagggctggattactgaggagccgaaggtcggcgatgagatcatcgtgatcggcacttacgcaggctttggtgttccgtcgttcatgaataagttctatgtcggccatgatgagtacatcgacggcctgatcccgaaggggaagtaatcatgaaaaaaaccacatctccacgcggcaccgtcgccgtgatctacgcccgctattcctcg

SEQ ID NO: 23000 - DNA, 260 bp, Unknown
  Description of Unknown: LeftRegion for integrase B10001 sequence
gtttaatcactgatgaagaaaggcgagaaatattaaaacgtgttgaagataaactgactgaagatatttaaattggtcgctgacgaaataaagtggtcgcggcagtataagtatgtgaaggcggcaaaaacacttatttttttaccccaacgaatcccaactatatatagggttaggaattataaaaaaggaggaactatatgagaaaaagagctgttgcgtatgcaagagtatcttcaaattctgcaagccaagagcat

SEQ ID NO: 23001 - DNA, 260 bp, Unknown
  Description of Unknown: LeftRegion for integrase B10002 sequence
acctgcccaagatccaccgtctgggatgaagtagaagaacggagggtttctgtagattattgggatgttgaagattacaaactgacaaccctttgcgattattacaagatctatcgcgatgacgcacatcgttctctttctgattgctatgctacagcattgctgtttgaaaacctcatcgaagacaaaatcaataaaccatgaagaaaaagatcgatgattgctctgggaagaatgctgtcatctatgcccggtattcc

SEQ ID NO: 23002 - DNA, 260 bp, Unknown
  Description of Unknown: LeftRegion for integrase B10003 sequence
aaaggactcataaccgaggaagagcgcgacaggctatacgaaaagaatccgtataaaaatctttgagttttggcaatttttcgctggacttgtcaaagtgagcacggtatgatttgtcctgcccacgacgggtaggacaaatttttttaccctacattcaaatccataacggcaacatagtgtagcggaaaggaggcaatatggcaaaacaaagggcggtggcatacatccgagtatccacgaaaagcgatgcgcagtcg

SEQ ID NO: 23003 - DNA, 260 bp, Unknown; identical to SEQ ID NO: 15182
  Description of Unknown: LeftRegion for integrase B10004 sequence

SEQ ID NO: 23004 - DNA, 260 bp, Unknown
  Description of Unknown: LeftRegion for integrase B10005 sequence
gattcttctaaaaattataaaaagataaaaatacataacatagaatatttaagagaaatcgatctaaagtcatttttatttacatacataatgaatgaactagataaaattaaaaataaaaattattgatgaaaataaaaattagctatggtataattatccatagcttttccttttatttcatggaggactgataaaatttgaaaacttgtatttatgctagaaaatccacacataaacttggtcaaaaagaaacaata

SEQ ID NO: 23005 - DNA, 260 bp, Unknown
  Description of Unknown: LeftRegion for integrase B10006 sequence
atcgacatcatccgagtgtatcgttccctggacagacgagccaagcatgagttcatggctactgtttttgagtacgagaaattgggggatggagcaaaaactcagtcttctgctggataaaataaaaaatctacgcatcatcccgtatgagatgtgcgtagaaatccataaactaaaacaagagattgcgaggtgagatgatgataaaggcggttatatatgctcgatactccagccataaccagcgggaggagtccatc

SEQ ID NO: 23006 - DNA, 260 bp, Unknown
  Description of Unknown: LeftRegion for integrase B10007 sequence
cgtttcctgttttgataccatgaacctttcacgttactggcctgaagcggaaaataaaaaactaaccaccctcgcatctgccgccggtatcgaaacggctgaggcccatcgcgcactcggcgatgctcggactgttgccgccctcattgatgctacaaataaacgccgcgccaataagtcaaagaaataaggaggcactcatgcctgagtcccttaacgcggtcatctacgcccgctattcatctcactcgcagacagaa

SEQ ID NO: 23007 - DNA, 260 bp, Unknown
  Description of Unknown: LeftRegion for integrase B10008 sequence
gagcttttaaaactgtctgcttgtttcggtgtatcaattgatgaaattttaggaaataaaattccaccaaaagaagaatatatttccgtttccaaaagacatctagacttaaattttaaaattgcacagttatctggtgaagatttggatttcgttgaaaaagccatcgatatggcattagaaaggaagaataagccatcatgacaaaggctgtagcctacgcccgttattcatcagataatcaaaccgataacagcatc

SEQ ID NO: 23008 - DNA, 260 bp, Unknown
  Description of Unknown: LeftRegion for integrase B10009 sequence
tatggttatttgggaaagggctcggcgttgtttgattatagtaactgtgtaaggggatacagaatacaagttttcaataatgatgaactcgtttccacttcttactgcccacaacatgaactgcaaaaatatttggagataataaagtatgaaatgtctataaaagatagtgtgatcacaggcagtaacttaataataaaatgaaacgagccatcggctatgcacgtatatctgatgaagatcagtccacctggtcgctg

SEQ ID NO: 23009 - DNA, 260 bp, Unknown
  Description of Unknown: LeftRegion for integrase B10010 sequence
tgtttgtggttacacttgtagccctgacctgttatctggtttgggatatcatgcacccaggtgcaggtttgttccattggtaaaaaagccgcccctgtctgactcacaggagcggcaacacaagaaatccacacatccgaaggggattttctatgcccttttatcatagcaaatccctccgcaaattgcaaggaggatttatgagagaacgaattccgggcgctatgataaacgcccgttactccactgacaatcagaat

SEQ ID NO: 23010 - DNA, 260 bp, Unknown
  Description of Unknown: LeftRegion for integrase B10011 sequence
atctattcaggtctctgccaggtatccggtcgtggcaaaacaaaagaagagttagtgtttaaagtgtcagatgctgatgctaagtcattttccgatattcttaccctgtgctttacttatgagattcgtaacaacagtttgtttttgctatattctcaggatgctgtaaaagaggatatttactggtaaggaggctctccatgaaaaagaaaatcgttactccctgccttcctaaaatcgccgtcatctatgcccgctat

SEQ ID NO: 23011 - DNA, 260 bp, Unknown; identical to SEQ ID NO: 16388
  Description of Unknown: LeftRegion for integrase B10012 sequence

SEQ ID NO: 23012 - DNA, 260 bp, Unknown
  Description of Unknown: LeftRegion for integrase B10013 sequence
atcatctctttcagcgagtacgactttgctgatggaaagatgctcgacttcggtatgtatccgaccggaaaaggaaagcggtacaacatcttctgcaccttcagctctttcgggttcgaaatgctgtctgatgaaacctatcacttcacggccacctgcacggagcaggcaaagctcttctgtgaaaagcgaggaaagtaatggacagagccgtcatttatgcccggtattcctccgacaaccagagggatgccagcatc

SEQ ID NO: 23013 - DNA, 260 bp, Unknown
  Description of Unknown: LeftRegion for integrase B10014 sequence
gcccagcagcagaagtccctgcacatgcaccgacttgtgacgctcatcctcttgggtattcttttgctgtgcgcccttgcgcttgtggccgacgcgctcatcccatcgatcggctggatccgcacataaataaaaccgccccggcccagcgccggagcggtatccgtataaccttttgcccttgtggtgagaatctgcctatgaaatttacatctacctggaaaatctccgacccgctcgcgcagtacatcatttacctg

SEQ ID NO: 23014 - DNA, 260 bp, Unknown
  Description of Unknown: LeftRegion for integrase B10015 sequence
gagtgactttgtaaagattgatgagtttgatgaaactaaagtaaacaagtttatagaagaaatcatcatagataactaccaagtaacattctgctttacaaatggtattagcatatcaagaaagtatactaatggaccatcaggtaatcagaaaggttggaaaaataaacaacaaagaaatagttaaggaggaatagaaaatggaagaaagagtaagaaccgttaccgtaatgcctgcaaccttaagggcaaacctatcg

SEQ ID NO: 23015 - DNA, 260 bp, Unknown
  Description of Unknown: LeftRegion for integrase B10016 sequence
gctcagcatcagaagtccctgcacatgcaccgacttgtgacgctcatcctcttgggtattcttttgctgtgtgcccttgcgcttgtggccgacgcgctcatcccatcgatcggctggatccgcacataaataaaaccgccccggcccagcgccggagcggtatccgtataaccttttgcccttgtggcgagaatctgcttatgaaatttacatctacctggaaaatcgccgacccgctcgcgcagtacatcatttacctg

SEQ ID NO: 23016 - DNA, 260 bp, Unknown; identical to SEQ ID NO: 16438
  Description of Unknown: LeftRegion for integrase B10017 sequence

SEQ ID NO: 23017 - DNA, 260 bp, Unknown
  Description of Unknown: LeftRegion for integrase B10018 sequence
ggaacagataggcgccgaaattaaacgtcggcgcaagctgaagaaaataacacaagagaaattatccgaaataaccggaatcgggcggaccgctattgctaaatacgaactcggaacaatagagctcggcatctcccacttttctataatttgcgatgccctgggatgcacgccggcggaattttggcgggggttagacaatgggcaagagtaacgcggtaatatatgcccgctattcttccagcggtcagcgggaagaa

SEQ ID NO: 23018 - DNA, 260 bp, Unknown
  Description of Unknown: LeftRegion for integrase B10019 sequence
attgcacttatctttttgattatggagttgaaatatattaaaaataactgattacataaagccccctgtgctggtaacacagagggcaaaaagtaatataccggcaaggcgccgatacgatataaaagtgcacttctattgtatcatttcgcgacttgtctgtaaagaaatacacaacatttaaaggaggaaatgatacagtgaacgcagtaatatacgcacgctacagcgccggacccggccagaatgaacaatccatc

SEQ ID NO: 23019 - DNA, 260 bp, Unknown
  Description of Unknown: LeftRegion for integrase B10020 sequence
gaagaataccttaaaattgatattggattgaaagaataataaatcttttcatatcttagaaaaaggaaattaggaatagtttccttttttattgattggtaatgaaacagttaagcattattttaatatgtcaccttctttaacggatgacaaattgaattaattgtattatatttgtaatcaaataaataaccatttttatgaaaccaatcgtaatttattccagggtatcgacaacaaaccaaaactttgagtcacaa

SEQ ID NO: 23020 - DNA, 260 bp, Unknown
  Description of Unknown: LeftRegion for integrase B10021 sequence
ttcaatcaattatctcaatactatgtttcagcttagagtaatggcgagacaaggtttaatcactgagaaagattacattcaaattgaagaaaaaatggctaataaatacaatcaaaaagaaacgagtttatatcgtttaaatgacttgataatatccccttttagagtgattaatataatacaagaaaaggagtgatattatggcaaaaataagagtaataacaaagcaacttggacttcaaaagttggtaaatgttgct

SEQ ID NO: 23021 - DNA, 260 bp, Unknown
  Description of Unknown: LeftRegion for integrase B10022 sequence
gagcgctacgtcgcgctggtggaaggcctgccgatcggctgcttcccgacctcggccgaggactatctcagcagctacaccggctttgaagccgcgatcctggacatcaccgagcgcgacagcggcctttacgccgtcagcgtgatcgtcgccccggaataaaaaagcgccccggccggggcgtgaaagaaggtgatcccatgccgaccgtgaagcccgacgggctgtattgcgcctacctgcgcaagtcgcgccgcgac

SEQ ID NO: 23022 - DNA, 260 bp, Unknown
  Description of Unknown: LeftRegion for integrase B10023 sequence
gatcgtctctgcaaagcgggccggatgtacgactgtgtatgaagctgcggagtatctggatgtaccggaggattttttgaaggacgcgatccaggcttaccgatcccgatacggggaacagatcccctatcatggctgtatagtatgcttcgaaccgtatcttgatgtgcttacagaatcagaggcaaagaggagatcacatgactggtaaaaacgaaatggctgtggtatatgcacggtattcatccacgtcccagcag

SEQ ID NO: 23023 - DNA, 260 bp, Unknown
  Description of Unknown: LeftRegion for integrase B10024 sequence
ggcaggaatatatcgaagcgctcaaagcttccgagaagtacaacaacatgttggctatcgtcaactttttctacaacacatcaatcaagagaatgcaaaaggaaataggtcaaaaaaaaaacctttcgaagaatttcaacttgggttttgaggacgggaataaaagaaaaaagggttttacaggtccaaaaagatagcatatgaacttagaggtattcgagcaattcgcgaaaaaggaaaagggcaggatcataggtaaa

SEQ ID NO: 23024 - DNA, 260 bp, Unknown
  Description of Unknown: LeftRegion for integrase B10025 sequence
ttgagattggcctgggcgccggcgccgggatgctatcggggaaggccggatcttcgtttttactgaacggaaatctggcgataagattttagccttcatgaaaacaatccttcgatttaaacctcttgcgagccgtaaaccggctctttttttttcaaaaagtgcttgatgatatcttaatatcggataaaaattcattcatgaatgaattggctcgagatatcgccctgtcccgggataaggggttggttccggctttt

SEQ ID NO: 23025 - DNA, 176 bp, Unknown
  Description of Unknown: LeftRegion for integrase B10026 sequence
ggttgacggtgatccgcttgggcggcagcgaaaggccgatcgcggcaatggcgttgcgcacccattttgtgacggttgtagagaaattcctaacgcaaccgtgacaggatgttgggatgacgcaagcagctataatctatgcccgcttttcaacctcagaacagagcaagggccac

SEQ ID NO: 23026 - DNA, 260 bp, Unknown
  Description of Unknown: LeftRegion for integrase B10027 sequence
atacatactactagaagataaataatttatatgtttttttaaaggtatatagtaagggtggtagatttatggaaaataatcaatatgtagcagagttaaaaaagaatgaagcaattaaagtaatggcacagcttattagaaagtatatgaaggaattaacaaaagaaggataggattaaatattaagggaagggaaaaaaatgaataagaaggtaaaggcaggaatttatataagggtatcaacagaggagcaaaaacaa

SEQ ID NO: 23027 - DNA, 260 bp, Unknown; identical to SEQ ID NO: 22559
  Description of Unknown: LeftRegion for integrase B10028 sequence

SEQ ID NO: 23028 - DNA, 260 bp, Unknown
  Description of Unknown: LeftRegion for integrase B10029 sequence
ttcctcgaagacaataaaaaaccgtttgtctgcggcgtcaaacggttttttaggaggagtatttatgaaaaaactctgttctgtaaataattataccataaataaagaaaaccaccttttttgattggggtgaaggtggttttcctctgatgagatgagactggataaaatggatttacccttatgaaaagtattataccatgattccgaacatttgcccatttaataaaggcgataaagtagtcggttatgccagatat

SEQ ID NO: 23029 - DNA, 260 bp, Unknown; identical to SEQ ID NO: 22583
  Description of Unknown: LeftRegion for integrase B10030 sequence

SEQ ID NO: 23030 - DNA, 60 bp, Unknown
  Description of Unknown: LeftRegion for integrase B10031 sequence
gggacatcattaaataagcgtgaccagtttaatgctatgattgcagatgcaaaacatggg

SEQ ID NO: 23031 - DNA, 260 bp, Unknown; identical to SEQ ID NO: 22667
  Description of Unknown: LeftRegion for integrase B10032 sequence

SEQ ID NO: 23032 - DNA, 260 bp, Unknown; identical to SEQ ID NO: 22665
  Description of Unknown: LeftRegion for integrase B10033 sequence

SEQ ID NO: 23033 - DNA, 260 bp, Unknown
  Description of Unknown: LeftRegion for integrase B10034 sequence
agaccacattggataatatccatacatcctatgcagccgaaatacagaccattcgtgatgaatccaaagaaaaaacaaaccagcttttgacgcagattgaaaggctcagacaagagattgattatctgcgcttagaaaatgacagaaaggccaggattattgataaatttttagacaaataaaagaaagaagtgataaaggtgacagtatttgaagcgcaaaacgccataaagagagcaaagataatagattctaagatg

SEQ ID NO: 23034 - DNA, 260 bp, Unknown
  Description of Unknown: LeftRegion for integrase B10035 sequence
cataacgaatataaattttcggttgaaatgtcgggaaacgtcgcaaatattatattgattcaaccgttagttcgctatcttgattcgcttgaaattccgctcgaacattgcgggcgttctgacgtcgaagacgctgaataagcataaaaaaagcgaccgtccgaagacaagtcgcttaatagcataaggagaatacaaaaatggaacaatgcgttctttatgcgcgcgtatcgtcaaaagaacaagaacgcgagggattc

SEQ ID NO: 23035 - DNA, 260 bp, Unknown
  Description of Unknown: LeftRegion for integrase B10036 sequence
atatagaatacttattgagtaaaggaatagcagaaatgctgttgaatcatggcttaataacaagtgaagaatataaggaattggacaccctaaacaaacaaagttttatttgttaaaaaagtcttatttctttcagatttcgctggacttttgaagttctttgcggcattgtttgattgaccaaaaatggaggtgttaaattggcaaaagtaaaaaggatagataatgcaaacattgagattccttgttgtgcttatgca

SEQ ID NO: 23036 - DNA, 260 bp, Unknown
  Description of Unknown: LeftRegion for integrase B10037 sequence
aaattcgacaaaatttgacaatcgttttgttgaagaaaacatcaaagaaattagaatatctggatacactgcaattgttatattaaatgataaaacgaaaattataaaagaatggaaggttcattcaagaaaagactcgtggactaatgaaatgaaagaaagtgccagaaaacgagaattagaaaggttaggtaaatagtatggcgaagattacagtaatacctcaaacaagaaacactttaacaagaataccaataagc

SEQ ID NO: 23037 - DNA, 260 bp, Unknown
  Description of Unknown: LeftRegion for integrase B10038 sequence
gaaggaagctaagtatcagtctgccatgttgttgttcaggggctggctggagcagggcatcatcacgaaggcagattatgcaaaggcagagcagctgatgcgcgaaaaatatcatccgcaattgggcacattattctcggacacagcgttgacttaattttcaagtagagtgatatatagtagggaaaggaggctacagcatgaagaagatagaacgaatcaagccaagcatcccaaaaattaagcgaaaaaagcgtgta

SEQ ID NO: 23038 - DNA, 260 bp, Unknown
  Description of Unknown: LeftRegion for integrase B10039 sequence
ataaaaattgactatatatactcttttctgtacaataacaataaataaacaaataataataactatataataataattatctttatttattagttatatttagttatatatatactattgttttatagtaatagtatatattattaaataacaatgtctgtaaatagtcaaataacggtcaaataacagtcaaataagccatgagaaaaattattgtcgaaaatttaattgaagccaagaatcagacaaaacctaccgct

SEQ ID NO: 23039 - DNA, 260 bp, Unknown; identical to SEQ ID NO: 22670
  Description of Unknown: LeftRegion for integrase B10040 sequence

SEQ ID NO: 23040 - DNA, 260 bp, Unknown
  Description of Unknown: LeftRegion for integrase B10041 sequence
gtggcattcgtttcctgacgcgcatgaacatggatctccgcgcgatggggtatctgccgcaggagcgcgcggccgcgtgaagcacgtttcgatccccctccagcgatcatcatcgccgccggaactgatcgagttggcgaaggcgcttgcgcgtctcgcagtgaagcgtgacatagcagctgctcgcaaggacagaatcggtgcgaaccctcctctacgcccgctatagtagccagctacagaacgcccggtcgatcgag

SEQ ID NO: 23041 - DNA, 260 bp, Unknown
  Description of Unknown: LeftRegion for integrase B10042 sequence
caaagagatctgcgaaaatcttatattcttgtaaatccaggttcttcagttgaacttgaatttattccgatccgatccggtcaggatccggaaatccgtatgatcgacttgtccggacaataaaaaagaccgctcatcccccgaggcggtcttccttcgatggtctcccatcggatgccaactgatatagatattttatcatgacagtaagcacatctccttttaaaattggcgacaaagtggtcgcatactgccgatac

SEQ ID NO: 23042 - DNA, 260 bp, Unknown
  Description of Unknown: LeftRegion for integrase B10043 sequence
tgaaaaaaactaccttaattctattattcaagcaatatctatggttaaaaaaggaataattgaaattgacgaatttaaaaaaattgaagctaaattggcacaaaaatattgtattaagaaaaccaatttatatcgttcaaatgactggataaatacttaaaaaagagtgatatatatgataccaagtttggaggtgcaaaatggctgaaattaagataattcctaaagaaaaagaaatgccaaaattaaagaaagttgca

SEQ ID NO: 23043 - DNA, 260 bp, Unknown
  Description of Unknown: LeftRegion for integrase B10044 sequence
aatggtcgtttgcaaaaaatctgccgtatggttggaagatgttgaaggcaacaaatatgcacttaacggcattgcaaaaaatatgttaaaaagtgatagtaaatacaaaggcggcacggatctaattttaaaaaatggcatggttgatttatacacgccaaatgacgctttaaaattttgtataagaatggattaaaaaaatggcaatagatgacgcaatattatacacccgtgtttcatctgacgaacagaaaaaaagc

SEQ ID NO: 23044 - DNA, 260 bp, Unknown
  Description of Unknown: LeftRegion for integrase B10045 sequence
cgagactcagggctttgataagtatgacgagatccagtactgggcggttgccgatatggccgacggttcagagtcgaaggtggtcgcgttcactctcgacaaagatctgatcggaaagatcgccgccggatcctttccagcgaacactctcggcgactatgtgaccgacctgtggatcttgccgagcttggagcagtaacgtggctatcaaaaaagacgagagccgccagctgatccgggcggttatatatgcccggtat

SEQ ID NO: 23045 - DNA, 260 bp, Unknown
  Description of Unknown: LeftRegion for integrase B10046 sequence
gaaagagagaaaaattatcaagtatctcttttagttgcaaagaatatgctagaggagaatcttatagatcataaggaatatcagaaaataaacaaggccttagtaaagaaatataaccccataataggtgggttgtatgcttaattaacttgctatgtatcaaaattagagttaacatcgtgctgaagggaggtggggaaatggctagaaacatcataagaatcaaggcttcgaacattaaacagcttgaaagaaaaaaa

SEQ ID NO: 23046 - DNA, 260 bp, Unknown
  Description of Unknown: LeftRegion for integrase B10047 sequence
tctgtggacaacagataaaataaaaaatcccctcaccgactgcaatcagtgaagggattcgctgggagtattgctacccgaacctcgacaggtaaagtatagcatatctccgggaaaatgtcaataattcgttgaaaatcgatgttttcagaccgatttttgcaaaatttctgcaaaaatcgcagataaggaggtattctatgccccgaaaacgctctaccctgccctccggcagcatcggcgtaatctatggccgatac

SEQ ID NO: 23047 - DNA, 260 bp, Unknown
  Description of Unknown: LeftRegion for integrase B10048 sequence
cacaaaatcgacttataacaaaaacaagtatgttctacttctttttgtccgagagtcaaaatggatttagaaaaagcaaaaaaaattgtaaacaaaaacaggaaaaaagaattaacggaagaccaaattaaagaagtactcgcactggcagaaatgttagccagttgcactataactaatcttaaaacaggaaggctaaaatgaaaaatgttatactttacgtgcgcgtgtctaccgatgagcaagcaggaagaggatat

SEQ ID NO: 23048 - DNA, 260 bp, Unknown
  Description of Unknown: LeftRegion for integrase B10049 sequence
tttgcatgaacgtgtgaaaataagttgtgcaatggcatggcaaataatcctttgtaacaaatgtttgatgaggatgaattgaaagtttatgataagaaatttcaagcaataggtattttagacaaagaagaacaaaaaaagatactggagttcttctatacattaggtgttattacgtttaacctttaatttaatgattgatgagtaagaaaaaaagtaaagagaaagtagtagagttttctaaattgacaaataaagta

SEQ ID NO: 23049 - DNA, 260 bp, Unknown; identical to SEQ ID NO: 23007
  Description of Unknown: LeftRegion for integrase B10050 sequence

SEQ ID NO: 23050 - DNA, 260 bp, Unknown
  Description of Unknown: LeftRegion for integrase B10051 sequence
cgaggtcgaggtgatgctgactcagaccaagccggcgcccgagaggcggcagccgaagcggatcggcaaggtgaccaccacgacagaggtgtccggcgacgttctgtagggtgcaagcccctgacctgcgacgacgctgacacaggtaaataggaatccgccggggcggatcctcatttacatggtgtagactcagggccatgaccagcacgaactcccgcaccgcaagaccggcccggcgcaagctctccacctcctac

SEQ ID NO: 23051 - DNA, 260 bp, Unknown
  Description of Unknown: LeftRegion for integrase B10052 sequence
gcaaccttcaaaactctcctggttcgaggcacgataacagccgatgaatacggcataattgatacaaagatgcgggcaaaatactctccattattaggtagtttataccctcaaaatgacttgataaatcaaggaaatgacggtaatatgtgtaacaccgaagatgtatctgatggtgactaataaaggaggtgttccgtatgaaaaagacaatacgggttattgaacccaccataccgcttctcaaaaagaaaaagcgt

SEQ ID NO: 23052 - DNA, 260 bp, Unknown
  Description of Unknown: LeftRegion for integrase B10053 sequence
cagctttggaaattgaacagatgaatttggaattgtaccagcaggaggccaaggcaaatctgttacaacaaggggaatatattgccaagttggtaaaagaaaacgatgatttgcagaagaaaaaggatattcttgaggaaaagatacatgccttagaggcagaagcagcttcaaccgattcggaatcagggagtgattaaatggcgaaaaagcagaagccgtctatggttccgataacagccgccgtttatgcccggtat

SEQ ID NO: 23053 - DNA, 260 bp, Unknown
  Description of Unknown: LeftRegion for integrase B10054 sequence
acagctgagaaaatgcgggactatattctggagtgccagaagccgaagaccgtaatccagcaggttgtcgcaactgctccggcagctcaggttgacacaacagtcgatcagataagacggctgaagtctctgctggatgaagggatacttacccaagaagaatttgatgcgaagaagagaaagattttggggatttgaaaatggaatcagccgtcatctatgccaggtattcatctgataaccagagggatgccagcatc

SEQ ID NO: 23054 - DNA, 260 bp, Unknown
  Description of Unknown: LeftRegion for integrase B10055 sequence
actggcccaagttcctggtcgtcgccctgtccacgctggtctgcggcctgttcgggctgtgcctcggtctcctcgcctccctgcctatgtgggccatttcaatggcgctggacgatatgcatgccatgcgccagtacatgcagggcttcgtcgtcatcggcgataagcaggatattcaatgatcttgactggagggcaatatgggaagcatcaaaccaaacggcctctactgcgcctacctgcgcaagtcccgccgcgac

SEQ ID NO: 23055 - DNA, 260 bp, Unknown
  Description of Unknown: LeftRegion for integrase B10056 sequence
atcgggtcgctatggcgatggcagaagaaatgctgtcccagggcattatcacgaaagaggaatatgataaggcagaagaaaaaatatgtgagaaatatggtatcaatttcagcagtattttccgattatgtggctcgaaataactggatatgtttcggctttagaggtaatatacgactaccctaaacaggaggtgtgaaatggagcgaattgtagagacaatcaaatccagatatgacccgaaaatgaagccgaaacgt

SEQ ID NO: 23056 - DNA, 260 bp, Unknown; identical to SEQ ID NO: 16646
  Description of Unknown: LeftRegion for integrase B10057 sequence

SEQ ID NO: 23057 - DNA, 260 bp, Unknown
  Description of Unknown: LeftRegion for integrase B10058 sequence
atgacgcacgagcagtttcaacgtgaaaagaattatagagtaactttatcaattgtaaaatcaatgctaaaacaaggggtaatctcggacaaagattattgtgcaattgatacaatgttagtggctaaatatcgccctgtaactgcagtttataactaaaaatcacttgatatgtatcaacataagagttaacatagacagtgaaaaggggtgattacatggcacgaatcataaggaaaatagagccttcggtattaaaa

SEQ ID NO: 23058 - DNA, 260 bp, Unknown
  Description of Unknown: LeftRegion for integrase B10059 sequence
gcatataaaaccacaatggcggcttttaaagttatgttgaataaaggtcttatttctgcttctgaatacaaagatattgacacaaaaattgcacaaaaatacgggttatctttgtcggttatatatcgataaatagtgcctgaaacccttgactttacggcactttagagcaaatatatggtaaagaaaaggaggtaaaaatggatagaataattaagcaagtggtgtttgctgcacccacaataataactgcgttaaag

SEQ ID NO: 23059 - DNA, 178 bp, Unknown
  Description of Unknown: LeftRegion for integrase B10060 sequence
ctccgcaggtgcgggaacacctgcagagctggagcgagaacaccgaaaagtgcctctacacacgcgtctattatagcatcttttcccggtgttctcaataaaaagggaggatgctgtcttgaactttgccatttattccagaaaatcatatttcacggatacctctgagagcacaaag

SEQ ID NO: 23060 - DNA, 260 bp, Unknown
  Description of Unknown: LeftRegion for integrase B10061 sequence
cacagacttgaaacattcacaatattatcactcggaactcttagtgtctcctgattataaacgttttgagaaagataaggatattacagagtatactttcactgtaaaagacggagattatattcagataaaaaacgcatccgttatctttacacctaataccggaaagccttccctgggattcaaataaggaggccatcatgtccaccgctaagaagaagctgacaacctgtgaaccgaagacggccgtggcctatgcc

SEQ ID NO: 23061 - DNA, 260 bp, Unknown
  Description of Unknown: LeftRegion for integrase B10062 sequence
acagaaccgatgtcaatatatttgagggagacaaatggttctgcacggaagctgaagccattgcagcaggcttccgaagacctgctaatgccggctctgctgtctgcgaagaatgaaaagaaccgcagatctgcggttctttcaactggatggataaaaagagatgatatgaaaatgtttccctcaacagcaattataccatgatgcaaaatctatcaccatttaaacaaggcgataaagtcgtgggctactgccgatat

SEQ ID NO: 23062 - DNA, 260 bp, Unknown
  Description of Unknown: LeftRegion for integrase B10063 sequence
gacctgctggatgccgtcgccgccaaactcaaccggagaacgtcatgaccgccatggccacgcccgcatgatcgccatcagcccccccgccctggccactcgcacacgcgcccgccccctggtctgccgaggcgtctatggcgtccccggcggggacgggctagactccctggctcgtctcctcctgtccatcgccgaagatgaagccgaccagtccgcttgccagcccgacccatgcctgctgttacctcagaagctca

SEQ ID NO: 23063 - DNA, 260 bp, Unknown
  Description of Unknown: LeftRegion for integrase B10064 sequence
atggtcaaggatctgaagagcaatgtttccactatgcagaattcgttcaatgagctgaaccacgatgagatcacatgcgtcctgaatctgtgcgatcctatcaaccgagatgtcgtttatctctcaatagcacagggagtggccggatacgatgctgtcaacgggatcgacctgctgaacaatccggacggtaacgcctgatgaccaagaagaaagcaccacagccgaagagcggcaaggccgtcatctatgcccgctat

SEQ ID NO: 23064 - DNA, 260 bp, Unknown
  Description of Unknown: LeftRegion for integrase B10065 sequence
attcattaattgattctacgaagggaactgaaatatctttcaacctaagcgaaaataggattacagcttatgtagtgcccactttatatggtcatgtattaaatcttactattactgacattattggcactaaaggtaaatgcacattaaacagaaaatcaattaaaaagctatttaacaaacaagataactaatactcaatgccccaagctgtagcctattgccgattatctgacgctaatgaacgttcaggatctata

SEQ ID NO: 23065 - DNA, 260 bp, Unknown
  Description of Unknown: LeftRegion for integrase B10066 sequence
ttctaattaatttaataattttattattaatattcattatatcagatttttgtgatttttatacctactaaatcaataaaaaatatcaattttaataaattttttagttctaaaaggataaatccctttccatatagaatactactctataacatcactcatcaatcatctctaataacatattaataggagcaaaccacatgaaaaaagatttaatttccgccgtagcatactgtcgggtgtcaactaaatctactgat

SEQ ID NO: 23066 - DNA, 260 bp, Unknown
  Description of Unknown: LeftRegion for integrase B10067 sequence
tccgcaatcaaaacgacgacatcataaaagttcttgattttaagaaccctccctataaggatgtccatggacactcgcaagattatcgtattgcaaaaacggcatataactatgccagggagaaatttcaatatataaaaacactcccctactatgaccatgccagccaatcgtataaaaaatagtcggaggtgtgatttatgtttacaaccatggcaccccaggccgcagcagtatattgccgggtatcgtctgaagcc

SEQ ID NO: 23067 - DNA, 260 bp, Unknown
  Description of Unknown: LeftRegion for integrase B10068 sequence
tattattcgtttctatatggcacttgcacctcttcaagcaatggaacgaaaaggtataatcactcacgctgaatttctcaaagcggaggactttttggctaaaaaatattatctaaaaaaacacaatatttataggcaaaatgacttgataaataattcaaaaagagtgatatatatactaccgcaagaggaggtgcaaaatgatacaaaaaacgataacgacaatagaaccgttaccacagttagaaaggttgattaga

SEQ ID NO: 23068 - DNA, 260 bp, Unknown
  Description of Unknown: LeftRegion for integrase B10069 sequence
gtattttatttccattttgaagtatcattcctcctaaatttattgcatcgatgcgtgtataaattatcatttttattgcattcgggtcaataacactttttgtataaaatgtcattattctaatctagattaaaatatattgcacattggtatcatatattgtatgatgtatatcaaatagttattaggaggaaagacgtatgaagttatttgataacgatggtcctagaaataatagaattagaggacacgtagataaa

SEQ ID NO: 23069 - DNA, 260 bp, Unknown
  Description of Unknown: LeftRegion for integrase B10070 sequence
tcaggccatgaacgcactgtccctgcgaatgctcaaagagggcatcatcacgcagaaggaatacgcccgcatcgagaatggcctgaacgataagtaccagcccattttccgcgcaaaataaagatcattttggcccgggaattgacttgataatttcccttttcagaggtaatatgcaacaccacaaggaggtgacaatcgtggaaagaaccataacaaagatgcccgtgctgcccaagatgcctgtacgcaagcgtgtg

SEQ ID NO: 23070 - DNA, 260 bp, Unknown
  Description of Unknown: LeftRegion for integrase B10071 sequence
gggaagggaagaccccggacgatcagctttccaggatcgagttcgccttgtcaggcgagatcaagcagctctccgacatcgaaaagcaggatatccttgactatatccgtttcaaaaaagcgcagagaaaatgatcgatgaaaaagcaaacaggtgtttgcattttgtcaacaactgaaacttaaaggcgaggaatttctatgaacgccgtaatttacgcccgttactcctcctacactcagaccgagcgcagcatagag

SEQ ID NO: 23071 - DNA, 260 bp, Unknown; identical to SEQ ID NO: 23068
  Description of Unknown: LeftRegion for integrase B10072 sequence

SEQ ID NO: 23072 - DNA, 260 bp, Unknown
  Description of Unknown: LeftRegion for integrase B10073 sequence
tttagaaatgtattacttatccatcacacccgttaaatcaatgtttgaggaggcgattttgagtaaatctgaatatcttaaagcagaagcatttttagcagacaaatattgtatcaataaaggtaacattcatcgtcttaacaacttgactaaaccccctaaaagagtgatatatggtgtaaccaaagaggaggtaaaagatgaaggaaaagaagataaccaaaatcgaagcattatccaaattaccaaagaaaactaga

SEQ ID NO: 23073 - DNA, 260 bp, Unknown
  Description of Unknown: LeftRegion for integrase B10074 sequence
tgacggaacgctctgaatatcaccgtctgccaaatatcaacgtatacgaactcgcatggaatgcctccgcagaatagtcgaatgaataatcccccgcccagctcctgccccggacgggggaacgcaaaaccacatctctgcaaaagcgggtttgctatggctattttaccatagttctcccgcaaatacaaggaggacttatgggtaaaatccgcctgaacggcctctactgcgcctacctgcgcaaatcgcgccgcgac

SEQ ID NO: 23074 - DNA, 260 bp, Unknown
  Description of Unknown: LeftRegion for integrase B10075 sequence
aagttctcctctacagaagcacaatggctgcggtcaaaattatgctcgatcaagggctgatttcgcccgaagaatacgccataattgacacaataattgccgaaaaatatgggctaaattcgtctactatatatcgctgaaaacccttgacttatcgggcttttagagcgaatatatggtaacgaattaaggaggtagatatgaatagaactgtacaaagggtggtcttcaaaaatccaccgaaaccccaggcgacacgg

SEQ ID NO: 23075 - DNA, 260 bp, Unknown
  Description of Unknown: LeftRegion for integrase B10076 sequence
tcatggggattctcctttcggtacggggcagaacaggaacacctgttccactgaattatacaataatagtaaattgtctgacaacgtacaaataataccaagaaatccacaaaaatcatgtcgaatcctgaaaggtggtgatgctttttagatcgagcctgaaacgctcacaactagactaaacataagaaggtgaaaacatgaccgtttttgaaatgaacaggtcaattgaaaatgccctgaatcccaaaatggaacag

SEQ ID NO: 23076 - DNA, 260 bp, Unknown
  Description of Unknown: LeftRegion for integrase B10077 sequence
ttgacgcaggtcttatcaccatcaccccttccatgaaaatctatgtttcgtcatttttgacaaatgcgcctcaggacgattttacggcccgctggctggtctctctgaacggagccttctgcccccccccgatttccgccgcgtaaagagttcttagagtaccacaacgacgaaatttttaggaggtaggcagaaaaactatggacacagtgatttatgcgcgctattctgccggtcctcgtcaaactgaccaaagcatc

SEQ ID NO: 23077 - DNA, 260 bp, Unknown
  Description of Unknown: LeftRegion for integrase B10078 sequence
agatgcgtgctgtgcgaaaataagcctccggcttatggtaaaaatccctgtcctttgataggaaaaagtatgtaaattcggtaaaagcacccggataggtgaagagaatcaaccagataatgttttccatactctcatcctccttggtagtattataactggattttggataaaaaacaatgacatgtttccggtagaaggtgatagcaattcgcaaaacgaaaaaagcggcctgccgcccgaaaacggcggtggcctat

SEQ ID NO: 23078 - DNA, 260 bp, Unknown
  Description of Unknown: LeftRegion for integrase B10079 sequence
ttcaaacatctctgtcggtgtcatacactcgccccctttcaagccaaataatagaacatttgtttgatttgacacaatagtaaactaatggaagtccgatagtacggacagtatagcacagtgctaattaaaagtttgtcgaaatccctgcccaggtagtgcagtcccgggcaggagtctacatcaaaggagtgagcatcatgtatataataccgcaattgacgccgatcgagacgctgttgtactccaggaagtcaaga

SEQ ID NO: 23079 - DNA, 260 bp, Unknown
  Description of Unknown: LeftRegion for integrase B10080 sequence
aagcagaccccgatcttattttggatttacacagtgcggtgcaaagagggttatcagagaatgaagcaaaaaccatggcgtgtgtcatgagaggtctttttgaggggttgaaggaacaccaggaccaggacccctatacatctgagaatatctgtagcttcgacggtcaataatcttacagcggtggacggaggagggcattggctgaaaagagaaaggctctgatctacgcaagagtatccacgctgcgccaggaaagg

SEQ ID NO: 23080 - DNA, 260 bp, Unknown
  Description of Unknown: LeftRegion for integrase B10081 sequence
aagaataacgcgtatgttttgttgaaagatgcgcgtttaacgcacaaatgcgttaattatgcgttaagcgtgcgtttctaagtaaaaaatcccgccagacctattcgcagtaggcctggcgggacttatctcccggaggagcttgtatgatggttatattatatacctccggagtctgaaaatctaccggaggtttttctatgtcagaaaatgccgtggtctatgcccgctactcctccaggcgtcagcaggagcagtcc

SEQ ID NO: 23081 - DNA, 260 bp, Unknown
  Description of Unknown: LeftRegion for integrase B10082 sequence
gaaaagctcattgaaatgacgagcgatattgatatggtgcaagtagaccacattaaggtggaacgaggaaataccattataatcgttctcaaggacggaacggaaatcacaagacaatggcaagaccgttcacgtgcagaaagctggacggacgaaatgcggcaaaaggctgccgagcaaacaagaaagaggtatcaataatgggaaaagttacagttatacccgctacaagagattttcatacgggtgtggttaaaaat

SEQ ID NO: 23082 - DNA, 260 bp, Unknown
  Description of Unknown: LeftRegion for integrase B10083 sequence
gcctctggggtccgatatgccgcttgtcgtcggtcacttccgtctccacctgcccagcctggacgattcgcccttcgccgttggcggtgaagcactcatcgttggagaattgaactcggcctattcaacctggatcgtgccgtggcttatgatcgaagaagtcaacggctacgacagcgacgagtattgatggggatactatgaacaacctcaaccccaatggcctctactgtgcctatctccgcaagtcccgccgggac

SEQ ID NO: 23083 - DNA, 260 bp, Unknown
  Description of Unknown: LeftRegion for integrase B10084 sequence
ataagatcattacgtatcaaaccacagtttcgattttgaaaagctggatgcgtgctggattggtcacgccggaggaattccaaaaaatcaacaccataattgccgaacgttccggcttatctttgtgcagtatattccttgactcctgcccgatcgtacggtaatatgtcatcggaaagggggagattatcacggcacgagtgatacaaaaagttgcatttccacagaaaaagccgttcctgttgaaacggacggcagcc

SEQ ID NO: 23084 - DNA, 260 bp, Unknown
  Description of Unknown: LeftRegion for integrase B10085 sequence
gagaagtaacgcgcatgttttgttaaaagttgcatgtttaacgcacaaatgcgttaattatgcgttaagtgtgcgtttctaagtaaaaaatcccgccagacctattcgcagtaggcctggcgggtctatctcccggaggagctcgtatggtgtctttattataaccctccggtgtctgaaaatctaccggaggtttttctatgtcagaaaatgccgtggtctatgcccgctactcttccagggttcagcaggagcagtcc

SEQ ID NO: 23085 - DNA, 260 bp, Unknown
  Description of Unknown: LeftRegion for integrase B10086 sequence
catacagaaggctggacgattatgcaaagaagatcatccggctgacagctcacctggatgaataaaagaagggcgccgactgcgggaacagccgacgcccaggagcgagaacactgcaagaagtgtctctacacgtgcacattatagcacatttttggcagtgttttccacaatatccacagttataggaggacactgccttgaattttggaatatacacaaggaagtcatacttcacggacacatcggactctgtgaag

SEQ ID NO: 23086 - DNA, 260 bp, Unknown
  Description of Unknown: LeftRegion for integrase B10087 sequence
agaaagttttaatgcatcattatttatagctaaaaagctactagctaataacgatatttcgattgaagactatataaaaattgaagataaattagcatcaaaatattgtatcaaaatatcatctatttatcgccaagattcgttgataaaggggagtcaaagaggtaatatgtgtcatgaaaaagaaggtgattttatagatggaaatcgagaagattgcagcattacctaaacttaaacgaaagataagagtagctgcc

SEQ ID NO: 23087 - DNA, 260 bp, Unknown
  Description of Unknown: LeftRegion for integrase B10088 sequence
cagaaaataacttttagcttatgcttgtccgctttttccagcatctgtttaatttgttctttgtactgctcaactgacatttcaagacctccaatatagaacatatgttcgagttatttctatggtatatcattttactaatacattcaagtattattttaataaacagttattccataaactatgaaaggaaacaataaatgagatttgcaagctataccagaaaatctatctattcagataaatctgactctgttgat

SEQ ID NO: 23088 - DNA, 260 bp, Unknown
  Description of Unknown: LeftRegion for integrase B10089 sequence
gaccagctaagtgctgaggagcagaggctcatcgcctactatagaaagctgagcgagccggagaaggacatgatctgcagatccatggacctgaatcgtggatattaaaaaaaaaaaaaaaaaaagaaggcccagacgcgggaacgactgggcctgcagaacaccggcaagccggcaatcaaacacaaggagattatagcatgaattttggaatttacacaaggaagtcatacttcacggacacatcggactctgtgaag

SEQ ID NO: 23089 - DNA, 260 bp, Unknown
  Description of Unknown: LeftRegion for integrase B10090 sequence
atagagaaactacctataacaataataggtaaagtaattaaattaataggtaattattaaaaaagcaaaagataatgtaatcaagtttggtaaccaatacattatctaatattatcatacactttgaaaagtgttatattagtattatatactatttaacaactcttttcaagtattttaatgaaaggagtaattttattgtggaaaattttatatctgatgataacaggccttatgctatgtatttacgtaaatcacgt

SEQ ID NO: 23090 - DNA, 260 bp, Unknown
  Description of Unknown: LeftRegion for integrase B10091 sequence
aagaatagcgcgcatgttttgttgaaagatgcgtgtttaacgtacaaatgcgttaattatgcgttaagtgtgcgtttctaagtaaaaaaatcccgccagacctattcgcagtaggcctggcgggtctatctcccggaggagctcgtatggtgtctttattataaccctccggtgtctgaaaatctaccggaggtttttctatgtccgaaaatgccgtggtctatgcccgctattcttccaggcgtcagcaggagcagtcc

SEQ ID NO: 23091 - DNA, 260 bp, Unknown
  Description of Unknown: LeftRegion for integrase B10092 sequence
aagcggtattccggtatcacgcatgcatggcgctgatgagatgcatggtggctaaagggatccttgacccgcaggatttatccagtgtatcggacactctcgcccaaaagtacggtttatcattgtgcagtatattcctcgattcggacttgcaatacccagcaaacagagccaatatgccatgatgacaggagggcattatgggcagaaagataacaaaactggcggtctcggagccaataccgactcggaaaagggtg

SEQ ID NO: 23092 - DNA, 260 bp, Unknown
  Description of Unknown: LeftRegion for integrase B10093 sequence
ccgaagtcgcggcgcggtggagcagcccccaagaccggggtggacggcggcgcgccacctgacccatggtcgccgtttgtggcattcctctgcgagctgtatcgggattgggaacgagagcgcgcatgcaaggacaacgagtagccgtctacgcccggttctcgacggacaagcaaaaccctcgaagcatcgaggatcaggtgcgggtttgccgcgactatgtcgagcgcgccggaggccgcatcgctgacgacctggtg

SEQ ID NO: 23093 - DNA, 260 bp, Unknown
  Description of Unknown: LeftRegion for integrase B10094 sequence
  modified_base (116)..(144): a, c, t, g, unknown or other
cttccatgaaaatctatgtttctccgataattttggatagccctcaggacgcttttacagcccgctggctggcttctcttgacggaatggttttaccccccccccccccccccccnnnnnnnnnnnnnnnnnnnnnnnnnnnnnccgccgcgtagagagcttctggagtaccataacgacgaaatttttaggagggtcacatgaatacagtaatttatgctcggtattctgccggcccgagacagaccgaccagagtatc

SEQ ID NO: 23094 - DNA, 260 bp, Unknown
  Description of Unknown: LeftRegion for integrase B10095 sequence
attttgactatatctactgcttcattttgtgttgcagatgttatcaaatattattatgagagcaacgcgaaagaaaaaaattacagtgcatataaacagcttaatgctggaagtccttacataatatcgttctgttattccaatggctattattttcaaatttcatttgacgattcaataaaataacaggaggcctcgccatgtccaccgccaagaagaagctcacaacctgccagccgaagacggccgttgtctatgcc

SEQ ID NO: 23095 - DNA, 260 bp, Unknown
  Description of Unknown: LeftRegion for integrase B10096 sequence
taagatattccgctatcagacggttatgtcatgggttcgctccctgctgaaacagtctcttatcaccaaagcagagtacgccaaaattgatacaatgatagcagagaaatacggcgtatcttcgtgcagcatatttcgctgaaaatccttgactttatgcggttttagagcgaatatggtaagcgaggaggtggtgctgtgtggagaataaagaacgcatcgtagagagggttcagttccccgacgcacaaaaagtaaag

SEQ ID NO: 23096 - DNA, 260 bp, Unknown
  Description of Unknown: LeftRegion for integrase B10097 sequence
ctgacctcaaacggatcgctgacttctatggcgtaggcttagactttttcgacttagcttcggctgatgatgtccaggacttactggcacgagccagagatgtctttatgaatgaagatatttcgcaagagataaaggacgacctctatcgagagatcgtcaaactttacttgaaaataaacagataggaatgaagcaccatgaagaaaacaaacaaaaagacgagagcggttatctatatccgctactcttctcacaaa

SEQ ID NO: 23097 - DNA, 260 bp, Unknown
  Description of Unknown: LeftRegion for integrase B10098 sequence
atctcccacctgcttgaaatattcatcgaagctaacgcaattaaagccaagcaggccatcgaaaaggctgctgttttggaagagcagaaaaaacaataaaattaaaatcccggcaaagcataaaaatgtttacatcttcacattctatagtataatatagttgtaccagatagatacttaatatatatgagaggtaagttatgaatatcgctgcttattgccgggtctctaccgataaaactgatcaacttaacagtttg

SEQ ID NO: 23098 - DNA, 260 bp, Unknown
  Description of Unknown: LeftRegion for integrase B10099 sequence
ttattcgcgagatcgagatactggcagcccttgaagctagcggaatgattactaccagagaacacgccgacctatacgcggatctatctgctgtttactgcccggtttatcagccacgcacccttggggttctaactggataaatcaggcttttagagcgtgtatagacatgagctaatcaggtgagacgaggaggaatagtggcgaaaatcaagcagataacacggctacctgtttccagaccaaaactagtgaaagtc

SEQ ID NO: 23099 - DNA, 260 bp, Unknown
  Description of Unknown: LeftRegion for integrase B10100 sequence
gtcgcgcaattcgggaagcgtctacaattagaaatacaaaatcgggcaagtgaagaaagtaatccttcgcgtttgcttgaacaaatgaatacattgtttagtaatgtgtccgaattatccgaagcagatcagagagttttttatactggccttatagaaggtataaagcgctgggaagaagagcagaaggggaaataatcatgcagcaagcattaaacgcggtcatatacgcccgctattcctcccatagccagcaggaa

SEQ ID NO: 23100 - DNA, 260 bp, Unknown
  Description of Unknown: LeftRegion for integrase B10101 sequence
ttttgacagcggccttattacagttgatactaagtatataatatatgtatcagatgtagtaaaagaatatagttataatgaatttacgcgccaatggctcgtaggcctcgagggcaatcaaattataaggcctgaacgctttgctcctcagagggagtttttggaataccacaacgatattatatttaggaggtgttagcttgcgagcggttatctatgcacgatacagtgcgggtccgagacaaacggaccaaagtatt

SEQ ID NO: 23101 - DNA, 260 bp, Unknown
  Description of Unknown: LeftRegion for integrase B10102 sequence
ctttgcgaggttttagggttggagaagtatgacgacgacgcagttctgaaatatattcggcaaattattgttcccgaaccaaacgaactgatttttatcttttataatggtaaacaggttcagaaacattgggaaaatccgtcacgttctgaaagctggacggaagaaatgaaacaaaaagcaaaggaaaggagtttacaatggcacgaaaaatcacaatgattccgcagaccattaatccgcagacacgaacggcaatg

SEQ ID NO: 23102 - DNA, 260 bp, Unknown
  Description of Unknown: LeftRegion for integrase B10103 sequence
agaaaaagtgaacgtcattacttccgagaatgatcttctccgaattaaacttgaacacaaagaggaaattatctcactacataactattaccgttctgttatgggaaagtttaaagaataacagcctgcgataatagtataatactgacatcaactgacatacaatgtcatttacacaaaaaaagaaaggaagtgagaatatgtttacttatcacggcgtaacaatatcagcaaacgagatattaaaatattcccgaaag

SEQ ID NO: 23103 - DNA, 260 bp, Unknown
  Description of Unknown: LeftRegion for integrase B10104 sequence
aaacgtggatacataaaaatcctagttgttttattgtctatttgtattcttgtcatctgcggcgcattgatcatcgacagaatgaaccctgatattggtttcttctggcgtgaagttgcagaacacttcacagaatcagaaaatggcacaaatgaagcagatagtttgatgaaccgaattataaattggaggttgtaaagatgataagtgaacaaacgaaatcagaaatatcaggtaaatatgtaggaagtccagaccaa

SEQ ID NO: 23104 - DNA, 260 bp, Unknown; identical to SEQ ID NO: 23101
  Description of Unknown: LeftRegion for integrase B10105 sequence

SEQ ID NO: 23105 - DNA, 260 bp, Unknown; identical to SEQ ID NO: 22619
  Description of Unknown: LeftRegion for integrase B10106 sequence

SEQ ID NO: 23106 - DNA, 260 bp, Unknown
  Description of Unknown: LeftRegion for integrase B10107 sequence
gtgcgagcgtatagacgtttggacgagtacggccagaggctcacgcgtatggccgcgcacgtagaaaaagaataaaagaaggacgccagctgcgggaacagctgacgcccaggagcgagaacactttgagaagtgcctctacacgcctaaattgtagcacttttcgcggttctcgtccatataaagaggaggagaacgccatgaacttcggcatttatacgaggaagtcatacttcacggacacgtcggacagcgtcaag

SEQ ID NO: 23107 - DNA, 260 bp, Unknown
  Description of Unknown: LeftRegion for integrase B10108 sequence
tgataaatccgatcttatcgaagaatatgttccccgttttccagttcttcggaagcaggaaatcagccggttccttgaggagctgaatggcatgtcatatgacgatttgactgatgttctgcaagttatgaccaaatacttaaacgcagatgacaagacgaagcgcatggtgcgcatgctcctggatctggaggacgatcatggataagacccctgccgtaatctacgcccgcttctcctctgagaaccagcgccaggaa

SEQ ID NO: 23108 - DNA, 260 bp, Unknown
  Description of Unknown: LeftRegion for integrase B10109 sequence
atatcaaattacaatgaattatttaaaagatatgcttgaaaagaagattatttcaattgaagaatacaatcaaatgatggttgaatttaaaaagaaatatacaccaaaagttagccatttattctttgaaatagcccaataacacttgatatatacatcatttagagtgatatatagtaatggaaaattggaggtgtatgatgcgtaaaataacaaaattagaaacaaaaaaaatagaccttcctaaacttaaaagagta

SEQ ID NO: 23109 - DNA, 260 bp, Unknown
  Description of Unknown: LeftRegion for integrase B10110 sequence
gtgcaagcactgaaggaaagtttattatcatacaaacctgtatgaatcaaaaagaagcgtcaaaaagcagtgccgtataatatcgttcaaatctcgttaatctgagattttcagattgcctatataacttctctatagaatagatatataagagactttatagtacctgtctgagattttcagattggaaaggaattatcatgtacgaggatataaaaagagtctgtttatatgccagattttctagtcataatcagaca

SEQ ID NO: 23110 - DNA, 260 bp, Unknown
  Description of Unknown: LeftRegion for integrase B10111 sequence
cgcgcagcgtgacgcgcgggggagcagcgcttgacgtcctccgcgcagtcggccatcgtcgccacgaaatcaagagaggagtggcgacccatgctgacctttgtccagctcgaggatccggatccggcggcgcgatggacccaggcaatcgcgctgctcgtcgccgccggcgagcgcgcccgggcaggggagcgcgcgccgtgatccccgccgcgatctacgcccgcgtgtcgacggaggaccaggcggagcgctatggg

SEQ ID NO: 23111 - DNA, 260 bp, Unknown
  Description of Unknown: LeftRegion for integrase B10112 sequence
gaatgggagaacgggaacgttgtcagcgtgaacgtggatgactgcgacatgataaaacgcatatatcgcacattcgacggaggaattgatctgcgctcagataacccgacctttgaaccgcttcatttcaccaccgaagacctacagaatgaccgcgtccacgttctgggacgtgtcctgatcccgataggcaaggaactgtgaacgcttcaccctttcaacccggtgacctcgttgtcggttattgcagatactcaggc

SEQ ID NO: 23112 - DNA, 260 bp, Unknown
  Description of Unknown: LeftRegion for integrase B10113 sequence
cccgcagtatagccggacgcagatccgaccgtccgaaggtgaccgctggttctgttccgtagagcaggccatcgcggcaggttttcaggcgccgtccaattctccggtctgcatacaataaaaaagaccgcctcattccccgcagcggtcttcattcggcaaggcaattgcctctattcaactgttgaatatattataccatgaccccgaacaattcaccttttaaaattggcgataaggtcgtcgcatactgccgttat

SEQ ID NO: 23113 - DNA, 260 bp, Unknown
  Description of Unknown: LeftRegion for integrase B10114 sequence
acccgccagtgggcgcccaacgacgtgtacgccgaggtgcgcgtgggcaggcccgccgacgccaggctgaaggccatggcgctggcgcagctgcagccgccggccgggcggccctttgccgcctggacctgagccttggtgacacacggcccgcttctcacgcgacacggccgcgccagcggcctacagtgggcgctgccatgaagcgggccgtcatctacgccagggtcagcaccgagcgccaggccgacgacggcctg

SEQ ID NO: 23114 - DNA, 260 bp, Unknown
  Description of Unknown: LeftRegion for integrase B10115 sequence
caacgaaaaaatgtgcggtgatataaaatttcaaaaacattttgttgaaaatcatcttactaagcacgtagtccgaaatcgtggtgaacttcctatgttctatttgtcaggtactcacgagggtatcgtttctaaagaaacgtgggacagcgttcaagctgaaatattgcgaagaagcaaaaaaggggagataaattaatatgccagcagtacaagtaataccagcaaaaaagaccaaaatagctgtcgctggtattaat

SEQ ID NO: 23115 - DNA, 260 bp, Unknown
  Description of Unknown: LeftRegion for integrase B10116 sequence
aggatttcgaagctgctgtccgatcgctgatcgtaaagcaaaaataaaaggatcagctgttcccgcagctgatcccctgatttccctatccgcaccgcttcgtggtagaaataggcttcgcacctctcattctatcacggaaccgtgcgactgcataggtttcttttttatactcttttttaggaatggaaggtgatctgatgtatatgacacagtcagccccggaactgtacggcgtccgcgtcgtcaaatacatccgg

SEQ ID NO: 23116 - DNA, 260 bp, Unknown
  Description of Unknown: LeftRegion for integrase B10117 sequence
atttttatcacatcaggcatggttaatgtttctgttgctgaaaacaatggccttttgtatcttgccgacagcaacggtaattatgtaacggctttttatgatgaaaacggaaccgatttatggatttatcttgaaaatgtatattttcgcatgactcctgttccttctttttctatgtttaatgattggaagtctcagccatgattaaaaataaaattccgtcctgttctccgcggaccgccgttgcttatgctcgctat

SEQ ID NO: 23117 - DNA, 260 bp, Unknown
  Description of Unknown: LeftRegion for integrase B10118 sequence
cggcaacaagttcttgcaggtgtttgacaatgctaaagaacgtaaggatgcctaactctaaattatccggcaattccgccgcataactcgggacgctacgccgcataacccggcttgccaatctcaagttcttgttctatatatgtgtggcaccggcaaacgcggcgccaaataaaatgaaggcatacggagcgagaaacatgacccccgctatctacgcccgctattccagcgacaaccagcgcgaaacctccattgag

SEQ ID NO: 23118 - DNA, 260 bp, Unknown
  Description of Unknown: LeftRegion for integrase B10119 sequence
ctggaacggtggccgcggtctattacctctaccggagccgcgacgcctacgacgccgacctctatcagacctacaacatggtcaaggactacgagggcgacgtggccgtggtggagcgggaggagctccccacgggcggcctgatccgcgtgacggacaaggtcgtcctggagccctacggcgggaaaggggcttgacgcatggccagaaaaagagaatcctccacccgggcggtgatctacgcccggtattcttcccac

SEQ ID NO: 23119 - DNA, 260 bp, Unknown
  Description of Unknown: LeftRegion for integrase B10120 sequence
gagttcgacgtgtcgctcgactacctgatggggcggacgcagatccggggcctcgcctcagagtccacggacagcaccggcaggcgcacgctgcccagaccgatcgccatgtactacgccctcagcgcctcggatcagagacgggtggacgcgttcatggaagggctcctggcgtctgacgagtacgagggggagccgtgatggcaggcaggatacgggccgcggtctacgccagatactcgtcccacagccagacggag

SEQ ID NO: 23120 - DNA, 260 bp, Unknown
  Description of Unknown: LeftRegion for integrase B10121 sequence
tgtacgaaggttataaaagagaatgcattcgacgatataaggtttcgggacaaagtggagagaatcacagcagcagaagacatactcacctttcattttaggggaaataggaaggtgaatattacatggagcaatacgtctcgaaaagaagtctggaccgagagcatgaaagactcggcaaaggaaaggagtctaaagcagtggcaacaccggaaaagcaaataacgataatcccaggggtcataaaatacaccgaagga

SEQ ID NO: 23121 - DNA, 260 bp, Unknown
  Description of Unknown: LeftRegion for integrase B10122 sequence
cgatcatccactacaggacggcaatggtggtttttggaaaatggcttgccggtggcgtcatcaccgaggaagaactgacaagaatcgatgcggcaatagcctgtaaatacggcctttctccgtgtagcatatatcgctgaaagtacttgatattacgggcgtttagagcgaatatgttataaacggaacggaggccttttatggggcgagtcatcacaaaaacagtccctgcggcgccatcccttgcaaaaagacagagg

SEQ ID NO: 23122 - DNA, 260 bp, Unknown; identical to SEQ ID NO: 22982
  Description of Unknown: LeftRegion for integrase B10123 sequence

SEQ ID NO: 23123 - DNA, 260 bp, Unknown; identical to SEQ ID NO: 22625
  Description of Unknown: LeftRegion for integrase B10124 sequence

SEQ ID NO: 23124 - DNA, 260 bp, Unknown
  Description of Unknown: LeftRegion for integrase B10125 sequence
atgtagtttgcatagatgggcaatattacacctctcctgagtataataacatgatatataacgaagaaattgtatatgaacatgatgtcgccccagaaccagtgaagaacagatttggattagctgatatgcagttttaaaaatctgtcaaaaaaccgtccggtgctaccaacaccgaacggctttacatagattttctcttgccggacgaaccggaagataaatcaccttcaacaagtgaattatatcatttctggtac

SEQ ID NO: 23125 - DNA, 260 bp, Unknown
  Description of Unknown: LeftRegion for integrase B10126 sequence
tcccatctgctgaaacttatggaaagcggcggggttatgggtatcgactgcaagatgggcggcggcaagttcaaacgcctttatgaagaatatgacgatgaaaaggacgaggacgttttcgtactggaaaaggacgatataaactattttgttcatttggaaattacagaacgggcctaacctttggaaggggtgattttgtgcgggcgtttatatactgccggttttccagccacaagcaacaggaacttagcatcgaa

SEQ ID NO: 23126 - DNA, 260 bp, Unknown; identical to SEQ ID NO: 22776
  Description of Unknown: LeftRegion for integrase B10127 sequence

SEQ ID NO: 23127 - DNA, 260 bp, Unknown; identical to SEQ ID NO: 22625
  Description of Unknown: LeftRegion for integrase B10128 sequence

SEQ ID NO: 23128 - DNA, 260 bp, Unknown
  Description of Unknown: LeftRegion for integrase B10129 sequence
cccgggccattactataaataactaatgccagaaaccccaaccataccaaccattaaatccatatgtttgcaacccgcaaaagttgtaacattacaacccgcaaaagttgtaacattacaacccgtcccgccccttaccgaaaacgaaaaaaaaatcctaaccctgatggcaactgtttatgtaagtaaaattgtaaaccatgcaggcaatagcatacatcaggataagcactaaagaccaaagcaactttagtatagaa

SEQ ID NO: 23129 - DNA, 260 bp, Unknown
  Description of Unknown: LeftRegion for integrase B10130 sequence
aagggaaatgtacagatgttggagaagtctttggatattctcttgatattgatgaaatagaataaataataaaaaagccggctcctgcgaccaacaggaaccggttttaataaataagataatccggagaaaatcttacctacaccataattatatcatctcctggattatcacacaagtaaaaaaaggagaatgataaaatgaatgaatcagtatgcatctatctaaggaaatccagggccgatcgggaagctgaggca

SEQ ID NO: 23130 - DNA, 260 bp, Unknown
  Description of Unknown: LeftRegion for integrase B10131 sequence
ctgctcctgcaattatgattattacatcgactactttgtttccggcgcgcacgaatttgtatatctgattgcggaagaacgcaaataagaaatgcccgccccggtttcccaggacgggccgcaaaatcagccaacaccacttgtccgatttgctattttattatagcgcggagaacgtgaaaagtcaaggagtttcgcgcatgaaagctgtaatttacgcacgctattcttcccacggccagacggagcaatccatcgaa

SEQ ID NO: 23131 - DNA, 260 bp, Unknown
  Description of Unknown: LeftRegion for integrase B10132 sequence
cagcacgtctatttttccggcgacgatgagcacgacgacgtcgtctggatcgtggacagcaccggcgaccggctcggacgcctgccgaaggacgccgccgcgcagtatctcgcggaaggcgcccgcggcgcatttatcaagagccttgaggacgaggatcagaacacgatcccctttgtccgcgtattctggaaaaaagcatgaacggcgtcatctatgcccggtacagttcagagcggcagacggagcagtcgatcgag

SEQ ID NO: 23132 - DNA, 260 bp, Unknown; identical to SEQ ID NO: 16840
  Description of Unknown: LeftRegion for integrase B10133 sequence

SEQ ID NO: 23133 - DNA, 260 bp, Unknown
  Description of Unknown: LeftRegion for integrase B10134 sequence
tacggaggcgcctctcttggagaatactggatcaatacgaaaaccggagaaattgataacttagaataaaataaaaaaagccgtcaggtgttgcagcacctgacggttctgatcctgcccttgcgggtggactcgttattggtagatatattgtagcataccgcatggatatctgcaagggcttagacttggaggtatctatgcgtttttttaattatggacggaagtccatctactcagacagctctgattctatagac

SEQ ID NO: 23134 - DNA, 260 bp, Unknown
  Description of Unknown: LeftRegion for integrase B10135 sequence
gttatcagatggtcatgtcgtgggtacaatctctgctgaaacagtctcttatcagcaagaaagagtataccagaattgatacaatgatggcaaagaaatacgacgtatcttcgtgcagcatatatcgctgaaaactgcgtaaaatcgttgacttatggctcaatagacggtaacatggtaagcgaaggaggtggtgctgtgtggagaatagggagagaatcgtagagagggttcagttccccaacgcaccgaaaataaag

SEQ ID NO: 23135 - DNA, 60 bp, Unknown
  Description of Unknown: LeftRegion for integrase B10136 sequence
gccggtcagcgcgaggagtccatcgagggccaggtgcgcgagtgtcgagcttatgcgaag

SEQ ID NO: 23136 - DNA, 260 bp, Unknown
  Description of Unknown: LeftRegion for integrase B10137 sequence
gactattattactcggaaagtctcaggcttgccggtgccgacgattactccggacttgatgaaatggattacgatttcaaggatggcgcttatgtcatcatcaattatggtgacgtgatcttcacgccctatgcgggcaagccctcgctggggtttaagtgatacacaaggcgcttcggcgccttttttgaggtgtgactatgaacagattggacccctctggcctctacgccgtctacctgcgcaaatcccgcaaggat

SEQ ID NO: 23137 - DNA, 260 bp, Unknown
  Description of Unknown: LeftRegion for integrase B10138 sequence
cggcccttcgcgcgcagcttgcccagcagcagaaatccctgcgtatgcaccggcttgtgacgctcatcctcttgggcattctttcgctgtgtgcccttgtgcttgtggccgatgtgctcatcccatcgatcggctggattcgcacatgaaaattaccgccccggcccgatcagccagagcggtatctttggaggatttttttggataatttgaatcttgccaacgtcgtgatctacgcccggtattcttccgccgggcaa

SEQ ID NO: 23138 - DNA, 260 bp, Unknown; identical to SEQ ID NO: 16827
  Description of Unknown: LeftRegion for integrase B10139 sequence

SEQ ID NO: 23139 - DNA, 260 bp, Unknown
  Description of Unknown: LeftRegion for integrase B10140 sequence
ggctatcaggtacacttcgcagaaaatggaaccaagggaaccggccaccgtccggcgtggtatatccgattccaataaaaaatccgcccaggctgctacctgtgcggatcaaacgcaaggaaaatgcaaacaccactaagcactttccgtagtcagtatatcacaagctgcctgcgttgtaaagtcggaaaggattaagattgaacgctgtaatctacgcccgtttctcgtcgcacagtcagcgggagcagtccatcgaa

SEQ ID NO: 23140 - DNA, 260 bp, Unknown
  Description of Unknown: LeftRegion for integrase B10141 sequence
taagaacatgtatgagactgcagaatatctcgatgttccacagaactttctcagagattgcttggaatgctatcacgataaatacggcacgcacgttaaatatcaggactatgtgatcttctttgatccgtacatggatgtcctgacaatgcaggaggcgttgaaattacaaaatgactggtaagaagacagatggagaaatggctgtcgtatatgcccggttctcatcagcaaaacagcatgagacctccattgaaggt

SEQ ID NO: 23141 - DNA, 260 bp, Unknown
  Description of Unknown: LeftRegion for integrase B10142 sequence
aaatgaatcgtaatatcatcatctatcaggttatggttgaaattatcaaaacttggcttcgttcaggaaagatctcaagaaaagattatgcggaaatgaacacaaaaatggctgaaaaatacggcatatctttgtcgggtatattcgttgataaatctgaaaatccatgctaatatggtatctgaaaggaggaggtttacatggaacgtttgatacaaaaaatagaaccttctgttgatatttcacataaattacgaaac

SEQ ID NO: 23142 - DNA, 260 bp, Unknown; identical to SEQ ID NO: 23125
  Description of Unknown: LeftRegion for integrase B10143 sequence

SEQ ID NO: 23143 - DNA, 260 bp, Unknown
  Description of Unknown: LeftRegion for integrase B10144 sequence
aaggccgcgtacgctgaaccgattgtgcttcataattcggatattaagccgacgcttctctgcattcttgccgggcttttgattggcggcgcgattcttttcggcctttatatctataaaaccctgccgggctacacgaaggaaaacaggatcccgccgcccccggcccgcgccgaacagacggaaacggaggcgacgccgtgaccgcgcccgtcacgctctcccggatcgtcgcgtacctgcgcaaatcgcgcgacgac

SEQ ID NO: 23144 - DNA, 260 bp, Unknown
  Description of Unknown: LeftRegion for integrase B10145 sequence
gcatccgcgagcgaagctgccctacggagggcaatgatgcgaacccctgaccggccactggacctcctgatcgacgccctgaccgacatcatcgtcgaggaatatctgcgggagacagcggccaacgacgcggcctcaccgcgcgacggggaaaatcccgtgcttcccgctgcgcgcgacgccgcataggatcgcccgccatgcgcatcgccgcctacgttcgctacagcagcgagaaccagtccgccgccagcctgcag

SEQ ID NO: 23145 - DNA, 260 bp, Unknown
  Description of Unknown: LeftRegion for integrase B10146 sequence
agaaattaattatgccttatccctgaccttcctaaagggcttgcgtcaaagccgtcttttgacggctgaagaatttagaaatgcacagctgaaactgaagaccaggtacaagccgtttttgcggtataaattagaaaatatagcttgatacaatcttacatcagagctaatatacaacactgaaagggggacgtgccaagatgaaagtagatattatagcaccgacaaaacacaaaaaatacagactcataaatgttgct

SEQ ID NO: 23146 - DNA, 260 bp, Unknown
  Description of Unknown: LeftRegion for integrase B10147 sequence
cgaccaggagcggagggcgctggtcgtatgacctcgcccgacgacctcgcccggcgccgcgcgcgcatccagcgcctggctgcgaagcgccccgagggcctcacgatcgaggtgacgcacgcgccggagccgggcgcgctcgagcgcctggccgacgtcctagccgagctgctggacgcgcggcgccgctccggacgaaggtgatcgccgtgcccgccgtccgtgccgccctgtacgcacgtgtttcgagcgccgcgcag

SEQ ID NO: 23147 - DNA, 260 bp, Unknown
  Description of Unknown: LeftRegion for integrase B10148 sequence
ggtcagtgttgagtcatcgggtcgttcaacgttcacttaggcgagggtaaccgggcggtcggcgcgacggaccgggaccaaagtcaccgtttccgcaggtcagacggcctttcctcacatacgcagattgggccaatacggcaacccgtacgggtgggagtaacatacgttccgacacagcaaggggagggaacaaacgcatgtcgcagcgcagaggtccgcgcgtgttgggcgcaacccggcttagccgctacacggac

SEQ ID NO: 23148 - DNA, 260 bp, Unknown
  Description of Unknown: LeftRegion for integrase B10149 sequence
aatccctaccgcgtgggcgatgtcgtcgcgggactcggaactgtgtatggcgccgccgacgccgtgagcttcttccggcgctactgcctgccgcctgccgggcgctcgtacgaagagctgcgcgggaagaacctggcttgttggtgccgacttggcactccctgccactcagacgtgctgctcgagctggccaaccgctgatgcgtaccgccgcctacgcccgctacagttccgaccagcagagagacgccagcctcgag

SEQ ID NO: 23149 - DNA, 260 bp, Unknown
  Description of Unknown: LeftRegion for integrase B10150 sequence
aggccaaaggcattatccgctttgaaaaagagtttacggatgccatcggcatgcaaaaacaggtattgccagccatcaaacggggtgcacagtcttttcgtgtccaccatatccaaaaagcctgtgagctgtataaagtaaacgccaactggatatttggtttacaaaacacgccttttagggcaaaaaccacttaagccatggatgccatcggctacgcccgcctttccgacaaaaacgagtcttccaactccatcaaa

SEQ ID NO: 23150 - DNA, 260 bp, Unknown
  Description of Unknown: LeftRegion for integrase B10151 sequence
agtacacatcttcgaattcttccgacgggtcagaaacccgcggcgctgggtgattctcatccagcgaagtctttttggcaaataaaaagagccgccagcgctggaacgctgacggccgctgcctttatttctaaagggcttccacctgtatgcatcttctattttaacgcggaatgcccttttttacaaggagggtatttatgcgctttttttgttatggcaggaaatctgtttattccgatcactcggattctgtcgat

SEQ ID NO: 23151 - DNA, 260 bp, Unknown
  Description of Unknown: LeftRegion for integrase B10152 sequence
cattaaatgtagtatatattgaacctgaaatttcagaatcaaaagatgaagataaaaaaagattaacaaaatttatttctttgtttgctcaaatcggctataaagaattagcattaaacaaagattttcaaaatgaattaaattttgcaattaaataatttcatgtataatgttttcataaatagattgagccataactgatgaataaaaaaagatgtattatatatgtcagagtatcaaccgaagaacaaatcaaaggt

SEQ ID NO: 23152 - DNA, 260 bp, Unknown
  Description of Unknown: LeftRegion for integrase B10153 sequence
catcgccggcgcaggctggttccgctttgggctgttaaagtagcttgcatccgcgtctattgcgtggtaatataaagaaaagccggaggctgcaacctccggcatacttgaaagtgtctggtggagcagacaacttcccaacagttgtattatagcaccttccagtcctcctttcaagtgttcgaagggaggattcttttatgcgtgtcgggatctatatccgtgtctccaccgatgaacaagcaaaggagggtttttcc

SEQ ID NO: 23153 - DNA, 260 bp, Unknown
  Description of Unknown: LeftRegion for integrase B10154 sequence
tgtaccaggattttttctccaagtcttttaggcacatcatggtcgccaaagtatatcactgatctgataatttactattatgaaaacatcaatgataattattcttacgcttataacgttatagactcggataataattttattctttatttctttggatccgataacggatatatatttgaattaaccgggagcaaagaatgaaaaaacagtctttaccctcctgtcctccgcgtaccgccgtcgcttacgcccgttat

SEQ ID NO: 23154 - DNA, 260 bp, Unknown
  Description of Unknown: LeftRegion for integrase B10155 sequence
cttgcagatgctcctttttcttttcgttctccggatacaatgtttaacaatcttccggaagaagaaaaagtttttcttgacgcttaccgtgctgccgatgaccgcgcccgcgctgatgctctcgctactctgctgcagcatcctgcagctaaaaaataggaggtttgttattttaaaacttctttaatttggaggtttccatgaaaaaaactgttgccccttcctgctctccgcggaccgctgttgcctatgctcgctat

SEQ ID NO: 23155 - DNA, 260 bp, Unknown
  Description of Unknown: LeftRegion for integrase B10156 sequence
tcgttgagcattagaaagcaagccgaaatgattcaatatctcttacgcttgcaaagtgaagaaagtgaataataattgcttttttctataaagtcccttatagatacatatttatagaacactttatggaaaaacactaaaatcattcacttttatcactctctatatattatatataatgtttaggacaggggtttactatggaagtagtattatatttaaggtatagttcagatagacagaacgaacagtctattgag

SEQ ID NO: 23156 - DNA, 260 bp, Unknown
  Description of Unknown: LeftRegion for integrase B10157 sequence
aggcctaccgtttggccagctatgacacgaagctggccgcctgcgcggttctccgcgtaaaagaataaaaaaaaagcccgccgctgcgggaacagcgacggacatgaagcgagaacactgcactcttgcgagtgcgctctacacggccacattataacatttttgtgcagggttctcaatatagaagggaggactctgccttgaattttgggatatatacacgcaagtcatacttcaccgacacgtctgacagcgtcaag

SEQ ID NO: 23157 - DNA, 260 bp, Unknown; identical to SEQ ID NO: 17197
  Description of Unknown: LeftRegion for integrase B10158 sequence

SEQ ID NO: 23158 - DNA, 260 bp, Unknown
  Description of Unknown: LeftRegion for integrase B10159 sequence
ttggattactttgacctggccgcggccgatgaggcacaggatttgctagcgcgcgctcgtgatctatttatgagcgacgatgtatgccaagcgactaaggacgatatttatcgtgaaatcgcattgttatatcttaaattgaaaaagtgaggcttcggcctctgtaaactgttatatctgtagaaaaggaatgttatatcatgaagaaaactaaagctgttatctatattcgttattcatctcataagcaaagggagtca

SEQ ID NO: 23159 - DNA, 260 bp, Unknown; identical to SEQ ID NO: 17179
  Description of Unknown: LeftRegion for integrase B10160 sequence

SEQ ID NO: 23160 - DNA, 260 bp, Unknown
  Description of Unknown: LeftRegion for integrase B10161 sequence
cccggccttgcccgctatgaaatttgcatccttgatgtcgatcttcacgatggcggttatactcacacctatatgatttcttccgatggttccacagaaattggaaaaatctatcttccttatggtgccaccgtaaacgtgttaagtggcccgatccgctttttcccatatacgggccttttccattgatcggaggcagtatgcccaaaacgaaaaaaacggcctgccgcccgaaaacggcggtggcctatgcccggtat

SEQ ID NO: 23161 - DNA, 260 bp, Unknown; identical to SEQ ID NO: 22632
  Description of Unknown: LeftRegion for integrase B10162 sequence

SEQ ID NO: 23162 - DNA, 260 bp, Unknown
  Description of Unknown: LeftRegion for integrase B10163 sequence
taatgtaatcgcctgtatcactgctcttggtggatttcttaaagaagggggtattgctactgattttgagatatttagcctttaatctgcgaacttatctaaattggtgcatcagttacatatgctgattctttttagataagtttgcatttctgcttttatcttcatatctttgccctatatataaatataaggaaggtatgaaagcaattgcagtactgagggtatctaccgaaacacagcagattgaagaccagaaa

SEQ ID NO: 23163 - DNA, 260 bp, Unknown; identical to SEQ ID NO: 17197
  Description of Unknown: LeftRegion for integrase B10164 sequence

SEQ ID NO: 23164 - DNA, 260 bp, Unknown; identical to SEQ ID NO: 22629
  Description of Unknown: LeftRegion for integrase B10165 sequence

SEQ ID NO: 23165 - DNA, 260 bp, Unknown
  Description of Unknown: LeftRegion for integrase B10166 sequence
ccgggagatcgcgtatcagatgactatggcggctgcccggaaaatgctcgaacaaggccttatctcaagggatgaatacgagaaatttgatacaaaaatgatacaaaaatacgagcccgttttcggcagattattctctgatctcaacttgatataggggaaacaccacgggaatatgtcatcggaaggaggtatggcatatgccgacaataaaaaagataaagccccgtgccgcaattcccacggcaaggaaacgagtc

SEQ ID NO: 23166 - DNA, 260 bp, Unknown
  Description of Unknown: LeftRegion for integrase B10167 sequence
gaacccgattatcttgtccccggctacgattcgacgcaggtcttcaaccccgagaacgaatactacaacggcatgatcgccgaagacgtcatcgaactgcacgacggcgattatctgttggtcagtaaagacaacgcccccgccgtcttcatgccctacagcggcaagccttccctgggctttaagtgatggaggttcccatgtcagacctggacccccgcggcctttactgcgcctacctgcgcaagagccgccgcgac

SEQ ID NO: 23167 - DNA, 260 bp, Unknown
  Description of Unknown: LeftRegion for integrase B10168 sequence
acgggagatgaaatatcgcgtttcgatggcggccgcgaatagtatgctccgccaaggattaatcaatcaaaccgaatacgatggattcaatcgactcatggccgaaaaatatcggccactgatcggcggtcttttgttaaaatcttccgttgataaacaccgcgaatcgagctaatatgccacatgacaggagagcggatatgaatcgtgtggttcgtaaattaaagccaaagattccggcaatcccgcaacggatgcgg

SEQ ID NO: 23168 - DNA, 260 bp, Unknown
  Description of Unknown: LeftRegion for integrase B10169 sequence
gacgatggattataacgtatgctttgtgcttattatcacagatttcgtagttaaaatgcaaattcaggaataatatcgtttaggaattgtattataaaagccgcccggtgctgcaacaccagacggcaacggtcattgtaccccgatgcattatacgggcaatctctgacctttttcattatatcacaggaggtgattctgtgcgcttcttctgctatggacgaaaatctgtattctcagacaaatctgattctgtggat

SEQ ID NO: 23169 - DNA, 260 bp, Unknown
  Description of Unknown: LeftRegion for integrase B10170 sequence
aaagtccaagcctacctgtccgctatggcacaggcgcagattatgctcaaaaatggcatcatcggcaaggatgacattgtatcaattgagcacaagttagccgagaaatatgggcttaaaatcggcagtatatatcgcgaaattgacttgataaatgttgctttgagagcgaacatggtgtaaggcgaggaggtgatattatgcctaaaaaagtaagaaaaatgccgcagaagccgcgattggaacagccaaaaaaggtc

SEQ ID NO: 23170 - DNA, 260 bp, Unknown
  Description of Unknown: LeftRegion for integrase B10171 sequence
acgggagatgcgttatcgcgtttcgatggcagtggctaattgtatgctgcggaaagggctgatttcgcaggctgaacacgaaaccttcgatgctcttatgatcgagaagcaccaaccgccgatcgggaatatcttgctcaaaacatctgttgataaatcgccgagtgagagctaatatgccacatgataggagcataggtatgaatcgagtgatacacaaagtacagccaacgattccggcaatcccgcaacggatgcga

SEQ ID NO: 23171 - DNA, 260 bp, Unknown
  Description of Unknown: LeftRegion for integrase B10172 sequence
tggctacgtaccggtgaaggcgaaatgtttaaaaatgatgattttgcttatgaccttggtacttatgcagctaaagcaactgatcttgatagagctgtgatcaccgagtggatgaagctcaatgatgataccaagaagaacttatatgagtttatgaaaaaagttgttgatgcctctaataaagaataggatgtgttgatatgaaggctgttatatatgccagatattctagcgacaaccagcgcgaggaaagtgttgaa

SEQ ID NO: 23172 - DNA, 260 bp, Unknown
  Description of Unknown: LeftRegion for integrase B10173 sequence
gaagagacagcccgacgtattgaagcggagcgggcccgaagagcgaaagccctgggcagggataacagaggcagaaaaaaacagcctaagccgacgatttataagaacttttctatccccagggtgccggaaaaataccaggaccccatcaagcaggccgagtatgcatatagcctgattcaaagcgaggtgagcggataatggcattagcacaaaacatcacagtgattccggccagacgtaccatcggaacacagaag

SEQ ID NO: 23173 - DNA, 260 bp, Unknown
  Description of Unknown: LeftRegion for integrase B10174 sequence
attgctgtttatcgttcgttaggaatagccgagcaagccgactttattcaatatttattaaaattgaaaagtgataaaagtgataaataataggctttttccataaagtcctctatataattacttttatagaacactttactgaaaaacactaaaattactcacttttatcacttaaaatcacttttgagaggctgaaaatggaagttgtattatatttaaggtatagttctgaccgtcaaaacgagcaatccatagag

SEQ ID NO: 23174 - DNA, 260 bp, Unknown
  Description of Unknown: LeftRegion for integrase B10175 sequence
tcctactgagcctttggctacaatcaatttcgccaatacctctgtcgctcttccggtgagcttcacggcaatactcttatccaaaggaaattataccacagaaaaagaaaaccaccctttatgtgcggcaacacaggtggtttccataacagatgagatagatcggtataatcatccttaaatgctaaaaggattataacatggcttcaccatttcaacaaggagacaaggttgttgcatactgccgatattcggaaggt

SEQ ID NO: 23175 - DNA, 260 bp, Unknown
  Description of Unknown: LeftRegion for integrase B10176 sequence
catctttgtcgcattgtaaaataccataacgatcctgcatgttatgcttttgttggtgatcattttattggccagcttccggatgaggctttttcttttgctgatcgtttggatacgtcccccgaattcctcatttcaattgtcggaaaagttgaaaacggcgatatttacatttatatcgcagaataaaaggaagtattatgaaaaaaccaaccactcccacctgctccccgaagacggcggtcgcttacgcgcgttat

SEQ ID NO: 23176 - DNA, 260 bp, Unknown
  Description of Unknown: LeftRegion for integrase B10177 sequence
tggaaaaacagaatgctgaattattagaaaaaaatgaagagttgatttctaaattatcagccattgacgaattgcacaggaatgatattcgggcgataaaggccgaatatacagaagaaatcgccttcctgaaggaacagcttcgggcctggcaacgccatgaaggtataaaataaccatttttgaaagaagtgaggaaattgacagtatttgaaaaaaacaacgcaatagaagctgcattcagcaaagatatatatgct

SEQ ID NO: 23177 - DNA, 260 bp, Unknown
  Description of Unknown: LeftRegion for integrase B10178 sequence
ccgagcttcaccatccggtcgtggaccgcccctgctttggtgatgtacgaggcgcgcagcatgccggcgttgttgcgttgggccaggacatcggaataggcgaggtactgaagaatctgggcttggatggctttttctgggacggagcgttctttagacattcaattgggctattggcacattatactctcttgggtcaattgatcagcctcaagagccagcgcgaggctatccagaaatactgcaaggagcaaggctgg

SEQ ID NO: 23178 - DNA, 260 bp, Unknown; identical to SEQ ID NO: 17281
  Description of Unknown: LeftRegion for integrase B10179 sequence

SEQ ID NO: 23179 - DNA, 260 bp, Unknown
  Description of Unknown: LeftRegion for integrase B10180 sequence
ctgaccaccgcacacgaagcccttgtggcaaagatgcagaccgtggaagaagttcaccggaaggacgttgcagccatccgtgctgaataccgggaacagattgattttttgaaggagaataacgcattcttgcgcgaacgcttccagtgggcgcaagaacacgcaaagaaggattaacccaataaaaggacgtggaaaacgtgacagtatttgaaactaacgacataatagaaacatccatgccgaaaatggatgtatac

SEQ ID NO: 23180 - DNA, 260 bp, Unknown
  Description of Unknown: LeftRegion for integrase B10181 sequence
attgatgaggatacctaccgtaaggcacaggaagaacgtaagcgcagagctaccgcccttggtcgcaacaataagaaaacacaaaagaggcaaatacagataccgacctttttccatgtgggcgaggtcactgccttctataatgatcccatcaagcaggcagaatatctgtacaaccttatagaaagcgagatgaaataatgggaaatgtaatgctgattcctgcaaggcgtcaggttggaaacaccgcgcgaaagcag

SEQ ID NO: 23181 - DNA, 260 bp, Unknown
  Description of Unknown: LeftRegion for integrase B10182 sequence
gatttcgagtatgaaatggcggaaaagttcacgcagtcactctttgaaaaagggcttatttcggaagaggaaaaggccagaatatccacgttaaaccgggaaaaattctctcctttttacggcgatattatggagaaataacttgctatatgtggcctttagagtgatgtatagtatcgacctaataaggaggtgagacggtggtaaggataacaaaaatagaagctacacaaagctttgctacacaacaaaaaacacga

SEQ ID NO: 23182 - DNA, 260 bp, Unknown
  Description of Unknown: LeftRegion for integrase B10183 sequence
tctgaactggtacgcacagcagcaggatccgagcatcgagtcttcgtcttcggattcctacggcgggctctatgaccgttacaatgctctcgtcggagtatcgactccaagcaccgtcagcgatacggataaatggctgatctacgacggcatcacgacctcgacgcagttcgtcgaccttaaataataaggaggacatcatgcgtatcttcatctacgcccggaagtctgtcttttcggataagtccgactcggtggac

SEQ ID NO: 23183 - DNA, 260 bp, Unknown
  Description of Unknown: LeftRegion for integrase B10184 sequence
  modified_base (117)..(129): a, c, t, g, unknown or other
aacttctttcaggcgcagaagatcgctaaaaatatgctggagcttggacttatttccttgtcagaattcaacaaattaactgagataaaccgtaaaacattctccccgttttgggtnnnnnnnnnnnnntgcccaaaattccttgatatataagggattcagagctaatatgtgacactaacgaagggaggtgaactaccgtgaaaaagataaccaaaattgatggtgtacagaataatagcaccataaagaaggagctc

SEQ ID NO: 23184 - DNA, 260 bp, Unknown
  Description of Unknown: LeftRegion for integrase B10185 sequence
attaaaagatgatgagataaccgatatattgcgccagcacaatataaaatttgaagttgataaaccagaattattattttcttcggctataaaagttaacacttcatcatgccagcttccactctggaaagttgttcttttaatcattttatggccacttggtttgtattatttgataagcaaaaaaaataggagtaccaatggctgatactcctaaattaaatgctgcattttatggtcgatactctgctggaccaaat

SEQ ID NO: 23185 - DNA, 260 bp, Unknown
  Description of Unknown: LeftRegion for integrase B10186 sequence
tccggcacatggaaagctgtaggatctgtgctttccctttataccaaagataaatcaagcatgataacgctcgaatatgacgatgattatctctggtttgaacttgaacattaccgaattggcatgtcaaagacacctgacttttcgctttcacaatttcaatttttcggtgattgacttattggaaaggatcttgctcaatgaagaaatctgctgccccagcgtgcaatccgaagaccgctgtggcctacgcccgatat

SEQ ID NO: 23186 - DNA, 260 bp, Unknown; identical to SEQ ID NO: 15028
  Description of Unknown: LeftRegion for integrase B10187 sequence

SEQ ID NO: 23187 - DNA, 260 bp, Unknown
  Description of Unknown: LeftRegion for integrase B10188 sequence
attatgactttttactagcacagaaggtctcagaacagatgatgaagcttggacttatttccttgtcggaattcaacaaattaactgaaataaatcgtaaaacattctccccgttctgggttgagattatgcccaaaattccttgatatataagggattcagagctaatatgtgacactaacgaagggaggtgaactaccgtgaagaaggtaaccaaaattgacggtgtacaaaagaataccgccataaatagcaagctt

SEQ ID NO: 23188 - DNA, 260 bp, Unknown; identical to SEQ ID NO: 22746
  Description of Unknown: LeftRegion for integrase B10189 sequence

SEQ ID NO: 23189 - DNA, 260 bp, Unknown
  Description of Unknown: LeftRegion for integrase B10190 sequence
agaacaatcgatgcagagggtcgtgcgagaattattcaggatataatgaatacatccgatgcaaaagaaaaaagacatttaccggagaataaagcatttgtcggatgagtttatccatacaaaagttataccatttgaaaaagtagtagaatataaccacttactaaatttgttaaatagaccgagaggaaaatgatattatggatgttgttttatatatgagatatagttctgacagacaaaatgaacaatctatagag

SEQ ID NO: 23190 - DNA, 260 bp, Unknown
  Description of Unknown: LeftRegion for integrase B10191 sequence
aggtcgccgtcgtcctgatcgacaaccaggactccaccgtgaagcgcgttttcaaatcgcaggacggcatcacgctggtcgcggataatccggcagtgttcagcccgagattcttttcaaatgaagattgcctttccctgccggtcctgatcctcggcagagtgatttcgattcagcgcgagatgtgaggaggtctttatatgatagtggcactatatgcccgctacagctccgacaaccagcgagaggagagcatcgtc

SEQ ID NO: 23191 - DNA, 260 bp, Unknown
  Description of Unknown: LeftRegion for integrase B10192 sequence
atattatcactttgataatcggattctttgtcggaaaacaggtcaataagaagaaatctgataaggatgcacctggagaaccagaagatgctcaaattatagattaataaaagtgacgcttttaatattcgcctggccctgtccaggcttttttatttgtaaattctacgtaaattcaaagccccctaatatatttacaaatgaaagccatcgggtacatacgactatcagacgaggaccaaagcaactattcaattgaa

SEQ ID NO: 23192 - DNA, 260 bp, Unknown
  Description of Unknown: LeftRegion for integrase B10193 sequence
tactaaaaatgaatctgaagcgaaagggaaatagctatgaaggatcataaggatcatgctgctttaatgctgatagaaattcttgccgagcgggatctggtgaataaggaaacgctggatgctgtcagagagaagatcaagagtacaaatcatatacacaagatggctcatccagaagacttgaagattgagggaatgccatgactaatttgcacatgcctattggtagtgcacgggtctaccaggaccgaaatcgccca

SEQ ID NO: 23193 - DNA, 260 bp, Unknown
  Description of Unknown: LeftRegion for integrase B10194 sequence
cgatctcgactatcgccgggcgcaggacatcactaaaaagatgctcgatgacggcctgatttctgtggctgaattcaacaaattaaccgccatcaatcgggaaactttctctcccttgttcgcggaaataatgccaataataccttgatatgtagtcgctttagagtgatgtatagacgtacggaaaggagggacttcccttgaaaaaagtaacgaaaattgcggaaacagcgagctcgaaggtcaagctcaaaaagatc

SEQ ID NO: 23194 - DNA, 260 bp, Unknown
  Description of Unknown: LeftRegion for integrase B10195 sequence
tgaatacggttatattgttgcctccaagttgctcagggaaatgctggatcagggcctgattaccttagaccaatatcacaaaattgaccagaaaaaccgcgaaactttctctccgcatctggccggattaatgccaagtaatcgttgatataagtgggaagtagagccaacatgtcacctaatgaaaggaggacgagaccttgacaacgataacaaagattgaagcaaaaaagcagaaaaccgattgcaagctcagggtc

SEQ ID NO: 23195 - DNA, 260 bp, Unknown
  Description of Unknown: LeftRegion for integrase B10196 sequence
gcgaagttgattatgtgagagcacagcaaatactcacttctatgcttgagaaagatttaattaccttgtcggaattcaacaagataaccgaattaaatcgcaaaactttctcgccgctattagccgagattatgccttgaaatcgttgatataacttcgtttcagaggtaatatgtcacactgactaaggaggtgagaatttgaaaaaggtaacgaaaattgctcaaaacacggccaatttaaccgaacagactaagttg

SEQ ID NO: 23196 - DNA, 260 bp, Unknown
  Description of Unknown: LeftRegion for integrase B10197 sequence
gcgaagttgattatgtgagagcgcagcaaatactcacttctatgcttgagaaagatttaattaccttgtcggaattcaacaagataaccgaattaaatcgcaaaactttctcgccgctattagccgagattatgccttgaaatcgttgatataacttcgtttcagaggtaatatgtcacactgactaaggaggtgagaatttgaaaaaggtaacgaaaattgctcaaaacacgaccaatttaaccgaacagactaagttg

SEQ ID NO: 23197 - DNA, 260 bp, Unknown
  Description of Unknown: LeftRegion for integrase B10198 sequence
gctgcacggcggccgggtcttccttccacttcttctcccaatcgtcgagcgagggcacggttacttcggcacgtttcgagtaggcgtgatgcaccgccattgacttgtgccccagggcctgctgcgcaaaacgctcggggtagccgcacttaagggcacgctcagcccagacataattgacttctgcaaatgagcttgatatggtactgggtatgaaaacgcaagccattgcaactcacaggcaagcaatcatctggggc

SEQ ID NO: 23198 - DNA, 260 bp, Unknown
  Description of Unknown: LeftRegion for integrase B10199 sequence
tttgaatagatatgtgaatggcatcaaagttatggaaacgatgtttattaggaacatcatcgatgaagaagatttcataaaagcggagacgcatttagccaaaaaacattgtatcaaacctaatagcatttttaagcttaatgacttgataattgaagccaaaagagtgatatatagtaatacaaaaaaggagtgatacagtgagaacaagaatcaataaaatcgatgctgatgaacagatacttaagttgcaaagagtc

SEQ ID NO: 23199 - DNA, 260 bp, Unknown
  Description of Unknown: LeftRegion for integrase B10200 sequence
gcgcgcggaagctgatcgcgcgggcgtccgcactggcctggaatgccgcgattgccgtgttcgtgtcgataccaatttgcgttgccagttcggtgatttcgtcaattgagagcgtcattgcagtaccctttctctgtgtcctatcccgatgtattgaataatacactactaatcaaataatgtcaagaggggatttgacgatggcccacgcacgcatctacatccgccgctcggacgacgatcaatcgacctatagcccc

SEQ ID NO: 23200 - DNA, 260 bp, Unknown
  Description of Unknown: LeftRegion for integrase B10201 sequence
agaggttgattactggcgggcatataaaattctgcagaagatgcttaaggcgggactgatttcagaggaagaattcgacaaaatcgacaagttgaaccgcaaaactttctcgccgatgtatgcacagcttatggcctaattagcttgctattagcggcacacagaggtaacatgtcacatgcccaaaggaggtgaaaacagtgagaaaggtaacaaggattgatggaaacaatgctctccaagctttcaaaccaaaggta

SEQ ID NO: 23201 - DNA, 260 bp, Unknown
  Description of Unknown: LeftRegion for integrase B10202 sequence
tgaagcatagttgtttttgacctgaaaactttgccggatttgaagctaaaacaagctaagctaaaaattttctattgccttttcgtgaacgaaaaagagtaataaaaataaacaaaataattttttataatcaacactactatgcaattattttatgcacataccgacataaaaattaatcctgataaataactttaattatgatcgcagtaggttacgcaaggttaagcgataaagatagtagcagcaacagcattaaa

SEQ ID NO: 23202 - DNA, 260 bp, Unknown
  Description of Unknown: LeftRegion for integrase B10203 sequence
tagatctgctggcgcgactgcgatccgtagatcggagagtcggtctgagacggcctcattggtgatgtggcgcaactcacaccgagggagacgggtcatcatgggtagccatgtacgaaatgcccagtgatggtggagatggatatcccatgttggtccagacgaacacaggattttagaacctttctcagattacgatcatggacgtgaacagcacatcccccacagcagtaaccaagatcgatgtaatgctggtagtt

SEQ ID NO: 23203 - DNA, 260 bp, Unknown
  Description of Unknown: LeftRegion for integrase B10204 sequence
ccaatacgtggcaatcttagcaaaacagatcataaaagatgacaatggctggagacaaagatttcccgatggagttaatctaaatttattgacttattcagtcaatggggattatccataccaatcgttaactgactttgaaacgcttttggatgttgacaataagaaaatatcatatcaggagtgggtagaagcctcaaatgcaggtttcaaataaccacccattctcccttaactcgccggtcgttgcctacctgcgc

SEQ ID NO: 23204 - DNA, 260 bp, Unknown
  Description of Unknown: LeftRegion for integrase B10205 sequence
agaatttgattattatagagcagaaaaattgcttagaaagatgctcgaaaaaggcttaataacggaagtggaattcaacaaaatagacgcactaaatcgccaaactttctctccatttttgaaggagataatgccctcaaatcgttgatatataagggtttcagaggtaatatgtgacctaccaagaaggaggtgagaggatgaaaaagataacgaaaatagaaggaaatacggccaactcttttattaagccaaaaaca

SEQ ID NO: 23205 - DNA, 260 bp, Unknown
  Description of Unknown: LeftRegion for integrase B10206 sequence
cgaaggcatcaacctcgccaccgccacgcgcgcggagatggcgctggccttcgagcgcatccgcggcgccctcgccgacgtcatccgcatggaactggaacatcatccggagccctgagggcctccgagcagcagtgattacagacgcctactggtacccctaagcgaccatagggagccacaaagtaaccaaagcactcatgtggggacgccacagtcgctaccgtctccccatgagcaccctggctgacaccaccccc

SEQ ID NO: 23206 - DNA, 260 bp, Unknown
  Description of Unknown: LeftRegion for integrase B10207 sequence
attataacttctttcaggcgcagaaagtggctcaaaacatgctggagcttggacttatttccttgtcagagttcaacaaattatcgctgaaaaatcgtgagacattctctccattttgggtggagattatgccagaaatccgttgatatataaggctttcagagctaatatgtgacactaacgaagggaggtgaactaccgtgaagaaggtaacaaaaatcgaaagtgtgcagaatgcgaaaactgtaaaacagaaactg

SEQ ID NO: 23207 - DNA, 260 bp, Unknown
  Description of Unknown: LeftRegion for integrase B10208 sequence
agactggaacgctacctggcatctatgctccaggcaaaaaggatgctgtcgatggggattttaaccccagaggattacgccataattgatacaatgcagggcgagaaatttggaatatcttcgtgtagtttatatcgcgggattgacttgatatatagtggtttcagaggtaatatgtcacactacgaggaggtgacaaaatgccaagagcaataactattgtaccaaaaccaccgaaactggagcagaaaaagcgagtt

SEQ ID NO: 23208 - DNA, 260 bp, Unknown
  Description of Unknown: LeftRegion for integrase B10209 sequence
ggaacattataatttctatctggaaatacactataatgtaatgattgagagtctttttgatataattgatttctttgtataattttatatttattcatagttataaatatatatgtgtttcatttttttatataaaaaaaattgattatttttttattatgatatttgtttttataaaatgaatataataattatttacaatgagtaaaagaaatattgaaaaacttactgaatcatttgaaaagaatactattaaaaaa

SEQ ID NO: 23209 - DNA, 260 bp, Unknown
  Description of Unknown: LeftRegion for integrase B10210 sequence
tccctcctagttccatatgaagtgccttagcgatgcagtctgcgtactgttgttgagtcagaaaagagttgcccgtttttgtgaacatttttccctccccggtcttctaccttgtttagagccactttctaaaaaacgagatgctgatcgcggtctccgcgttgtttccagcggctgttgatcagaatgaggacatgtcgatgcaaactctcattggcgcgtataacactagcaatgcctcaaccgcagccatggcggcg

SEQ ID NO: 23210 - DNA, 260 bp, Unknown
  Description of Unknown: LeftRegion for integrase B10211 sequence
tgatacaggccgatagactcctaaaatataggattattagtgaggaagttcatcagcaatttaaggaaaagatgcttgaaaaatatcaaccatttattagtagattatcgacctaaagacttgataaatgaggcctttagagtgatatatagtagcgaaaggagtgtatcaaattgagaacagttagacgaattcaaccaatgatgacaccgcaaaaacctaagttgcgtgtagcagcatatgcaagggtctctgatagt

SEQ ID NO: 23211 - DNA, 260 bp, Unknown
  Description of Unknown: LeftRegion for integrase B10212 sequence
cacaatgggaccgggcagcgttcgatgcggctcttcacagagaggaggagggatgaagggcggaggcgatcaagtccagatggatgacgagatcgtcaactgttactgttgtttgcctgccgggcttgcttgggcgcaaccgatgtatgcagcattcatcgaccttcttcgggcgcgatgcagattcctaggcacttgccatgatgcggtcaggagcgatgatacgtaaggtcttccgctacatgcgagtctcgaccgac

SEQ ID NO: 23212 - DNA, 260 bp, Unknown
  Description of Unknown: LeftRegion for integrase B10213 sequence
aatgcgtacaacaggcaccctgttttgggttcaaccgttcaaccgttaaagataataattttcttttctaaaaataattatattattaagcctttaagcggttgaaaaaacggttgaaaacggttgaagccgcttcaaccgctctcaaccgctcacgacgaaaagcgccagcgccggcgcttttgagaggaagtgatgcgatgccgaccgcctacagttacgcccggttctcatctgaccggcagcacgagagcagcatc

SEQ ID NO: 23213 - DNA, 260 bp, Unknown
  Description of Unknown: LeftRegion for integrase B10214 sequence
gctcggaacgctcgagacgccggagcagctcctcgagttctggaccggcgaccgtatgcggtacctccgtcagatgcacctcgagggccgctatcgggagatcccggagtgccgtcaatgcgtcgacggaggatgcaggactaacgagtagcgcgcgcccggagtttacggtcagccgtaacaccggatagactcgcgtcatggcagccgtaatttacgcccgattctcgaccgagcatcagtcggagtcgacgatcgtc

SEQ ID NO: 23214 - DNA, 260 bp, Unknown
  Description of Unknown: LeftRegion for integrase B10215 sequence
ttgatgaggagacattcgaaaaagctaaaatagaaaaacaaaaacgagcagaaaagcttggaaggatatgggaacctaaagatgaaccagagacggattatcctgtaaaattcaaagcaaaacctctggtgcaaaaatatgacgatccatataagcaggcagaatatgcttacagtttgatagaaagtgaggtgtaaccagtggcagttagcaggaatgtaacagtaattccagcaattaaacgaatcggaaataataaa

SEQ ID NO: 23215 - DNA, 260 bp, Unknown
  Description of Unknown: LeftRegion for integrase B10216 sequence
cataaaggatgtaattctgcaagtcttcgtgatgatttgctgcgtactatggcagcacaggttctcagcattgatgcatttaatgaagaggagtttgaacggagaattgaccatatcgatgtggaagaagacagactgaagttctattttcgagatggtcattctgtaacggagcattggccaataccaaggaggaaaaaatgccaaaaataacgaaaatacctgcatcaatcagccgatacacatcagcaccgattgat

SEQ ID NO: 23216 - DNA, 260 bp, Unknown
  Description of Unknown: LeftRegion for integrase B10217 sequence
cataaaggatgtaattccgtaagtcttcgtgatgatttactgcgtactatggcagcacaggttctcagcatcgatgcatttaatgaagaggagtttgaacagagaattgaccatatcgatgtggaagaagacagactggagttctattttcgagatggtcattctgtaacggatcattggccaataccaaggaggaaaaaatgccaaaaataacgaaaatacctgcatcaatcagccgatacacatcagcaccgattgat

SEQ ID NO: 23217 - DNA, 260 bp, Unknown
  Description of Unknown: LeftRegion for integrase B10218 sequence
gatgatacagacgccgccatcgacgcggcgatgcggcgggagcagacgtgacgcccgccctccgcgaactcgtcgaactgctcgcgcgcgcggcatacgaagagatgaccgcgactcgccgaccggagacggaaccgccggtcgaggtcgagtcgcgcccggagtttacggcagtccgtacaacggactagactcgcgtcgtgcgctccgtaatctacgcccgattctcgaccgagcatcagtcggagtcgacgatcctc

SEQ ID NO: 23218 - DNA, 260 bp, Unknown; identical to SEQ ID NO: 23181
  Description of Unknown: LeftRegion for integrase B10219 sequence

SEQ ID NO: 23219 - DNA, 260 bp, Unknown
  Description of Unknown: LeftRegion for integrase B10220 sequence
ggaatttctgattttgatgaagatatttttcggtcggaaattcaacaaatcaatgttcctgcaccgaatcagctggagttcattttccacaatgacacaacgaaaactgtggaatggcaggatcgctcacgctcggaaagctggacggatgagatgcggaaacaggcaggtcggatttcaaaagaaaggagatggcacagatgcccgtagtaaccaaaattccagcaaggctgcaccctgcgacctttgtacctcttgaa

SEQ ID NO: 23220 - DNA, 260 bp, Unknown
  Description of Unknown: LeftRegion for integrase B10221 sequence
catccttaagaagctactgggcatcaagggcaagggaaaataaaataaaaagcccctgccatatcgtgaaatatgacaggggaatgcagccaggcattaccagtaccgggttgcggttataatccactcttgtcggaggcagattatgtatatattatatcataaagcctccaaacaccctagaaggaggctctatttttatgcctaaaacagaagaaaagcaagccgtaaaggccgtaatatatgccagatactcgtcg

SEQ ID NO: 23221 - DNA, 260 bp, Unknown; identical to SEQ ID NO: 22549
  Description of Unknown: LeftRegion for integrase B10222 sequence

SEQ ID NO: 23222 - DNA, 260 bp, Unknown
  Description of Unknown: LeftRegion for integrase B10223 sequence
gattacgactactttatggctcaagaaactgcaaatgcactgctatctgctggacttatttccttggtggaattcaacaaattaacccagataaaccgcgacacattctctccgatgctccgcgatattatgcctaaaatcacttgataaatgcagcatttagagtgatgtatatacactgacgaaggaggtgaattaccgtgaagaaggttactaaaattgataaaatacagccttccaaagcagctaagagaaaactc

SEQ ID NO: 23223 - DNA, 260 bp, Unknown
  Description of Unknown: LeftRegion for integrase B10224 sequence
gcgcagatcggactggctctgaaacgcgctcgacgcaagaagcatctgactcagcaggacatctcagacaggacaggaatctctcgctcagtaatcggaagatatgagacagggatgattgagatcagcatctccaatttcattagcatctgtgaggcgattggatgcgatcctagcgtcattctcgaagggaggagcgaatgaccaccgctgtcatttacgctcgttattcgtcctcaaatcagcgcgaggagagcatt

SEQ ID NO: 23224 - DNA, 260 bp, Unknown
  Description of Unknown: LeftRegion for integrase B10225 sequence
gggtttttccgtgtcagcgcgagggcaaaaaagcgcgactgtttcgagttcagcaaggggacccttgtatcaggcatcacagacccctctgaagtcaaaaccattgatttttccctgaccctttccccgcccaaaggcaaggatatatttgttcagaaagattatacccattatgatctgccctgatcatggaggccgatatgccaaaaacaaaaaaagcgacgtgcagcccgaaaactgccgtcgcttatgcccgttat

SEQ ID NO: 23225 - DNA, 260 bp, Unknown
  Description of Unknown: LeftRegion for integrase B10226 sequence
gcgcagatcggactggctctgaaacgcgctcgacgtaagaagcatctgactcagcaggacatctcagacaggacaggaatctctcgctcagttatcggacgatacgaaacaggaatgattgagatcagcatctccaatttcattagcatctgtgaggcgattggatgcgatcctagcgtcattctcgaagggaggagcgaatgaccaccgctgtcatttacgctcgttattcgtcctcaaatcagcgcgaggagagcatt

SEQ ID NO: 23226 - DNA, 260 bp, Unknown
  Description of Unknown: LeftRegion for integrase B10227 sequence
actacaactattttatggcgcagagggtagctaaggatatgcttgaaaaaggacttatctcgttggaagaattcaacaaattaacaaagaaaaatcgtgatacattctctccgtttttagccgagattatgccaaaaacaacttgacaattgtgacatttagagtgatgtatatacaagtgaaatgggaggtgagttatcatgaaaaaggttacgaaaattgacaaaattcaacctgcaaaaaatgccgaggataaactg

SEQ ID NO: 23227 - DNA, 260 bp, Unknown; identical to SEQ ID NO: 23183
  Description of Unknown: LeftRegion for integrase B10228 sequence
  modified_base (117)..(129): a, c, t, g, unknown or other

SEQ ID NO: 23228 - DNA, 260 bp, Unknown; identical to SEQ ID NO: 23187
  Description of Unknown: LeftRegion for integrase B10229 sequence

SEQ ID NO: 23229 - DNA, 260 bp, Unknown
  Description of Unknown: LeftRegion for integrase B10230 sequence
tgatgagatcaactatttcagggccgagaagctgacaaagaagatgctggaacagggcctcatcaccgctgaagaatgtgacaaaatcctggccgaagcccgcaaaatctttgtgcctattatggcggaacttatgtgagatgcaacttgatatgtgcccgacagtattggaacatcggactacgaacggaggcgagaccatgaaaaagataacaaaaattgaacctacagtagtccagacagctgcttctaagatcaga

SEQ ID NO: 23230 - DNA, 260 bp, Unknown; identical to SEQ ID NO: 23229
  Description of Unknown: LeftRegion for integrase B10231 sequence

SEQ ID NO: 23231 - DNA, 260 bp, Unknown
  Description of Unknown: LeftRegion for integrase B10232 sequence
gcgaagtggactactaccgagctcaacagatcttaggcatcttgctacaaaacggactcatttctaagtctgaatacaatagaatcacccagctgaatcgcgaatccttctctccccttttagccaaaatcatgccaagtttgacttgatataagtaggcattagaggtaatatgacacactaacaaagggggtgaaagattgaaaaagataacaaaaattgagagaaatacttcagttgcttcagaacagcccaaactt

SEQ ID NO: 23232 - DNA, 260 bp, Unknown
  Description of Unknown: LeftRegion for integrase B10233 sequence
caatcgcttacgttagttgtatttttagttgactaattgagcattttagttgactaattgagcaaaaatataagaaaagacaaaaaccgcccggcctgcggcaacaggtcgagcggtcgttttctccacagaaggagcttcgcaaattgtattattaattatagcctccttctgtgcgcattgcaacggaggctttttctatgtccgaaaatgctgtggtttacgcacgctactcttcccgtggccagaatgaacagtcc

SEQ ID NO: 23233 - DNA, 260 bp, Unknown
  Description of Unknown: LeftRegion for integrase B10234 sequence
ccgcttgtcctgattatctgcgtcattctctatttcgttttgtagcatacaaaaaaggcgcgccgcgccccgacgtgccttttctgcgtagaacattctattccaatgggaatttagaggaaaccgttactcatggaagttttagtatcggttcactttctattgtacccataaacgacattctgtaaagggggaggaatatgattgcagccctttatgcgcgctattcgtccgacaatcagcgcgcggaatccatcgtg

SEQ ID NO: 23234 - DNA, 260 bp, Unknown
  Description of Unknown: LeftRegion for integrase B10235 sequence
ggtcaaacccagtaaacatatggtattgttgtaagttgttataatatattatgtgatttattatatagatggattgttgacaatagtcaactcgtagtaagtcgtatgatttttgatgtaaacaactttgaatttgcaatttacatcgttttttcgacagtttgcaacaataggaggactaggaattgagtgtagcaggcgtgtattgccgtcaatcaattgagaaacgtgacagcctttcaattgacgcacaggcagaa

SEQ ID NO: 23235 - DNA, 260 bp, Unknown
  Description of Unknown: LeftRegion for integrase B10236 sequence
gaaaaaatcggcgccgaacttaaacgacgccgaaaagaaaagaaactcacccaggaaaaattggcggaaataaccggcattgggcggactgcgattgcgaaatatgaactcgggacaatagagctcgggttgtctcacttttcgatactctgcgacgctctcgaatgtactcccgccgagttctttcaggagctcaactcatgaccaacgccgttatatatgcccggtactcgtccagcggtcagcgtgaggagtcgata

SEQ ID NO: 23236 - DNA, 260 bp, Unknown
  Description of Unknown: LeftRegion for integrase B10237 sequence
cgaggagctggagcgcgaagcggcgcaacggattgccagccagcggggccagccatgaaggcgctgtggttcgttggcatgatcgtagccctatcggtggcgatcgcggccgggcagcacggcggcgttgtcggctggctgatctgcgccctggcggtcttcgccttcatggtcgccggcggatacatgatgggcagcaagtgaccgacctaccctgggcgatctacacccgcgtcagcaccgacgaccaggcgaagaag

SEQ ID NO: 23237 - DNA, 260 bp, Unknown
  Description of Unknown: LeftRegion for integrase B10238 sequence
tcacgcataaagcgtacaataggcaccctgttttgggctcaaccgttcaaccgttaaagataataattttcttttctaaaaataattatattattaagcctttaagcggttgaaaaagcggttgaaaacggttgaaaccgcttcaaccgttatcaaccgcaaaaccgccagcgctggcgcttttgagaggaagtgatgcgatgccgaccgcctacagttacgcccggttctcatctgaccggcagcacgagtccagtatc

SEQ ID NO: 23238 - DNA, 260 bp, Unknown
  Description of Unknown: LeftRegion for integrase B10239 sequence
tgcaggacaagagatggcaagggtgttgaggcttgtctaggacgtaccgttacagaagaacaactctttcaagcctttggtgagagcataaatatagaagacattcaccatatttcttttaatagcgtgaccaatgaagctaaagtaacctatagaaatggagaagaaaaacacgtcatcattcagaaaggacggtagacatgaaaaaagttatcacgatagaaccagccaaacaagtcacccataaggttgaccttccc

SEQ ID NO: 23239 - DNA, 260 bp, Unknown
  Description of Unknown: LeftRegion for integrase B10240 sequence
aagacaccgatctggagacggcagagacctagcacgaagatcaagcgtaaggttgcgaagttcacagggatcccgacaaccaagagcggacgcaaggcgaagatccgcagagcgtgtatgcctggatgcgtcgtgtcgatcgcagcggtcggagctgcggcctatctgattgcacagatgttttgaaggagtgatgcagtatgttcttgctgccagagctgaaaccggaagagattctgatatacctccgcaagagccgg

SEQ ID NO: 23240 - DNA, 260 bp, Unknown
  Description of Unknown: LeftRegion for integrase B10241 sequence
agatcagtgatcttgacatcaagtgcagctgctatcgcttcaagctggcgcagtgttggcgatgtgatgccgttttcaatcgtgttcagtgttgacttgctgattcctgtcagggcttccagctgcttcaaagtcaagtgtctgtctgttcgtgcctgccacgttaggatttccattgcgtcatcctcctagttttgattatgtacacgcttcaggcactctatacaaataaaaaaggaagccgtgaccagcgacttccc

SEQ ID NO: 23241 - DNA, 260 bp, Unknown
  Description of Unknown: LeftRegion for integrase B10242 sequence
gtgactataaatattgtatagcacaaaaaatgacaaaagcactgcttgataaaggtctgatttctgtggatgaattcaacaaaataagcgaaagaaaccgccaaactttctctccatatttagctgagattatgccctaaatgacttgatatatatcgattagtacgggaatatgtccataccgaaagtgaggtgagttgatgaaaaggataacaaaaattgaagaaaatagagccttatcagttaagaagaaaacccgt

SEQ ID NO: 23242 - DNA, 260 bp, Unknown
  Description of Unknown: LeftRegion for integrase B10243 sequence
tctgtatctgacggctggattgtcaataatcaagacaatgtaattgatacaagcatttcaataagtggagattctgaatcttcaatttgccttgttaaatttttaacaccaaacgaagattattacacccctacatctagtcaatccaacattgttgttgaatctattactggtcaagtgatagttaaataggagtaagtatgaaaaaagctgttatatacgcacgatatagttctagcagccaaacagagcagtctatt

SEQ ID NO: 23243 - DNA, 260 bp, Unknown
  Description of Unknown: LeftRegion for integrase B10244 sequence
atatacaaaattatacaaaggtgctaaacacgaaggatatgctgtatttcaagtaagtgttaaagactcgaatccattaataacatttggtagggattataaaggtaatggtggatgttggattaaaacattttaatatacctactgcctagtatttactttttttatactaggcagtttttagttaaaaggagagttatatggaaaaagtagtaatatatttgaggaaatctcgtgcagatgcagaagctgaattaatg

SEQ ID NO: 23244 - DNA, 260 bp, Unknown
  Description of Unknown: LeftRegion for integrase B10245 sequence
gttagcttttaacaaagctgcggaacttttccctaaaagaatcgaaagttataacgatttggccagaatatatgctcttctgaacaacaaggccgaatgtgttaagaatataaagaaaatggcagctatagacgttaattcaaaaggatttataataaacgacaacaccctaacatctttgctgacaatgattgagatagatgatttatatagttaaaggagattatatgaaagcggcaatatatgcaagatactcaagc

SEQ ID NO: 23245 - DNA, 260 bp, Unknown
  Description of Unknown: LeftRegion for integrase B10246 sequence
gtctgatgtgtcctcaatgagaacatggactttcaaagggaatgtttatttcgctgtcgaaacaaaaacgaacaatgaatataaattttcattcggaactgtcgatttttggttgaaagctgtcgagaattacgcaaaagaatttgacattccgtttgaatattgcggggaatcagaggaaagttcggaagacgacgacaatgacgaataaagcaataatttatgcaagagtatcttcaaaagaacaggaaacaggcggg

SEQ ID NO: 23246 - DNA, 260 bp, Unknown
  Description of Unknown: LeftRegion for integrase B10247 sequence
gataaggctgaagaaataaggatggaaaggattcgataccttaatcgatgcaaggaacttaagccgaaagataaaccttccatcccttgcaatttcaaaatggcaaagcctatggagaagagatgtgatccatacaaacaggcagagtacttgtacagccttctggaaagtgaggtgtagaagtgggaaaaacaataactatgattcctgcaaaaagacgtgtaggaaatacagtaaaggaagaagatcggccaaaactt

SEQ ID NO: 23247 - DNA, 260 bp, Unknown; identical to SEQ ID NO: 15538
  Description of Unknown: LeftRegion for integrase B10248 sequence

SEQ ID NO: 23248 - DNA, 260 bp, Unknown; identical to SEQ ID NO: 16973
  Description of Unknown: LeftRegion for integrase B10249 sequence

SEQ ID NO: 23249 - DNA, 260 bp, Unknown
  Description of Unknown: LeftRegion for integrase B10250 sequence
gtaaaagaaaagcatgatcatctaaaatcttttgaaaagggacgcaatttctggcgcggctgtgccgtttttttgggcggtgtggcaatttgtatggctatttggcttgtgtgggagttctctaatctggatcttggccttaccggctatctgctcaggcagtctggcattatttccaaaatcggcgggggtgtgtgaaaatggcattttgcgcatatgtgcgccgttcgcgtttggattatgaggccgaacgtatcagc

SEQ ID NO: 23250 - DNA, 260 bp, Unknown
  Description of Unknown: LeftRegion for integrase B10251 sequence
tgttctgtttatccgattcaccttacccaaaagtagagatttccctaacaagaaaagagaaaatccttattgacgcataccgtgctgctgatgacatgggacagttgaacataatctatgtctgcctggatgaaatgaaaaaagcaaaaggggacagcgaaagtgccgtgtgattgattttgtagagtggaggaagaaccatgtatgaggatataaaaacagcctgcctatatgttagattctcaagccataaccagact

SEQ ID NO: 23251 - DNA, 260 bp, Unknown
  Description of Unknown: LeftRegion for integrase B10252 sequence
atatcgaaagcctaacaagacgatatattggcgatgccctaactgcttaggaacagctatcgatgaatcgaaaattgtcaaggcatataaaatggtatcttctgagccgtttgaggaaacaatagattatatattgaaaggggaatttcttgagttttatttttacgacaataacgtaacgatagtggaggtttaacgctatgccaacagtaatagcaatacccgctactagacgggaagtaagaaaaacaaattcagtg

SEQ ID NO: 23252 - DNA, 260 bp, Unknown
  Description of Unknown: LeftRegion for integrase B10253 sequence
aatgacatggttgcagtccttaagcggttgaaaagtgcgactatgatggaagcaggtaacttccttggaggaacttcaatgaaggatgcagctcttctaaacgcgacatttcagcgcatgattgttcagcaaaacatcgttatcattaggcagcttgatcgtcttaccacgttactatcaaaaaaggatcaatcgcagcaatgatcccggctgtgatatacgctcgttattcgagtacaaaccagcgtgaggaatccatt

SEQ ID NO: 23253 - DNA, 260 bp, Unknown
  Description of Unknown: LeftRegion for integrase B10254 sequence
gaacacatcagaaacggtgactttgataacatcgtggacaagaacgtaggcttcattgagaacagagcgcacaaaaaaagaccctgagaaacatgataaaaactcagagtctttccgctcaagtcgcatggggatgcaactcaagcacacacacaagagtattgtagcatcccctctttctcttttcaaggggaatctatatgtacaaatatctgatgtatctcagaaaatctagggctgaccgggacttctccgatgaa

SEQ ID NO: 23254 - DNA, 260 bp, Unknown
  Description of Unknown: LeftRegion for integrase B10255 sequence
gctgtattgcttattgcgatatactactatgaaaacatagctatagctgcgacagcgtttgctgcagcaatattttttacttacatctctatagcttgcggggtttatgttatgcttataattccggctggctgtttaatttatggaattattgcaattaaagacaatcctccaaagcgtaaaaggaggactgataaaaaatgaagaaggctgtaatttacgctcgatttagttctcatagccaaacagaacaatcaatc

SEQ ID NO: 23255 - DNA, 260 bp, Unknown; identical to SEQ ID NO: 13029
  Description of Unknown: LeftRegion for integrase B10256 sequence

SEQ ID NO: 23256 - DNA, 260 bp, Unknown
  Description of Unknown: LeftRegion for integrase B10257 sequence
tcgatgctccgcttccttttgaataatggaaaacccgccgtactgttagcgcagtaaggcgggctggtcatgccgtgtatgatatgagcgatatgtaaccgcaagccgccgcaggcttccggtcggagcatatcaacacttccgagcgaacttattatacaccgaatggccgcaattcacaagcaggaggtgtattttttatgcgtttctttacctatggcaggaagtccgtttacaaggataattccgattctatcgac

SEQ ID NO: 23257 - DNA, 260 bp, Unknown
  Description of Unknown: LeftRegion for integrase B10258 sequence
gacagtaattccatcaaaacccggacattttcgcgtaaacctggaggcagtacgacaacgaattgaaactgaatatggaattgatgtccaagaggttgagcaacttgtcatccaggtgtccgatattgaagaaatattgcaaatgaatccatatcgctaatatcttccgaaacaagttataatcatggggaggtgatcacatgaaccgccctacccatttggacgtatttgtttaccttcgcaagagccggaaggacgtt

SEQ ID NO: 23258 - DNA, 260 bp, Unknown; identical to SEQ ID NO: 23251
  Description of Unknown: LeftRegion for integrase B10259 sequence

SEQ ID NO: 23259 - DNA, 260 bp, Unknown; identical to SEQ ID NO: 23195
  Description of Unknown: LeftRegion for integrase B10260 sequence

SEQ ID NO: 23260 - DNA, 260 bp, Unknown; identical to SEQ ID NO: 23196
  Description of Unknown: LeftRegion for integrase B10261 sequence

SEQ ID NO: 23261 - DNA, 260 bp, Unknown
  Description of Unknown: LeftRegion for integrase B10262 sequence
tagagtggtggttctgggtctactatagccctatgccctcagtcttgacgagcttccgccacactcagtacgcgccttacgcctccgcgcgcgcgttcgggctggtgaggggccatagatcttccccgatatgtgcgacagcgagcgggccaggccccaccgggcgcagggcggggtcatcgggcgggcccaggggtagcgtgaccgccctgcacgaggctcgtctgggtgcagccggcatgtccggggtgaggatgccc

SEQ ID NO: 23262 - DNA, 260 bp, Unknown
  Description of Unknown: LeftRegion for integrase B10263 sequence
gcgaagttgattatgtgagagcacagcaaatactcacttctatgcttgagaaagatttaattaccttgtcggaattcaacaagataaccgaattaaatcgcaaaactttctcgccgctattagccgagattatgccttgaaatcgttgatataacttcgttttagaggtaatatgtcacactgactaaggaggtgagaatttgaaaaaggtaacgaaaatcgatgaaaataaggctgatatcacggagcgttcaaagcta

SEQ ID NO: 23263 - DNA, 260 bp, Unknown
  Description of Unknown: LeftRegion for integrase B10264 sequence
catttcctcaccgccttatgtatatattatatattataatacgtgttttgtcaatacgtattatagcattattttaaaaaaatccccgccggtattggcgtaccgacgggggggaaaaaatcctccgaatattgctattcgaacctgagcagttctattatagcagtattcgctccggaaatcaagagaggagtgatattatgtcatactgtatatatctcagaaaatcccgtgcagattcagaagcagaaatgcgtgga

SEQ ID NO: 23264 - DNA, 260 bp, Unknown
  Description of Unknown: LeftRegion for integrase B10265 sequence
tgacaaagacactttcaacactgccgaggcggaacgaattatgcgggcggaaagactcggccgtaccaaaaagtttagacaagaaaaagaggtcgtttatcctaccaccttccgcatgaaagaaggaacagaggaattcgacgacccattcgggcaggcggaatacgcctacagtttaattgaaatggaggtgaacaagaatggcagtcagtaaaaatgtcaccgtgattccggcaaggaagcatactcgcaagagcaag

SEQ ID NO: 23265 - DNA, 260 bp, Unknown
  Description of Unknown: LeftRegion for integrase B10266 sequence
aacgataaaattataacactagctaaatgcagtatatgtgggaaaatgtttaaagtgcctctaactcctgatacagcaagagcattagaaaattcaaaagagcttggttttatctgtccaaactgtgctgtaaaagagatatataagaacaaaagagtctttaaacctgtaaaataaaccttaaagcgaggtgttatacaatgaaagcagcctcttacgcacgtttttcaacagacatgcaaagagaagaatcaatagaa

SEQ ID NO: 23266 - DNA, 260 bp, Unknown; identical to SEQ ID NO: 23194
  Description of Unknown: LeftRegion for integrase B10267 sequence

SEQ ID NO: 23267 - DNA, 260 bp, Unknown
  Description of Unknown: LeftRegion for integrase B10268 sequence
gaaaagataatcatggaacatggcgggaaatgtacacagaaatcatccgccgcgacagactatctggtcatgggctcgttcccgaatcttccgcagacttatgtttccagcgctgttatttcagccaggaagatttcccaggaaggcggaaagattcagatcatctctcctgatgacgtcctgaaaatgctggaggaatcatgaagaagaagcaatcaccctcctgccgtccgaagaccgctgtggcctatgcccggtat

SEQ ID NO: 23268 - DNA, 260 bp, Unknown
  Description of Unknown: LeftRegion for integrase B10269 sequence
ttaatttttttaaatttttaaacaaatattcttaccttctaaatcaatttattcattttaaattcattatatacttactatattcaccttattcataaataacacatatttttaataaattttttagttctaaaaggataatctatacttaatatagaatactaatctatatattactatatgaaataggagtagattatatgactaaagacttaattcctgcggttgcctattgtcgggtatcaactctatcagacgac

SEQ ID NO: 23269 - DNA, 260 bp, Unknown
  Description of Unknown: LeftRegion for integrase B10270 sequence
ttcggggacccagctttgttccttcccaagtcaaccacgaagaacccgcccgatgggcacttcaattatcgcacagaagggttgatgaaaatagtcgaaattaatggaagacggtgaacgaaaagcgccccggcgggtgctgcaacacccccagggcatggtccagccacctatcgggtcaggaaggacggttagattatatggccgacgcggtcatctatgcacgctattcgagcgagcggcagcgcgacgagtccatc

SEQ ID NO: 23270 - DNA, 260 bp, Unknown
  Description of Unknown: LeftRegion for integrase B10271 sequence
atcacaaaaaaaagaaaagaaaaccggcttgaaattggatatgacgacggtgtctggattggagacaaagaccagctatccatccgtgtcggcaaggatgtattccaagccaacatagatgatgccggattcctgtatgtttcaaaggatgacataaccgttcgcttctttcggatagaagaaccggatggtgataacgcatgaagaagaagcaatcaccatcctgccgtccgaagaccgctgtggcctatgcccggtat

SEQ ID NO: 23271 - DNA, 260 bp, Unknown
  Description of Unknown: LeftRegion for integrase B10272 sequence
acgaaaaaatggaacaggagagggagcagtggtccaggagcatcgacttcctgaaaaaccaggtctctcttaaggacaagagaatagatgtccttttggaagcggttcaagctaaggactctaagttcgatcaagttttggatcttgtactctcctgcccttgtcgaaaggctcacgaagagagctgagaggaggtcgttatgagattttacacttacggtcgaaagtccgtgtataaagacaactcagattccatagat

SEQ ID NO: 23272 - DNA, 260 bp, Unknown
  Description of Unknown: LeftRegion for integrase B10273 sequence
gataagaacgagcagacctatgcgtatacaggagattactgcgtcttgtttttgagatcaagtgtagaataacagaaaaatccgcccacggctggaaccgtcggcggatcaaacgcaaggaaaatgcaaacaccactaagcactttccgcagacagtatatcatatactgcctgtgttgtaaagccggaaaggattaagaatgaacgcagtgatctacgcccgtttctcgtcgcacagtcagagagagcagtccattgaa

SEQ ID NO: 23273 - DNA, 260 bp, Unknown
  Description of Unknown: LeftRegion for integrase B10274 sequence
caacatcctcatcgccgcgacgtgtgtgctcctgcttaccacggcggcactgacatcgattttcgtctgggaaatcaagaatatcaaaaacggatcgttttgcacggcatgggttcagcatgtagacccgtcgtgaagacatataaaacccctgtccggcgtttccggacaggggcaatacaaatccggaggtgtttactgtggcagcaaagccgtctgatcgatatgcgatatacctgcgcaaatcccgcgcagatgta

SEQ ID NO: 23274 - DNA, 260 bp, Unknown
  Description of Unknown: LeftRegion for integrase B10275 sequence
attctcacactttggaagacaatacccccatctacaaagatcctgaatctaaagtggagataccgaacataaaagttgtgtccgtggtggatgaaatccgtggtttgaagcagctgctggatgagggaatcctgacagaagaagaatttgctgccaagaaaaagcagcttttggaaatttgaaatgggtggtgatggtcgatggcccgaaaaaagaatatcgctgcgggtcaggatgccgtcatctatgcccgctactcc

SEQ ID NO: 23275 - DNA, 260 bp, Unknown
  Description of Unknown: LeftRegion for integrase B10276 sequence
tatattccaacaatggaagcgatgcaggaataaatgaagtatttggaaagaaagctacaatggaatctaaaaacatagtactttcttctaaaacaacaacactaacaataaaaggggacgtaaaagttaaattaattgagcaaaaataactaagggctctacattgtagggctcttaataattaataagggggataaaaaatgcaagtagcaatatacacacgtaaatctatctacacagacaattccgagagcatacac

SEQ ID NO: 23276 - DNA, 260 bp, Unknown
  Description of Unknown: LeftRegion for integrase B10277 sequence
gcctcaccggcatgtggctgcgctagagcggcaaatccgcagtcgcctgcggaaataaaaaaatccacacccgaccgccatcaggtgtggacatgcaaaccgtcacgattgatcatccgtggatctgccctcatattatagcacgtccacggattttttacaacatccgcaacgtgctatttttttgaggagtgatcgatatgagcgccgtccagcccaacaaatatgccatctatctgcgcaagtcccgcgcggatctg

SEQ ID NO: 23277 - DNA, 260 bp, Unknown
  Description of Unknown: LeftRegion for integrase B10278 sequence
atgcatacgacaaagataataaagttatgatggctgaaaattttggtgatgatgaaagaaaaataaaatactttactaatgcacaacttaaaaaagatgttgtgttaagaatttcgggggttaaagttagactaattaataaaaaataactaagggctctacatagtagggctcttaataattaataagggggataaaaaatgcaagtagcaatatacacacgtaaatctatctacacagacaattcggagagtatacac

SEQ ID NO: 23278 - DNA, 260 bp, Unknown
  Description of Unknown: LeftRegion for integrase B10279 sequence
tgttctgtttatccgattcaccttacccaaaagtagagatttccctaacaggaaaagagaaaatccttattgacgcataccgtgctgctgatgacatgggacagttgaacataatctatgtctgcctggatgaaatgaaaaaagcaaaaggggacagcgaaagtgccgtgtgatagattttgtagagtggaggaagaaccatgtatgaggatataaaaacagcctgcctatatgttagattctcaagccataaccagact

SEQ ID NO: 23279 - DNA, 260 bp, Unknown
  Description of Unknown: LeftRegion for integrase B10280 sequence
acgatctcgactaccaacgggcgcagaggactgccagatgcatgcttgatacaggccttatttccgatgacgaattcaacaaattatgcgacatcaaccgcaaaacattctcacccctgtttgcggaaatatatccgaaaactgcttgctatgtgtccgaaaaagagtgattgatagacactaacaaggaggcaggccaattgaagaaaatcacaagaatcgaacaggcaagcaagggaaaaacagagccaaagaagctg

SEQ ID NO: 23280 - DNA, 260 bp, Unknown; identical to SEQ ID NO: 23184
  Description of Unknown: LeftRegion for integrase B10281 sequence

SEQ ID NO: 23281 - DNA, 260 bp, Unknown
  Description of Unknown: LeftRegion for integrase B10282 sequence
aatctttccaatcctgccgatcgggaatccgtgcgcaaaattgtttccgaattactaggcaccggaatgatggaaaccgggatgaaattgcaattggccaaggcggaggttgctttgcctgtttactatcagcgggcaatccttgagcagaatttcatcatgatccgtcaactcgatcggattgcacaattgctggaaaaatgaccccggcagtcatttatgcccgttactcatccagcaaccagcgggaagaatccatc

SEQ ID NO: 23282 - DNA, 260 bp, Unknown
  Description of Unknown: LeftRegion for integrase B10283 sequence
ctaaattactatgcgtaggttatacattttccaataaaaataaattagaaaaacaagctaattactttgcttttaaattaagtgatctgcattttgatgaaattgaattgtatgaaatgtccctggaacaaatatgttgctctttagaaataccctataatgttgttaatcaattagttaatctgtaagaaggtgaatgtatgttaagagctgttgcttactgtagatatagttcagataatcaaagagaagaaagtatt

SEQ ID NO: 23283 - DNA, 260 bp, Unknown; identical to SEQ ID NO: 23226
  Description of Unknown: LeftRegion for integrase B10284 sequence

SEQ ID NO: 23284 - DNA, 260 bp, Unknown; identical to SEQ ID NO: 22683
  Description of Unknown: LeftRegion for integrase B10285 sequence

SEQ ID NO: 23285 - DNA, 260 bp, Unknown
  Description of Unknown: LeftRegion for integrase B10286 sequence
caggaagacgcggaccggccaggcaagtatgaagtgctctataacggcagccgaatcggctatctgcctgcggcggctataaaatatgccgaagaatcaggatatgatccagaagagctgaccgcttatatcgccaatgtcgaatatgatgatgaaaaagagcgcgatatcatcagcgtatacatctccggtaaacgagcatgacccccgccgtcatctacgcccgctattcgtcgcacaaccagacggagcagtccatc

SEQ ID NO: 23286 - DNA, 260 bp, Unknown
  Description of Unknown: LeftRegion for integrase B10287 sequence
aagatatcgactattaccgcgcccaaatcatcacaaaagccctactcgatgcggaactgatcagcttggaagaataccacaaattgagcgaattgaacgcgcaatctttctctccgtttctcgtggatatatttcctaataccgttgataatactgcggttcagaggtaatatacgacactaccaaagggaggtgaaacagtgaaaaaggtcacgaagatcaaggcaaagcagactcctgcagcggaaaaagctaaactg

SEQ ID NO: 23287 - DNA, 260 bp, Unknown; identical to SEQ ID NO: 23222
  Description of Unknown: LeftRegion for integrase B10288 sequence

SEQ ID NO: 23288 - DNA, 260 bp, Unknown; identical to SEQ ID NO: 23193
  Description of Unknown: LeftRegion for integrase B10289 sequence

SEQ ID NO: 23289 - DNA, 260 bp, Unknown
  Description of Unknown: LeftRegion for integrase B10290 sequence
acacgtaaaattctgaccaacggtcttctgatcggcatcatcattgtcatcatcgcctgcgtgccggatggttttgagcgtgtcgcgtcctggttctttccgccccggctctacattgccatcgctgctgtcatcatcgtgatccttttgaagatcctttttgagcttcgcaatcgtaataacgggaatggtgatggtcagtgaaaaagcccgtctccccttcctgctctccccgcacggctgtcgcttatgcccgctat

SEQ ID NO: 23290 - DNA, 260 bp, Unknown
  Description of Unknown: LeftRegion for integrase B10291 sequence
gcagatctcgcggcgctgatcgacgggagcatgtacggtcactacgcactgctccttcgcaggtcgtagacgtgcaaccgcttttcaacagcggtgcaacagatgtgcaactggtcagccgggtgactggggtatggtctgaccgatcatccgtcggcgcggtcgccgaccgaataagcgccatgctcgaaaggcacgccatgccgcccaccgacccctccgagggaagcacaccgctgacgcccgcggctcagtacgtc

SEQ ID NO: 23291 - DNA, 260 bp, Unknown
  Description of Unknown: LeftRegion for integrase B10292 sequence
actgagtgggtggtccagctaggggaggaacgtcctagccgagtgtggaactggaccgacagccggtactcaccccacgacagtgaggcagccggacagcaacacctagcgtggctggctgtccaccacggcaccgacgcgacgcgcttccgtctgttggtccgcgtgacctcggaaacgatcattgctgaggtgaccctgtgacccgccggacagccgtactcaaccccgtggccaccgcgcgcattgcggagcttgtg

SEQ ID NO: 23292 - DNA, 260 bp, Unknown
  Description of Unknown: LeftRegion for integrase B10293 sequence
gaaccgttcggtatcactccctctttgtttgaatcttgggaataccgaggaatagattataatgtatacctctatataaaggaaggcgatgtagagtacatcgacatacacaaactgaccgaagacggggaacttaccccctctcaacaagaactgcgaatcgcccgtagagtcattgaggcggtcgtgaaggagtcacaatgaagaaagccgttatatatgctcggttctcttgtggaaggcaaaccgagcaatccata

SEQ ID NO: 23293 - DNA, 260 bp, Unknown
  Description of Unknown: LeftRegion for integrase B10294 sequence
acagaggcctgtgtcattgcaggcatagccatgttcgtcatcttcctggtcgtccgcagcatcgtccctacgccaggttgcgaccagtggcagcgaaggtatgacgcagcactcatcaacatggccatctccacggacagccagaccaccacagcagtggaacaactccagaactctcgtccggaaggttgccactgaccatggccaaaccacctcgtccctctgatgacatcgactatgggtcagagatacagcaactg

SEQ ID NO: 23294 - DNA, 260 bp, Unknown
  Description of Unknown: LeftRegion for integrase B10295 sequence
tcaactcagctcggatcgatcctggacaactgccttgcgcaggacgaggaaatttgcgtttcctgtccttatgctccgaaatgtatcgaccgcgattctgaagtgatttatgacggcgggctggatatcgacaaccgtccgctgttcaaggatctttatgcttacttccggtccatcggattatatggtggtgatctgcgatgctgaaaaaaccccgcatctcctgtcagccccgtaccgcggtagcgtatgccaggtac

SEQ ID NO: 23295 - DNA, 260 bp, Unknown
  Description of Unknown: LeftRegion for integrase B10296 sequence
gcatcttgtgtgtgttgcccgcaagatttcgcttcgagctttccagaactccaattcgtttttcggtctaacggtaatcccgtgaattccgatacctttaaaattaaacataacattacctcctttaaatatgaattattgtcctataatacccgttgtaatgcatgcgaatatgttacaatcaaagaaaggaggtacttatgcctaaagaaaaagctgttgtgtatgctaggtattcatcgcacaaccaaacagaacaa

SEQ ID NO: 23296 - DNA, 260 bp, Unknown
  Description of Unknown: LeftRegion for integrase B10297 sequence
gccatgctggatgcgaacatacaggaaaacaaaaccaaacagcagatccgtgaccagcagcatcaggatgtgcttgaactcggaaagatttatgagtcgctcacacaggaaggacaggcgtatctcatgcagcaggcgagaatcgcaaagaatatgtttcctaagaaacgataaagtgtcatcagaaaggaaatcgtatcatgaagaaaccagcagcgcctcagtgttccccgaccgcagctgtggcctacgcccgttat

SEQ ID NO: 23297 - DNA, 260 bp, Unknown
  Description of Unknown: LeftRegion for integrase B10298 sequence
attttagaataaggtcgagcaggtccgcatcgttggcgtcttttactgcttcaataactatattttttaagtggttgatgtcttgcatttgtggacccctctcgaacgtttgtttgtaacattatactacaataacattgtcgaaaaatgcaatactttctgtaatatcaaaaattttcaaaaaatggaggcacatcaagatgggagcatataaaaacacgggcgccctgtgggagtactacctcgtatatttgaggaag

SEQ ID NO: 23298 - DNA, 260 bp, Unknown
  Description of Unknown: LeftRegion for integrase B10299 sequence
tgttgaggaaactcaccataacattatcagcagaagcaagaacatcattaacgatagccctcacgcaaccttgaccatcaatgatacagacctgtccaagcaggagcgtgagttgattaaaatgtatcgtgagttctctctcgaagagcagcttgcactcatcacctatgcgttgaaggtgaagaatggcgaggtgtgatatgcgagtcgttttatacatgagatatagtagtgaccgtcaaacggaacagtccatagag

SEQ ID NO: 23299 - DNA, 260 bp, Unknown
  Description of Unknown: LeftRegion for integrase B10300 sequence
tcttgcattatgtgaaatatataaaagcaaggatattctctgtgattttggatataccgctcatgattccggctttgattttgaggagattgttctctttgaggatgaatacactccggagaactggcaaatgctcaagaattttatttccctggtaccggccaaggataaaaaatgatattaaacttaggggataagctatgaatgcagtaatatatgcccggtattctccggggccaaggcaaacagatcagagcata

SEQ ID NO: 23300 - DNA, 260 bp, Unknown
  Description of Unknown: LeftRegion for integrase B10301 sequence
atggtaaaaactcacgatggtgtgcatatcggctggcttccaaagggcgacaatctgcaaatcgacatatttgaccgccttgtaaaagggcagacggtctatgctaaaataaaggaaggctacgaacttgcgaccgctcccggcaatatcggactctgcatcgaggtcgctcgttatgcttcgaggtagggggtgcgtggatgagagctgctatctatgctcgtttttcctcacataatcaaaccgagcaaagtatcgag

SEQ ID NO: 23301 - DNA, 260 bp, Unknown
  Description of Unknown: LeftRegion for integrase B10302 sequence
attataccttcctgtttaccttcccggaggatcagccgtgagcacataccggccaggcatcctggagcgcatcggcttactcatctggaaaatgaaatattacgatcagatcgtggctcaattggaagcggaactggaagcggtggaggaagaaatcgcccgcttaaaatatcggatcgaaaagctggaaggaaaacagcatgactaacgccgtcatctacgcccgctactccagccacgggcagacggagcagtccatc

SEQ ID NO: 23302 - DNA, 260 bp, Unknown
  Description of Unknown: LeftRegion for integrase B10303 sequence
tctgttagcgtttacccgtctataacaaaaacccgcactattgaccaaataaccagcgtccataatgtaggatatacaagcagttgccaatccttcaaaaccggaaaaatcatattgcaggacgggtggatcgtcgaaatagttcaaggccccgcgataattaaaccgttcgccggcgtgtttaactaacggaggcagtaatggcaaaagcaaaacggccgacatgcagaccgaaaacggcggtagcttatgcgcgttat

SEQ ID NO: 23303 - DNA, 166 bp, Unknown
  Description of Unknown: LeftRegion for integrase B10304 sequence
ctctttgaggatgaatacactccggagaactggcaaatgctcaagaattttatttccctggtaccggccaaggataaaaaatgatattaaacttaggggataagctatgaatgcagtaatatatgcccggtattctccggggccaaggcaaacagatcagagcata

SEQ ID NO: 23304 - DNA, 260 bp, Unknown; identical to SEQ ID NO: 23155
  Description of Unknown: LeftRegion for integrase B10305 sequence

SEQ ID NO: 23305 - DNA, 260 bp, Unknown
  Description of Unknown: LeftRegion for integrase B10306 sequence
ctaattgttaaaaattgttaaattatcattaacaatccagcaccttagtttataaaaaactgtaacttattaaaaaccaatcaaaaacaattgcttattcttcctatccaatatagttgcataaaatagttagaatatacaataaaattaaattcctgacgttatgatacaaaaaataaattgaaattaatttaatagttatgagtaaaaagtgcatcatttgggtacgttgcagtaccgagcgccaggaaattgaatcc

SEQ ID NO: 23306 - DNA, 260 bp, Unknown
  Description of Unknown: LeftRegion for integrase B10307 sequence
agcgtccgcagcatgatagcattgccgatagtctcgtcaagatcgaattcctcgcagaaaaactgccagaacatggccatttctcctgtccccgctaccctcattcggtgccctctgaagagatagtgggggacgtggcagaaatgccttgccttccggcgaacaccgagtaactgactgggacgcgaaaggagcgcaacatgggcaatgagaagcggggcgaagaaaccggcccgagccgggtcgcattctacacgcgc

SEQ ID NO: 23307 - DNA, 260 bp, Unknown
  Description of Unknown: LeftRegion for integrase B10308 sequence
aaaaaacaaactatctgatcgtcgggaacgaagggaatccgtgttgggcgtattcctgctacggccgcaaggtggatgctgcgatcaagctgcgcaaatccggtatcccgattgtgattgtgaacgaaacggatttttgggatatcctcgaagatctgtagcaacgctgatcgaattttaaaagagttggaggactatatatgagaattgcaatctatgctcgaaaaagtgctttttccgataaaagtgaaagcgtgcac

SEQ ID NO: 23308 - DNA, 260 bp, Unknown
  Description of Unknown: LeftRegion for integrase B10309 sequence
aggttgcccttggtgttgcctgcggaatttgtgcctattttctcttcttttctgacaatcccctttttcttcgtatcgtcggttgtcttattctttctgttggttctcttggtattatttttggtgaaggcattccgcatgttgcgagagctataaaagcaaataacatgatgcgtgatggcacattataaggagattccatgaaaaaaacgcttaccgcctgcccgccccggacagccgtcgcctatgcccggtattcc

SEQ ID NO: 23309 - DNA, 260 bp, Unknown; identical to SEQ ID NO: 22782
  Description of Unknown: LeftRegion for integrase B10310 sequence

SEQ ID NO: 23310 - DNA, 260 bp, Unknown
  Description of Unknown: LeftRegion for integrase B10311 sequence
ggcgccttctccctcaattatccggcagtggacggtctctggatggcgaccgatgcggatcatatcaccatccggaccatgaaccgcacccttccggcccgcctggatgatcagggccgtctcctcgtctactttgtcgaggatgtcccctatccctttatcaaaatcccgtcttacgattatattgaagagacaagaaaatgagcataaaaacaaaaaagccgtcctgttctcccaggacggccgtcgcctatgcccgc

SEQ ID NO: 23311 - DNA, 260 bp, Unknown
  Description of Unknown: LeftRegion for integrase B10312 sequence
ggaaaacgaaggtgacaaaatcactagcgatgaacgcgaaatcgtcgataactaccgtgacagctcgccggaatggcaacagaacatttcgatgaccgccagagctgcggcatctgaatcaaaaagaaaataaaaaagccccagcgctaccgtccaaagtctcgcaggggcatacctagaaaaggcaaggtgattttatcatgccaaagggcacacgtgccgccatctatgcacgtttcagttcgcataaccagcgaagt

SEQ ID NO: 23312 - DNA, 260 bp, Unknown
  Description of Unknown: LeftRegion for integrase B10313 sequence
agctttctgttgtagaagcggaaaatgaaatgctgaaggcacggcttcaggatgtggacaagctgcttcggaacattgacgagcaacaccgcaaggacatccgtgctgtcaaagaagaatatcaggagcagattgcttttctgaaggaagaactgaaagcttggagatccatgcaccaaattaaataaggagtgatttatgtggcaccagtaaaccgaaatctttacgctatttatttgagaaagtcaagaaccgacctg

SEQ ID NO: 23313 - DNA, 260 bp, Unknown
  Description of Unknown: LeftRegion for integrase B10314 sequence
aacaattatggaggaacaatgcgagaaaaattagagcttatattgctgcctccgcaagaaaaaaaagaagtatctgaagaagaaattgcgaaggcatatatagacataatgaacttattattaaataacgggtaaaaggcccgttatttttttatttacatttttattcattcattcattttttgtgttagaatctcattatgaaaacagcagtaatatacgcgcgtgtatcgtcgggccgtcaagagcgtgaaggcttt

SEQ ID NO: 23314 - DNA, 260 bp, Unknown
  Description of Unknown: LeftRegion for integrase B10315 sequence
taatatgaattataagattgcaaaagggataattgatatgctattagcagaccgaattataacccttgcagaatatgaagaaatagataagaaaaataagctgagttttagttaaaaactcggcttttttatttcgattttcactggactttgcgtagcgtttgcggtatgtttgtgtctaacaaaaggaggataaaaaagtggaattttatagagtgtgtgcttatgccagagtaagtacaaaagctgaaaagcaagaa

SEQ ID NO: 23315 - DNA, 260 bp, Unknown
  Description of Unknown: LeftRegion for integrase B10316 sequence
tccgccatggtaagttaaacgtacaaagggaggtaagactcttatgatgcgtgacggtacctaaacgtaagctgtctgtaaggcagtcatcatagcagaaacgctccagcaaattatacactcatggttggatcatttaatgataagccatgagtgttttgttttatacgattgcaccagtgcaatagaaggaggctcacatggatcagatcaaagctgttatatatgcccgctactcttccagcggacagcgagaagaa

SEQ ID NO: 23316 - DNA, 260 bp, Unknown
  Description of Unknown: LeftRegion for integrase B10317 sequence
cacacaaggagaattttaaacttttttggtattggttttgcaatgtggagtttgcaatttcgcacatattatgtggtgattataaaaaagtctataacgttacaacgtttttaccaaaaatataaccacaaaaatttgcatgtttagatgatttcctgtaactttgccaatgaaatttaaatcttaattcatttatagttatggcaaaggttatcttattggtcagagtatcgaccgcacaacaggaagttgaagcacag

SEQ ID NO: 23317 - DNA, 260 bp, Unknown
  Description of Unknown: LeftRegion for integrase B10318 sequence
tgtttactcagaagatgagcgaactttcacaaatatgaaagagaaaaaagacgatattgttctaaaattggtttgcaagtgcttactagactatgattatttagatattaaagagtatgaaaaattatataaattagttgattcatttatgaataagcacgatgttaaattaagagcttttcaggagttactagtttaaaatgagagcagtaggttattgcagattttcatctgaaaatcaaagagacggattctctatt

SEQ ID NO: 23318 - DNA, 208 bp, Unknown
  Description of Unknown: LeftRegion for integrase B10319 sequence
catggtcggaacatactctacgccacctcagagagcgagatttttctggcgaacgtccccgatgacctgctcccacttgcttttggcaccaaaggctgctccctactttatactttaccacacaatctcccagcggcataaatagctcatgcataaggcctattcgtatttgaggttttccactgctgaccaaatacacggagactcc

SEQ ID NO: 23319 - DNA, 260 bp, Unknown
  Description of Unknown: LeftRegion for integrase B10320 sequence
tcgctatccttggcgtatgataaatcccataattctctgctgggccgcccgaagcttggcactcagtcatggcgtgcaatttagcgccgcgctactttcggacaacgatgtgccaatcgagcttgcactgagattcctgacacgtccgctgaaagagttatcctgtcgctgctatccattgattccaccggagaaaaatgatgagcggtttgctggaaactactatcctgtcgccggttcgtcgagctgcggcctatgtg

SEQ ID NO: 23320 - DNA, 260 bp, Unknown
  Description of Unknown: LeftRegion for integrase B10321 sequence
ctggtggaaactttacccgtgtccgcgcacagctcattaactacggatttcagccagaggacttactcttcgtttgtttggcttgttcaagcgaatcatcgttcaagccagattattgcccagtgatctttgatgggactaacacgatggttcacttctggtgggaatgtaaaacaactaagtttgcataaggagcagatatgagtacttacatctacgcgcgggtttcgaccttcgaccaatacgtcaacggtaactcc

SEQ ID NO: 23321 - DNA, 260 bp, Unknown
  Description of Unknown: LeftRegion for integrase B10322 sequence
ccctggatgttcggtcatccggagacaaaggcgacctgcctttggcttcacaatcttcctaagctgaccccgacaaacattgttgaaggtcgcgaaggtcgtattcacaaaatgggtccctctgcggacagagggaaactgagatcaattacgtacgctggggttgcaaacgccttcgcagaccaatggagtattctactatgagaacatggatctacgcacgagtcagtacctttgaccagtatctcaccggtcactcg

SEQ ID NO: 23322 - DNA, 260 bp, Unknown
  Description of Unknown: LeftRegion for integrase B10323 sequence
acgatgggaatgtccaatctggtttggaaaaaggcgaaaggcgaggagaagtctgtcaccaagaacgcaaaagtctgcatctgccagaactgcggttattcctggcagatcaaataaggccatcttatcacggcgggagggaggcgagcagtattccagcagcgaaaaagaaaagctctaagagcgaggggaaacgcgctgtgatctatgcccgctattcctcccacaaccaaagagaggcttcaatagagcagcagatt

SEQ ID NO: 23323 - DNA, 260 bp, Unknown
  Description of Unknown: LeftRegion for integrase B10324 sequence
tgatctgactaccagttattacacagaaaatcatttattaaacaaagaccaaatagaagttcaagcaaataaattcgctgctgaacttctcatacctgataatgttgaaatttatgaaggtatgactacaaaagaactagcttgctacttagaagtttcagaagaattagtaaagttaaaatataaggatgtgatttaagatgtattgtatgtacctaagaaaatctagagcggatttagaagctgaacaaagaggagag

SEQ ID NO: 23324 - DNA, 260 bp, Unknown
  Description of Unknown: LeftRegion for integrase B10325 sequence
acaacaatgatataatagaatacgaggaatacaagcaattcattcagaataaggctaatccatccactgttcagtaccaacctaataagtttgagtattcctattctatcgatctctctgttctcatcgccattggaatggtttgtctcactgcaatcatcatcacgataatccgaaggaaataatggagctgatccaacatggaacgtttacctcacggtgaatacgtaatataccttagaaaaagccgtgctgatctg

SEQ ID NO: 23325 - DNA, 260 bp, Unknown
  Description of Unknown: LeftRegion for integrase B10326 sequence
atgagcggccccgccttctttcagacgcacatggggcagcgcttctacgaggggacgatgccggcgctcgtccgtgagctgaagcgcctcaacgacaacatggagcgactggtggccatggcggagcagctcgccgggcagaaggagtccacgagcgccgagccagtgcatccgacaacgccagccgggacggaggggaaatgaggaagagcaagccagcgccctcggacgcgaagcgctgcgccgtctacacgcgcaag

SEQ ID NO: 23326 - DNA, 260 bp, Unknown
  Description of Unknown: LeftRegion for integrase B10327 sequence
gaagtgccttctccctcaactcttgcaggagcgacacatcgatccagtcgtgttctaccatgaatatttatcatccaagtatggcaatcataccagatttcacaagattatcaagtgaaatcgcttccgtaattggaatggtttgtctcactgcaatcatcatcacgataatccgaaggaaataatggagctgatccaacatggaacgtttacctcacggtgaatacgtaatataccttagaaaaagccgtgctgatctg

SEQ ID NO: 23327 - DNA, 260 bp, Unknown
  Description of Unknown: LeftRegion for integrase B10328 sequence
gccactgctcgtcagtaggtggaaacaaacaggcgttccgctcacccgttctaatacccctgtagcgcgtccagaagcctgccagggcgcgcagcgggtgaacaatgtcaaaagactcgtccaacccaaacggccacctgcctgcgcctgcccacgatgcagcaggcggggatacccacgcttcggtggaaaaagaacgaatgcccgtcagggcattgagactcctgcgcgccgccatctacgcccgcgtctccaaagac

SEQ ID NO: 23328 - DNA, 260 bp, Unknown
  Description of Unknown: LeftRegion for integrase B10329 sequence
gccggacaagcgcgttcctatgccgggcgcggtcatcacccgcgaatacaagggccgcatggttgtggtgacggtgctgccgaacggcttcgagtacgaggacaaggtttaccggtcgctctccgccgtggcgaaggccgtcaccgggacacactggaacggctaccacttcttcaaccttgtgaaggacggaggcgtgcatgcctgaaaaacactccatccgatgcgcgatctatacgcgcaagagcaccgaggaggga

SEQ ID NO: 23329 - DNA, 260 bp, Unknown
  Description of Unknown: LeftRegion for integrase B10330 sequence
gatgaactgcaagtcctacggcaacgcgcggcgctggatcgaagagcgcctgtgatctccctcgccgagtgccgcgagatacttgggcccgacgcccaggacgcgaccgacgaggaagtcgagctcgcgcgcggcgcgctctacctgatcgccgaggcggcgctagagtccgaagagaagaagctccaggaggacgccgcgtgaagcgagccgtcgtgtacgtgcgggtctcgtcgcaggaccaggtgcacaacctgtcg

SEQ ID NO: 23330 - DNA, 260 bp, Unknown
  Description of Unknown: LeftRegion for integrase B10331 sequence
attgggagttgaaaagtgacggcgttcatgtttctgttgttgattattccatgaaacgaaaagaatatgtgttttatctgacccaggctcattatctcgcttttgagatgtccggtgaatatatgctgtttcagaagatggtcctgccccgtgctattaatgatattcacattgtaacttcatgggattgatttcgtattatgaaaaagaattctgttccttcctgcgccccgcggacggctgtcgcatatgctcgctat

SEQ ID NO: 23331 - DNA, 260 bp, Unknown
  Description of Unknown: LeftRegion for integrase B10332 sequence
gcgaatgggaattaaaaagtgacggcgtccatgtttctgtcgttaattcttccatgaagcggactgaatatgtattttatttgacccaggcgcattatctcgcttttgaattgtcaggcaaatatatgctgtttcaaaaaatggttcttccccgctcttttgatgatatccatactgtgacctcatgggattgatatcgtatgaaaaagtattctgttgcttcctgcgctccgcggaccgccgtggcctatgcgcgttat

SEQ ID NO: 23332 - DNA, 260 bp, Unknown
  Description of Unknown: LeftRegion for integrase B10333 sequence
gaaagcgatacagggtttcatggattcggcaagaggccgctcatcgatggatgacgaggcctattccaaaacctgaggttctgccgtgagaacggcctgacctgcatggaataccacaggcgacaccgccatttccctcccgtggaggtacgggtgaaggaaggtggcaggaaggtaatagaggggaggttcaatcggacatgagggtcgctacttataaccggaagtcggtttattccgaccacagcgactcggtaaag

SEQ ID NO: 23333 - DNA, 260 bp, Unknown
  Description of Unknown: LeftRegion for integrase B10334 sequence
ggctgcaaaacgctgcggattgctcacggaataaccttgatttttcttaaattatggtgtaaaaatggaatacaaacacagacaatattttgaaaaactggcgggacgaccactctctgattgggaattggtggatgcatgccgccggattgtggcattcaatgattgtcttgtgaaaatgcaaaaggaaattgacgacaatggacgctgtgattctggcgcgggtatcatccaaagaacaagaggacgggttatcactg

SEQ ID NO: 23334 - DNA, 260 bp, Unknown
  Description of Unknown: LeftRegion for integrase B10335 sequence
tggatataccatgacatacacaggggggcagatgactgaatcgaagcacacgacgacgatccgcataccgaaggaacttctcaaggctgcccgagcgaaagcactcgaagcagaagcctccctgtccgaagtcatccgcaagtttctgacgctctgggtatctggggagatcgaactacccaagcgggaggagatgggagatgagagccattctatacgccagggtctcaggtgacgaccgagggagcgaggatcgcaac

SEQ ID NO: 23335 - DNA, 260 bp, Unknown
  Description of Unknown: LeftRegion for integrase B10336 sequence
cctctgaacttggttttccctctaactggcatgagcttatcaaataatcatctataaagaatccccggcagctctgtacgatagagccgccggggccagatggggaatctgtctgtcggagaataatcataaaataagaaaacacgcctgctgagcaatttcattgtaccatgatcctgctcagcgcacaaggagcaatcatggcaagaaaaaagaaagtatctcccgggaaccgtctggttgcctactaccgttacagc

SEQ ID NO: 23336 - DNA, 260 bp, Unknown
  Description of Unknown: LeftRegion for integrase B10337 sequence
aatggatccgctgggaatttgcactgatctgcgccctgatcaccttcctctgcattatcctgctgatcgatgtgctcaacccggacgtcggctggatccgcaaagcgctgtctgacattttcgccttgaactatgtataataaaaaatccccctcggtgccgcaacaccgaaggggatttatacgaaggagtcttttgatatgcgtgctgccttatacgtccgtgtttcgaccgatgagcaagccaaggaaggtttctcc

SEQ ID NO: 23337 - DNA, 260 bp, Unknown
  Description of Unknown: LeftRegion for integrase B10338 sequence
aaggcctcaccggcatgtggctgcgctaggcgcggcatatccgcaatcgcctgcggatataaaaaacacacccgactgccatcgggtgtgtacaaggcaaaccgtcacgattgagcatccgtggatctgcacctcatagtatagcacgtccacggattttttacaacatccgtaacgtactactttgaggagtgatctgtatgagcccagccccgaccagtaaatatgccatctatctgcgaaaatcccgcgcggatctg

SEQ ID NO: 23338 - DNA, 260 bp, Unknown
  Description of Unknown: LeftRegion for integrase B10339 sequence
tttctgtaaattattatcgtaaaaaaaagggagtgtgattagtcacactccctaaatttatatcttatttttcgacaagaaaataattatttctacaaacaataataatcttgtatttattgcttgtcaaggtgaaatctttatgatataatgaatttacaaagtaaagataattttgaacaacatagaaaggagaaataatggcaaacgttaaactaaaaaacattcttacattatcaccctatatgaaaatagctata

SEQ ID NO: 23339 - DNA, 260 bp, Unknown
  Description of Unknown: LeftRegion for integrase B10340 sequence
gatgctcgccgaggtcgaagagcgccgccagcagtacaagcgcgaaggcttccaggtcgggttcgaaatggcgaagcgcggagtcgccgccgaaacgctcaccgaaggcgcaacagtgatccacctgcccgtcggcacgtaccagcccaccacactgggcgaaggggcgctctaccaccgcaactgatcgggggacagtcatgcccaggcaacctccagcaggcgacctcatccctgccatcggctacgtgcgcgtgtcg

SEQ ID NO: 23340 - DNA, 260 bp, Unknown; identical to SEQ ID NO: 15851
  Description of Unknown: LeftRegion for integrase B10341 sequence

SEQ ID NO: 23341 - DNA, 260 bp, Unknown
  Description of Unknown: LeftRegion for integrase B10342 sequence
tctctgccaaaagaggaaatgctcaagagacttgcagaggctttagactgctctgtaatagatttctttatggacgattacgactatacctttaagattgacgataatatcgttatgctcgagagaggatataaaggactgtcggagagtcaaaaacaccgcctgttggcgtattattactctctcatagagggtaaagaatgaacgccgtaatttatgcgcgatattcaagcagtaaccaacgtgaggagtctatcgag

SEQ ID NO: 23342 - DNA, 260 bp, Unknown
  Description of Unknown: LeftRegion for integrase B10343 sequence
agagttcgacctatgttaagatctggggccatactatcgacgactactccgctggcggcggcctggtgtatgactttatcgtcaagcaggaaagacctgtattcgggaaggtcaacctcagggccggttatgtggtcgatatagatgagcctgtgatctttgctccggccgtctccctgggcttctgaggtggatccagcatgaacgtcgtgatctatgcccgcttctcatccagcgcccagcgcgacgagtccatcgac

SEQ ID NO: 23343 - DNA, 260 bp, Unknown
  Description of Unknown: LeftRegion for integrase B10344 sequence
acataaatgaaaaccttgacgattatatttgcgtggatgaaatagaaacttatatcgaagaatgtacagactacatcctgataagcaactctcaggaaacagaactcataaacatcttccggtctctatcggaaacagataaatcaaaagccctgctgtacatagcagagctttacgagtaaaatataaaggacacaaaaatgaacgcagtaatctacgcccgcttctccagcacagcccagcaggaacaatccatcgac

SEQ ID NO: 23344 - DNA, 260 bp, Unknown
  Description of Unknown: LeftRegion for integrase B10345 sequence
cgtgtcgccggaatatgccgacgcggtgaaaaaggcggtcagtggactcaccggctcgagtatgatcgagctcggcactgcactctccggatctgcccaggacgtcgcaaagctgacgctcctccgggcgattgttgaacagaattttattattattcgagaacttgacaagattgcaaagaaataagaggtgtttagaaatgaccggggttatttatgcaagatatagcgagggccctcatcagaccgatcaaagcatt

SEQ ID NO: 23345 - DNA, 260 bp, Unknown
  Description of Unknown: LeftRegion for integrase B10346 sequence
tctctgccaaaagaggaaatgctcaagagacttgcagaggctttagactgctctgtaatagatttctttatggacgattatgactatacctttaagattgacgataatatcgttatgctcgagagaggatataagggactgtcggagagtcaaaaacaccgcctgttggcatattattactctcttatagagggtaaagaatgaacgccgtaatttatgcgcgatattcaagtagtaatcaacgtgaggagtctatcgag

SEQ ID NO: 23346 - DNA, 260 bp, Unknown
  Description of Unknown: LeftRegion for integrase B10347 sequence
ataaatgttgggaaattaaattgggccaacgattggcttgattttatatggcaaaggtggcacagtgatgatgaaacttgaacgcaaattgacaagaatggccagcgcaaatggttattctgtatcggataccgaattgtattcggcatctggtcatcttgtccgctttttgcgcgctgtaaccgaattaaaaaaagaacatgacgacaaaatgcgtgattttggctcggatcagttccgaaaaacaagacaaagaatac

SEQ ID NO: 23347 - DNA, 260 bp, Unknown
  Description of Unknown: LeftRegion for integrase B10348 sequence
cttgaggttactttatagataatatagcacagcatttttgacaaaaacagacttttcgtagttcaaatttcgacagtttctcattccctttgcttactttatgatagcataatacgaacggatgttctatatttttagaacatttttctttaaaaaccctggtgtatggggattttaacagttggatagaggtgaaatgtatgtacagaccaaaaggattagatgtcgatatttatttaagaaaaagccgtaaagacatt

SEQ ID NO: 23348 - DNA, 260 bp, Unknown; identical to SEQ ID NO: 23246
  Description of Unknown: LeftRegion for integrase B10349 sequence

SEQ ID NO: 23349 - DNA, 260 bp, Unknown
  Description of Unknown: LeftRegion for integrase B10350 sequence
  modified_base (172)..(183): a, c, t, g, unknown or other
acacgaacatggcaagaaactccaccacagttttagatggttctgttacacctacaatgatagtgcctattgttgaaggttcagaggaatataaactttcaacatatgccttcaagttcgctgttgaaagcggcaagatggcgaaagcaaaggcaaagaacaaataaaaaannnnnnnnnnnngataaggaaaccacacaatgaatagtttaaaagctgtaatatacgcaagatactcatctgataagcaacgagatgaa

SEQ ID NO: 23350 - DNA, 260 bp, Unknown
  Description of Unknown: LeftRegion for integrase B10351 sequence
tatatagagcttcagatcaaatacgatgatctgtataaggattacgatgatctgtgtgatttcatatatcacataggcgaccccatgagtgacctttatctttattttgaagaaaaagaaatatcatttgatgaagcgtataaagcatttattttgttggatggttattatcgtccatttaacaactgaccggaggcaccatgaaacataatccttcctgcgccctgcgcaccgcggtcgcctatgcgcgctattcctcc

SEQ ID NO: 23351 - DNA, 260 bp, Unknown
  Description of Unknown: LeftRegion for integrase B10352 sequence
agctcgaagcgaacaaatttgcttctgagctcttaatccctagtgcttgcagttttcaaacttgcccaaaggatatgatggaaggtgtcgatatttcagttttaaaggacattattttttataagtcagtagaaatcactgaagagtttgtgaagctaaaagaattctataatagggcaaagggggcgtaaattttgaatgtggcgtgctactgccgctattcaagcgacaaccagagagaggaatcgattcacgctcaa

SEQ ID NO: 23352 - DNA, 260 bp, Unknown
  Description of Unknown: LeftRegion for integrase B10353 sequence
caatggtaaaacattaagaaatggcaagcataacccaccaaaacgagttgagttgcaacaaaatacatatggttatttagaggccatgattgcactaggtaatgcgcaacgtgttggcaaatttacaccaccaactgcaaaataaaaatagcccccttgatagggggctttacttatacaatttgaaagggaatcacacaatgaatagtttaaaagctgtaatatacgcaagatactcatcggataagcaacgagatgaa

SEQ ID NO: 23353 - DNA, 260 bp, Unknown
  Description of Unknown: LeftRegion for integrase B10354 sequence
atcttgcatgttggacagatagcgtatttgatgctcatgtttttactgatgatgaagcacgtctcgttgctgtgtatcgtggattgtctccacgcgggaaagagctttttcgtgaacgtcttgaagaacttaaactattgtatggaaaaaaatctgaagatcattcagctgagtctgtttatagaggtgagtaattaaatatgccgcgtgcaaagaagcaagccagctgcccgccgcggacagctgtcgcttatgcccgg

SEQ ID NO: 23354 - DNA, 260 bp, Unknown
  Description of Unknown: LeftRegion for integrase B10355 sequence
gtatatgtattcttcgggtgtcatatggtacaggctcctttcatccgggacagttatataatacatcgcacctgtgaaaaaaattgtcggaatttgtggcgatttcatgaaaaaatgcgaacaggcgttctcattaaaggaggtggtgcttatgtaatattcgccatacaccacagaacacacagaaaggggacagaattatggataacacacatctaaatgttctttcgacggacgcttatattatttatctgcggaaa

SEQ ID NO: 23355 - DNA, 260 bp, Unknown
  Description of Unknown: LeftRegion for integrase B10356 sequence
aggcatataaaaaagatttggacagcttttctcttcaagacgtttccgaattatgcggtgtttttcgtgacgatgcacatagaagcctttctgactgtttcgcaaccggcattgtgttcaaaaactgcgttgaagatatcactggcaggtaagccctccgggtgtacggttgtcagtttcgaatctgaacgggggacagtatgcgggcatttatttactgccgattttccagccataagcagcaggaacttagtatagag

SEQ ID NO: 23356 - DNA, 260 bp, Unknown; identical to SEQ ID NO: 23099
  Description of Unknown: LeftRegion for integrase B10357 sequence

SEQ ID NO: 23357 - DNA, 260 bp, Unknown
  Description of Unknown: LeftRegion for integrase B10358 sequence
ggacaagctatctaatttattttgagccgcttggcgtgatccgtttgtttgacgaataaaaaaagaacccctggtgttggtagcaccaaggattctttttagatacattcagcctaataggcggtgaaatgcatctgcgcagtataattatagcattttcgccgtctttagaacaataaattgaaaggcggtattttattatggaagccaaagtcattcgcgctgtagcctatgcgaggtacagttcagataatcagaga

SEQ ID NO: 23358 - DNA, 260 bp, Unknown
  Description of Unknown: LeftRegion for integrase B10359 sequence
actatgaaaaataccttcaaaaaacagaagaaccagaggtctaagatctctggtgggccccttctacactcggtagatggactatcattattatacattttttaacattttttgcaataaatttagacaattattcaagaattcacaatatctttacaggatagcctcttgtccaggaggcagaaccacaacatattgatatgaaggcagtaatctacgctagatattcttcacacgctcagcgtgaggagtcgatagag

SEQ ID NO: 23359 - DNA, 260 bp, Unknown
  Description of Unknown: LeftRegion for integrase B10360 sequence
atctgcatgatcatttctatcatatacttgatatataattctctattcatgctatcacctccctttgaagacgatagcataaatagaaaagctccagctgccttgattcagctggagcggtgcgaaaataatatttgctcagataatatttttgcgcttccattatagcaaattttttaatgaatataaaggagctaattatgaatgcagttatttatgctagatattctagcgatagtcaaagagaagaatcaattgac

SEQ ID NO: 23360 - DNA, 260 bp, Unknown
  Description of Unknown: LeftRegion for integrase B10361 sequence
gaatcaattggtgatgaaataaggtttgcacgattgcggaaaaggatgacacaagaacaacttgcacaaaaaaccggtcttggtcggtcaacaatcgcaaaatatgaatctggtcaaattgaaatgagtatgccggtattcattgaactatgcaatgcaattggtgtcagctacattgatattttgaagggtattgaattatgacaacggcagtcatatatgcaagatattcaagttcaaatcaacgtgaggaatcaatc

SEQ ID NO: 23361 - DNA, 260 bp, Unknown
  Description of Unknown: LeftRegion for integrase B10362 sequence
tgacggcggttgcgacgctcggaatgtcgaaccttgtatggaagaaagcaaagggaacagaaaaaagcgtggcgatcaaagagaaagtctgcctctgccagaactgcggaaactcctggataatcaagtgattctttgataagagaagggaggcgggcaagatctcaaaaaagaaacagaaaatcgaagggaaacgggccgtgatctatgcccgcttctcttcgcacaatcagagagaagcgtctatcgagcagcaggtc

SEQ ID NO: 23362 - DNA, 260 bp, Unknown
  Description of Unknown: LeftRegion for integrase B10363 sequence
attacccttgctcacgctcttggttgttccgtaatggatttctttgccgatgaagaagacctcaaggctgactacgtagtgtttgacgatgatgaaacagatataatcaccatttatagagaaatgccccgggaagaaaagcataagttcttagcaagaatgtacgcataccgggataaattacaggggttatcggataaatgaaagctgttatatatgctcgatattcaagtagcaatcagagagaagaatccatagag

SEQ ID NO: 23363 - DNA, 260 bp, Unknown
  Description of Unknown: LeftRegion for integrase B10364 sequence
gcagaagacgcccgacgggcgccagggtaagacggggatcaagttcggcaaccagccggacgattttgagccatgcggcccggtggtcgttcattcgaatacctcttcacacgaaagcaatcgttcattggttgtagtttcccccgttacttcttaccctacctgcttgctcgtttgagcaactttctctccaacttgcgatggaccccaaaacgctgtatctgtactcccgaaagtcacgtgccctcggcgatcctgac

SEQ ID NO: 23364 - DNA, 260 bp, Unknown
  Description of Unknown: LeftRegion for integrase B10365 sequence
acatatgccttcaagttcgctgttgaaagtggcaagatggcgaaagcaaaggcaaagagcaaataaaaaaaggccctattaagggcctctatttgtatataaaaaagaaaaaccgccatgaattggcagcatggcggaatttctttgatttacatttgataattcttatttaattatatcaccaacaaggaaaccacacaatgaataatttgaaagctgtaatatacgctagatactcatcggataagcaacgagatgaa

SEQ ID NO: 23365 - DNA, 260 bp, Unknown
  Description of Unknown: LeftRegion for integrase B10366 sequence
agaattccacctcaataagtggaaaaacaaccgggtaacgtttgtgcgtgtgatgactgcaaatgatagttatgtgtgcgaatattgcaaatcgatgcacaaaaaggtaattccaatcgaaacagcccaggacggaattcctcatgcaaactgcaccgcactcaaagggtgtagatgctatcatcagcccgcgaaagccgatgcgtcctagctccgccttcccccccggtgcgagcgtggttgcctacctgcgcgacagt

SEQ ID NO: 23366 - DNA, 260 bp, Unknown
  Description of Unknown: LeftRegion for integrase B10367 sequence
gacagaacaggcaccacccccggcttcggctccacttctgcttttcttgaactcggatcacccggctttagtgccttcggtgaagttaaccctgaaaccttagatcttgatatgaaagacgggtggtatttgttccttggcggtgctgttgtctttactccttataccggaaagcctgatttcggctttaaaaaataactatgaaaaagatcaaagctccgtcttgcgctccgcggacggccgttgcctatgcccgctat

SEQ ID NO: 23367 - DNA, 260 bp, Unknown
  Description of Unknown: LeftRegion for integrase B10368 sequence
gaacaattattgaccctttctcgggctttaaattgctcggttatggatttcttcgaggatgaagaaaaagacgctcctacggtcgattatgtgtatcaaaacgaggacgagcagatattgattgaggggtataggaatatgccaaaaagccaacagtataaactaatggcttattattacgctctaatggagggtaaggaatgaaggcggtaatatacgcccggtattcaagttctaaccagcgagaggaaagtatcgag

SEQ ID NO: 23368 - DNA, 260 bp, Unknown
  Description of Unknown: LeftRegion for integrase B10369 sequence
aagtaataccaataaacaggaggcgtaataatgggcattaaaggttttagtcttaaccgggccacgggcctgtcggacgccaaaacaaaactggcgaaggcaacagggataccaacaacaaaagccggacgcaaacgcaaggccgagcaccttgtagcgcaggccatattaggcaccagcaaaaaagggaaaaagaagtaatggatacgacaacaaacgcggtcatatatgcccgtttttcgtcgcacagccagcaggag

SEQ ID NO: 23369 - DNA, 260 bp, Unknown
  Description of Unknown: LeftRegion for integrase B10370 sequence
gctctggatacggcgagagccccggtgacttcatctggaacaacgctccgtatgccggtggtctgacccagaccaggactggcggtgcgggcttcggcccaggaggtggcggtgcccaaggaggcatcttgttagcttccggtcacggcgccgcaggcggtgtgttcatcacagctcgacagatatagcaaagaacccccgtgggggtcttcggactcctgcgggggcttttttgcgtttcacagagtgttgtgcaatac

SEQ ID NO: 23370 - DNA, 260 bp, Unknown
  Description of Unknown: LeftRegion for integrase B10371 sequence
aatattcacgattcctataaggcagaactgcaagcaatccgggacgaagcacaggccaaaatatccgatatgcgcagtgaactggacaggctgaagcggaacaatgactacctgtgggcagagaataaccggaaatccaaaatgattgatatgtttattgaaaagaaaatggttgatatctaaaaaaggagtgatattggatggcaccagtaaacaagaaatatgcaatgtacttaagaaaatcccgtgctgacttagaa

SEQ ID NO: 23371 - DNA, 260 bp, Unknown
  Description of Unknown: LeftRegion for integrase B10372 sequence
tttggagcaacaagggcttcgtgggaggtgtgcccgtaaacaccgaaacagccgccgtgaatacctgcgggtgcgaccgaaaaccggtggcaacggttttgatctttctgctatgcgcggtccgaggcccggcctgcggggtgggcaatcgctccaaaacatcccgcaggcatgcccggcaatcccctccaacaatttccatgagtgatgtcgaaaattctcaactgatccgtgctgccgcctacgtgcgcatgtccaca

SEQ ID NO: 23372 - DNA, 260 bp, Unknown
  Description of Unknown: LeftRegion for integrase B10373 sequence
aaagccccatctttctctgtcgaaaaaggcggggctttgatgaacgagttctgctttttaatgcaactccacttctataaatagttgaaaactatgatatttttggaatgagtttaactttttcatctcaaatggttgcttttgtctcaaatccgtgactgattagacgaaagtttttaccgcttgaaaggtggtatagtatgccaaagaaaaatccatccggcggcaagcggcttgttgcctactaccgctacagcggc

SEQ ID NO: 23373 - DNA, 260 bp, Unknown
  Description of Unknown: LeftRegion for integrase B10374 sequence
taggaatcttccagaaaacataaaagaagatattagagattatatagatatgaagtacaataaattcaatgaacagtgtgccactgtagaagatgattatataattaaacgagcctaaaatataatatacataaaatgtagaaaaaaataggaatagaggtattattgtacctcttattattatatagagaggtgattttatgttaaaggtagcaatatatagtcgtaaatctgtggaaacagatacaggtgaaagtata

SEQ ID NO: 23374 - DNA, 260 bp, Unknown; identical to SEQ ID NO: 15412
  Description of Unknown: LeftRegion for integrase B10375 sequence

SEQ ID NO: 23375 - DNA, 260 bp, Unknown
  Description of Unknown: LeftRegion for integrase B10376 sequence
gaccaaggagagacaaatggcaaaaactataattaaaaaatattctaataacactacggtggttattacatacaacaacgaaccttctttagaggctatcaagcagtatgcccaaaaattaaagcagacaattgacagcaaaagtattcagagttaacatatatttataaaatcaatagagagggtgatattcgttggaaatgcgaaatgaatacaatccaattattataaaatatgttgcagaatatttgagaaaatct

SEQ ID NO: 23376 - DNA, 260 bp, Unknown
  Description of Unknown: LeftRegion for integrase B10377 sequence
gaggggctggtgacgcccggcacgctgaacgagcagtacggcacgcccgagccccaggagcccgtgtaccgcgtgatagacaagcgtctggagtccatagagcgggcctacgagtccatgaacgagaacgggcgccacgtgctccacagcgtggccgtcagcctctcgcgcgaccccgcgaacgcgccggaggtcgagtagtggccgtcgccgcgatctacgcgcgctacagctcggcggggcagcgcgaggagtccatc

SEQ ID NO: 23377 - DNA, 260 bp, Unknown
  Description of Unknown: LeftRegion for integrase B10378 sequence
aagtaataccaataaacaggaggcgtaataatgggcattaaaggttttagtcttaaccgggccacgggcctgtcggacgccaaaacaaaactggcgaaggcaacagggatccccacgacaaaagccggacgcaaacgcaaagcggagcacctggtagcgcaggccatattaggcaccagcaaaaaagggaaaaagaagtaatggatacgacaacaaacgcggtcatatatgcccgtttttcgtcgcacagccaacaggag

SEQ ID NO: 23378 - DNA, 260 bp, Unknown
  Description of Unknown: LeftRegion for integrase B10379 sequence
ccatttccacagcatccgcttccagtactggtctgctgggtggtgaccgaatccaggctacaatggtttttgaaagaatataaacaaagaaccgccccggtgcggcaacaccgagacggttcagagggtagtaaacgtatgccaggattactaccctttcattttaccacggattggcaaaaaatggaaggagaattacaatggatttatacgccgtctatctccggaaatctcgaatcgatctggatgcagagcgcgcc

SEQ ID NO: 23379 - DNA, 260 bp, Unknown
  Description of Unknown: LeftRegion for integrase B10380 sequence
aagaaatactatcaaacattgaccggcgcggacatcattatagctgattgataaattttattgaatttattttttcttcagccgattctcgctggacttgtcgaaagttatcaatataattgtgttgaaaaaagcgaaagaggaatcgcatacattttggtacgaaacctcccaatcacgtaagaaaggagataagcggtatggcacaagtaaaactgatatcccccttaacaaagcaaggaatacaaaaactgcgggtt

SEQ ID NO: 23380 - DNA, 260 bp, Unknown
  Description of Unknown: LeftRegion for integrase B10381 sequence
caaggctaatggctgtttggaatttggctcaatgccaccggctgagtatcaatcggcgaacgattgccagtcctgggacgttatcccgttttagattccgatgaccgaccaacgacagaacatatccacacgatccgttggcgcaccgtccgcagacggactatcctcaatcgccagactactactcagccgagccgccaatgacagccgccgccatctacctgcgaagcagcaaggacaggcacgatctgagcatggac

SEQ ID NO: 23381 - DNA, 260 bp, Unknown
  Description of Unknown: LeftRegion for integrase B10382 sequence
aaattgaacgatcgagtgatatacaacaaaaagggaaaacgcttatacgaagggatgttttatgattttcgctatatcaacagacattttgtaattaaactagatggattcaatttcaacggaacaaacaaaatcgtcctgtcaaccggtaataccagcaaaacatatatcgtaaatgtcaataataccggaggtacaacatgagcaaacttccatccggagaattctggttatatctccgcaagtcccgcgccgatctt

SEQ ID NO: 23382 - DNA, 79 bp, Unknown
  Description of Unknown: LeftRegion for integrase B10383 sequence
atagtaaaggacctttgatatgaacgtagtattgtatttgagatattcgtccgataagcagacagagcagagtatagaa

SEQ ID NO: 23383 - DNA, 62 bp, Unknown
  Description of Unknown: LeftRegion for integrase B10384 sequence
cttattgtaggtttagtagtagagggcaacgggaagagtcaatagaagcacaaataagagag

SEQ ID NO: 23384 - DNA, 260 bp, Unknown
  Description of Unknown: LeftRegion for integrase B10385 sequence
aaatggagatgatccgggcagatgcacagaagaagattgacttcctgcttagccaagtggcgcagctgcgttcggacaacgacaacctttgggcagaaaacaatagaaagtccaaggtcgtggatatgttccttgaacgccagcatttcctgcttgtaggcgaaaaagaaaaaacaacataacacaagggagacataaaaatggcaataaactacctaacagatgaggcatacattatgtatctacgaaaatcaagggca

SEQ ID NO: 23385 - DNA, 260 bp, Unknown
  Description of Unknown: LeftRegion for integrase B10386 sequence
ctcggcggaatcaatgccgacagcgttacaaagaaaaccaacttccttgttttgggaaataatgacctgtgttcctcaatcaaagacggcaaaagttccaaacataaaaaagccgagaagtatattttgggcggcgcagacttgtctattatcccggaaaatgttttttatgatatgttagacgaataaagggtgattgtatgcgggcttttatttactgccgattttccagccataagcagcaagagcttagcatagaa

SEQ ID NO: 23386 - DNA, 260 bp, Unknown
  Description of Unknown: LeftRegion for integrase B10387 sequence
aaatggagatgatccgggcagatgcacagaagaagattgacttcctgcttagccaagtggcgcagctgcgttcggacaacgacaacctttgggcagaaaacaatagaaagtccaaggtcgtggatatgttccttgaacgccagcatttcctgcttgtaggcgaaaaagaaaaaacaacataacacaagggagacataaaaatggcaataaactacctaacagatgatgcatacattatgtatctacgaaaatcaagggca

SEQ ID NO: 23387 - DNA, 260 bp, Unknown; identical to SEQ ID NO: 22841
  Description of Unknown: LeftRegion for integrase B10388 sequence

SEQ ID NO: 23388 - DNA, 260 bp, Unknown
  Description of Unknown: LeftRegion for integrase B10389 sequence
ctcggtgaagtcatgcgcaaacaccgggaagcgaagcacctttcaacgactcaagtcggcgaactgctcaacgtttcgaaagtttctgtgcattattgggaaaccggaaaaagacaaatcaatgcaagcatgttgaagaaatactgcgacgtcgtcggcgtccgtgtgcaggcactgtttgatgaaatggacggtatcatatgaaaaccgccgtcatatacgcaagatactcgtctagcggtcagcgtgaagaaagcata

SEQ ID NO: 23389 - DNA, 260 bp, Unknown
  Description of Unknown: LeftRegion for integrase B10390 sequence
acgaaccgggaccaactgctgaggctgatcgcacgggaccggcgcaggcgcgaggtcgtcccgccgcctccgacgcgaccggtgcctgctaccggcgaacccgcaggtcagtggcttgggggccacgattcttcaacagttggtttgcagtgagtccagatcccacgacttcctgcaagcaatctgttaccttggcggacatgacgacgttggagtggttggtcggggcctacgagcgcctgtcgctcgacaagcgtgac

SEQ ID NO: 23390 - DNA, 260 bp, Unknown
  Description of Unknown: LeftRegion for integrase B10391 sequence
gctctagcgcaacttcaatagctatccctgcctcaaatagaaacgccgccgcgcttcttaccccatgagcgcgctgcagcgcgatcgccgtagcgaggaccgagcggctattgccaatttttgtggcgtctctactcatcctcatatagtctcccagaacaatcggggcgtattgcgccacatcaaacactggaggctttatggtcaaccgtgctgtcatgtacgtgcgcatgtcgaccgagagccaggactactccaca

SEQ ID NO: 23391 - DNA, 260 bp, Unknown
  Description of Unknown: LeftRegion for integrase B10392 sequence
tggcagaaaacgccaagctaaaaagggatatagaggcgtacaaagctatagttgaatccctgaaaaagaagatggacgaggctaaagcaaaattagtttattaaaacggaagttttatttaaggcgaccttcgggtcgtctttttttttatgtcttgatttaattgcgttcttaacgtacaataatttcgaggtgacgttatgaacataaaagacgtagctatttatttaagaaagagtcgtggagatgacgaagatgta

SEQ ID NO: 23392 - DNA, 260 bp, Unknown
  Description of Unknown: LeftRegion for integrase B10393 sequence
caaccgtggcagtatggccacggggagacaaaggctacttgcctctggttaaagggtttgccaaagctggaaccgacaaacatcgttgaagggcgtgaggcccggatacatatgatgtcaccggggaaggaccggggtaagaagcggtctgagacgtatcaaggtattgccgacgcgatggcggcacagtggggcagtttatgagcacatgggtctacgcacgagtatcaaccctcgaccagtacgtcaacgggtactcc

SEQ ID NO: 23393 - DNA, 260 bp, Unknown
  Description of Unknown: LeftRegion for integrase B10394 sequence
ctgcacctgctgcctgggcaccggcgtcggggagtcgttcgcgagcgcgtacgcgaacctatgggacgccatcaacggcgcgcgcggcccgtgggcgagcaacccgtgggtctgggtcctcaccttccaccgcatcgaggcaccatgaacggcttcgaccgcctcgcgtacctgctgctccccttcctggacaacgagccatgcgacaccgagacgcccccgaccgccccgcccgagtcctcggctacgtgcgcgtctcc

SEQ ID NO: 23394 - DNA, 260 bp, Unknown
  Description of Unknown: LeftRegion for integrase B10395 sequence
tctataacaaagaaaatgcaatgcgtaatattcacttgataaaaccggagggcaacaatgaaagaacttgaaattgaattgctgccaccggaacaaccggttgaagtatcagaagaagaaattgcttttgaacttgcaaaacttttatattattttacatatgattaacatatgttttttctttgtgctattatctttttatgaagcaagttgtcatctatgctcgtgtatcgtcggacagacaggaaaaagagggcttc

SEQ ID NO: 23395 - DNA, 260 bp, Unknown
  Description of Unknown: LeftRegion for integrase B10396 sequence
acaacgccgataagccacggttcctcgtctggggcgagcagtgcaactttcgaacacacgctgcgctacgcctccacccgttgctcgagtggcagctcgagagctcggatttgccgtgaagatcacggtgctagactccgcgccgggacctgacccggagatcgcagccgcggcagcgatgccgctcctcgaggccttcattgaacgagaagaagccgaacgcggtcctgtacctgcgcagcagcaaggaccgtcacgac

SEQ ID NO: 23396 - DNA, 260 bp, Unknown
  Description of Unknown: LeftRegion for integrase B10397 sequence
ttctgtctaagggtgatgaatttgtatgaatttgtcaccctctactttacaattttgattttaatagtataacaaagggaactacgctgtgacatagtgctctttgttatacttttttaacaaaacttcagactctataatttaagaatatggttaaaattgcagtacaagtaataacaacatcaattaaattatagattatggcaaaatgcatattactttcacgagtttcaactgagcaacagagcttagatgagcag

SEQ ID NO: 23397 - DNA, 260 bp, Unknown
  Description of Unknown: LeftRegion for integrase B10398 sequence
cagccgtggcagttcggccacggggagaccaaggcaacatgcctgtggttaaaaggcttaccgaagttggaaccgacgaacattgttgaagggcgtgaagctcggatacacatgatgtcgccggggaaagaccgaggcaagaaacggtcagagacgtaccaaggcttggctgacgcgatggcggcacagtgggataacttatgagcacatggatctacgcacgagtctcaacactcgatcagtacgtcaacggctactcc

SEQ ID NO: 23398 - DNA, 260 bp, Unknown
  Description of Unknown: LeftRegion for integrase B10399 sequence
ggggcgcagcgacgcgctctacaacctgattgccggagcgattgggctgcttgtcattgcggccgttgtccgcttcgtctaccggctgatcgtgggcgcggcgtgagcacgggcggcgtggcaatcctgtgcttcgccgccagtcttttcaccggggtcgccttgacgctgctctacgcgtggagcggcatgctcttcccatgaccgaacgccgccgcgccatcggatacataaggcaaagcgaacagcgcccgggtgaa

SEQ ID NO: 23399 - DNA, 260 bp, Unknown
  Description of Unknown: LeftRegion for integrase B10400 sequence
agaccgttgaatatgttctgaacaccagcagcaaaaagattcacaagccgacctgcaacgacgtgaaaaagatcaagccggagaattattcgaccaccaccgacattgattcatacctctcacaaggttatacaaaatgcggccattgctggtaaaaagaaaaaagcccgcctcaaagagacgggccgagggaatgagctatgaaagcaaatcaagcggcggcgcagaaaaacgccgtgatctacgcccgcttttcctcc

SEQ ID NO: 23400 - DNA, 260 bp, Unknown
  Description of Unknown: LeftRegion for integrase B10401 sequence
ttaacatatgatttacatacagtaattaaagaaaacggtctaatattttaattaaaaataataaatatataagcatatagaaagaccttgaacacattgaacgggaatacccttcaatccgttgtgctgcaacggtttgacgggtgttcaaggtaaaattgaccttgaacatcacattgaacagaaagaagggatgagaaatgacaaagtatattgaatatctgcgaaaatcgcagatggacagggattttgaagatgtc

SEQ ID NO: 23401 - DNA, 260 bp, Unknown
  Description of Unknown: LeftRegion for integrase B10402 sequence
tatgcccctattacatattcaggggagcagctgaatgaaataaggatcctcggaaaggcagtgatgctgcagcgcgtgatctccagcaagcggaagttttgattacatggaccgaagaccaggaggagatggataatctcagcagttatgtggaatcctggtcttaccgaataacaaaaagtcggtagggtgagaaagaaatgaagaacgcagttatttacgcgaggtattcctccctcgcgcagaatgagcagtcgata

SEQ ID NO: 23402 - DNA, 260 bp, Unknown
  Description of Unknown: LeftRegion for integrase B10403 sequence
ccactcgcaaaggttctgaggtgcgccccggaatatttgcttgggctcgacgagacgcaggacagcaatgcaccgagcgttccggccgttcccgttctctcccccgctgagcaagacctccttgatgcttaccgcgccgccactcctgaagcccagatggcggccatgttaacattaaaagcaaacagaaaggaacagccatgaacgccgccatatacgcccgcttctcctcctccggccagcgcgaagagtccatcgaa

SEQ ID NO: 23403 - DNA, 260 bp, Unknown
  Description of Unknown: LeftRegion for integrase B10404 sequence
ttatagataatagtatatatgtatttagatatatcgatagtatttatgttaaacgcctagtgcaaaatgtcgaccaaattattgttaaatcagataataaagagtatcaaccacgctatataacacttgaaaattgtgataatttacaaattataggtaaaatagttggtttaatgagagaaatatattaagggattaccatgcctgcgatcaaaaaaacaacatcaaacacaataaaaaaatgcgtaatatatgcccgc

SEQ ID NO: 23404 - DNA, 260 bp, Unknown
  Description of Unknown: LeftRegion for integrase B10405 sequence
tatgcccctattacatattcaggggagcagctgaatgaaataaagatcctcggaaaggcagtgatgctacagcgcgtgatctccagcaagcggaagttttgattacatgaaccgaagaccaggaggagatggataatctcagcagttatgtggaatcctggtcttaccgaataacaaaaagtcggtagggtgagaaagaaatgaagaacgcagttatatacgcgagatattcttccctcgcgcagaatgagcagtcgatc

SEQ ID NO: 23405 - DNA, 260 bp, Unknown
  Description of Unknown: LeftRegion for integrase B10406 sequence
gctacggcgggcgctgaggcgcagcctgggcagcaggtgcggggctacccgctgggcacccatcgccgccgcacgggcacgctcgaccgcatccttgacggctgggctgcctacgtctggacgaacccagaccgcaacgatcacgtgcggctcgtgatcatggacctgtcgacgctcgaagtgctcgacgaggcgtcgaagtgaccgccgcccgcaacctgcacgaggcgcccgctacggcgggcgctgcggcgcgtaag

SEQ ID NO: 23406 - DNA, 260 bp, Unknown
  Description of Unknown: LeftRegion for integrase B10407 sequence
attacccaaacaagaaacgctgattagattagcggatgaattggattgctctgttatggattttttcgctgacgaagacgatattgaaaagagaatccctgaaaacgaagatgaggctgatattttaaaaatttatagaaaactatcacgtaaacaaaaacacgccttcatgacaatggtgtatcagtttgcggatgaaaatggagtgtgatcttatcaatgctgtaatttacgctagatattctagccataatcaacga

SEQ ID NO: 23407 - DNA, 260 bp, Unknown
  Description of Unknown: LeftRegion for integrase B10408 sequence
gctatatatgatttcattaaagctgtagcaacagaaactgattcttctactgaaaaaaagaaaatctacgaaacagaagatgcataaataaaaaccccgccactcatagagaggcagggagcaaacaaaaagaatttaatatgatattctacactgctattatacaccattaatagcaggaaagcaataaggagtagtaaatgttttcaaaagaaattttagtatatttgaggaaatctcgtgccgacgatgtctatgag

SEQ ID NO: 23408 - DNA, 260 bp, Unknown
  Description of Unknown: LeftRegion for integrase B10409 sequence
gacctcctcgcgctgcccgtgcgcggagagttcggacaacgcgaaatcctgctcggcggcaagcgagtgatcattccggtcgcgccgcagccggcgctcgctttctacaccgaaccggacacggttttctgcgcaaccgacgcgcagggcgagggatggattctgtcgatggacgccgacggcttgcaccgccgccgcgcatgacggtcgcccgcatctacgcccggttctcgaccgagcggcaggacatcacatcgatt

SEQ ID NO: 23409 - DNA, 260 bp, Unknown
  Description of Unknown: LeftRegion for integrase B10410 sequence
atagcgtaatagctccaatatttgataggaggacagcgaatgaaagttatcatctgcgacctagtagagactggtgcacgttggttattcatcggggacaaagttcttattagtcaaggttttattgatgatttcgtaaaggaacatccagaaataaaaatgacggctaaatagccgttttgacatcaagggggttacagatggaatctgttgcaatttatatacgagtatcaacgaaaaggcaagttgataaatattcc

SEQ ID NO: 23410 - DNA, 260 bp, Unknown
  Description of Unknown: LeftRegion for integrase B10411 sequence
gtgcccggaggtgacttttgtggattctccgcgaccctccggagccacccctgcggcgaagccgccaacctgcacacagtcataccacctggtgaaatctgaccctgtcctagtgttaattcagttgaagagtgaataaaatctaggatacggacttgtaacacgcctcaagcccggggcagtgagtccgacatccgaagatgcgcgcctactcctatgtccgcttctcgtctgagaagcagtcgctcggtgactcacac

SEQ ID NO: 23411 - DNA, 260 bp, Unknown
  Description of Unknown: LeftRegion for integrase B10412 sequence
atctcccacctgcttgaaatattcatcgaagctaacgcaattaaagccaagcaggccatcgaaaaggctgctgttttggaagagcagaaaaaacaataaaattaaaatcccggcaaagaaaaaagatgtttacattctcgcattctatagtataatatagttgtaccagatcgctacttaatatatatgagaggtatactatgaatatcgccgcttattgccgggtctctactgataaaactgaccaacttaacagtttg

SEQ ID NO: 23412 - DNA, 260 bp, Unknown
  Description of Unknown: LeftRegion for integrase B10413 sequence
tagacatgaccatcagattatttttagacctgattcacatgattcaagattcactgattacatagtatcagatgaaaatgaaagtctaaaaatacatggaaaagtggttctttacactgtcgaattagattaaatctctagctagatatttaaccaataggtgggtcgctcccacctattttctttagggaggtatttacatgagggttgccaactattaccgagtttcaaccaagctgcaagaaaagaaattcagttta

SEQ ID NO: 23413 - DNA, 260 bp, Unknown
  Description of Unknown: LeftRegion for integrase B10414 sequence
ttccctcggtagaatacaccagctatgggccggatcggagccagccgacacggaaagacaaggagcgaccttaaagggggtgatgcttcaaaaaacgcaaaacattctatataaagggggtgaaactttcaacattgccagcaaacattgcaactatactttgaaactatgttgcaatcacacacaggaggaaagacatcatgccagtcaacgtattatcggatgaagcatacatcatctacttgcgtaaatcacgggcc

SEQ ID NO: 23414 - DNA, 260 bp, Unknown
  Description of Unknown: LeftRegion for integrase B10415 sequence
tatgcctacttctactgtcaataaaatatgtgcagtcttgaatatcaaaccatcagagttgttaggacttacccaaaataactcatttgagtatgatttaaaggacattctgacttcagttgatgatttaccctatgaagcaaaaaaagacttgctagacctattaaaacaacaaataaatctatgtaggagattatacaatgataaggcgaaaaatcataatgtacttgagaaaatcaaggactgacaatcaatctgaa

SEQ ID NO: 23415 - DNA, 260 bp, Unknown
  Description of Unknown: LeftRegion for integrase B10416 sequence
gtctggcggaaaattttcccgatgccgtattattccgaatgttattgtcatgttgagagcgtcaggaagttttctgaattgtcccacggcgaagatttcgatctgccgccccgtgattttgccgaccccgtgaaaatcctggaatcatggcaaaacgaccccaatccattgatcccattaccaaaggaggatctcaccccatgaaatacatgctctatgctcgggtaagtccgaagggatccgactggcacgcggaagaa

SEQ ID NO: 23416 - DNA, 260 bp, Unknown
  Description of Unknown: LeftRegion for integrase B10417 sequence
aacaaataattataaacttgaaaagtcatacataagcaaattgggacttaaagtgaagagttatgtgatttgctatgatagcgaagaaagtaaagtatctgtacgtgaggaaataactaaatcttgcttaagaatttttgataaaattaaaggataacaaaaatgctctttaagtttacattcaaacgtgatataatataatgtatcaaaagaaaaaaggacgagtattaaaaatgatagcaatttattgtagacaatcg

SEQ ID NO: 23417 - DNA, 260 bp, Unknown
  Description of Unknown: LeftRegion for integrase B10418 sequence
gaaatatttcaggaaatgggggacgattacaacagcctgtcaccgaaagctcggcagctgttcggaattttcgaacagctgaacgatgccggtcaggacttcctgatcgcccaggccgaaagcatcctctcgcaaccggtttttcgaaaagacggcgctgcaaggttggcagaataaattatttataatgtgagtgaatgatgaatgatgttttaattggatatgcccgcgtatcctcggaggaacaggcccagcacggc

SEQ ID NO: 23418 - DNA, 260 bp, Unknown; identical to SEQ ID NO: 23306
  Description of Unknown: LeftRegion for integrase B10419 sequence

SEQ ID NO: 23419 - DNA, 260 bp, Unknown
  Description of Unknown: LeftRegion for integrase B10420 sequence
acgcccgcaaggcgctgggaggcggcgatgggcgcggctgagaaattcccggctgcattcctcgctctgctggacgccctggcggtggctgaagtcgaggattacatgacagcccaggccgcgccgggcaacgattctgacccggcccgaccaaatcactccgctaccggcgacgaacgagaggcggcatagtctcggccatgcgcgttgccgcctatgcccgctatagctcagaccagcagcgcgatgcctcgctggat

SEQ ID NO: 23420 - DNA, 260 bp, Unknown; identical to SEQ ID NO: 23203
  Description of Unknown: LeftRegion for integrase B10421 sequence

SEQ ID NO: 23421 - DNA, 260 bp, Unknown
  Description of Unknown: LeftRegion for integrase B10422 sequence
tgaccagccactaggatattcagctagagattcacctgactattttgtgggagtaggggctgaatatcgttggtgatcattaattatttaatttaacaaatttacaactttacacttagtgtaaacattcaattttaaacagcttgcattttgagtatgagggggcatacactctcgctatcctacgctcaaaggtgaatatgcaagctgctttatatctcaggtcttcaaaagaccgttcagacgtcagtatcgatgcc

SEQ ID NO: 23422 - DNA, 260 bp, Unknown
  Description of Unknown: LeftRegion for integrase B10423 sequence
tcgaagctgttcacggggcgaatagcagacccgacatggcaaaaggctctcacgatgattaaggctctcggcatgaccgctgatgagttcagagaggtagaagctcaattagagagcgaccaaaacaaaaaagctcgctgagtggtcaagactcagcgagctttagtccagtcccaaacggcagaacggacaatcacattatggcagaaaaagcggtaatttacgcgagatttagctcagacaagcagcgcgaggaatcg

SEQ ID NO: 23423 - DNA, 260 bp, Unknown
  Description of Unknown: LeftRegion for integrase B10424 sequence
ataactgctccgatagatgtgaaattgcaaaatatttaaacgtaactcttgattatttaaatgaagcaattagctattatgaacataaatatgggtctatttatagaatagatgattatattatatatttttcccctaaattttatataggtaaattcttttaattaatatatttaaattaaagtgaggtggcgaaacttatggatacagatattttcgcaatatatcttagaaaatcaagaaaagatttagaaaatcaa

SEQ ID NO: 23424 - DNA, 260 bp, Unknown
  Description of Unknown: LeftRegion for integrase B10425 sequence
gagcgcggcatcatcgtcaacctgaagcgggacacaatcgagaaaatggcagattatttcggagtcctgccgagctacatcatgggaatgtccgaagagcgtgtccgtctgacagatgaggagacatctctgatcattgccttccggaaggctgatccggatctccagaaagcgatcagactgatgctgaaggtggaagcatgacagccgacctgatccccgctgtcatctatgctcgttactcctcttccggacagcgt

SEQ ID NO: 23425 - DNA, 60 bp, Unknown
  Description of Unknown: LeftRegion for integrase B10426 sequence
gacaccgaggatcggcaagtgagatcccttgccgaccagctctccgagttgcgcgagctt

SEQ ID NO: 23426 - DNA, 260 bp, Unknown
  Description of Unknown: LeftRegion for integrase B10427 sequence
tggtggaaaggaattttagcttatgtagtggcgagaataattctcactttgtttgaagtttgggtatctaattttataaccggatttatcgtttatagatataatagatcgaacaatgagtatattgatatctaatcaaattaatttgccttgtaagcaaatttaaattaacaaggaaaggcgttgtaacaattataggcatggaacggaccgctatatacttacggaaatcgcgcacggacatagaagctgaagcacgc

SEQ ID NO: 23427 - DNA, 260 bp, Unknown
  Description of Unknown: LeftRegion for integrase B10428 sequence
aagatttgctctgctttgcaaatcaaagaatttgacgtggaaattgtgaaaagcaaaattgaaaacattctggtgtcaccgaattggctgactttccttttcaaagataatacggagaaagccatttcttggaagaattattccagaagtgaaagctggacaccggagatgcgacaggctgccgcagaaaggagcagaaaatgccaaaagtaaccgtcattccgccgtctatcaatcggacaactcggcagtccacaacc

SEQ ID NO: 23428 - DNA, 260 bp, Unknown
  Description of Unknown: LeftRegion for integrase B10429 sequence
cgtcatcgtccgggtgctcgcgtgaccgccgagcgccagcagcagcgaccgcacctggtgatcgtgccgtccgaggcggaacggccgatcgtcgacccgttcctcctggcgctcgccggtctcatccggtccgcccacgagaaccgctacgcccgccgcgctacgctgaccgccatggacggcgggaaggcacgcgaacggtgaagcgactgccgcgctccgtcgacgcactgcgcggcctgcgcgcggcacgatgggtg

SEQ ID NO: 23429 - DNA, 260 bp, Unknown
  Description of Unknown: LeftRegion for integrase B10430 sequence
taagacgatcagcccggtaacgctggccgtcgtgccctagagactcccggcgttttccgccgcgcaagggtcctgcggcgggccggtcgagagcccccggcgtccccgcttcccggacgccgggggcattcgctttccccggtcagagtgtgtatgctgctttatggttcgcgttgacaacaccgaaaggaccatacacaatgcaagacatgccaacttgcgtgatctacctgcggctttccgactcccggaccgaggag

SEQ ID NO: 23430 - DNA, 260 bp, Unknown
  Description of Unknown: LeftRegion for integrase B10431 sequence
ccaataaaacttattttatagtaaaaaacaaccgccctgccggcaagcagaacggatgttaataaataaggtgcatttatgatatacacccaaaaaccaattaaagtatatcatattgcactctgatttgtcaagtgtaaatgcggtaagtatatcttcccgcttatgcttgcatacaattaagtaaaggagaatgcaatatgacagaatacaatataatgtatttaagaaaaagccgagaagacgaaaaagatccaacc

SEQ ID NO: 23431 - DNA, 61 bp, Unknown
  Description of Unknown: LeftRegion for integrase B10432 sequence
ttattgggggggggcggtcatggcagcgtacatttatgcacgggtgtcgacagtggagcag

SEQ ID NO: 23432 - DNA, 260 bp, Unknown
  Description of Unknown: LeftRegion for integrase B10433 sequence
atatctgtacagagggaatctggtagatgtctgtgatacagtaaaggcggcagacggaaaagcgtggtattatatccgcattgcaggaaaatactatggatttgtttcttcagattatatcgtgaaggcataggaatatggctgatggtcagtaatggctgtcagccgtatttttttcagtttatgccaaggaaagaaaggtgaaagggtatccaagaaaacacttgctattattggctttcagagtgatatatagacta

SEQ ID NO: 23433 - DNA, 260 bp, Unknown
  Description of Unknown: LeftRegion for integrase B10434 sequence
gaagaaaacgggattaaaattaccccaatatctaattgaaacaaaataaaaaaaccgccctgcgccaacaggacggtgtcaggcatgagatcgtaatcccttacccccagatatgttaaaattaacacaccttgatatcatcgttaattttagcatatcctttttgaattgtcaatattttatacaaaaggagtgctgaaatgaagatagcagcggcatacattcgtgtatcaacagacgaccaaattgaatacagtccc

SEQ ID NO: 23434 - DNA, 260 bp, Unknown
  Description of Unknown: LeftRegion for integrase B10435 sequence
tggacatgagaagacaggttacagttataccagcaactggaggcggcagaaccaggaaaaagagcagcgtaaatcaaaatagaaagatccgcgtagctgcttactgtagagtatctacagaacaagaggagcagctcaattcgtttgagagccaggtagaatactacactaaatatatcggagatagacctgaatatcagatgattgacatatatgcggatgaaggaattagtggtacaaataccaaaaaacgtgaaggc

SEQ ID NO: 23435 - DNA, 260 bp, Unknown
  Description of Unknown: LeftRegion for integrase B10436 sequence
ataccgaccgtgctcggtgggtgtcgatagacgcggaaccggccggattatctgcagacgatccgcgctttgcagcgcagaaaaataaaaaccagcgccattggaaagcgtcgctccgtgacctttccgagctggccggctttgatgatgcggtcgtggccgcgtgtcagtacatagaaagctattaaggagggatatatttgaacggtgttatatatgcgcggtattcggaagggccgcgccaaacagaccagagcata

SEQ ID NO: 23436 - DNA, 260 bp, Unknown
  Description of Unknown: LeftRegion for integrase B10437 sequence
agaaattgccacactttgcaatgtgtccatgcaggcggcagaaattcgctccagaaggatgcaaatcttgcttgcaagaaataaatttctgacgcatccgctggaacggcaggtatttgaacagtttcaacagtttatcaacaatcagtaaaaaaaccgccctgcaaggaattgtggggcggtacaattaaggagcgattatgaaaagagcagtgttttatggtcgttattccagcgacagacagaccgaacagagcatt

SEQ ID NO: 23437 - DNA, 260 bp, Unknown
  Description of Unknown: LeftRegion for integrase B10438 sequence
cgctatgttctttaatgtagatcttaattacatgcttggaaatacagatgtgcgcagatcttatggaggtctgcaggaatactttgatgctaagctagaagaactgctgactgatgatgagcttactcttgtttttgcttttagaaaagcgtctccagaattgaggcaggcaactctgcgtatgctgggtgccaaataagatggtaaaagtagataagaaaataaatagaggagttatatatgcgagatacagcgaaggg

SEQ ID NO: 23438 - DNA, 260 bp, Unknown
  Description of Unknown: LeftRegion for integrase B10439 sequence
tcatgcggcagtgttgtcgtcagcgaacggtctgtcccttccttaactgacgttgaatccgaactactccagcagttacgcagactggatgaatatgaccgcggcaaagtctccggatacatcgacggtctgcttgcttcgtcaaaatatataaaaacagacgcagccatttctgagactgcttaaatgagtttgtgagtatggaaaataatagagctgctatatatgcccggtattctgctggatccggacagacggat

SEQ ID NO: 23439 - DNA, 260 bp, Unknown
  Description of Unknown: LeftRegion for integrase B10440 sequence
aaagatagcgttatcagcatgatcaccgcgaaatattacaatgaaacctatcagatggacgattccgatctgttcaccctgacaacaaaccagcctgagattggcaagatcgatctgagcaaatacaccagcatcgagatcaccgggcctgttgtgttcatggcttataccggcctgttcaactgatcggagattccaccatgaacgccgtaatctatgcccgtttctcctcctccgcacagcgagaagcatcaatcgaa

SEQ ID NO: 23440 - DNA, 260 bp, Unknown
  Description of Unknown: LeftRegion for integrase B10441 sequence
gctgccgcacgcgacctacgggctggccgtggacggcggcaaggtggtgaccgctgcgccgattggctggtgggcagtgggcaaggatgagcagtacgtcgcggactacctgcggcgccggggcgcccggctggttccgctggacccccgcgaaggtgttgcacctaaatagcaccccaccgtagagagacgctatataggtgcaatacagtcggggcatgaccgagaccgggtacgacgccaccacgtggcagcagatc

SEQ ID NO: 23441 - DNA, 260 bp, Unknown
  Description of Unknown: LeftRegion for integrase B10442 sequence
aaaccagaggcatgagattgcttgacgcatttccaggcgcggctcggccactccatccggcggtccttgaaatgcttgaacctcgtaagagccaaacgccaaaagaagacgccgaaatggttgtactttggcgtaatgctaccctggctgcaaaacgagctgctatcgctgtccttaaatctatggaggaactcaaataaatgaacgcagtcgtctacgcccgcttctcatcctccgcccagcgtgaggcatccatagag

SEQ ID NO: 23442 - DNA, 260 bp, Unknown
  Description of Unknown: LeftRegion for integrase B10443 sequence
gttcagaaaatagctgattttttaggaactacaacagactacttagcaaaaggatctgaatctactgaagaaaactcttcttttgttgaacttgaacgagtatatacaattctgccagtaaagcaacaacatgagttaatgaactttgcttattatcttctagacaaaattgaagatgaaaaatctggaggattcaaaaaatgaacaagtctgtattatatattagatacagcgacgagaagcaaaatgaacagtctgtt

SEQ ID NO: 23443 - DNA, 260 bp, Unknown; identical to SEQ ID NO: 18323
  Description of Unknown: LeftRegion for integrase B10444 sequence

SEQ ID NO: 23444 - DNA, 260 bp, Unknown
  Description of Unknown: LeftRegion for integrase B10445 sequence
taaaaaaatttaaatggaagaattataatattacagctatttttaatgggaattttaatgtagatcgattagcgaaatcaattattgaaactgtagatgagtttgaagcaaaaaagaatctcaaaagaaggccttcctaatatggctttctttttttataataaaatgtatacaagttttacttgaggagatgtcatgtaatggatacaaaaggaaaaatcgaacaaattaaagacgttgccattctcctaagaaaaagt

SEQ ID NO: 23445 - DNA, 260 bp, Unknown; identical to SEQ ID NO: 18323
  Description of Unknown: LeftRegion for integrase B10446 sequence

SEQ ID NO: 23446 - DNA, 260 bp, Unknown; identical to SEQ ID NO: 18323
  Description of Unknown: LeftRegion for integrase B10447 sequence

SEQ ID NO: 23447 - DNA, 260 bp, Unknown
  Description of Unknown: LeftRegion for integrase B10448 sequence
tcgttttatgctttttgttaatgtctttattttttatgtattcttttgtactttcaagattatggcgtaagaaaattgcaatacgattattgttgtatattcaagataatgtgaccttaattgtctttttaaataaaaattaaacaaaaattatatcccaccactaaggtttataaaagcatacgttagcaggtgtcaccatgaaaaaagccatagcatatatgcgattttcatcaccaggtcagatgtctggcgactca

SEQ ID NO: 23448 - DNA, 260 bp, Unknown
  Description of Unknown: LeftRegion for integrase B10449 sequence
tcatattaatttactcttaacacgcaatgtaacttacactatgcaacggctacggttgagttctattagtcgttagcacgcttgaccatgcgtctacccattctatcacatatagaacctttgtgctagtagacacgcacgattgaccagggatttgcccgattcttttaacgcttctcacttgatgagaattaccgcccatgcccgacttctccaccctcacccgcttcgccctgtatcgtcgtgtcagctcgcaggag

SEQ ID NO: 23449 - DNA, 260 bp, Unknown; identical to SEQ ID NO: 17848
  Description of Unknown: LeftRegion for integrase B10450 sequence

SEQ ID NO: 23450 - DNA, 260 bp, Unknown
  Description of Unknown: LeftRegion for integrase B10451 sequence
ggtaggacgatcagcccggtaacgcttgacgtcgtgccctagactcccggccttttctgccgcgcaagggtcctgcggcgggccggtcgagaggtcccggcgcccacgcttcccgggcgccggggccattcgctttccccggtcagagtgtgtatgctgcttcacaggtcgcgttgacaacacctagaggagcatacacaatgctagacatgcccacaacagacctttacctgcggctttccgactcacggaccgaggaa

SEQ ID NO: 23451 - DNA, 260 bp, Unknown
  Description of Unknown: LeftRegion for integrase B10452 sequence
gaatagttgcactggtgcaatttatcccattgtggaataatgccgaataagtgggattgataacgaataagtacgatttgatgacgcatttcaagaaaaacgggcatttttcgggatgagttgtacatttttcatcccaaatgtgcatttcatttcaaaagtgggacattgtacccacattgtgctacgcggaggaaattatgatcggagtgatttacgcaagatattcagaagggccgaaacagacggatcagtccatt

SEQ ID NO: 23452 - DNA, 260 bp, Unknown; identical to SEQ ID NO: 18276
  Description of Unknown: LeftRegion for integrase B10453 sequence

SEQ ID NO: 23453 - DNA, 260 bp, Unknown
  Description of Unknown: LeftRegion for integrase B10454 sequence
ctgggcgcgaaatgggagcgaccgatccgagattggatcgacccggtcgccgtggacgaggccttcgacgccgccggggcgatggtaaccgccgacccggatagcggtccttacgtgcttcgagtgatggagatgctgaagctcgcgacgtccggcccggacttccgtcccgccgccgcgccgacggctgatcagtagccatgcgcgtcgccctctatgcccgttttagcgattccgagctgcagaatgaacgctcggcc

SEQ ID NO: 23454 - DNA, 260 bp, Unknown
  Description of Unknown: LeftRegion for integrase B10455 sequence
taaaagaagcggatggagtgggagcatccaaatggggattcttaaaaagcaaagccggatggatttcccttgattacgcaacaaaatgctgataagcagccggaagaaatagtgcttccggctttacatatatcagcaaatatagcttgcaaattttgccctttagagtgatatatagacatacgaaaggaggccaaagtatgcaggtaaatgtaataaagcccgtagaaaagaccaagaaaaaactcaaggtttgtgct

SEQ ID NO: 23455 - DNA, 260 bp, Unknown
  Description of Unknown: LeftRegion for integrase B10456 sequence
acgatgagctttttagacctgcttatcagcgctccgcaatctctcgatcagggtattgttagcgctctccgcgatcgtacaagaccgcagaccccaaaggaagattctcagatggtggtcctgtggcgcaccgcgtccatccaggctaaacgcgcagccatcgccgtactggagtccatgaaggaggcggatctcaaataatgaacgccgtcatctatgcccgcttctcttcctccgcccagcgcgaggcatccattgag

SEQ ID NO: 23456 - DNA, 260 bp, Unknown; identical to SEQ ID NO: 23403
  Description of Unknown: LeftRegion for integrase B10457 sequence

SEQ ID NO: 23457 - DNA, 260 bp, Unknown
  Description of Unknown: LeftRegion for integrase B10458 sequence
cgaagtgcttagattataaaactatatgctgagaaataagatgatgctagaggaatgttttttatcttaaattttccgtgtaacaaatatggaaacgataattgtgtaccgcttttctaaaaataacacaagaaatatttttctggtatttatattttttgtaattttgcaacataaagacttataatatgagcaaaattatgaaagcaattattctagcacgtgtcagtacagaaaatcagtcgctcgattcacagata

SEQ ID NO: 23458 - DNA, 260 bp, Unknown
  Description of Unknown: LeftRegion for integrase B10459 sequence
tgtcgacgctaataacatacacacacaaaagagactgcagaaaatgtattttttgcgtagggcaaaaagacggttattacattgacggtcgctgcgcattgcctgactgcccgcagttaatccccgccagccggctgaaagcgatttccgaacgtgcgcaagcgttgcgcgctgacacgtgtgatcgttaggaggcttttatgttacgcgcagccatttacgcaagatattccagcgacaaccagcgccacgaatccata

SEQ ID NO: 23459 - DNA, 260 bp, Unknown
  Description of Unknown: LeftRegion for integrase B10460 sequence
attaaatctaatttaataacatcattaatttaatcatcttattctaattatatcatttttgttaatttttatacatactaaatccataataaatattattttttttaaatttttttagttctaaaaggatattctacactctttgtagaatactatatctatccctattctccataacatcattataaggagtaaatatcatggaaaataaattatcagaaatcataaaggatatagcaatatatcttcgtaaatcaaga

SEQ ID NO: 23460 - DNA, 260 bp, Unknown
  Description of Unknown: LeftRegion for integrase B10461 sequence
attaatccaggtgatgctcgttattgtgaacactgtggggaagaaacattattaacaagacttgggctattaatggcatgggaggaagttctagcggctaggaaagaaatagcagcaggattgcaaccaactatcatcactaagttagaagatgatatcccgttttaggaactattaaagcttaaacaggaggtgaaaccatggaatcggtcgctatctatatccgtgtttcaactcgtaaacaaatggataattactcc

SEQ ID NO: 23461 - DNA, 260 bp, Unknown
  Description of Unknown: LeftRegion for integrase B10462 sequence
gctgcttataataatgatttgattattaggagtaaatttgaacttcaagctgattattttgcccttaaactgctagatatatctatagacaagtattactatgaaggatgcacctttgagcaagtagctaagagcttgtgcgtttgtgaagctattcttgaatgtttgtatagttagttattgagagaggaggttttgttatgcaaactgctgttgcttatgctagattttctagtgataaccaaagagaagaatcaatt

SEQ ID NO: 23462 - DNA, 260 bp, Unknown
  Description of Unknown: LeftRegion for integrase B10463 sequence
ccgatccttcgatgatctggattctttcgcctccgagttcacctaccaagtatccgggcaggcatatcgtatcatcgacctcatggcacagcggggctatctctccttctctgacgccgggaaactctcggatgagattgaccgaaacttgagcaacgagcatttcttcgtgttctgcgctggagatcggggtgattcggttgagtaaacagagcaatgctgttctgtacggcagggtcgccacgaaagaacaaatttcc

SEQ ID NO: 23463 - DNA, 260 bp, Unknown
  Description of Unknown: LeftRegion for integrase B10464 sequence
taaaagagaggtaaagattgaagagtattacatatttgatttaaagactaaagaacaacttttttcaactaagaaaccatctaactggacacctattgaaaaagattcgccagttgaaatagttgttacatatatattccaacatcatccagaaacaaaagatatcaaacattaatttgagatatttaacaggtgataatatgagagtcgcaatatatactcgcgtttcaactgaattacaagctgaaaaaggttactcg

SEQ ID NO: 23464 - DNA, 260 bp, Unknown
  Description of Unknown: LeftRegion for integrase B10465 sequence
cgctttttgacctaggataacttgcaacataacttgcaacctacttgcaatctgattgcaacctaggataacttgcgattatcttttgaattcgcacggattaacgaaagtaaatgcccgcccgctttaattggagattggtttttcgtctccaattaaaacaatctttagtcaatccaaaaccaatggaggcttactatatggatcaatacgccctataccttcggaagtctcgcgcagacgtagaagccgaggcgcgg

SEQ ID NO: 23465 - DNA, 260 bp, Unknown
  Description of Unknown: LeftRegion for integrase B10466 sequence
gctggcgcagtgttggcgatgtgatgccgttttcaatcgtgttcagcgttgacttgctgattcctgtcagggcttccagctgcttcaaagtcaagtgtctgtctgttcgtgcctgccacgttaggatttccattgcgtcatcctcctagttttgattatgtacacgcttcaggcactctatacaaataaaaaaggaagccgtgaccagcgacttcccttgcgaaacattgaaacaaaatatatcgcggaagaccgcccac

SEQ ID NO: 23466 - DNA, 260 bp, Unknown
  Description of Unknown: LeftRegion for integrase B10467 sequence
gtctgcattgtcacgcttattttctgtattgttgacgtaaacaaacacaacaaaacagcagaaaacctttttccggattctgccgtccaggaagaatatcgcaagcgcaagtcattaacgattgagatgtatcctttttactttcttcttctcgctctgatcggtacatttatcacaaccatactgtaaagggatttactatgaaaacagccgtcgcttacgcccgttattcctccgccggccagcgcgatgtatccatc

SEQ ID NO: 23467 - DNA, 260 bp, Unknown
  Description of Unknown: LeftRegion for integrase B10468 sequence
aaagtcctcctcaacatcttcaaaggcacaaccgaggagggaagattgttaatgattcaaagtatattaaacatccgagacgatatagaaaaaaaccatacgggagaaaatacggcttctgttggatgaatcaccaagcaaaaaggtcataccttttgaggtggtacaactgtatggaagattgaaggagttagaataatatggatgtatgtttatatatgaggtacagtagcgaccgacagaccgaacaatccattgag

SEQ ID NO: 23468 - DNA, 260 bp, Unknown
  Description of Unknown: LeftRegion for integrase B10469 sequence
acgcctggcgtagatttcaccatcgtcgcacggcttgagtcggccgcaggggcgatcgtcgattacttcctgctcgccgccgcagacctggccggcggtccaatctacctcaaggcatccaacctggagcgttacagatcgatcaggtaccttgtcctgcgagagatgttcggccctgtcggcgcgccggtggcagaaccatgctgaaggcttattccgaccgggccgctctctacgtacgggcttcgaccgaacaccag

SEQ ID NO: 23469 - DNA, 260 bp, Unknown
  Description of Unknown: LeftRegion for integrase B10470 sequence
taatgatttcttattaataaaatcattttacaagttggtgattgttagtccagaagagctggttttcgttatatctggtagcaaggataccgaagagctgtcttcttgcattgatgagttgaacattataccctcgttgttttcgaagttgtacatcgattacgatctgcaaaaaggtattaagtatcgggtggtttatcatgtctagtgtcagtgtcatcccagttgatattgggtctgttgttcgcaaagtgagagtc

SEQ ID NO: 23470 - DNA, 260 bp, Unknown
  Description of Unknown: LeftRegion for integrase B10471 sequence
tgttcacagctcggctcctggtaggtcaggtgtcgggatgggccctgtccggcggtcgaatcgccgtgatggggccgtgtcatgaaaaaagtctgttcttaagacttcatccaggacggcatgaagagatagtaccgcacttctgcggctaccataagcccatggcgactgaacccccatcctcccgcgcccttgacttgatgtccggccgcgcctggctatatgcccgtgtcagcaaagacctgcgcgaaggctcctcc

SEQ ID NO: 23471 - DNA, 260 bp, Unknown
  Description of Unknown: LeftRegion for integrase B10472 sequence
caaggaccacattttctgcggttcatgcggttcgaagctgaccagaatcattggtaagcatggcgacacagtgtggacctgcaatgggagaaagcacaaaggaagggccttctgtgagggagtccgcatctcagatgatgtgatccggggctggggcgaaattaaaaaggatatttttatcagaatgaaggaggaccgtcatggccagagaagttacagttattcccgccacaaagacgccacaggcaaatggcaaaaag

SEQ ID NO: 23472 - DNA, 260 bp, Unknown
  Description of Unknown: LeftRegion for integrase B10473 sequence
tggcacaatcacgcctacgcctatagttccaatcgtcgagggttccgacgagtacaaaacagcaatatatgcttttaatttcgccgttcaaagtggcaaaatggccgaggcgcaagcaaaatataatagtaagcataagaaataaaaaaagccccctatcaagggggctatacttatacaatttgaaaggaaatcacacaatgaataataccgatttacaaacaggcgtgatatatgcacgctactcgtccgataagcaa

SEQ ID NO: 23473 - DNA, 260 bp, Unknown
  Description of Unknown: LeftRegion for integrase B10474 sequence
taatgttgatgattataaaacattattaaatgctgcgttaaacgacataaattcaaagattgaaaagggctatgtatataagcccagaggaaagagtaggaaataaaaaatccccgcccggcgctggaacaccgaacggggaagaagctgtgatacaatcacaaccttagacaagtttattgtatcatagctccctgaaaatgtcaaggagtgatttaaatttgaaaaccgccgtaatatacgcccggtattcgtccgac

SEQ ID NO: 23474 - DNA, 260 bp, Unknown
  Description of Unknown: LeftRegion for integrase B10475 sequence
attatcaaaacgatactatcaactaatcccgtaaggagatactatggagataaaagagattgtcgccaacaatcccgccgataaggagacagtagaagaacagctctacaacatctttataaagtattgttgactaatggctgatggtgtgctataatataaaggctaccatcagcctcttattatataggaggtatgatatgattgcaatatatgcaagaaaatctgtttttagagaggactctatctcaattgagtct

SEQ ID NO: 23475 - DNA, 260 bp, Unknown
  Description of Unknown: LeftRegion for integrase B10476 sequence
gcatcctcgaagtgcttagattataaaactatatgctgagaaataagatgatgctagaggaatgatttttatcgtgtaacaaatatggaaacgacattgtactttcatttccataaaagtaacacgagttaaagtatgtaaaatcttgttttaattaaaatataatatataattttgtatcataatcaaatgtttaagttatgaacaaagttattttattttcaagagtttcgacattaggacaggatttaactcagcag

SEQ ID NO: 23476 - DNA, 260 bp, Unknown; identical to SEQ ID NO: 18150
  Description of Unknown: LeftRegion for integrase B10477 sequence

SEQ ID NO: 23477 - DNA, 260 bp, Unknown
  Description of Unknown: LeftRegion for integrase B10478 sequence
caaacctgaaataagaataaacttaaagaaataaaaaaatcccgtcccctgttgtaacaggaaacgggaatgacggcaggatcgcgactcctccgccacttttgtaaatcgtttgtagatgcacaactatgtgcggggctgatttacgtatttattataccataatcagcccttttttgataatgaaaggattgatttttatgtcaagaaatgcagtcatatacgctcgtttttctagcgacaaacaaagagaagaatct

SEQ ID NO: 23478 - DNA, 60 bp, Unknown
  Description of Unknown: LeftRegion for integrase B10479 sequence
agccacagtcaaagagaggagtctatcgaaggtcagcttcgagagtgccatgagttcgca

SEQ ID NO: 23479 - DNA, 260 bp, Unknown; identical to SEQ ID NO: 23390
  Description of Unknown: LeftRegion for integrase B10480 sequence

SEQ ID NO: 23480 - DNA, 260 bp, Unknown
  Description of Unknown: LeftRegion for integrase B10481 sequence
gtctgcaaatgccatagtcgctgctccataaagatgagtcagcttagcattcgtgaaggaaattaacgccatgcccgaacttttccaaatggcaatgtgtcgcatctataagacggctacaggttgtcttacagtagcaggcgaaatgcgcgtactctgacacttgaggcaccacaattgtttgcgcaaaggacatgacgatgcgccagcccactcgaactcgtgctgcgatatatgtacggatgtcgaccgaaaatcaa

SEQ ID NO: 23481 - DNA, 260 bp, Unknown
  Description of Unknown: LeftRegion for integrase B10482 sequence
agaccccagcctgggatcgacttcatcattgctgcccggctgagcggcgatacccacgagatcatcgatttcttccttatcccagcggcctggctcagtgacggaccgctctacttaaaggagtcgaacatggatcgctttgcgtccctccgctatcagtcgctagcgccgatgttcggcatcccatcagcggagcggagatgaaggcgcccatgctggacacggcggcactctacgtgcgtgcatccacggaacatcag

SEQ ID NO: 23482 - DNA, 260 bp, Unknown
  Description of Unknown: LeftRegion for integrase B10483 sequence
ggcttcaatgaatggctgaagggcagaacgcctgattcttccatagcaaagacaaacatcacctacgcgatggttctggaggaggcagtgaaaaacggaaacgccgggcgcgctgcttgggtctaccgggaatggcgttccaacgaattaggcctcatacaagcggggcaaacgggcgttcccgccagaggcggttactaatggggcgctcgctccgcgccgcgctctatcttcgtgtcagcaccacgcgccaggccgaa

SEQ ID NO: 23483 - DNA, 260 bp, Unknown
  Description of Unknown: LeftRegion for integrase B10484 sequence
aacaggtaccagtgccgcaccacaagtaactaatttcttagtttactaaataaaaaatccccggtgttaccagcaccggagagcatgagtatgttaccagcatactcaaggatacataaaaagtatgaccgctaatcatataactttttatgtacccattttatcagatttaccaataaaaagaaaggatgggtacttttatgaattactacattatgtatttaaggaagtctcgtgcggaccgaccggacgagtctgtt

SEQ ID NO: 23484 - DNA, 260 bp, Unknown
  Description of Unknown: LeftRegion for integrase B10485 sequence
gctgtgcaaagtggcaaaatggccgaggcgcaagctaaatataacaaaggtaagaaataaaaaaagagcccctatcaaggggctttatttctacctaaaataaaataaccgccatagatagcggcctaggcggttattttaagatatacattttattattattactaaattaattatatcattaagaggaacattacacaatgacaaaagacttacaaacaggcgtaatatacgctagatattcaagcgataaacaaaga

SEQ ID NO: 23485 - DNA, 260 bp, Unknown
  Description of Unknown: LeftRegion for integrase B10486 sequence
acgaacccgacctgctcgccccgctccgcgggaagaacctcgcctgctggtgcccgctcagtgggccgtgccacgcggatgtcctgctcaatctagcaaacgaatgaccactcgcctcaccctcctcccttccgccggcgcgcccgcgatcaccgagcgcatgctaaagtccgcggagcacctcctggaaccactcctcgatgttcaacaacgccgccgccctttacttgcggtcgtcgaaggatcgcagcgacgtctcg

SEQ ID NO: 23486 - DNA, 260 bp, Unknown
  Description of Unknown: LeftRegion for integrase B10487 sequence
aaacaggcaaagatttttatgattgtgaagaagtgaaggatatttataatcgcatttatgatattgttgatgaatcagcaacagcagacctgcttgcgtatgacgaagatatcaaatcaaaatatgggaataatgctgattttaaagcaagtgacttatattcaatatttatacagttcttaggaaatgaggaatgatacatgagaaaatacattctgtatttgaggaagtcacaaatggacaaagacttcgaagaagag

SEQ ID NO: 23487 - DNA, 260 bp, Unknown
  Description of Unknown: LeftRegion for integrase B10488 sequence
tgacggacaaatatggtatgccaattcaagataagatttttgttgacagtgaccttacacattggtcgcaatggcagaatgagtcaaccattattgatctactccttcaggaaaataatgtcgaaaacaaactgagtcttacttataccagtcgcacggtattaaagaatattcccattccttcgggcttatgagattaaatgaattctccggtctcttcctccaattcacgcgctattggttacttccgcgtctctaca

SEQ ID NO: 23488 - DNA, 260 bp, Unknown
  Description of Unknown: LeftRegion for integrase B10489 sequence
actgatagctgtaatcgctatcatactcatcatgtcggtgactcatatctctgctaaatgtgacgaaatttccgagaacataaaaaagctcgtagagctgaaagaaaaagagcagaaaaaagaagaataaaaacaatcccctgctccgtgcaggggatatttgcgaccgacatctttgtcgaccgcagaaaggaggaactatgtccgataaatacttgatgtatcttcgtaagtcccgagccgacggcgagcatgagacc

SEQ ID NO: 23489 - DNA, 260 bp, Unknown
  Description of Unknown: LeftRegion for integrase B10490 sequence
ctacaagctcgcggacatctgcgaaatcaacaacatttatatgtgcaatgctcacgacgcactgtatgatagctttgcggctggtgagctattcaagtgcattgtggctgatatcaaagaaattgatattgatgatttgtttgtcaatgaataaaatatcccctgctccatgcaggggatacttataggaaggtgaagctatgtctgagaaatatttgatgtatctgcgaaaatcgagggcagacggcgagcatgagacc

SEQ ID NO: 23490 - DNA, 260 bp, Unknown
  Description of Unknown: LeftRegion for integrase B10491 sequence
gaagtacttacactgtgcagaatgcggctcggtactgactcgccacatccagggaacaaacaaaaaggttgtatggatctgcagcagatataagcgcaagggaaaggcattctgcagcggtgtcagggttccagatgaagttgttagaagagcaagtgcaaagataactcaaaacatttatatcagaaaggggatcggacatggagagacaggttacagttatacccgcaattggaggcagaaggaccaggggacggaat

SEQ ID NO: 23491 - DNA, 260 bp, Unknown
  Description of Unknown: LeftRegion for integrase B10492 sequence
gaagtacttacactgtgcagaatgcggctcggtactgactcgccacatccagggaacaaacaaaaaggttgtttggatctgcagcagatataagcgcaagggaaaagcgttctgcagtggtgtcagggttccagatgaagttgttagaagagcaagtgcaaagatcacacaggatatttatatcagaaagggaaacggtcatggagagacaggttacagttatacccgcaactggaatcaaaaaggccaggggaaagaat

SEQ ID NO: 23492 - DNA, 260 bp, Unknown; identical to SEQ ID NO: 23165
  Description of Unknown: LeftRegion for integrase B10493 sequence

SEQ ID NO: 23493 - DNA, 260 bp, Unknown
  Description of Unknown: LeftRegion for integrase B10494 sequence
cagtcaactactctacggctttgactctacttatagttgctgcagctctcgagactcaagatgagaacggctggagtcaaaataccacagaaggattaaatcaattgctcaatgaccggacaagcgtcccatcgatcattgcgaacatagatatgaaggcagtaatggcagatattacacaaaggtgagggtagtaaaaaatgagaatagcgatatattgccgagtatcaacggaagaccaagaacgggaaggcactagc

SEQ ID NO: 23494 - DNA, 260 bp, Unknown
  Description of Unknown: LeftRegion for integrase B10495 sequence
gattaataagggaggaattggatatgttggcaatcggaatcctgctgttggtgttcagcgtcatttgtctggtgtccggcatgaacgcgttcggcgacatcggcatatcgatgatctacacggccgtcacggcactgctgtccggccttggcttcgtcatcggcagccgccgcaaaaaggcataagcgcgggaggagaacatgaacacatatgccctttaccttcgcaagtcccgcgccgatctggacgcggaagcgcgc

SEQ ID NO: 23495 - DNA, 260 bp, Unknown
  Description of Unknown: LeftRegion for integrase B10496 sequence
aaactaattcagatgaagctttgctaattgaaatagactcattcgtaaatggaatgataaaatcggtgaatgactggctgaatatcattaaaggagataagaactatgagaaaaacaaaaatgatctgattcagcctcgtcctgcgtcaactataaaaatattaaaaggagatatcgttatatattgattggaggtatatatgtgcgagaaatatctggtatatctccgcaagtcccgagctgacggtgagcatgagact

SEQ ID NO: 23496 - DNA, 260 bp, Unknown
  Description of Unknown: LeftRegion for integrase B10497 sequence
cgcagcgccgaaaacatcagcttgcagacgctgaagaaactgtccgaatatttcggaatcagcatcgaagagcttgtctacggtgcgaagccacggcatgagattgtatttacaagcgacacatataccagcgaggaattggcacagatagaacaatttgcacgattcctgataggacaacgagaaaggacatgatatgaatgacatacgcgatttacttacgaaaatcaagaaaagacgatgagacaggatatgcggat

SEQ ID NO: 23497 - DNA, 260 bp, Unknown
  Description of Unknown: LeftRegion for integrase B10498 sequence
gttacagatctggacttgccaggggatgacatgttgacacgccttgacgaaatcatggccgacaagcaagagcacacgtacaacgggttcacctacaggtacatcacaacacagccattcagcaacgtcgtggcactggaagtcacccctgcttaaccgggcgcacactgcgcccatctttatacccttggaggaacaatatgagcctgtatgccatatacctgcgcaagtcccgcgcagactttgaagccgaggcaaga

SEQ ID NO: 23498 - DNA, 260 bp, Unknown
  Description of Unknown: LeftRegion for integrase B10499 sequence
aacgccgtatatgacggcgatgtattcaccatcacaaatcttactcccatacataaagacgacagaccggaaaagaaacgacagattgagaaatccttatatgccgtctttagcaaatacttcaaccccaagaacaagcgataactaattctgcaggccgcctcatgcagggcagtcctgcacatcgaagggagtaaaacatggattttatttacacaagacaatctgtggatcgtgaagatagtatctccatcgaaagt

SEQ ID NO: 23499 - DNA, 260 bp, Unknown
  Description of Unknown: LeftRegion for integrase B10500 sequence
taagaaaagatcataagtccgtaactgggcattgcaaatttctataaaaaaatcccccaccgtgcaggaacacgatgagggacgcgcagcaggtattaccagtaccgctgcaacagtctaaaccatccaccacaggaggtcgactatgctaatagtatatcacgtcggcctccatctagccatagaaggaggctattattatgcaaaaaaacaccactattgaaaatacaacaaaggctgtcatttatgctcggtactct

SEQ ID NO: 23500 - DNA, 260 bp, Unknown
  Description of Unknown: LeftRegion for integrase B10501 sequence
ggcaatgtacttgcgcacagtcgttcctttcgttggtcaggtgaaggtgaacacatggtgctcggcgtggacattacatgagatgatcgggttcgtgtgtggcgaacacatctttctatccacgtcacgtcctattgcgtcttctgacgtggataggttatggtcggtcgacctactcaccacgaaggaaggacgggccaatgaccgccgtaccggaaaccgccccagccaccacccccctcggcctgatcccggccgcg

SEQ ID NO: 23501 - DNA, 260 bp, Unknown; identical to SEQ ID NO: 22666
  Description of Unknown: LeftRegion for integrase B10502 sequence

SEQ ID NO: 23502 - DNA, 260 bp, Unknown
  Description of Unknown: LeftRegion for integrase B10503 sequence
gtacacgactggagaacacagataccagaatttgctccagagcgcaaaaaactttattttattagtagttaataataaaacgctcaccagagtgagatttgaaaaatgtaaatttttggaaagtttaataagtaaaaagttccaataattcacattgtaataaaataataatattactacaatattattggaggattacaatgaaatacgcaatttacgctagagttagtactagtctagaagcgcaagactcatcattt

SEQ ID NO: 23503 - DNA, 260 bp, Unknown; identical to SEQ ID NO: 23292
  Description of Unknown: LeftRegion for integrase B10504 sequence

SEQ ID NO: 23504 - DNA, 260 bp, Unknown
  Description of Unknown: LeftRegion for integrase B10505 sequence
tcaaaaatatgggcatgaagtgttggcggagatcgaggaaatgaagtcaaaagagaatacgaatgagcagtgagatgagccggttgcatttttttgtaatcggctcattttacccgctgacgcaatcgaaaaagtgcgttatattttagatccaaacatgaaagacgaacaatcattgagcaaccgaaaagggggatatgatgagaaagaaaaaatgttatatatacaccagagtatccacgatggctcagacagagggt

SEQ ID NO: 23505 - DNA, 260 bp, Unknown
  Description of Unknown: LeftRegion for integrase B10506 sequence
tttttctccgtcgatgttaattttttagtaggatcatcccagaaggtcacacggctcaccggaacccacgccgatgatgaaagcatgagctccacctatgtgatgctaaacgacgaggagcgtgctgtcatgaaagcgtacagactggccagcgaagagatccgcgctgctgttcgtgcagtcttgggaggtgtggaagtttgaccggtgtgatatatgcaagatattcagaaggaccacgccagacagaccagtccatc

SEQ ID NO: 23506 - DNA, 260 bp, Unknown
  Description of Unknown: LeftRegion for integrase B10507 sequence
ttctgccgcctcttttcgtagctgccgaagaagatttctgcctgaagcactacggcgacacctatcgcgaatatatgaacagaacaccaagatggataggaataccgaagtcggggggaaagtgagaaatatgccccctcgtttacttaattgtttcggtaatttcttttatcctaaaattgctattataggaagatgaaatgaaagccgccgtctacataagagttagcaccccgggccaggccatcaacggcgaaagc

SEQ ID NO: 23507 - DNA, 260 bp, Unknown
  Description of Unknown: LeftRegion for integrase B10508 sequence
ggccaaatccatcaacgccctggtttcccgttacggtggggaggtctacgatgttctcggaatttcaccagcctttgaagtagatacagagatcaatcactcagtagccgaattggctaagctgatcaatagtctgtccccggaagaccaaaaagagctaacgtccatcatccgttcgatggtgaagaagcgcacgaaagatggcgaataaatcgccctttcagcccggcagcctggtcgccgcctatttccgtgatagc

SEQ ID NO: 23508 - DNA, 260 bp, Unknown
  Description of Unknown: LeftRegion for integrase B10509 sequence
aaagaattgattatatcgatggatttacagttactaataatttcccagattatacgcctgaagaacaagtaattgtaaatgaaagatttctacaaaaattatatgatatattattcaatgacaataaaaagagttgacataaaagtaaaatcctctataattatattaacataaaaatatgaatataaaggatgataattatggcagtggctatttattccagacaatctgttgataaaaaagattctataagtattgaa

SEQ ID NO: 23509 - DNA, 260 bp, Unknown; identical to SEQ ID NO: 18725
  Description of Unknown: LeftRegion for integrase B10510 sequence

SEQ ID NO: 23510 - DNA, 260 bp, Unknown
  Description of Unknown: LeftRegion for integrase B10511 sequence
tgaactacttgctgggcttcaccgataagatcgagaagccggccggcgacgagacagatcccgctgccaataagttcctggccgtcacgctggccgagatcgacctgatcgaagcataccggcacgccggcgctgagactcaggcagcgatcagagcgatcctgcacatctaacagatccccagagaggagcgtgaggccatgcgtggcgttatttatgccagatactcaccaggcccccggcagactgagcagtccatc

SEQ ID NO: 23511 - DNA, 260 bp, Unknown
  Description of Unknown: LeftRegion for integrase B10512 sequence
tcggccgaagtgcgcttcgtcttccactgcgagcggtgcgggcggatcttgccggggccggaagtgcagccctctaaaccgtggccgcgttgatccattgagtgacgccgtgaccgaacgcattacaatgctgccgaccaaggggatgccggatgaggatctcgccctcggcctggtcatggacgcactaaggggaaaaaatgaaggccgccatgtacctacggagctcaaaagaccgcagcgatgtgagcctcgccgct

SEQ ID NO: 23512 - DNA, 260 bp, Unknown
  Description of Unknown: LeftRegion for integrase B10513 sequence
ctacctgctgggatatactgataagattgagaagccggcaggcgatgaaacggaccccgccaccaataagtttctggccgtaactctggccgagatcgacctgatcgaagcataccggcacgccggagctgagacccaggcagcgatcagagcgatcctgcacatttaacgggagaaccccgggaagggaggacggtgccatgcgtggcgtcatttatgcgagatattcaccaggcccgcaccagacggagcagtccatc

SEQ ID NO: 23513 - DNA, 173 bp, Unknown
  Description of Unknown: LeftRegion for integrase B10514 sequence
gaagataaagaacgtgtagaatatgaaggagaagattacacaaaatagaaataaataatataataaacatcagggcagttagcagctgctctttttaattaggaggaaggaaaatgaaaacatgtatataccttagaaaatctagagctgatgaagaactggagaaaaaagaa

SEQ ID NO: 23514 - DNA, 260 bp, Unknown
  Description of Unknown: LeftRegion for integrase B10515 sequence
ctatttgctggggtattctgataaaatcacgcggctgtccggggatcacaccgaccccacatccggcccctgtgttgaagttactgctgcggagctggagctgctgaaggctttccggcacgccggagctgagacccaggcagcgatcagagcgatcctgcacatttaacgggaggaccccgggaagggaggacggtgccatgcgcggcgtcatttatgcgagatattcaccaggcccgcaccagacggagcagtccatc

SEQ ID NO: 23515 - DNA, 260 bp, Unknown
  Description of Unknown: LeftRegion for integrase B10516 sequence
tttaacgttccccttgcctctattgttaccaatgacgagcggctggaaatgaacctgcagctgtttaatgaaccttccgcgcacgatcagcaaatacgcctggttgttgatatgatggagcccatgacttacgagcaaaagcagcaggttgttgccattgttcgcgcctttgccagcacctgccagcctgacaggaagggttgaatattgctatgattttcggttattgccgcgtatcctctgacgagcaggctgcgcat

SEQ ID NO: 23516 - DNA, 260 bp, Unknown
  Description of Unknown: LeftRegion for integrase B10517 sequence
acgctacagcacgtctgttcttttcatagtatgtttaccctatgaggggcaggcgcgtcaaaaaaagggcgtttttgatgtaaaaagaaaaatcccccacggtgctggtaacaccgcaggggatcacaaggagatatgtttattgaatccgtttccattatatcatatctccgccgaaaaatcaacaggagagtgagaatatggaaggatatctcgtctatctccgcaagtccaggtcagacggtgagcacgaatccgtt

SEQ ID NO: 23517 - DNA, 260 bp, Unknown
  Description of Unknown: LeftRegion for integrase B10518 sequence
acgggcagatctatgccgttgttttcggggcggacgatgaggcagtgttaaaaaaggtatatcgatccggtaataaggtgatcctgcagtcctgtaattcagaatatgccccgatcatattggaccaggttgacgtccgtttaattggcaaattgacgtgggtctgccataaggcgcagtgatagaaatgaggttcacctatgacaggagtgatttacgcgcgctatagtgaaggcccgagacagactgatcagtctata

SEQ ID NO: 23518 - DNA, 260 bp, Unknown
  Description of Unknown: LeftRegion for integrase B10519 sequence
caaccgatgatcaggagagaacgggtcactctagagatcgaatacaacgactacaacgagtcgatcaaaaagccgagtgaatggggatgggaagggatcctgcacaccctcatccgttcgggtgacgttgtgagcgttgaagttgttcacgatcacattgcggcgccggcatcttggtcttcgcctcggatcgaagttccatgacggcccgcgtaaccctctgcgggtacgaacggatcagtcacgacccgaccggagcg

SEQ ID NO: 23519 - DNA, 260 bp, Unknown
  Description of Unknown: LeftRegion for integrase B10520 sequence
tttttctccgttgatgtcaattttttggtgggatcttctcagaaggtcgcaaggcttaccggcacccatgccgatgaagagagcatgagctccgcctatgtgatgcttaacgacgaggagcgcgctgtcatgaaggcgtaccggctggccagcgcagagatccgcgcagctgttcgcgcagtcctgggaggtgtggaagtttgaccggtgtaatatatgcgagatattcagaaggacctcgccagacggatcagtccatc

SEQ ID NO: 23520 - DNA, 260 bp, Unknown
  Description of Unknown: LeftRegion for integrase B10521 sequence
gggtacgaaacggctgagcaattaattgaagacgtcgaaaagaaaactggctacaagataagcagaatatcgatttatcgtatcgagcgaggcgagcgagccctccccctcgaggcgtacctcgcgttccaggaagtcatgccgaggttcttcaacgccgacatgttcaagccggcactcaagatctaccaggacgagaaatgagccgagcggtcatatacgcgcgctactcctcggacaaccagaaggagacgtcgatc

SEQ ID NO: 23521 - DNA, 260 bp, Unknown
  Description of Unknown: LeftRegion for integrase B10522 sequence
gagaactattctatcttgggagcaaaaggtgtaatggagctaatgggagagaatcgctctgaggagcaaataaaaaaaatggcatatagaatgaatctacagcgagaagataaatcaatgatgtgggaacaaacagatataaaactggtcaataataatattttttcagttgaagcaacttacaaaggacggtgactctggtgaatgaatttcaaacatataaaacaactaggaatattttagaatcgattaaaaatgta

SEQ ID NO: 23522 - DNA, 260 bp, Unknown
  Description of Unknown: LeftRegion for integrase B10523 sequence
gtgtccgtttcgcaccccaaccttggaatcgaaggcgcactcgacaggctgcgatcagagccgcaaacgtgcaggtcagagggacggacgtgtgtcttacacggtcgccccggcacagattccggcaggggtgtcataggccatgttccgggttcccgaacccatgacaaagacacccttggtgacggacactcgggaacatgaagaccagccgcacgcccacggggcagcgaacacgcgcagtgatctacgtccgcatc

SEQ ID NO: 23523 - DNA, 260 bp, Unknown
  Description of Unknown: LeftRegion for integrase B10524 sequence
tttctggagcacgcgcgatgcgcaaatgctctcgaaggccgagcatcaggcggagatgttcgcctatttcgtcgcgttgccgtcgaatgagctggcggtgctcctgcgcgggcgtgtcgagatcgaggagatcgcgagccgctatacgcggaccgaggaatgggtccgcgaacgcatccgcctcgagggctaacactgagatggggatcgcccgcggctatgtgcgcgtttcgacgcggaaacaagaggccggtgtctcg

SEQ ID NO: 23524 - DNA, 260 bp, Unknown
  Description of Unknown: LeftRegion for integrase B10525 sequence
cgccgcgtgttcgtggaagcccgcccggctgcccagtttcgcctcatcggctagggccctgtgtcgccagggtgacgccgggccgcactatggctgcacggaacatgagcgcgacgtgttcatgccccgcgcttttgtggacaggtgccgcgcgatgtgtctacggcggcgacagatagcttaactggagtataaggatcgtgagcagccgccccttgcgtgtcgccatttgggccgccgtctcttccaggcgccaggcc

SEQ ID NO: 23525 - DNA, 260 bp, Unknown
  Description of Unknown: LeftRegion for integrase B10526 sequence
ttgtttttccataattgtaaacgtcaacaaattttcaatcaagtgtgatatttactaaaaaaatatttttttatacatttattcaagaattattaattatcaaaacccctagtgaggggtttttcttatcttaggagggatatcatgcgcatagcttgctacatccgggtagatgtctttataacatggaggaaaattttatgaaagtagctgtatatgtaagggtttcgacaactgaacaggctcaagaagggtattcg

SEQ ID NO: 23526 - DNA, 260 bp, Unknown
  Description of Unknown: LeftRegion for integrase B10527 sequence
ttttgtggcagatacagaagaaaagccttgcagatatgttgaacctccgttgtccgacgaattcatggaaattgccgctgaaaaagaaatgctcatgccgtcattcctgtcatatgatgaagcacgcctgtttttaaccaatggagaatggagaaaagatttatagtagctatttaagaagcgcattgcaaggggaggtcatgaacgcagtaatttatgcacgctattcatccgccaaccagacggagcagtccatagag

SEQ ID NO: 23527 - DNA, 260 bp, Unknown
  Description of Unknown: LeftRegion for integrase B10528 sequence
gcttcgagatcaggtgggcgcatccctgggcgtggacctcgtaggtccatttcttgtcgttgtatgcgatggcgaacttgttcatgtctgcccttctcgctcgtcccccgtacagttcaattatcccacggcatgccccctacccccaaattatgcagttggcgtgccaactgtacacttttggggtacaggccacgagcatggagggcagcatggcaccaaggcagaaagccaagcagggcaacaggttaccggccatc

SEQ ID NO: 23528 - DNA, 260 bp, Unknown
  Description of Unknown: LeftRegion for integrase B10529 sequence
  modified_base (175)..(195): a, c, t, g, unknown or other
aatttaaaatgtgctctatatattagagtttctacttttcatcaaattgataaagactctcttcctttacaaagagaagatttaatcaattatgcaaagtatatattaggaatagatgactatgttatttttgaagatgctggttattcaggtaaagatactgatcgaccaagtnnnnnnnnnnnnnnnnnnnnnaaaatatgatgacaagaataagaatgggcgagttttctcatttgcttgtttggaaaatagatcgt

SEQ ID NO: 23529 - DNA, 260 bp, Unknown
  Description of Unknown: LeftRegion for integrase B10530 sequence
ttatagtcgaaagtgtccaagcaatacttccagaagaagaacaaaaaaagctaaattacaaactattaaaaaaggcaattgaagcaaaaaacagacctaattaagattgaccttttcattcatacatattataatgttagtaaacaataaactatatttaaatggtttattgtttactatttttactaaggagattaaaaatgattgctatatacgctagacaatctatagataaaaaagatagtatctcaattgaaggt

SEQ ID NO: 23530 - DNA, 260 bp, Unknown; identical to SEQ ID NO: 23214
  Description of Unknown: LeftRegion for integrase B10531 sequence

SEQ ID NO: 23531 - DNA, 260 bp, Unknown
  Description of Unknown: LeftRegion for integrase B10532 sequence
aaaaaacatacaccctacatttgccacagaacaagaaaaaaataaacaagaaaaaaatataaaaattcaattatatgacatatttaaaaaatattaataaataagacagaaaaattcggtaaagtattgaaaaaagagggttgctgtggtataataatactattagcgaccttctttctattttagaaaggaggaacacaatggatgcaatatatggtagacagtctatagacaagaaagacagtattagtattgaatcg

SEQ ID NO: 23532 - DNA, 260 bp, Unknown
  Description of Unknown: LeftRegion for integrase B10533 sequence
taaatcagtcaatcatatgaatggttttacaattaaaaactgtcaaccaaatatggacgagctagaaatacaaaaaattaaaacaagaatcatcaaacaactacaatttattttttccaatgacactaagtcgtttgacacataagtaaacttaatggtataattctcctgtgatataaaacatcaaaggagagagatacatgaaagcagtatacacaagacaatcattagacaaaaaagacagtatatctatcgaaaca

SEQ ID NO: 23533 - DNA, 260 bp, Unknown
  Description of Unknown: LeftRegion for integrase B10534 sequence
ggataagattttttgtgcattgtgtggaagcagacttgtaaggtatgtagagactaaaaaccataaagttacatggatatgcaacggaagaaagcggaaagggaaagacttctgcgatgggacaaggattccagaccacatcctgaagggatggggagaaatcaaaaaagatatttatattcagagaaaggatgataagaatggcaagaagcattacagttataccagcaagaaaccgtcaggcatcggggcatagggca

SEQ ID NO: 23534 - DNA, 260 bp, Unknown
  Description of Unknown: LeftRegion for integrase B10535 sequence
atcttcatttagtgtttcgatcagttcaatcaattgggatttgttgtctttcatggtgaatgctcctttcaaaatgagaacaactgttcctattcactaatttacaacgtacttttgttgcaaataaaaaataaatgtgaattatatgtgacagtatagcaccggaaaagtaaaaaaaatgtagaaaaagaggattggacatgggaaatttacaaaaattggcaaatgcatatcatcaggatccggaaacacgaataatc

SEQ ID NO: 23535 - DNA, 260 bp, Unknown
  Description of Unknown: LeftRegion for integrase B10536 sequence
tggagaaattagctacgaagcatccgctttgggcacgaccaagaccatccgtttgaaaaaacaggactaaacataaaaaatcccgccctggtgttggcgcaccagaacgggacggggcagatataactttccaacggtcatttctgcccctttattttactatacattgtttgaaaagtaaataaaggagtgtagataacatgagacgagttgatgcaatttacaccagacagtcgattgagaaaaaggattccatttcg

SEQ ID NO: 23536 - DNA, 260 bp, Unknown
  Description of Unknown: LeftRegion for integrase B10537 sequence
gtttcttcaaaaacaaactatgtaattgtaggcggatatggaagttctgattgggctcatggcaattacggcagtaaagtaaaaaaagcacttgaacttcaagcacaaggaatagatgtaaagataattaaagaaaacgacttttttaaataaccctcccctgctctgtgcaggggatattcataggaaggagtaagcctatgtatctgatctacctcagaaagtcacgagctgacggtgagtatgagactgttgaagat

SEQ ID NO: 23537 - DNA, 260 bp, Unknown
  Description of Unknown: LeftRegion for integrase B10538 sequence
atatgattattccgcagtacagaaaagggtaaatgaactcctgaaataaggatatggctgatggtcagtaatggctgtcagccgtatttttttcagtttatgccaaggaaagaaaggtgaaaggtatcgcagattgtacttgctattattggctttcagagtgatatatagactacccaaagagaaaggagtggcagagcttggagattcagatcagggaaggaaacagggaacagaagagaaaattaagagtctgtgct

SEQ ID NO: 23538 - DNA, 260 bp, Unknown
  Description of Unknown: LeftRegion for integrase B10539 sequence
gtaagggttactgttgaagttaacaacgcgggtgatttagaaatgctaaaacacatgaattataagatttgtggcgatatgggattaagtcaagttgaatatttagacttttataagtttcttatcgctgtagatgaagcttacgaactgggggataactcaattattgaaaactatgacgattgggaggatgatttagaatgattgctgctgcttatgcaagatattcaagtatgaaccagaatgatgagtctattgat

SEQ ID NO: 23539 - DNA, 260 bp, Unknown
  Description of Unknown: LeftRegion for integrase B10540 sequence
ggaattttattgacgaaatagttatggaccattttatcgtactttatgattccataaaaattgaacgtgatacaaaatggaagtccgcaatgtagcgggcttttttcgttgtccatttattcgcctacttcatcattgacttatatcgacgaatggttgtataatctaattgtaaacttgttttcgaaagggtgaacgaattggataatatagaaaagaatgcgtcgattgcggtatatttacgaaaatcacgtgaagac

SEQ ID NO: 23540 - DNA, 260 bp, Unknown
  Description of Unknown: LeftRegion for integrase B10541 sequence
cgtaaggagcgtgtcatcagacgagtatctcagcaaagaatcgcagaccatctcggtcttgccaagaccactatctccgcttatgaattgggcaaagtctctccggcaattgacacgcttgacgagtattgcgcattccttggagttgattacttggagcttctccgggaggtcactgaggaagtgagacggctagacatatgaaagccgtcatatacgctcgttttagctcctccagtcaacgagaggagagcattgaa

SEQ ID NO: 23541 - DNA, 260 bp, Unknown
  Description of Unknown: LeftRegion for integrase B10542 sequence
agtatgaaagacaagcaaatgaattcgcaataagattaatatcgttccatacgaaaatacagcccacagaatctatcgaacatttttttcttcgaaatagtataccaaccgtaatgattaaatattttaaaatgaggtgaacgctaatgaaacttacgaaaacccaagaaaacttcagaaaagaaatgaggtaattaaacatgaatgcaaaaagagcagctgcatattgtaggtacagttcagacaatcaacgagaagaa

SEQ ID NO: 23542 - DNA, 260 bp, Unknown; identical to SEQ ID NO: 22603
  Description of Unknown: LeftRegion for integrase B10543 sequence

SEQ ID NO: 23543 - DNA, 260 bp, Unknown
  Description of Unknown: LeftRegion for integrase B10544 sequence
  modified_base (1)..(2): a, c, t, g, unknown or other
nncttttattcgttgctttctgcaacacccattatagaacaaatgttctaattttgcaataacaaattgtggatatgaatatataaatacgtcattgaaccacagggggtatctcgtggcggaaaaatccgccgccaaatatccggaatgaactgaacgagattttccgttcaccccaaaacccacatggaggtgatctcatgtcagaaaagtccgctgttatttatgcccgatacagcagccacaaccaacgggaggaa

SEQ ID NO: 23544 - DNA, 260 bp, Unknown; identical to SEQ ID NO: 18853
  Description of Unknown: LeftRegion for integrase B10545 sequence

SEQ ID NO: 23545 - DNA, 260 bp, Unknown; identical to SEQ ID NO: 23189
  Description of Unknown: LeftRegion for integrase B10546 sequence

SEQ ID NO: 23546 - DNA, 260 bp, Unknown
  Description of Unknown: LeftRegion for integrase B10547 sequence
gtttcaggtgaaaaagtcaacacaagtggtatttaccatcgaatgcggtgcgactcctgacgaactaatgcaggccattcaagatatcgtgctttcaaagctgcttgccggccgagcggaggtagcatcttgaacgagctggatgcgcgtggtataatcgaaccagcagaatttggctggcatcgaaaggaggccggcacatgagaatgtgcggatacgcacgagttagcaccgacgaggaacggcaattagatagctta

SEQ ID NO: 23547 - DNA, 260 bp, Unknown
  Description of Unknown: LeftRegion for integrase B10548 sequence
agccttcgaccgaggccttataactatcactccttccatgaaaatctatgtttctccgataattttggatagccctcaggacgcttttacagcccgctggctggcttctcttgacggaatggttttaccccccccccccgatttccgccgcgtagagagcttctggagtaccataacgacgaaatttttaggagggtcacatgaatacagtaatctatgctcggtattctgccggcccgagacagaccgaccagagtatc

SEQ ID NO: 23548 - DNA, 260 bp, Unknown
  Description of Unknown: LeftRegion for integrase B10549 sequence
tccctgaatccggagtatgacgatatctaccccgaaaacggcgagatcataccgtgcggtatcatcgtcgggaaagctgtaagataaaaaaaatcccctcacggtaccggaaacaccgcaaggggataaggatatgctataagcacaaccttgacaattgtattatagcatatcctttattaaaatgcaaggagaatgttatgaaaaaagcgataatctatgcccggtacagctccgagcgtcagaccgagcagagcatt

SEQ ID NO: 23549 - DNA, 260 bp, Unknown; identical to SEQ ID NO: 23468
  Description of Unknown: LeftRegion for integrase B10550 sequence

SEQ ID NO: 23550 - DNA, 260 bp, Unknown
  Description of Unknown: LeftRegion for integrase B10551 sequence
tgcttgaccgcagggcaaagcacgagtttatgtcaatggtctatgagtacgaaaagcaagcggaatatcagggggatagagaacgcaatagcacaactgcgtgaccgttggagaaaagaaaaagtcatcccattcgatgtttgtcaacacctgagtgagatgattaagcgtaaaaaggaattggaaaaggaggtgcgaaaatggtaaaagcagtaatctatgctcgttactcatctcataatcagagagaggaaagtatc

SEQ ID NO: 23551 - DNA, 260 bp, Unknown
  Description of Unknown: LeftRegion for integrase B10552 sequence
cgcaaggagcgtgtcatcagacgagtatctcagcaaagaatcgcagaccatctcggtcttgccaaaaccactatctccgcttatgaattgggcaaggtctctccggctatagacactctggacgagtactgcgcattccttggagttgattacttggagcttctccgggaggtcaccgaggaagtgaggcggttagacatatgaaagccgtaatatacgctcgttttagctcgtccagtcaacgagaggagagtattgaa

SEQ ID NO: 23552 - DNA, 260 bp, Unknown
  Description of Unknown: LeftRegion for integrase B10553 sequence
aaccggccggctagaggccgtggagtcggaggaggacggccccgagggaatcggcttggtcaatcatcccaccggcacccttcctgactagggcttccttactattcgttggctgctcgtgtgcggatcctcgggcagccaccgaatactgccgatagggtggggcaaggtccgatccgctagcccggaaggttgccccgatggccgaggaacgtccccctatcgcatacgaaatcctccccgggaagaggccccgcaag

SEQ ID NO: 23553 - DNA, 260 bp, Unknown
  Description of Unknown: LeftRegion for integrase B10554 sequence
ttcacggccggctccgggagggccggagcctggttacgccacttcttgatccactctgcacgggacatcttccctgctcacagcccttcggtaggggtgcgtttcacgctccttctcccaagggaacgaacgcaagaagcaccaactacctctatgatgcctgtagcacgcctcgcgtgcaaccacatcggggaggaactgtgggggacacacgtccacttgccggctatctgcgcatgtcagatgccgacctggcagag

SEQ ID NO: 23554 - DNA, 260 bp, Unknown
  Description of Unknown: LeftRegion for integrase B10555 sequence
atcttccggccgcgccgcccttaccgccgcctatgccaacgttctcactgacgcgcgccagagaggccgatgccagccaggccgaactgactgagtcgcgcgtcactgaatctggacagcagacaaccgatggtcaatagcagcgtggcgcgcgctcgtcgccgttattgtacacggcttgaccgagtggggtcaataacatgaagatcatcagcgccgactaccggcgggtttcgacggacgaccagcgcaagggctat

SEQ ID NO: 23555 - DNA, 260 bp, Unknown; identical to SEQ ID NO: 22981
  Description of Unknown: LeftRegion for integrase B10556 sequence

SEQ ID NO: 23556 - DNA, 260 bp, Unknown
  Description of Unknown: LeftRegion for integrase B10557 sequence
cgatgcaggaccccagcggccccttgcctgacctcccgtttatcaggagggcgcggcaatggaagcagtaacgctgcgggtgctggagtgccgggcgctggaggcgcgggcgatctaccacggaagggcgccggtgctgctcctgatacgcgaaccggacccgccggccgtgcgctgggcggagcgattgctggcggaggatgagcgggccgtgcgggtctggcggggggagtgacgcgctctatgcccgtgtctccagc

SEQ ID NO: 23557 - DNA, 260 bp, Unknown
  Description of Unknown: LeftRegion for integrase B10558 sequence
gggactcgccgagggcgttccatcgatccgatgcacggcggccctccaggggctctctgacgggttcgcgccgcacggcgggcacgcggcggttgccgacttcgtcggggccctggccgtcgcagggcgctgaatttcctgctcccggacttctcgcgggtgaactgcggagagtaagtgtgtagttcttacgctctcgagtggtcaaggacgcgtacagtacccacatggtgggatcccacaagcacccggtcaaagcg

SEQ ID NO: 23558 - DNA, 260 bp, Unknown
  Description of Unknown: LeftRegion for integrase B10559 sequence
tcggtcaggacatcatggtcctggtgccgctcgctaaagaatccggcagcgagccaccgaagtgaccacggcctacctcaatagccccggaacgccatgatggacatcctcacctacgacaatgtcatgggcgtcgtcgccgcgatctgggcgcttgttctctgctgggcgatcttccgcaaaggatggttcctgcgcccatgaccacccccaagcccgggactcccctagcggccatcgcctactaccgctactccgag

SEQ ID NO: 23559 - DNA, 260 bp, Unknown; identical to SEQ ID NO: 18885
  Description of Unknown: LeftRegion for integrase B10560 sequence

SEQ ID NO: 23560 - DNA, 260 bp, Unknown
  Description of Unknown: LeftRegion for integrase B10561 sequence
tggcacaatcacgcctacgcctatagttccaatcgtcgagggttccgacgaatataaaacagcaatatatgctttcaatttcgccgttcaaagtggcaaaatggccgaggcacaagcaaaatataatagtaagcataagaaataaaaaaagccccctatcaagggggctatacttatacaatttgaaaggaaatcacacaatgaacactacagacttacaaacaggcgtgatatacgcacgctactcgtccgataaacaa

SEQ ID NO: 23561 - DNA, 260 bp, Unknown
  Description of Unknown: LeftRegion for integrase B10562 sequence
ggcaggtggtcagacacttccagaaatttattctgaccacgccttaactggaaattggagtggttatagagagtgtcatattgagcctgactggttgttggtctataaaaggattgacgataaattgattttatctttaacaagaacaggaacacacagtgatattttttagttataaacagtgaaatgtggagaatgatatgaaaaaagcggtaatctatgcaaggtacagctctgaccgacaaacagaacagtccatt

SEQ ID NO: 23562 - DNA, 260 bp, Unknown
  Description of Unknown: LeftRegion for integrase B10563 sequence
aaataataatgaatcaacaaacagatagtatcgaaaaaatcctaacaaagatattactagcaaaattacaaaaaaatggcttaattactcaaaaacaacaagaaataattatacaaaaatattaacttttcttttcaaataaccctggactttaagtctcttttacggcttaattgtattagcaaataggaggataaaaaatgctagatttacagcgaaaaccaagagcatgtgcctatgtcagagtaagcacaaactcc

SEQ ID NO: 23563 - DNA, 260 bp, Unknown
  Description of Unknown: LeftRegion for integrase B10564 sequence
tagagagaaagactcacagaaggtactggaggcgtattttgccgaaaggaaagaaatttttgagccgtaccggcagtttatcgcccgaggtctcagcctgctgaagggagacaccacaactagctttgccctgggtgaatccagctcaactggaagagacgcctgggaaaaggtatttcgattacttacgggaggagaaaatgatggaaaagagagcagcagtctataagcgggtttcaacagccgcgcaggatgaagaa

SEQ ID NO: 23564 - DNA, 260 bp, Unknown
  Description of Unknown: LeftRegion for integrase B10565 sequence
gaaatggttgaagcttttgaaaatattaatggtttttataaaatacctagttgggttaatgaagtgtaaggagattgagagaatgaagaaagaaaaaacgataaaagtaacttttacagaaagtgatgatatgctatataataactttattgatatattaataaacagttttttagaagaaatataaaggagtaagtaaaatgattaatgttgtaggatatgctagatattcatctgataatcaaagagaagaaagcatt

SEQ ID NO: 23565 - DNA, 260 bp, Unknown; identical to SEQ ID NO: 23481
  Description of Unknown: LeftRegion for integrase B10566 sequence

SEQ ID NO: 23566 - DNA, 260 bp, Unknown
  Description of Unknown: LeftRegion for integrase B10567 sequence
gcaccaatgggagcgactatcaagtcagacctgcatgagcatattgacggattaacaaacaaaaaacctaaatgatctaaaaacactctctgcgccacgtcagagattgcttcactgacaaactgcacaaaaacgcccctcacacgctcgtacagaccgcatgaggggcatataaataattaccacaaaggagtgagcatatgtacagcatctacctcagaaagtcccgtgccgatgcggaactggaacggctcggagag

SEQ ID NO: 23567 - DNA, 260 bp, Unknown
  Description of Unknown: LeftRegion for integrase B10568 sequence
gcacaagattcgcatagggatgactacccaacaagtcagggaatcttggggctggcccggccatatcaataccacaatcacacgctgggggcgtcacgaacagtgggtgtatggtcgattcccatacagtgagtatgtgtacttcgagaagggcatagtcactacgattcaacagtgaaccatcttgagaatgaggtgctatggctagcggtgtgatgagcggtcccgtccccgccgtcatctacgcccgggtctcgacg

SEQ ID NO: 23568 - DNA, 260 bp, Unknown
  Description of Unknown: LeftRegion for integrase B10569 sequence
aaaagaatagaaagagaaaaagtaatgttaccaatagacgaaaatggaaaccttaatcatgaatacatggagaagttcacaataaacatgattattaataagacagaattaatacatgaagaaaaaaagtagtaataaactaaaaaggactccattatcaaaaactctgctttaataaatagcagaaaggaataatgaatatggatgaaaaagttacaatattgtatgttagaaaatcaagaatagatgaaaaaggtgga

SEQ ID NO: 23569 - DNA, 260 bp, Unknown
  Description of Unknown: LeftRegion for integrase B10570 sequence
ccggaatattcgaacaattccttttttccattcgccggctgcccggcacggtggtttcttccggtctgaatcgctttgtgcggaatcaatgcatgccttttgtgcttaacatctttgagtattatcaaaccgcgctccctgcggatggttccgctgctgttgatttcggttcttttatggacggatacgaggaataaaccatgatttacggatactgccgtgtgtcgtccgatgaacaggcggcccacggcatttctatt

SEQ ID NO: 23570 - DNA, 260 bp, Unknown; identical to SEQ ID NO: 13096
  Description of Unknown: LeftRegion for integrase B10571 sequence

SEQ ID NO: 23571 - DNA, 260 bp, Unknown
  Description of Unknown: LeftRegion for integrase B10572 sequence
ttcgtttaatcacagttatgatgactctcctgccgtggaaacctattatatcggaaatagctctacaaaaaagtttcatcgttccagttgtagttatttgccctctcaacagaatcaggtcgccctttcatccagagaagaagctatttcgtccggttataatccttgtcaacgttgcgatccttagaaaggagcctcccatgcgcacctacgccgcctatctccgtaaatcccgcgccgatgccgataaaaccattgag

SEQ ID NO: 23572 - DNA, 260 bp, Unknown
  Description of Unknown: LeftRegion for integrase B10573 sequence
gcttctcaccctctatcgcggcgtgaatcctgacgggcagcgctacattttgaagcaggccgaatttgccaattctcaggaagaataccgtctttcccccgcccctaccgcaaagtcgggcgcgtgattcacgttgacttccgcggaaaagattaaagtcccgccactggtgaaaattcccagcaaaggagtgacctcttatgaccccgccgaaaggctttacttcttccgtccccgcaccgctgcctgatcttcgcatc

SEQ ID NO: 23573 - DNA, 260 bp, Unknown
  Description of Unknown: LeftRegion for integrase B10574 sequence
actgaaatccggtgcaggctggatttcacttgattatgtaaagagattataaaattctgccgggcggtaaaattctgtccggcagaatttttttacgttatttcccatcatagaaaacaaacggtatcggaaaaaagacttgctattcttgggggttagagtgatatatagactaccaaaaaagaagggaggagaccattatgcaaattgaagtcagaaaagctgagatgggaaaagagaaaaaacgtttaaaagtctgc

SEQ ID NO: 23574 - DNA, 260 bp, Unknown
  Description of Unknown: LeftRegion for integrase B10575 sequence
gtgtgcccaaaaagcaaagcgctgtaaaatatttatatgaaaaaaacgacggcatacataaaggccccgaatctggaaaaagaccgtaagcagatcgtcgaggagaccaagcgcgatctcgacgaaatgctgaatgagccctcccctatcggtaatcttgccgagctggtgaaggccctgaaaaaagccaagaagaagaaatgaagggcgtaatctgggtccgtgtttcgtcgatcgaccaatcagccggttacagcccc

SEQ ID NO: 23575 - DNA, 260 bp, Unknown; identical to SEQ ID NO: 23550
  Description of Unknown: LeftRegion for integrase B10576 sequence

SEQ ID NO: 23576 - DNA, 260 bp, Unknown
  Description of Unknown: LeftRegion for integrase B10577 sequence
tccgtacagaaagaagatattctgcggactctgcggaagcagactggtccgccatgtaaatccgaaaagccataaggtcatatggatatgcaacggggcaaaacgaaaaggagtggcattctgcagggggacaaggatacctgactccgttatcaggggatggggagaaatcaaaaaagatatttatattcagagaaaggatgataagaatggcaagaagcgttacagttataccagcaagaaaccgacagcgtgaaaca

SEQ ID NO: 23577 - DNA, 260 bp, Unknown; identical to SEQ ID NO: 23002
  Description of Unknown: LeftRegion for integrase B10578 sequence

SEQ ID NO: 23578 - DNA, 260 bp, Unknown
  Description of Unknown: LeftRegion for integrase B10579 sequence
agcaccatttgataaacaattattagatttaatgcttcaacttaactctaatgaaaaaattgaattgtataatatgttaataagtaaggtaggtaataagtaatgaaaccatttgtaaaaggaataatagcaattttattaggtattgtaataggtatattgttatacatcattattaagtattggggttttattagataatgactaatgttgttttatatttaaggtattcaagtgctaaccaaacagaacaaagtatt

SEQ ID NO: 23579 - DNA, 260 bp, Unknown
  Description of Unknown: LeftRegion for integrase B10580 sequence
ctcggcctggacgacggggttccggtcattgaggtcataccacaggacggcggcagggccgaggtgtacgccgctgaccagtggcaattgcactggcccacctgactgggtgctttgcgccattgatgacgtaactccctaactcgacatgcgttcagcccgaggtttgtattacgggttgccgttgttagcgtgaccgaatgcgcaccgacctgtacgcccgcaagtcctccagtgaccttgggcgttccgtggcccgc

SEQ ID NO: 23580 - DNA, 260 bp, Unknown
  Description of Unknown: LeftRegion for integrase B10581 sequence
ttattgatgattttcgtctatgcatttataatccttacaataaagcagataatgacaaaaacttactaatttttgaggattatattaggcttacacaattgccaaaaaatattttgaaaaggttaaatgattactatataacaataaactcagagttttaggggctatgcccctttaattttttaattaggagcgaacatatgagcgaaattactcaaataggtgttatttatgcccgatattcctcagacaagcaacgg

SEQ ID NO: 23581 - DNA, 260 bp, Unknown; identical to SEQ ID NO: 13018
  Description of Unknown: LeftRegion for integrase B10582 sequence

SEQ ID NO: 23582 - DNA, 260 bp, Unknown
  Description of Unknown: LeftRegion for integrase B10583 sequence
tatgagcatgaagtgatgcacattgctaatgatgatatgttcgggggtaaggacatacatgaaattgaaccgcaactgagaaagggtgcttaaacatagccaaaaagagccgaaaacagaataacaaggctgtcatatatgcgaggttttccagtcacaaccagaaggacgcatccattgaacaacaggtcgaatggtgcatggcaatggcaaagcgggagaatcttgaagtcatagaagtctatccagactatgccgtc

SEQ ID NO: 23583 - DNA, 260 bp, Unknown
  Description of Unknown: LeftRegion for integrase B10584 sequence
cagctttgccacctgatatgcgtgcaattttaatcaatactcttgtacagcttatcgaaacaagcagaaaaataagaaaagccactgatgaattcgtaaatgttgatacggatgaggagaagaaatcagactaatttcatctgcaaaaaaatccgtccagctttatgactggacggattcactaaaaggaggttttgaacatgagaaaagcagtattttacggtcggtacagttccgtgaatcagaccgagcagagcatt

SEQ ID NO: 23584 - DNA, 260 bp, Unknown
  Description of Unknown: LeftRegion for integrase B10585 sequence
gtgctgaccacgattccgaatctctgctcagcaccttccttcaggaacaggatgagcgcatttcccatatgcgcatcccgaatccattgcgccccggggatttctttcactgtatggacgagcttgaggaatattccgaagcgctgcgagaggcagaggctaaaaggaacgtatatcattaatcgaaaggagcccccgccatgtccgaacttcatatcgccgcggtctatatccgcgtgagcaccgacgaccaggtggag

SEQ ID NO: 23585 - DNA, 260 bp, Unknown
  Description of Unknown: LeftRegion for integrase B10586 sequence
tctttttgtttgtcaagtctctgcccctgctccgtgtaggggctttgttgaatttgtttattctgccctgttttttctcaacagtttattatccgtaattgcgattatacaataggtttttcaatgtgtacagttatttattaactgttgattttcaaatatggctattttttagaagaggagtatgctttttgtttttgatgtatttgcgcaagtccagagctgacggagaacatgagaccgtcgaagaggtacttgct

SEQ ID NO: 23586 - DNA, 260 bp, Unknown
  Description of Unknown: LeftRegion for integrase B10587 sequence
gcgacgccgaaggcttccacactctgatcatgtacaagtaaagggcggcggacttaccacccgccacccagaaaacaaaaaagccgccccggtgttaccagcaccagagcggcagacatacagttcccccgtatcaccacaatataggggctttatgcccttttattgtaacacacgtgtcacaaaaaaggaagtgcaaaatgcttgatttatcagctttcggcgtcctgaaggctgcggagtatatgcggtactcgacc

SEQ ID NO: 23587 - DNA, 260 bp, Unknown
  Description of Unknown: LeftRegion for integrase B10588 sequence
aaagaaacttcacctgtccgatgagcaatggaattccctgattcatgatgctcttggcgagttgaaattaatttggaatcagtcaactggtaagtaattttgtgggggcttcggcccccattattttttttgtctaaattttgggcttgacaaatgtacaaaatatggtataatggttcaaaattttaggagggacttttgtgaaacaaacagaatttattaaagacgtagggatatatttgaggaaatccagagcttca

SEQ ID NO: 23588 - DNA, 260 bp, Unknown
  Description of Unknown: LeftRegion for integrase B10589 sequence
gattccgtcaaggagatctccgcttcactcgccggctcgaagctgtactcctttggctcgcttctctccggagacgcgaatcagacttttctcatggagatggagcgcgcacaggtcgaacaaaatatgatcctcatgcgacagaatgaggaaatcatccgccttcttcagataatctatggagcaatagtcaataaccaatgagaaggtctgtaatttatgccagatactccgccggcccgagccagactgatgtctcg

SEQ ID NO: 23589 - DNA, 62 bp, Unknown
  Description of Unknown: LeftRegion for integrase B10590 sequence
gtgccttcgctgagcgcttcggcatcgtcattgtcgcagaatactgcgaccgggctctcacc

SEQ ID NO: 23590 - DNA, 260 bp, Unknown
  Description of Unknown: LeftRegion for integrase B10591 sequence
tgaagtgcctgttcatgaggcttttcctattgaatacggagaccgtctggatttcagagatgatgttgatttggaaatcgatgaaaaacttgctatgctgaatcgtttcggaaagcagaaagcacttgaatacatcactgatttatcggaacagcagaaatatacgaaacaagattaaattatcagggaggttttttcttatgaagaaagtagctttttatgggcggtacagttctgtaaaccagactgagcagagcatt

SEQ ID NO: 23591 - DNA, 260 bp, Unknown
  Description of Unknown: LeftRegion for integrase B10592 sequence
tctttctgtttgtcaagtctctgcccctgctccgtgtaggggctttattgaatttgttcattctgccctgttttttctcaacagtttattatccgtaattgcgattatacaataggtttttcaatgtgtacagttatttattaactgttgattttcaaatatggctattttttagaagaggagtatgctttttgtttttgatgtatttgcgcaagtccagagctgatggagaacatgagaccgtcgaagaggtacttgct

SEQ ID NO: 23592 - DNA, 260 bp, Unknown
  Description of Unknown: LeftRegion for integrase B10593 sequence
gtcgccacggaaccgggtgtgcgggcggtcaggaacgccttgttcaggcacctccgcagggaaggcggcggatcggaggctgccgcaacgtcacgcttgccgtttgcgctggtcacaggcactcccctgccgttgacatttgctagccctaccggtaacaacgacctcacactagcagatgttgaactagactggcccgcatgtcccgcgacgagaacggccggcgtgccgcagtgatttacctgcggcaatcccttgac

SEQ ID NO: 23593 - DNA, 260 bp, Unknown
  Description of Unknown: LeftRegion for integrase B10594 sequence
gatgatggcactaaaaaggcattggacaattggcaagcacaaaacgatatacacagaacatcaacagtagacactcaacaaacgcaacaaacacaacaggaacaaaagaaaaaacattggtatgatgatgttttagacggaacattttaataaaaaagagccacctacataggtggctttatttgtagagaggattaactatggaattgtcaaaaggtgtaatatacgctagatactcgtccgataagcaacgtgatgaa

SEQ ID NO: 23594 - DNA, 260 bp, Unknown
  Description of Unknown: LeftRegion for integrase B10595 sequence
tacgaggatgccagggcattttgtgcggtaggcgaggggctggagatccacgagaacgaagacggtgacggatacgtggtcgaaggatatggagatccggtcggcaccctgccggaaagcctcgaattgaacgagaaccgcgtctgggttgccgaggtccttgaggacgatccggacgacttccacatccggatctacacatgaccgccgtcatatacgcccgctactcgtcagccggccaacaagaaacatccatcgag

SEQ ID NO: 23595 - DNA, 260 bp, Unknown; identical to SEQ ID NO: 18262
  Description of Unknown: LeftRegion for integrase B10596 sequence

SEQ ID NO: 23596 - DNA, 260 bp, Unknown; identical to SEQ ID NO: 15967
  Description of Unknown: LeftRegion for integrase B10597 sequence

SEQ ID NO: 23597 - DNA, 260 bp, Unknown; identical to SEQ ID NO: 18292
  Description of Unknown: LeftRegion for integrase B10598 sequence

SEQ ID NO: 23598 - DNA, 260 bp, Unknown
  Description of Unknown: LeftRegion for integrase B10599 sequence
tcacgtttcccatgcggagatgaaccctgctgccatgctaccggttgtaggactttttgccaattcgcacaatgtgcaatccacttccctaatcgttatgtttggcgatgatggtaaggttcaaaaattcgccttcacagagcctcagcaagccaaagaggtgacacctcctcggaagcaaccatttaagtaacttgtctatgattgccagcatcacatgcgccatctacataagaaaatcccgcgaggacaaggacaag

SEQ ID NO: 23599 - DNA, 260 bp, Unknown
  Description of Unknown: LeftRegion for integrase B10600 sequence
cgcagaaatcgagagtggctgtattgccgtggtcgtggtagacggtacagacgggtttttaaaacaaatcgagttcggtgagaactccacctcgcttcactcgtttaatccgtattatcccgacatggagtttgtagatgccgaccagaaacgtttgcactttgtcggtcgcgtccgggaaatgaagcggaggttctgatatgcgccagaagtttaagatcgacctctctatgctgaccccggaagaacagcagcagttt

SEQ ID NO: 23600 - DNA, 260 bp, Unknown
  Description of Unknown: LeftRegion for integrase B10601 sequence
ccagccttgccacactggatagccaaactcttactctatccgcagaggaagtgcgcttaatcctcaagtaccgtgctttagacaaagagggacgaacgatggtagagtctacccttattcaggaaacccgcagaatggatacggagaaaggggaaactgtaagtgccgggtaatcagccttgccgaatggaggaagaaccatgtatgaagaagtgaaaaatgcctgcatctacgccagatattccagcagcaatcaaacc

SEQ ID NO: 23601 - DNA, 260 bp, Unknown
  Description of Unknown: LeftRegion for integrase B10602 sequence
gctttcaatgccctgctagacgagcgcggcatgtcgcaggcagactttgcccgcatgtctgggtggcagaccagctacgtttctcagatttcgcgcggcgcgattaaagaccccagcttgtcgaaggccatggttattgcgcgcgtgcttggcatctcgctgcaggagctgcatgaccgcagctttggggatgatgtcgaatgaacgccgccatctacgcccgctactcaagccactcccagcgcgaggagtccatcgac

SEQ ID NO: 23602 - DNA, 260 bp, Unknown
  Description of Unknown: LeftRegion for integrase B10603 sequence
tcgcaacgctagtggacctctgctcgaagctgaaccccgagcagatcgacatcctcgtcatgaccgcgcgtaacttcgtcgcggcaaacgaaaaatatggagagggcgataagcgagatgtggagggagctgggctcgctctgaccgtcgattaattagttacgcgcacgcgcggcatatataaggaaggaaggtggcccatggaagggatgtactgcgcttacctgcgcaagtcgcgggccgacgaggtccgggagaag

SEQ ID NO: 23603 - DNA, 260 bp, Unknown; identical to SEQ ID NO: 19085
  Description of Unknown: LeftRegion for integrase B10604 sequence

SEQ ID NO: 23604 - DNA, 260 bp, Unknown
  Description of Unknown: LeftRegion for integrase B10605 sequence
cgcaccggcttcggaacctcttacgtttcccaggtctgccggggcgtcgtcgatgatccgtccctgagccggtgccaggtgatggcggacgtcctgggcgtgacgctccaggacctctacgaccgatcgtttaaatgaaaaatggcccccgcgaacaccgacgacgcgggggccggaaccggagcgacgggaggccgctcatgaagaaggataggttatcggcggctgtttacgcgcgttacagctcgcacgcccagcgg

SEQ ID NO: 23605 - DNA, 260 bp, Unknown
  Description of Unknown: LeftRegion for integrase B10606 sequence
cctgcctccgtcaactacgtcggcaacaagaacaccggcaaattccacctccccagctgctccagcgtgagcgacatgaatgagtccaacaagctctactggaccggcagccgggacgagctgatcgcccagggctacgtgccctgcgcccgctgtcatccgtgacggtgcccgaatcgggcacgaagggagtgacccccatggacgccgcccagtacctgagaaaatcccgcgtggaggagggcctggagaccgacgag

SEQ ID NO: 23606 - DNA, 260 bp, Unknown
  Description of Unknown: LeftRegion for integrase B10607 sequence
taaccgaatatacgttctgtgttaataattaaaattaggaattagaaatgaaatatggacaaacaatattttcatatcctcctatagggaggattgatatttcatgaaaattatcgttattagaggaaagaatatttctaaaaacatacaaaattgctatgattatatattgaaaatgtacggagggggatgcagtaataatgattgcaatctatgcaagagtgagtaccgaagaacaagcgttaaaagggagcagcata

SEQ ID NO: 23607 - DNA, 260 bp, Unknown
  Description of Unknown: LeftRegion for integrase B10608 sequence
ccgaccccagtcgagcgccctcgctcgcatcaggggatgccgactaggcaaccatgaagatgagacattcctaacccttcccgcccaaaaagaggaagaacctccctccggtatcgcccttctccgcccgcacgcgcccgactaacgcgctaacatcccgccaacccctaactcaccgcaccaccctcggaaacgcgcccgtgaacgccactcctgccgcccgcacccgaccgaagcgcgccgtcctctacctgcgccag

SEQ ID NO: 23608 - DNA, 260 bp, Unknown
  Description of Unknown: LeftRegion for integrase B10609 sequence
aggaaatcacggaaaaatggatgggttatttcggacagattgaatactattgctaaaataaaaaaatcccctctcctgttggcgcaggaaagggaatttcataaagcggtcgtaagatacaaccacatgtcgcaactgtattgtatcataagaccgctctttttgctataccctaaatataggaaaaggaggtcttttgtatggtagctatttacgcaagacaatccatcgacaaaaaagacagcatcagcatcgaaagc

SEQ ID NO: 23609 - DNA, 260 bp, Unknown
  Description of Unknown: LeftRegion for integrase B10610 sequence
cggaaccagcggcggcagttaggcacggcgcagcgacgtccggcgagctgggcgcgggacaggccgctcgcgcagatacgcggcagggcagcagtggtcatcggatcccccctcaaaaggcccgtccccgcagatcagacctagactggcctcacctgtcgggcgaacctgcgactgcatgtgtatgacatcataggggaatggacagcgtcccgccccgcgaatacgccctttacctccggaaaagcaacggccccata

SEQ ID NO: 23610 - DNA, 260 bp, Unknown; identical to SEQ ID NO: 22873
  Description of Unknown: LeftRegion for integrase B10611 sequence

SEQ ID NO: 23611 - DNA, 260 bp, Unknown
  Description of Unknown: LeftRegion for integrase B10612 sequence
tatatagtatataaaaataaaatatataaggagttagagatttttttgttattttgttatatttgctattttcacacgaaaaaaaccgcctcgataggaccgagacggcgtaccaagttaacccccggcaagaggttaaaccttgacaatagaattatatcacacctccccggggaaaataaaaagggagttgttggaaaatggatttagaaatgatgaaagctagaaacgtgttaagagtagcgctttatgtaagggta

SEQ ID NO: 23612 - DNA, 260 bp, Unknown
  Description of Unknown: LeftRegion for integrase B10613 sequence
actgcagcaacgacgaggagatcatgtactcaatccagtgcgttgccgcataccttgcgctgaacaacggcgacgatgcgctcgatgccatcgacgaccttagatatgcactcggcaaagaagactactagaccccaccgccttatggtgcgagggatggggtctgccagatagccgcccgttggaggggcgattcgattatgccagaagagataaagactgcggttatctatgcccgcttctcgtgctcgaagcagcgc

SEQ ID NO: 23613 - DNA, 260 bp, Unknown
  Description of Unknown: LeftRegion for integrase B10614 sequence
atgatggaatcgcagctgtccaaagcgagacaaatcagccggatggcatcatcgaacaacctggcaacgagcatgtcgaaaagcaagcaagcaccgacaatcaaggtaacgagcacaaccaagacaaagaattaaaaaaagcagaataactatctcaggccccgtctgcaattagcagatggggcttttttgttgagcacatgactgcagctatctacatccgcaaatcacgcgaggacaaaaataaacccgcgcaccgg

SEQ ID NO: 23614 - DNA, 260 bp, Unknown
  Description of Unknown: LeftRegion for integrase B10615 sequence
tttcactttaaccagttatccccgtggaaccctaaacttatgaaaaggagggctgaaaatggaagcgataagaacggaaccggcggttcgcgagtatcatccgaagctgaaggcggaggaccgcgaacggatcagcgcggagatctcggaggaattcctgaatatactcagggaacattttaaacgtaagggtgagcccgttgacaggtatatatgtaagacaaagtgttgaccgcaaagagagcgtaagtattgaggca

SEQ ID NO: 23615 - DNA, 260 bp, Unknown
  Description of Unknown: LeftRegion for integrase B10616 sequence
tgcatccgcatgaaacttgacgagcttggactcgctcctgcgcagcttgcgaaaaaggcaggtgtgtctcgccagtacgtcaacagcctgctcaatggcgatacgaaacacttcaggctcgacaaggcgtggcggatagcgcacgccctcggcatgaccgccgacgaactcgccgatgccctctatgggggtgacgtggcatgaacgccgccatctacgcccgatacagcagccacgcccagcgcgaggagtccatcgac

SEQ ID NO: 23616 - DNA, 260 bp, Unknown
  Description of Unknown: LeftRegion for integrase B10617 sequence
aaataaaaaaacttgaaactaaaaatttttaaacatcattgaataacaaaattaaatctagtaaaataaaaaagactccgagcgaaggattcttttttattatgacaataactttattttaaaaaacactttcaccattgaaagcttaaaaatatattactattttttctcggtgaagtcaagaaagggaaggcagtaatatgtattgtatttatcttagaaagtctagaaatgatgaaggaactattgaagaaactttg

SEQ ID NO: 23617 - DNA, 260 bp, Unknown
  Description of Unknown: LeftRegion for integrase B10618 sequence
gtcgataaaattatcttgattgccggagatagcgactttgtccctgctgcgaaactagctcgtcgtgagggtatcgattttgtcttggacccaatgtggaaaaccgttaagcccgacttgctggaacatattgacgggatcaggactacaataaaaagaagaggccccaagcagaaagcagaactgcaggcagaccccaaatgacctgcgccatctacatccgcaaatcccgcgacgataaagacaaggccagccaccgc

SEQ ID NO: 23618 - DNA, 260 bp, Unknown
  Description of Unknown: LeftRegion for integrase B10619 sequence
cagtggaacttcaacagcgaaggtttttggatcgaactttattacaaaaatacacggtttgcattcaatccggtttttcaaacatggaccagaaatcgtaaaatattgacagatgatgtcaacatggagaaagccattctgcagcagatattacccaattatcctgcatggagaaaatatcaacggcagttagacagagcatgaaggcgactaccgctgccatctacatccgtaaatcgcgcgaggaaaaagacaaaccc

SEQ ID NO: 23619 - DNA, 260 bp, Unknown
  Description of Unknown: LeftRegion for integrase B10620 sequence
catgggcaattccaattcccataaactgcacttttctgactgtcgttgggcagaaaaaaccagtccagctaatagggtctactttaatacccgagaagaggctataaatgctggatacgtgccatgcaaggtatgtaatccctaattcaataaaacagttacccggtaccgacgccgggtattatttttgaggtgaaaacatgaagcgcggagcagtttatattagggtttcccacctaaaggatgacggagtaagtccg

SEQ ID NO: 23620 - DNA, 260 bp, Unknown
  Description of Unknown: LeftRegion for integrase B10621 sequence
gtgtcatttggcagtgttgacgttggcgattgctgtaaactacccctatgccgcgccagcgtaagcccaaggtcatgatcgatcttccgtcgcccgcgccgcacccccacccagacggttgcagctgtgtcctgactcagccctacatccgagtctccagggtcggcgatcgaaaattcttgatctcgcccgagattcagatgcgcgcgatggacgagtgggcagtcaggaacaacagacggcttttgcccccagtgtgc

SEQ ID NO: 23621 - DNA, 260 bp, Unknown
  Description of Unknown: LeftRegion for integrase B10622 sequence
ctatcgcacaataacagtagttacaaataaaaacgccccagtgttaccagcactggggcattgagaaaactatactttgcaaggaacttgcggtataatcctctccctcacagagactattatatcacaaattcctggcaccgtgtaggtgttatttttgtacccatttttacgtacacttaagaaggaaaggtgatacaatgagcgtaaaatatgcatacggctatatccgggtatccacacacgatcaggaagaaatc

SEQ ID NO: 23622 - DNA, 260 bp, Unknown; identical to SEQ ID NO: 23035
  Description of Unknown: LeftRegion for integrase B10623 sequence

SEQ ID NO: 23623 - DNA, 260 bp, Unknown; identical to SEQ ID NO: 19293
  Description of Unknown: LeftRegion for integrase B10624 sequence

SEQ ID NO: 23624 - DNA, 260 bp, Unknown
  Description of Unknown: LeftRegion for integrase B10625 sequence
caaaagataaaaatgtattaaataaaaaccgtccctgctaccaacaggaacggcctaatgaatactatacggtgtcaaggcacgatataatactccctgaacaagaatattatatcacatttcctcgacacctgtataggtgttatttttgtacccatttttgtgcgacatcgcacatataattacaggaaggtgatacaatgagcgtaaaatatgcatacggctacatccgggtatccactcatgatcaggaagagatt

SEQ ID NO: 23625 - DNA, 260 bp, Unknown
  Description of Unknown: LeftRegion for integrase B10626 sequence
gtcatacatacatttttgtcaatttaaaaccgccctgctctaccaaagcaaggcggtaagctcccgaatgatacgaaagccctaagcaagcatattgtatcattctcggagcagcttcgcaagcggaacacccgtttgacgcaggctgttatttttgtacccaaaaaccaatacaatatagagaaagaggtgcatatgctatgaaagaaaaggtttctgaacgcaaaaccggcgcgatctacatccgtgtatccaccgac

SEQ ID NO: 23626 - DNA, 260 bp, Unknown
  Description of Unknown: LeftRegion for integrase B10627 sequence
catcacgtgctgcggcaccgggatctcgagcactacacctatggccccgacggaccactgttcgactccccactcgaagccgcggaggctgaccacttcgccggagtgttcatccagcactgccgcggctacaacgggtcgcgctttacgcggttcgttgatgtagattccgcgcggtccgctcggcgctaggaacctccgtgagggctgccggctactttcgggtgtcgactgagcagcaggcatcggccgaccgcaac

SEQ ID NO: 23627 - DNA, 260 bp, Unknown
  Description of Unknown: LeftRegion for integrase B10628 sequence
tatgtagagaaatcaaagtatgaattttataaggcgttcgccaaagaacatggtatttcatttgccgaactcgtgcgccgtgcggtgtattacagcatggaaaagcatggatttgacccggacgacccatatttaaagaattaaaaatagtccctgccggaaaggagaaatcggcagggactattcaggaggtatgcaaaatgacaaccaacacttatagtataccatgcaaagaagaaaaagtcaagtgcgttttctat

SEQ ID NO: 23628 - DNA, 260 bp, Unknown
  Description of Unknown: LeftRegion for integrase B10629 sequence
ttccatccggatgtaatggaagcgatagagtctgccattcaggaaaaagaaacacagcgccagatccgcgaccgtgaacgtcaggacgaactaaagttgataaagattttcgactccctcacttcagaaggaaagcagtatttgttgcaacaggccgacatcgcaaagaagatgttcgggacgaaataggaggtgaacgaatgaacgccgtcatctatgcccgcttcagctcctccgcccagcgtgaagcctccattgaa

SEQ ID NO: 23629 - DNA, 260 bp, Unknown
  Description of Unknown: LeftRegion for integrase B10630 sequence
tttgtgccttcaagattattgcgtaagcaaattgcaatacgattattgttgtatattcaagatagtgtgatcgtaattgtctttttaaataaaaattaaacaaaaattatatctcaccactaaggtttataaaagcataagttagcaggtgtcaccatgaaaaaagccatagcatatatgcgattttcatcacaggtcagatgtctggcgactcattaaaccgacagagaagacttattgctgaatggttaaaggtaaat

SEQ ID NO: 23630 - DNA, 260 bp, Unknown
  Description of Unknown: LeftRegion for integrase B10631 sequence
tctctgagtaaatgtcctctcgatcaactccgtttggaatgttggatctccctatcgttgcgagaatccatgggcgaatggcttgaagtatcggtgtgattgcttctctgtcaccgtttgtatattgtctgacaagggcagtgacggtatgcttgtccatagggcgtgatgctagttgaatcaattcgaggggcttctcaatggcttggtacgtttacgttaggatgagtcatcgatcttcggcgtattctggaatcagt

SEQ ID NO: 23631 - DNA, 260 bp, Unknown
  Description of Unknown: LeftRegion for integrase B10632 sequence
tgaagcaaaaatcacagggacaaaagatgctccaaaagttattagctttgacatatattagctatctctaattttaaaaataaaaaccgcccctgcgctaccaacacagagacggctacatatccgaagatatgcaactattaatgaacaaatatattgtatcatcttcggaaacagcttgcaatcggaacatattttcgatggctgttatttttttacaaatttctcatacattttacaaaggagatgatatcatggaa

SEQ ID NO: 23632 - DNA, 260 bp, Unknown
  Description of Unknown: LeftRegion for integrase B10633 sequence
taataatataataaaaaaatatataaaaataaaaatatatagtaactttcaactttttttgttattttgttatgaagataaaaaaaccgcctcgatttatagtcgagacggtaactgatataatcctcctgggagaactataatagccgacaatttattatagcacacctttccaggttgagaaaagggagactataattatgaataagcctatcgtacaccgattacgagtagcgttatatgtccgagtatcatctcac

SEQ ID NO: 23633 - DNA, 260 bp, Unknown
  Description of Unknown: LeftRegion for integrase B10634 sequence
aacgaccgcttgctgctctacgccctggacgttttgatgatgcagaacggtttccggacggactacactccagacggcgatgttcttctgatccgcggcgacgttgcgaagccagtcacggaagaagaactcctggcgatggcgcgggacatctcacaacttgccggaggacagctccgtcgtctctttgggggtgcatcatgatcagagcagtgatatatgcaagatactccgccggaccgcgtcaaacagaccagtct

SEQ ID NO: 23634 - DNA, 260 bp, Unknown; identical to SEQ ID NO: 19365
  Description of Unknown: LeftRegion for integrase B10635 sequence

SEQ ID NO: 23635 - DNA, 260 bp, Unknown
  Description of Unknown: LeftRegion for integrase B10636 sequence
ctggctactgctcatggcgggcttcaagcgagtatccgctctgttcttggctccatggccgcggctgaggtggacctttgcatcaatggcgatatccccgcagcgacaacccgcatggatgaaatcaccgttggtgtgcgcggcatgaccagttggctgcaagtcatgaccgagaagatgcagtaggagccgtctaccccatgccgcgccgccgcaactcccgctccgctcgcgcgaccgtccggcccctgcaggccggt

SEQ ID NO: 23636 - DNA, 260 bp, Unknown
  Description of Unknown: LeftRegion for integrase B10637 sequence
aaattgaaaaaatagtatacaaactcgaaaacattataaatgatattgcagttattgactatacaaattctgccgcgtaaaaaattcccctgcctgttggagcagacagaggaaaaagaataaagtgcatttatacacatatgtcacgctccccacggagtgtgtgagttgaaatataacacaagaaaggaagatttacgatgaatgtagccctgtatttacgaaaatcgagagcggacgaaaacaatccgcttgaaaca

SEQ ID NO: 23637 - DNA, 260 bp, Unknown
  Description of Unknown: LeftRegion for integrase B10638 sequence
agcatgccggcgaacgcccctatttcgcctgctgccaaaagcgagaaggtcacgacggctttcccatatggagggtgaccgttgtctatctcggaagataaaagagccccgtcggctaaagcggtaccagcgctgccgacggggcatctaaccagtgcacccatgcaaactcaacttgaaggaagggtgacatatctattatgccaaagagggcagtgatatacgcgagattctcgtgcaacaggcagcgcgaggcatcc

SEQ ID NO: 23638 - DNA, 260 bp, Unknown
  Description of Unknown: LeftRegion for integrase B10639 sequence
ggcctcgtgctggctgcgctgcggcgcggcgggcctggtcggccttggctactgctgggcctcgccgcttcggtcgccgggaatgtgctgtcgcactatcccgcggctgtcgtgacggtcgcccccgggatctccgcttggccagcggtcgccctctacggctgccactgcctcgtgaaccggcccgatgaggtctcgtcatgacgtcaccgatgacccgtgccgtcgtcctcgatgccgtagtgcgcgtctcacggcgc

SEQ ID NO: 23639 - DNA, 260 bp, Unknown
  Description of Unknown: LeftRegion for integrase B10640 sequence
ggagaggcgcttaggtttggccttcgggccggtgccgcgcttgagcggcttcgagcgctgctgccaggcgcggttctgctccagtgagctacgtttcaaccccgcagaccgcttcacagtgcgatctccggggtggcacccctaaaggtgagagctattagactctcacctttaggggggagttctgacgaggagagagaatgcgagttgtgggctatatccgcgtgtcgcgggtcggcaagcgcgacggggagcgattc

SEQ ID NO: 23640 - DNA, 260 bp, Unknown
  Description of Unknown: LeftRegion for integrase B10641 sequence
gttctggtcaaaatagctgatattttaaatacaactacagatttccttcttggacgcacagatactaatccacccgatgctgcaacaatcaaacaactacaaggaattaatgaattaccgcaagacaagagaagatttgtaataaatataataaattcgattatttcagaaataatcgaagaggctaaggaggaataggtatgcatggaatactatacctgcgcaaaagcagagaagatgagcaatatgaaaaaaatact

SEQ ID NO: 23641 - DNA, 260 bp, Unknown
  Description of Unknown: LeftRegion for integrase B10642 sequence
caatggcaaaattgttcctgtggcaacagatccagttgaagcaatcagcattgaaagcattttggaagaaacaaagcaaaagattttgaatgcagataatctgaccattggtgacagatttgcagatgcagctgatgtgactgcaatattaaacacatttgaaatagtattagaaatgcaaaagaaaaggatgatttaaaatggttatgactaaaacaacaaattatattaaaaaagtccgtgtagcaatttatgttcgt

SEQ ID NO: 23642 - DNA, 260 bp, Unknown
  Description of Unknown: LeftRegion for integrase B10643 sequence
aattgtttccctcctgtgttttttatgtacttattttaccacagaattacgaactcgtgttcttattatttttaataaattgcatattaacaattcatatatatagacgtttgtatttataaaatgttacgtgacataagtagctaaaaaaggtggtgcataagacttatttttaaattaaccgaaaagggtgaaatagcatggacaaagctgtaggttacgttcgtcaaagtaaagaaagaaaggatagagattcaata

SEQ ID NO: 23643 - DNA, 260 bp, Unknown
  Description of Unknown: LeftRegion for integrase B10644 sequence
ggcaaccaagcacacccgggccaatcgaattgcagagacccgggccaagctggtggttgcttacaccgagatgttctcactgtcccggacccgtgtggctgtcactaaggacaacccgctcggactaccggggagacgacgagatgacgtttggctcgggccgcctatggagccggacatgacgtggttaggagacgacgatgccccgtcaagctgatcttcatgtgcccaagcgagcccgtatcctggcccggctatca

SEQ ID NO: 23644 - DNA, 260 bp, Unknown
  Description of Unknown: LeftRegion for integrase B10645 sequence
atattgagaatttttttgagaacagcaaaaagcaggagggtattgccgaaaagcttgcatctgtttttaataaagaatggtttgactttaagcccgacaagaacggcataatgacggtgagcatgaatgttggaacaaaagattaatgctattaaatatgaatcttcatacaaaaaagataattatttccgcctgacggggtgaaggagcgtgaacagaaaatgagctattgtatatatctaaggaaatcaagacctgat

SEQ ID NO: 23645 - DNA, 260 bp, Unknown
  Description of Unknown: LeftRegion for integrase B10646 sequence
aacccgtacctgtatcttccactcggcatcatcgcagccacgtcatacctcgtgctccaccgtgagcactaccagcgtccggaccgcttcgaagccgaactcgccctcctccattggctaatcgggatcttcttctggccactaattccgccgttgatcatccttgaagtggtgatcaacttccttcgctccctccgaaaatgaccactccccctcccccccgcatcgccatctggaccgccgtctcctccaaaccccag

SEQ ID NO: 23646 - DNA, 260 bp, Unknown
  Description of Unknown: LeftRegion for integrase B10647 sequence
gggcgagaacgcgaacaaggtcaggattgtcgggcgagtggttgaagtgcggcacaaaacgatataggcaactgttcgggatttccgacaacttgcaactttgatacaacttcgatacaactttgatacaacaaaaaaagaaccgcctcaagggcggctcattgtcatgtcatgatattttattgtgaaagcgtgatttcatgcaaaccgccgccatatatgcccgcgtgtctactgattggcaagctgaacacgggtac

SEQ ID NO: 23647 - DNA, 260 bp, Unknown
  Description of Unknown: LeftRegion for integrase B10648 sequence
ctaccttttgctgatgattatcatacgagactcatacgctctaaaaacgaatttaaagcatttaaatggttacaaagtaatcttattccacttggtatagaaaattcaaaatttgacaacatatgggatattgcggacaagtttcaagtcccacctgaatttgttgttaaagtattagaatatagaaaggagaatttcatatgaaattagcatgctattgcagatattcatctgatatgcaaagagaagaatctattgaa

SEQ ID NO: 23648 - DNA, 260 bp, Unknown
  Description of Unknown: LeftRegion for integrase B10649 sequence
ctgcccgttacgattatcggcttggtcatcgaggttcgtcataagcttatctaactggaatattttggagcagaattatggaatattttttatataacaaaaagcccgcaagcgttagcgcacttgcaggcagaaagaaaggaattcgataaaatgaatatttcaagtagcattatagcacatacggagtccggactctaatgaatgtcgcaatttatgcccgtgtcagctcagagtggcaagctgagcacggttactct

SEQ ID NO: 23649 - DNA, 260 bp, Unknown
  Description of Unknown: LeftRegion for integrase B10650 sequence
ccgtccttgcggaactttcctttattgacaaaatggataatatcctgaaaatgcacattgcttattattacaacagaagaaaataaaaaaaaaaaatcccccacggtactcgcaataccgcaggggacaggaattgtgatgtacacaatcctcacataattagtatatcacgattcccccaaaaaatcaaggaggaatttatgaaaaaagtagttttttacggacgctacagctccgtgatgcagaacgagcagtctatc

SEQ ID NO: 23650 - DNA, 260 bp, Unknown
  Description of Unknown: LeftRegion for integrase B10651 sequence
tttgaaaaacgaagattttctatttaaaaaactcttattgtattattttgtaatagtaagccctatttatttctttgcaaataatattctttatgatttttttccatatgtaattacatctttaggtctctttgtattaacaatatttgttactactcatgttttttggttgcacttaaaaaaaatcagaggacaaaaaaatgaataaagctgtaatatacgcaaggtactcatcggataaacaacgtaccgaatcgata

SEQ ID NO: 23651 - DNA, 260 bp, Unknown
  Description of Unknown: LeftRegion for integrase B10652 sequence
gaaaccccctgccaggccctccagcctggtcgggggcccctttttttgtgtctaacacatgcagacattagtatgtgtgcttgaataatcctgccccatcgcggactcaaacgggctgcattgttcaaacgtgatacggtctctacatgcgtgtattgggaagagtgagactttctcggtctaccgaggagagtaccagcgtggagcgccagcgcgagatcatcgaggactgggcccggcgcaacgaccacgagatagtc

SEQ ID NO: 23652 - DNA, 260 bp, Unknown
  Description of Unknown: LeftRegion for integrase B10653 sequence
ttatgggaaaatagaaaaaaatatttatgcagaatatttagaagaacttataaagcatcttgaatataaaaaggatcaagttatatctatgtcaaatgttgattttacttttaaatgtaatgtatgtgaaaacacttatgttatacccaagagggatttatataaaaaaaataattgtccgtactgtgaaggagaactaaatgaaggtagcaatttatattagaaagtcaagagaagataaagatgaatataaagaagat

SEQ ID NO: 23653 - DNA, 260 bp, Unknown
  Description of Unknown: LeftRegion for integrase B10654 sequence
tagtaatatctttctctggtgagaattttaaaagcatcgtgaaagaagcggagtttatgttgcaggaccttgaaaaagaggccgttgccaagcctgtcgatagcgataatgaaaaaattaagctacagcttgagctagaaaagaccaaactggaactggaaaagctcaagctccaaaacaggacccattctccataacacatgaatgcagccatctacatccgcaaatcccgcgaggagaaggacaggccatcccaccgc

SEQ ID NO: 23654 - DNA, 260 bp, Unknown
  Description of Unknown: LeftRegion for integrase B10655 sequence
gggacgcgcggcgctcgcgctaacagcgggattcgcgagatcagccccgagcactacgaccgctggtcccggcgctcgcgcccgcgtggcccgcgtatcggcgtcgcgtctcgcaggatcgttttccacgaccccgacctggcggtgctcgacgtgcccagcacgcacaccgtcaccgtgcgacgcctggcgagcgcatcatgaggaccgccgtcgagacttacgagctgatccccgcctacgcgcgcctgtcgcgcaag

SEQ ID NO: 23655 - DNA, 260 bp, Unknown
  Description of Unknown: LeftRegion for integrase B10656 sequence
aattcaatgaataaacaagttgatggagcttttttatcgaaggatcatgatgcaacattaaaagctaaaatatcagcaaagcgggcagattgcgaaaacaagattaaaagagccaacatggattattataggggagttattagaatttatatgcgcaatatgagcgtttcagagcatggatatgcactagattggtctttgtgactcgctgtgccatctatatacgcaaaagccgggaagaaaaagacaagccttcccac

SEQ ID NO: 23656 - DNA, 260 bp, Unknown
  Description of Unknown: LeftRegion for integrase B10657 sequence
atcattagagactgttgaagaaggtgaagaggaagaagattattattgggatgatttagaggatgaagatttcttcaatagattaaaatagatttatatgggcaagcattgtaattctttaagaggaattaaaattctctataaaaaattacaatctttagactaaaatcattatatttacatcataaaaatgtaagtatatgaaagtcattggattagtaagagtttcaactcaagcacaggaatttgaaagccaatca

SEQ ID NO: 23657 - DNA, 260 bp, Unknown
  Description of Unknown: LeftRegion for integrase B10658 sequence
ttatcataaatcaaataaaaagtcaaggaaagtccgctgaaaaaagcggatttttttattgacaaatatatttttctgtattatagtaaatatagaaaccgtcctgcaatcaggtcacaggacggaataattgggggaatgtgttatatccaacaatgatattataacagattcttcccataatgtcaaggaggaatttcatgaaaaaatgtgtattttacgggcgttacagttctgtcatgcagaatgagcagagcatt

SEQ ID NO: 23658 - DNA, 260 bp, Unknown
  Description of Unknown: LeftRegion for integrase B10659 sequence
accccgcccggaccgttggcgcggtcttggtgggcggggcggcttggtgccatgtatataatacactccgagcaagtgtaattatagcatggcccggccaaaaacacaagtagaaaggcaagggctatttttgcgccctttttggtgctgctataatgaaaacgaagaaaacgaaaacaccggcggccgctcctctatctgtggccgatctggaaaatgtaaccgatctgtatatccgggtatcaacggcggaacaggcc

SEQ ID NO: 23659 - DNA, 260 bp, Unknown
  Description of Unknown: LeftRegion for integrase B10660 sequence
gcagggcggaatttcaggagatacaaatatttggattcatctatcaaaattattatatcacaatataaaataaaagtcaagaaaaagccgcccgattttgcataaatcaggcggctttcccgaaaggaagtacaatatgtcaatccaacagtatagtaatattttatcataaaccaaataaaaagtcaaggaggaatctcatgaaaaatgcagtaatatatgcccgattttcttctgatttacagcgtgaagaaagcatt

SEQ ID NO: 23660 - DNA, 260 bp, Unknown
  Description of Unknown: LeftRegion for integrase B10661 sequence
tactagaatttataaaaatgaataaagattttattattaataaaaaataaaaaaagatctagagcggctactctagatccaaaatgaaaaacccaaaagactactaatctataacaaaaataatgagacatacactataattgtatatgagtttttctatacaattatagcacattaaacatagaaaggaaagtgctataatgacagaattaaatgaaaagaaagcagcagtttatataagagtttcaacagatgatcaa

SEQ ID NO: 23661 - DNA, 260 bp, Unknown
  Description of Unknown: LeftRegion for integrase B10662 sequence
ctagacttactaccgactgtactggaacttgtccttctagtgcagtcactcgcttttcaagttgagttagtctttgcttcagttttttcaccacctctataaattatttagttaaattatactaaatatagtcgctaaagtacattacgaattttcataatcccggcctggtttcgggaataattttttgaggtgacaacatgaaaaagcagaataacaaaataatcaacaaccgggctattgccatagtcagagtgtca

SEQ ID NO: 23662 - DNA, 260 bp, Unknown
  Description of Unknown: LeftRegion for integrase B10663 sequence
tccaagccgaggtagatttccaatatgatggggggtctgcaatgcgtggatgtagctaaactgtactttaaccgaatacttaataataacatgatttaaagtaagtggcgccaagggatcgggcaatccttatggcgccacttacttttattattaaaataattccggccagcgccgggaatactttttgaggtgacagcatgaaaaagcagaataataaaaccatcaacaatcgagccatagctatcgttcgtgtatca

SEQ ID NO: 23663 - DNA, 260 bp, Unknown
  Description of Unknown: LeftRegion for integrase B10664 sequence
aatttgagcaagtaatagatgattaagtagaggattaaattcctctactttattgttatattgaatattttatactataatttatctaggggtgtaatttatgggaataaaatttgagatattaacagaaaataaatctagcattttaaatttattaattgatattttagtacaagcagaagaaagaggtgtacaaatttatgaagaagatgaatgtggtactacttagaatttcaacagataatcaagaaactttatca

SEQ ID NO: 23664 - DNA, 260 bp, Unknown
  Description of Unknown: LeftRegion for integrase B10665 sequence
gccatcaccgttcaacgcccgtacatacttccaagcaatttcataaagccgattctttgcaatcatcttccgttctttctttaacataattacaacccctctcttgtttattatacttctacccttgcttgagtttattataattcaacgctaggcataagtcaagtattttcttaaaaatttttttgggagtgctggaaatgccaaccgccgcaatatatgcccgggtcagtaccgacaggcaagccgaacaaggctac

SEQ ID NO: 23665 - DNA, 260 bp, Unknown
  Description of Unknown: LeftRegion for integrase B10666 sequence
tgcctcctctcgcgtctcgtagatagtgtacttgcaaaaccaatgcagataacccacaacctccccgtttttgatgatgccaaccgccatttgtaaaacctccctttgtttattgtgtttcttcccttgttcgagtttattataattcaatcataggcataagtcaagtattttcttaaaatttttttggagtggtcgaaatgcctacagccgcaatatacgcccgcgtctcaaccgacaggcaagccgaacagggctat

SEQ ID NO: 23666 - DNA, 260 bp, Unknown
  Description of Unknown: LeftRegion for integrase B10667 sequence
gtaggtccggccgagaggtccggcctacccgagtttttcaaaatatatttatgatttacccgggatccgtggtcatccgaaagaccacggatcattttttatactgagtggtatggatatttttgtagttttagaatgtgaaaaataatgattatatccaaaattattattatctttgtccaaaccaacaacattgagttatgtttaagataatagttttcagccgggtatctactgagaaacaggatctggatcagcaa

SEQ ID NO: 23667 - DNA, 260 bp, Unknown
  Description of Unknown: LeftRegion for integrase B10668 sequence
gtgtttcaatggaagaaatagttaatggaaaacctaaaaaaacaaagactttaatttttacagaaaaagattatacaaaacacgaattaaatgctattattgattttagtaaatttttaaaatcaaatagatcagtttacgaatatgaaattgctgaagaactgactaatataaataaatctaaaaaggaatgataataaatgaatgttgcaatatatataagaaagtcaagggaagacagagaagaaacaagagaagaa

SEQ ID NO: 23668 - DNA, 260 bp, Unknown
  Description of Unknown: LeftRegion for integrase B10669 sequence
gtacatggtcccaaaaaagtttatggaagtattacttttacagaaaaagattttacaaaatatgaacttaatattatattagaatttagtaaatttttaattgctaatagatatattgaaaaagaaattgaaatattagattttaaggaattagaaaaaataaaaagaaaaaataaaataggttagaaggaaatgacaaaatgaatattgcattatatttaagaaagtcacgtgaagaagaaatagaaacacgtgaagaa

SEQ ID NO: 23669 - DNA, 260 bp, Unknown
  Description of Unknown: LeftRegion for integrase B10670 sequence
ttatgttggctaaagccatagtggaaaaactatggcttaaaggccacattactgaagaacaaaaaagaaaaatcgatgaaagaaataaagttaaaattctttcaactaatcactagatattaaaaatggtttgcggtattgttttgttgcattcgagtccgtaaacgatttgggtgtataaaacaaggaggtaaactactatgaaaagagcagttgcatacattagagtatcaacgaaatcagatgcacaactacacagt

SEQ ID NO: 23670 - DNA, 260 bp, Unknown
  Description of Unknown: LeftRegion for integrase B10671 sequence
ggatcggatggactagcaaatgccaacaatcacgaaatggaaaagaaatttgcggcaacgcaataaagacagtgctttttttctcaaaatgcttgacctcaaaattcttgacgaaataaagcgtatagatttcaaatgaaagtcaggatgctgcccagccacaatttgccatcggcgcaagcggtgctaggattgatcgtatgcgggcagcactctacctccgaagcagcaaagaccgacacgatgtcagcctcgacgcc

SEQ ID NO: 23671 - DNA, 260 bp, Unknown
  Description of Unknown: LeftRegion for integrase B10672 sequence
tattcaataaaacacagaaaattcagtctgattttgataagagcgtcaaggaaatgctctctcagaaaggaaaataaaatttccgtccagtaccgaaatactgaacggattcagggtgttatgctataatacacaactctcacaagttttactattttattatagcatattctccctgaaaagtcaaggaggaatcgaatttgaaaaaagtagtattttacggacgctacagctccaataaccagaccgagcagagcata

SEQ ID NO: 23672 - DNA, 260 bp, Unknown
  Description of Unknown: LeftRegion for integrase B10673 sequence
acgtatagatagagatttataatattactacctacgatagaagtagaacgggggtgatgcctttggccaaaagaaggagaaatgctgccaatacggacagcgggcggataggcgtcatctatgcccggtactcttcccacagccagagggacgtttccatcgagcagcaagtcaacgaatgtcggaagttcgccgaggaaatggacatcccgatcacgaaggtgtatgccgaccgggccatcagcggaaggacggataag

SEQ ID NO: 23673 - DNA, 260 bp, Unknown
  Description of Unknown: LeftRegion for integrase B10674 sequence
gcttgatgcgttcacaaagcaaagggagatagatataaacaacgacatcatagaaaagcaaactagaatcgcaaaagaagacgttgttctttacgtggtcatcatcattgtcggggccttcgtcctgttttcgtggtcgctatgacccgcctctactggacgaagcgcttttactggtggctgttctcccgactgctgtcatggatacgatgatccccgccgcagcctaccgccgcgtgtctacagatgcgcaggtagag

SEQ ID NO: 23674 - DNA, 260 bp, Unknown
  Description of Unknown: LeftRegion for integrase B10675 sequence
caaaagggtgtgaaaatgtatcattaagcacattaagaaaaatatgtaatttatttcatattactttagatgaattgatttatggcgaaattaaaaaagaaatgatagtaaaatttaacttaactaattattcagaagaagaattaaaagttataaaaacagtattcaattatattcattcatcaagaaaggaaacgtaaatgaatgtagcaatctatttaagaaaatcccgtgacgaccaagaagaaacaagagaagaa

SEQ ID NO: 23675 - DNA, 260 bp, Unknown
  Description of Unknown: LeftRegion for integrase B10676 sequence
ggatgatgagtgaaaaaccaccttacgtcggcgtggactttgggggtggaaggcgagccgtgttcaatctggcgacgatgatggtcatctatgccgactgaggagtgccgggcttccctgggggtaatcatctcgcctgcaacgaccctttgtctcccatctctgggccggaacgagagcgatcgatacaaggagagagaatgagcggcgaagcgaacggacctttacgcgtggccatctggtgcgccgtctcgagccgg

SEQ ID NO: 23676 - DNA, 260 bp, Unknown
  Description of Unknown: LeftRegion for integrase B10677 sequence
accggcggatctattcgagtgaccgcctcggacatcctcactcccgacgatgcggcggccctcttgaaggtgcccggatgagcacccgacgggtacctcagtccgtggaggttactcccgtgccggccactcctgccgacgttgacagggtggccgctgcgcttgtacggctgctctccaccccgccgaagaggtagcccatgcgagccgccgcgtactgccgagtctcctcccttcaacagaaggagtcccagaccatc

SEQ ID NO: 23677 - DNA, 260 bp, Unknown
  Description of Unknown: LeftRegion for integrase B10678 sequence
gaactggatcctcatccagcagaacgagctcatagcgaggttgctcggggaaggtaagtaagagggtttacttactcccgaaaagaggttgcgcccctgcgaaagtttggcgactggacaggggcgcggcgtcttcccaggcataggaaggacggtgcgattctaccatgcgcgaattgcctgcgggcggcaggtacgccatgttcctgcgcaaatcccgagaggacgtcgaggccgagcgcgccggcaagggcgagacc

SEQ ID NO: 23678 - DNA, 260 bp, Unknown
  Description of Unknown: LeftRegion for integrase B10679 sequence
ccaatcacaagaattattccgcaaccaaagagaattgaagacatcattggaaatgcaaagcaggaattattaaatggtaactatttgacattcgataatcagccagcatcagaagatgaaatcaatgatattgtgctgatgatggacatggcattggaattacaaagaaggaaaagactaaaaacaaaggatgaagtaaaatgactgattacattaagaaaaatatacgtgttgcaatttatgtaagagtatccacacaa

SEQ ID NO: 23679 - DNA, 260 bp, Unknown
  Description of Unknown: LeftRegion for integrase B10680 sequence
cgtggtattctaaagggtgcgataatgtatctttaagtattttaagaaagatatgtaatttatttcatattacattagatgaattgatttatggtgaaacagaaacaattacttttagtgttaaaaattattcaaccgaagaattacaggtaataagaactgtgacacagtttattcaatcatcaagaaaggaagcataaatgaatgtagcaatctatttaagaaaatcacgtgacgaccaagaagaaacaagagaagaa

SEQ ID NO: 23680 - DNA, 260 bp, Unknown
  Description of Unknown: LeftRegion for integrase B10681 sequence
tccaaatattgagggcgaggcacggtgcatcggtcttgtaatcggtaccgcagaaaaggtataaaaaagccacccggcatctggtaccgggtggctttgcacgagagaaatgtcatgtccggaggtatgtaatgcacgaacctcgacaggttaagtataacatatcctccggcaaatgtcaagcatcaggaggaatttaaatgaaaaaagtcgctttttacggacgttacagctccgtcatgcagaccgagcagagcatc

SEQ ID NO: 23681 - DNA, 260 bp, Unknown
  Description of Unknown: LeftRegion for integrase B10682 sequence
gcccacgctcgtcaactcgatcgtattgaagacaaggtcactcatcacgatattaaaatatctatcttagataaaactaaatcgaataaacgtattgctaaagtaaaatagagtaaataataaaaacacgctaaataaccacgatacaatataaatatcgtggttattttataactttttattagtttcaggaggtacatatgacaatatcagcagctggatatttacgagttagtacggatgaacaagcagagcatggt

SEQ ID NO: 23682 - DNA, 260 bp, Unknown
  Description of Unknown: LeftRegion for integrase B10683 sequence
ctgcggtactgtcggcgaagaactcgaacgccgtgccagacaaaaagataccgcataagaatgtatcggcacaagtaaaaaaaatccgcccagtgcaggaacaccggacggattagggagttatgatataatcacaaccttagacaggttcattatatcatattctccctgaaaaatcaagtatcaaggaggaatttattttgaaaaaagcagtattctacggacggtacagctctgtgaatcagactgagcagagcatt

SEQ ID NO: 23683 - DNA, 260 bp, Unknown
  Description of Unknown: LeftRegion for integrase B10684 sequence
attaaaagtgcaaaatataaagatattttaactattcgtataacaaaagattaagttttaacaataaaaaaccactcaagcgactggtcctcgcctgagtggtagtggataaggtgatagaatgctcaattccccttccttagccgttttctattctatcaccttttccttgaaaaagcaagaaaaaaggtgatttttgtatgcttaacgaacaaaagcgggcagccgcatatatcagagtatcgacagacgaccagctt

SEQ ID NO: 23684 - DNA, 260 bp, Unknown
  Description of Unknown: LeftRegion for integrase B10685 sequence
ttctgtctgacgtacaagaaataattaagaatcctccggcatggttaataaaaagccggagatactttaatccaataaaggaggagaaatgattaaggcaagagctaagtttttgaatattaaagaaacagcagaaaatgatttctggaagatttatcaaaaacccgtcgaaagaagaataaacaaaacaagcaaggttaatgaaaacaagcaaagcttacatacgagtcagcactcttgaacaagctcgggaagaccgc

SEQ ID NO: 23685 - DNA, 260 bp, Unknown
  Description of Unknown: LeftRegion for integrase B10686 sequence
cactagccgccgcactcccgccgcccccgctgtctggttcacgccaggcggtgggggcggtttttttgcgtttcctcgccggccgtacggctcggtgcgctggtcggcgaccacttcgcacagccggcaacctacccccataagtagtattcgcggtcgggacacatgtataagggggtaggtcgcagtacgatcggcggatgctgagacccgctgccgcaggcgccgaaccgctgcgcgccttcatctacgaccgcaac

SEQ ID NO: 23686 - DNA, 260 bp, Unknown
  Description of Unknown: LeftRegion for integrase B10687 sequence
taaatatgattatgaaggtgaagatgctttcaaagttcttaataaaaataatgaacaaataggaagtattagaaaaagcgatattccaaaaatgaatgaaatttataataatattaaaaaagttaatgttttaggaacatcacattttaccaatgaagaaggaaatactgttctttcttgtcaagtaggtgttacttattatgaatgatattaaacgtggtgctttatatattcgtgtgtcgactgatgatcaaacagaa

SEQ ID NO: 23687 - DNA, 260 bp, Unknown
  Description of Unknown: LeftRegion for integrase B10688 sequence
taaatatgattatgaaggtgaagatgctttcaaagttcttaataaaaataatgaacaaataggaagtattagaaaaagcgatattccaaaaatgaatgaaatttataataatattaaaaaagttaatgttttaggaacatcacattttaccaatgaagaaggaaatactgttctttcttgtcaagtaggtgttacttattatgaatgatattaaacgtggtgctttatatattcgtgtgtcgactgatgaccaaacagaa

SEQ ID NO: 23688 - DNA, 260 bp, Unknown
  Description of Unknown: LeftRegion for integrase B10689 sequence
tcttttgaagtagtccctgaataaataaaagattgttttcagcaggtcaagcggtaatttttcaacatttcggatgataaattgctcatattcccatcgttccatatgttcgccccctttcggattactatgataaaacaaacggatgttcgggtcaacaaagagaaaaattgacgggtaaataaaaggacagggctaagatgctaaaccaaaaaggaatatatgcggcctacctccgcaagagccgcgcggacgcagag

SEQ ID NO: 23689 - DNA, 260 bp, Unknown
  Description of Unknown: LeftRegion for integrase B10690 sequence
taaatataaatatgaaggtgaagatgcatttaaggttcttaacaaagataataaacaaattggaagtattagaaaaagtgatatttcaaaaatgaacgatatttataacaatattaagaaagttaatgtgttaggaacatcacattttaacaatgaagaaggaaatactgttctttcttgtcaagtaggtgttacatattatgaatgatattaaacgtggcgcattatatattcgtgtgtcaactaatgatcaagtagaa

SEQ ID NO: 23690 - DNA, 104 bp, Unknown
  Description of Unknown: LeftRegion for integrase B10691 sequence
ctctcggtccccttcttgggcgcacaccccatctaggaggccccatgaagatcgttggctacgtccgtctctcccgtgcgtcgcgcgaggagtccacctcgata

SEQ ID NO: 23691 - DNA, 260 bp, Unknown
  Description of Unknown: LeftRegion for integrase B10692 sequence
gaaagaaaagtaagagaacaatttgatgatttcatcagaaattatcagaaataaataaaataaaaaatcccctctcctgcgccaacaggaaagaggattcatatagtggtcgcatgatacaaccaccactcgcaaaagtattgtatcataagaccgctttatttgctatacatttttataagcaaaaggaggtcttttttatgattatcgcagctgcttacgtccgcgtttctacggatgagcaaaccgattattccccc

SEQ ID NO: 23692 - DNA, 260 bp, Unknown
  Description of Unknown: LeftRegion for integrase B10693 sequence
ttaccgtttacatcaccaagaccggaaccaagtatcacagaagcggatgttcgtatctcagcaagagcaagatccccatttctctttctctcgcaaaatcctatgggtacacaccttgctcccgctgctggtaaaacgagacccactccccgccggtctgttccgcggcttcgtgaaccgcaattgaaaggaggcccgtcatgccagaactgaaaatcgccgcggtctacctccgcgtgagcaccgacgaccagaaggag

SEQ ID NO: 23693 - DNA, 260 bp, Unknown; identical to SEQ ID NO: 22864
  Description of Unknown: LeftRegion for integrase B10694 sequence

SEQ ID NO: 23694 - DNA, 260 bp, Unknown
  Description of Unknown: LeftRegion for integrase B10695 sequence
tatgctataaatgaaataagaaaactattaaataattataaaaaaagattaaaatatagatttagcccagatgaagatactaaaatttatttagtaaaatgtaaaaagtgtaataaaactattatggtatatgcttatgaaccattatcgcatattgatgaatgtcctaaatgcaaaaaattacaacaggagaatacagaatgaatgtagcaatatatttaagaaaatcaagagaagaagataatgaaacaagagaagaa

SEQ ID NO: 23695 - DNA, 260 bp, Unknown; identical to SEQ ID NO: 19742
  Description of Unknown: LeftRegion for integrase B10696 sequence

SEQ ID NO: 23696 - DNA, 260 bp, Unknown
  Description of Unknown: LeftRegion for integrase B10697 sequence
cgggtaccttatctgggacttccggctgccgaacgcaggcctcatcatcggtggcaatatgtcgcttgccgcgtggctggtcctgctgctggtcatcgcagccgcctacgtcatgggccgctgtctgcttcgtatgtcctcccggtatacgaagcgatcccacaccgtttttatcgaccacgagccgggaggtgacgagcatgactgatttgaaaatcgccgcggcctatatccgcgtttccaccgatgatcaggtggag

SEQ ID NO: 23697 - DNA, 260 bp, Unknown
  Description of Unknown: LeftRegion for integrase B10698 sequence
ttatctcagcaaaagcaagatacctatctcgctcagcaaagcaaaggaacagggatatacaccatgttctcgttgttggtaaacttcgggataaatcggtagattccggtttccgtcatgctttcaggtggcgcggaacttgaagcccgtacccgttgccgcccaagagcggcgtaataaacgaaaaggaggtccccgtcatgtcccccaatccccgcatcgccgccatctacatccgcgtcagcaccgacgaccaggcg

SEQ ID NO: 23698 - DNA, 260 bp, Unknown
  Description of Unknown: LeftRegion for integrase B10699 sequence
atatcacaaaaactttctgttatgaaatgagtttttgttatggtttttgttatggcaagaatggcttatttacgccatttttcggccctatataacagaataacattatttttattaatttctataataaataaatatatatagatatatataagtatatatagagaaaaataaaaatatataaggagtaggcgatttttttgttattctgttatgcccgaagaaatgaggacagaatgagagtaattatctatgtgaga

SEQ ID NO: 23699 - DNA, 260 bp, Unknown
  Description of Unknown: LeftRegion for integrase B10700 sequence
gacggagagatcacctgcgtcggcagagtgatcggcatcgcagagctgccggagtgaggtggcgttttactttacaaacaaaaaaatccgctccggcgctaccaacaccgggacggatatggaggtaaagtggtatacttgaacctcgacaatatcagtataccacatcctccgaaaaaatgcaaggaggattttttattatgagaaaagcagttttctacggacgctacagctcagcgaaccagaccgagcagagcatc

SEQ ID NO: 23700 - DNA, 260 bp, Unknown
  Description of Unknown: LeftRegion for integrase B10701 sequence
atgggaaaagctgcgatgagccaagcagatgagcacaatgcttctataaggtgtcccactgcatgcatctttagttatactccctgctcccccacccagatacctatatcttagcaattataccacaaacctcttaacggactgcttaacaactggtaaagaaatccttaaaatgccgtaactattgaggcaggcaggcaatgaaaacccgcgtggcaatctgggccgctgtgtcaagcaaacctcaagcggccggcgac

SEQ ID NO: 23701 - DNA, 260 bp, Unknown
  Description of Unknown: LeftRegion for integrase B10702 sequence
tgaataaaacatgattgacacaaccaatacgcccccgaccattgcccccttcgctcagatcattttcccagacgaaatactggaaccagacaccgacgcgcttgatgcggtcacgccgctacagcgtcagttggtcagcctaatcatttcgattgtcaacaaaaatgagagcagcaatttacctccgtgtctcgtcagagatgcagcacgagaatttcagcattgattcgcagcgccgaatctgtgctcaattctgcgaa

SEQ ID NO: 23702 - DNA, 260 bp, Unknown; identical to SEQ ID NO: 22849
  Description of Unknown: LeftRegion for integrase B10703 sequence

SEQ ID NO: 23703 - DNA, 260 bp, Unknown
  Description of Unknown: LeftRegion for integrase B10704 sequence
attctattagaattttgattagatcatcatatttcataattcaaccacccctattatagtataaaaaaaattcagatgatttcggcatctgaatcccataaggacatagaaatgtcttatgtaagaaaaaatttaccaaccacgatagactttttctatgtcctaattataacataaaagtttagttaggagcaaataaaatgaatgaaaaaaataataattttttaaatattgagaaattatataatgattactatata

SEQ ID NO: 23704 - DNA, 260 bp, Unknown
  Description of Unknown: LeftRegion for integrase B10705 sequence
gatcgtgaaaaggatctccggcgcagattaggatattacaaatagttattaagccgaagaatactacactaaataaaaagagctttccgctagatgcctgccccacaggcaccatacagaaagctctcatataggtatgttataataccctctcgcaaatcgtattatagcatacctctcatagatggaggtataaatatatgaaaaacgtagccgcctatgtcagagtatcgacacaagagcaggctgacgaaggatat

SEQ ID NO: 23705 - DNA, 260 bp, Unknown
  Description of Unknown: LeftRegion for integrase B10706 sequence
aagatatctccacaagatataatctcgtgatattgtacaattttgttttcccggataacagctgtttgttattcatattgaccaaaaacaaaaactccccggcgctggaacaccggagagctctcataacaggtatgatttgtgataccctttggacataagtattatatcataccttctttcaatggaggtataaaatcatgaaaaaagtggtaggctatgttcgtgtgtctacccatgagcaggcggatgaaggctat

SEQ ID NO: 23706 - DNA, 260 bp, Unknown; identical to SEQ ID NO: 23000
  Description of Unknown: LeftRegion for integrase B10707 sequence

SEQ ID NO: 23707 - DNA, 260 bp, Unknown
  Description of Unknown: LeftRegion for integrase B10708 sequence
ctggtcgctggaagagcatggatcgttgctcaatgacttcctgaaagaggttcgtgaccgccagggcgtaccgccgaagaagtagaagcttgcgacgtttaggcgtacgatgagcgatctgcttgctctccaaaacgtagctattgacgagaggggcagcacccctcataatcaacagccagtaagcggagaaacccctgatgaaaccccaaattggagcctattgccgtatctcgtatgaccgcgacggtcgagagctt

SEQ ID NO: 23708 - DNA, 260 bp, Unknown
  Description of Unknown: LeftRegion for integrase B10709 sequence
aatatatataaatatataagaaaaagagataaaaaagaaaatatataagaaattcaatatttttttgttattttgttatctggataaaaaaccgtccgagcggcaactcggacgataaaaagaaagtataagcctcgggagacttacatctaaataattatatcatatctctcggggatgaaaagggagataattttaaaatgagtattaaaaaaatcagtaataacagagtgatcctatacgtccgcgtatccacccaa

SEQ ID NO: 23709 - DNA, 260 bp, Unknown
  Description of Unknown: LeftRegion for integrase B10710 sequence
ttatatcaaatcgaagtctttagtcaatatataaaaaagagccagccactaaggaccagctccacagaatgattaaatcatccctagacaagttgtattttatcattctttggagcacccggtcaatcagaactgttgttcttcggttgggtgttatttttatactcatttttcataaaataaacaaaggagtgatagaaatgaaaacaggtgcattatacgtcagagtatcaacagatgatcaggtagagtattctcct

SEQ ID NO: 23710 - DNA, 260 bp, Unknown
  Description of Unknown: LeftRegion for integrase B10711 sequence
tgggcgttgcgccttctacggtcaatagctggttcaatcgttctgctgaaaatataacgttaaagactttgagaaagctcgcagacttcctcgaatgctcgattgattcgcttgtatatggagacgataaagactttgagttcgagagattttttatgcaagcattagcttcatatatggaaaagaggaaataaaagacgatgaaaaaagtgttattatatctgagaaagtcaagagacgacgaaaacgaaagtaaggaa

SEQ ID NO: 23711 - DNA, 260 bp, Unknown
  Description of Unknown: LeftRegion for integrase B10712 sequence
gaaatattataaatatatataatatatagatataaaaataaatatataaggaatttaaaatttttttgttattttgttatggacgaaaaaatccgcctcgaaaaagagacggatcacacataaaccccgagaggcttatataaactagacatttatattatagcatatcccccgggtacaaaaaagggagttgttggaaaatgaacgagacaagagtagcattatatccacgagtaagtacacaagagcaagctaaagag

SEQ ID NO: 23712 - DNA, 260 bp, Unknown
  Description of Unknown: LeftRegion for integrase B10713 sequence
atattttttcttggaggtcttttctttgagcaattacagcgaacgtgataaagccgttctggacagtctggacgagaacattcgtcttgcaccgcgtctcggagtctgcgccgataccttctatgccctgaagcaggagttcctgcgtgtcatgcgtgaacgcgacgaagccatccagaagctttcggaggtgcaagcgcatggcaaacactgatttgaccgtcgcggctgcctatatccgcgtctccacagaggatcag

SEQ ID NO: 23713 - DNA, 260 bp, Unknown
  Description of Unknown: LeftRegion for integrase B10714 sequence
ttggcaaaaggaaatattgtaacagtcagtgtgccagcacagctgaccagaattgaagatatctttgaacagacaaaacaaaagctgcatacctgcagccatcccactttaaatgaccatcctgtgaatgctgacacaatagcatccatcattgatggtctggatcttttattggaaatacagaaaagaaggatagaaaaatgaataagaaggtaagagtggctatctatgtcagagtatccacacaggaacaggcaaaa

SEQ ID NO: 23714 - DNA, 260 bp, Unknown
  Description of Unknown: LeftRegion for integrase B10715 sequence
aaaaaatcagcacctataaggtcacacttgctgttctgaaaaagtggcggaaagacggcattatttcggaacatgaatttcgtaaatgcgagttaaaaattgccgaaaaattcgatatatctttgtgcagtatatatcgtgaaactgcttgactttaggtcgcttctgatttaatatgtaacactgaggagggatactatatggcacgcaccataaaaaaggtcgaatttctgcctaaaatgccaaaactgctgaacgtt

SEQ ID NO: 23715 - DNA, 260 bp, Unknown
  Description of Unknown: LeftRegion for integrase B10716 sequence
caggtgctggcggtcgagcgggagtggtggcggcaccccggcgccaagctgaaggccatccactcgctgggcgtcaccgagacgcgctactaccagctgctgaaccggctggtggacaagccggaggctgaggcgctggagccggtgttggtgcatcggctccgcagggtccgggctacggcgaagcggagggcggcctgatggcccgtctgcgcccggttccgcaggctcagcctcgagcactcgcgctgatccgggtg

SEQ ID NO: 23716 - DNA, 260 bp, Unknown
  Description of Unknown: LeftRegion for integrase B10717 sequence
atctccagcttgatggtcaggacctttttgacgcccatacggcctccctcgccagtggaggactagtctgctcagccaaacgggtgagccgctggtgatctcggaagtcggggtcagaaaccctcaagtggatacgtttgagtgaacccgtggtgaagcaacttctgtcttaccccccaaccccgatatcgtcaggcgctatgaagaccccctccagggcccgcagggccggtctgtacatccgcatctctgacgaccgc

SEQ ID NO: 23717 - DNA, 260 bp, Unknown
  Description of Unknown: LeftRegion for integrase B10718 sequence
tcataaaagggtataacagcggcatagacataataatagacggcgcataaaatgccgaaatatggaattttgccctttaaggactggaaaaagctatacagccttgaaacttcaaaaaaggcttgtatgttaaaaaatggatttccaagaataggataagcctctccgtcaataaaataatttgacagggggcttttattatggaaacggcaatttatggcagagtttcgactgaagaacaagcacaagaggggtattca

SEQ ID NO: 23718 - DNA, 260 bp, Unknown
  Description of Unknown: LeftRegion for integrase B10719 sequence
tcaaagagaaatttaatgttatgacatctagagaagacggtataattgaattagatttagaatttgatgaagacaaataaaaaaagccccacgctcaaatttggcgaggagagcgtaaggcgaatctagtatagtaaaaacctgctttttgggaggggcttttaccatacccattttaacagaaaaatgaggtgaaaacaatgaataaagttgctatctatgtgcgtgtgagtacaactatgcaagcagaagaggggtac

SEQ ID NO: 23719 - DNA, 260 bp, Unknown
  Description of Unknown: LeftRegion for integrase B10720 sequence
tccttacagaggaagaatttatagctaagaaaaaaataattttaggaatttaaggtgtaaagttaaccgttaaaaaaataaaaagccccacgctcaactttggtcggtgcgagcgtgaggcaaatctagtatagtaaaaacctgctttttgggaggggcttttaccatacccattttaacagaaaaatgaggtgaaaacaatgaataaagttgctatctatgtgcgtgtgagtacaactatgcaagcagaagaggggtac

SEQ ID NO: 23720 - DNA, 260 bp, Unknown
  Description of Unknown: LeftRegion for integrase B10721 sequence
cctcagcccactcggcatagaggacgtcatcctcgcgtgcctgcacaatgggatcggtccccacggccgtctcgtacatgacacagactgtgtcatgtatcgcacatgacacgcaagcggcgacacgctcaccagcccaaacacaccccacagagagttcaagtgcattctgcaattggtaaggagaatgtccggagtaggtgaactatgctgacctggtgattggtgacctgtacgcgcggaaaagcaccgtcgaccag

SEQ ID NO: 23721 - DNA, 260 bp, Unknown
  Description of Unknown: LeftRegion for integrase B10722 sequence
atataaatatataaaagaatatatataaaaataaaatatataaggaattacaattttttttgttattttgttatatcgtaaaaaatccgaccaggcggccacctgatcggacagttaaatattataagcctcgggagacctataacaactaaataattatatcatatctcccgaggtaggaaaaagggagataataaatcatggtaataaaatccattaacaaaacacgagtattactttatatccgagtatcgactcac

SEQ ID NO: 23722 - DNA, 260 bp, Unknown
  Description of Unknown: LeftRegion for integrase B10723 sequence
ctggcatactggacgcgattacgcatgaagaatcgcggcttgggtgatgacgacggcaagatgacaatcacggttgagtcgttcaaggggagtctgcagaaggcgtatgggcagggatcgtcagaccggaaagatgtcgagacatctcttggtggtgtgagtggtgatttgtttggtgacttgtttagagaaaggcaaccatgagctacgcatggatatactgccgcgtatcgaagaaggaacaggctgccgatggcacg

SEQ ID NO: 23723 - DNA, 260 bp, Unknown
  Description of Unknown: LeftRegion for integrase B10724 sequence
tatgaaaacgccgatgatgaaacggaagaaatccgcctcgcatagcacggataacccgctatatttacggcggaaaataaaaaacaccgtaaacggcggcacttgtaaaaagcactgccgtttacggcgaaaggaggatcgtgaaaatttatcataagtctattatagcataaccgcaaagaaaaatcaaggaggaaaacatgaaaaaagcagtattttacgggcgttattcgtccgccaatcagaccgagcagagcata

SEQ ID NO: 23724 - DNA, 260 bp, Unknown
  Description of Unknown: LeftRegion for integrase B10725 sequence
cgatgactcagacatcactccggagtttttggagtctggtaaaaaagtatatgtctgtgtcgtcgatcgaaaatccggtgagatcgactatctccccgatgacgccatctccggggactgataaaaaggtccccgggggaccatgaggggtctcccggggaggatgttgagtatatagtaggggtttaaaagattataccatgagcgatgtgaaaagggtagctatctatacgagagtgtcgacgcaggagcagtcccag

SEQ ID NO: 23725 - DNA, 260 bp, Unknown
  Description of Unknown: LeftRegion for integrase B10726 sequence
gggtagtgctcaacgtcgatgcgggtgacctgcggccaccagtccttctcttccgcatgcttgcggaatcggcgctgaccggagcgtgtaatgcccgcgtagagcagtcggccgtcggcgtccaagaagcgatagacgctcacggccagacttgtaggcgaaccggcgttcgtagtgtttcggtcggtcattcgcctattatgctccgcgcgatggcggaatgggccggaatcgtccgcgtcagccacatgggagcacga

SEQ ID NO: 23726 - DNA, 260 bp, Unknown
  Description of Unknown: LeftRegion for integrase B10727 sequence
gagtacgccccatctgatgagaatgtgccgggcgggcacgggataggcggttacatcaaggcggaccagctatattattttaagcgtgatcttattgaatactatgtcataggcagcgtttccccggagctttttatccgcctaaaggaatttatcaacaggcttgattccatagaacgcattacggataatcttgagccatgtcgatgaagaaggcggctctctacatccgggtctccaccctcgagcaggcgcaggag

SEQ ID NO: 23727 - DNA, 260 bp, Unknown
  Description of Unknown: LeftRegion for integrase B10728 sequence
ctcacgctgctgctacgccacacacagggaccgatggaggtttgacctcggaaagtacgggacgtgccctaaatgtggttccagcagccggagaaatgcagtagaatgggaatacgtcgctaaggtgaatgggtactcccctgaaccgatggacaatcaaccttattccatccaaccggaattattctagggggaacgacatgcgcccagctttatacgttagggtatcgacagaggaacaggcggtaaagggtaattcc

SEQ ID NO: 23728 - DNA, 260 bp, Unknown
  Description of Unknown: LeftRegion for integrase B10729 sequence
aacgttccccgagctacgcccccgagccctcgaaacgggccccccgtagctccccctcgatgggccagattggcccatctaccaggggcgatgcgtgttcccccttgggcgggattggtcacagtgccaaccaagggggaacatcgggtaggctcccccgtggcactagaccggtgccgaatatgagaggatataaaatcatggctcgctcacgattcgataagaccgaatcacaaaccaataacgatgaggaaatccga

SEQ ID NO: 23729 - DNA, 260 bp, Unknown
  Description of Unknown: LeftRegion for integrase B10730 sequence
tattaacgcttggtatactaaagactataaagggataacccttaaaaacttgataaaattaagcaattgctttgatattactatagaggatcttgtaaacggagatattaaaaaccttagctttacctctaataactactcggactcggagctaagagctattaaagatttttcggagtatcttaagaggagccgcgataatgagtaacacggtcgccatctacttaagaaaatcaagagacgaggataacgagactaga

SEQ ID NO: 23730 - DNA, 260 bp, Unknown
  Description of Unknown: LeftRegion for integrase B10731 sequence
atgattatgaaaaccgagaggagttagagggggataaagaagattctgcggcaatctaacattatcccgatagagttattaagaaggaaaaagctattggaggtgagattatcaaagcggtaatctatgctcgatactcgagccacaatcagcgagaggaatccatagaggggcagattcgagagtgtaccgagtttgccatgaagaacggatttatcatcgtagacgaatatattgacagggctatatcgggtaagacc

SEQ ID NO: 23731 - DNA, 260 bp, Unknown
  Description of Unknown: LeftRegion for integrase B10732 sequence
gcgtagctccttctacggtcaatagctggtttaatcgctcggctgagaatataacgctaaagactttgaaaaagcttgcagacttccttgattgctcaattgattcacttgtttatggagatacgaacaaaaagaatctggaagaatattttttacaggcgttaacatcatatatcgaagaaaagaggaaataaaagaaaatgagaaacgtattattatatttaagaaaatcgagagacgacgaaaacgaaagtaaggaa

SEQ ID NO: 23732 - DNA, 260 bp, Unknown
  Description of Unknown: LeftRegion for integrase B10733 sequence
accagagcgtgatatgatctggccttagtaagattattgttagggcaataatcagccagataatcacacgtggagaaatccacacgggcgtcacctcctctattcagtttgggagagcttatccctctcccaaaaaccattataacagcagccggttggaatatccaactggcttttattttttctatgaggatgattatatgaaagtagcagcttatactcgcgtcagtaaagaggaacaagccgagaaagacttatcc

SEQ ID NO: 23733 - DNA, 260 bp, Unknown
  Description of Unknown: LeftRegion for integrase B10734 sequence
gaaggtattggcattactttgatgagatattatagactccaaaacactttagtattagagccagatagttataatcatcaaaattcggctcttacttttgattggaataatgagattagcacgaaagtaaatatattaggtaaggtagtgtggtacatgtcgccattcaacacaaaatactaggcaaggaggaatataatatgcagatacttggttatatacgagtgtcgactgaggaacaagcaaatgacggaaactcg

SEQ ID NO: 23734 - DNA, 260 bp, Unknown
  Description of Unknown: LeftRegion for integrase B10735 sequence
cgactcacttgtctctcaaaaattaaatggagacatggaagtaaaagttaaataaaaaaagccccacgctcagaagtttggcgaccgagagcgtgaggctggtaattacaagaaaggattttcatggagataacctcgcatgatgtcttttcttgtacctattttatcattttttaggaaattttgaaagaggtactactatgataactacaaataaagtggctatatatgtcagggtatcaacgacaaaccaggttgag

SEQ ID NO: 23735 - DNA, 260 bp, Unknown
  Description of Unknown: LeftRegion for integrase B10736 sequence
aaaacaagacgatggttctttcttgttgacttctaaagtcagctcaggtctagaataaaaaagacaacaaaaaaaaccccacgctctcggtcggcaaacttctgagcgtgaggcatgtgacaggaaaagattttcatggagataacctctcatgatgtcttttcttgtacccattttatcaaaaaagaggtacaaattcaatgataactacaaataaagtcgcaatctatgtcagggtgtctaccacatctcaggcagaa

SEQ ID NO: 23736 - DNA, 260 bp, Unknown
  Description of Unknown: LeftRegion for integrase B10737 sequence
acattttcttgacataaactaagaaaatcgttatttagtgaaagttttagttgcatttagtaatagttgaataaatttcccataaaccttattcaattgtttcaagatataagaatattttatatatttgcattaaataatgcaaaggcgttcaagcaagcttgaatatatttgcattatgaaacacaaaacataatgcgatgagtaaatgtatcattttgagtagagtatctacagctaagcaagagcttgattctcaa

SEQ ID NO: 23737 - DNA, 260 bp, Unknown
  Description of Unknown: LeftRegion for integrase B10738 sequence
gcaggccgtccgcttggagtgcgaccactacaagcgtgagatcgagctgtataaacgctcccttcgcacgcaccgcatcgtcactctcatcctcgttcccatcctcgcccttgtcgtgatctcgttggtcatcgatctcctcaacccctatgtcggctggattcgcgataccatgtccattttacgggaggtttccgtctatgcctgaaccacgcattgcagccgcctatatccgcgtctcaaccgatgaccagatggag

SEQ ID NO: 23738 - DNA, 260 bp, Unknown
  Description of Unknown: LeftRegion for integrase B10739 sequence
gaaagcattgcctacatgaagaaaaaagaaaaaagctatctgcggttgatctgcactttgtccattgcgctgtcggttacgcttgtcgttatcattgcggcgctggtgatggatatgatgaacccggataaaggctttttctggctacggagtatgctatagcaacacgaaaaacggaggaacaaagggagagaaaacacatggaaacagggaaatttatgggcggagaaaactatatcgaagaggtggcggcctatatc

SEQ ID NO: 23739 - DNA, 260 bp, Unknown
  Description of Unknown: LeftRegion for integrase B10740 sequence
gtggctgttcctgtccattccccgtgtcctgctgcacatcggcagaaagaagaagtatgtaggcgattccaaaagcacaaccaagaacaaggtacagtacaagaccgtctgtgtctgccagaattgcggtcataactgggtgaagtaatcagaccattttcgtgacctcacgaaaatgataggaaagagaggtggcatctttggcagctcctaggaatacaaagcgtggcagaaaagccgaggccgaaaccattggtgtc

SEQ ID NO: 23740 - DNA, 260 bp, Unknown
  Description of Unknown: LeftRegion for integrase B10741 sequence
atgaatttgaaaacagaaaagaattagagggggataatgacacagctacggcaatctaaagtcattccctttgagttaattaaaagaaagaagcaactggaggtggtactacgaaagcggtaatctacgctcgttattcgagccacaaccaaagggaagaatccattgagggtcagcttcgagagtgccacgagttcgccatgaagaacgattttgtggtgatagacgaatactgcgacagagccatttcgggtaagaca

SEQ ID NO: 23741 - DNA, 260 bp, Unknown
  Description of Unknown: LeftRegion for integrase B10742 sequence
taaagcagaagaatcgcagtaaacaaaaaaaccgctcccggtactgggaataccgagagcggaaccatacacacgggcgcatatggtacgcataacgcataaatattgtaccatacccctgtgatatttgcaagcacaaaaaacgcaacacaggggatttttgcgcccttttttgagtatatcttaaaaagggggatgttatgaacaccgatttaaaaacagccgcggcgtacatccgcgtttcgactgacagtcaaaca

SEQ ID NO: 23742 - DNA, 260 bp, Unknown
  Description of Unknown: LeftRegion for integrase B10743 sequence
gtctcgttatttttctcaggcttgcattgtggaatcaaccgagctgtatttgaatatttgttccgaaaggaagaagaggcagaaaacgagctgagacctcttagaaaacagctgtccgctattgaacgcaaagaaacagacgagcttattgagaaattggagcgagagagaagcaccaagaaaaaggggaattaacgaaaatggaaatgaaagaattaaattcggaagatttgcaagtgaggaacgtgctgagcgtcgag

SEQ ID NO: 23743 - DNA, 260 bp, Unknown
  Description of Unknown: LeftRegion for integrase B10744 sequence
tatggcagataatatatgaagcaattttaacaatagcatcaggaattatttctcttgtttatacagttatttgggaaaaagatcaaaaatcaaaattgaacaaagtaacatatacctatgaataattaacaggccatactcaaaccgggtatggtctttttgttacccctatcctacaatacagacaaggagtgatatagatgaagatagacggcacaaccagcagtggtttacgagttgcaatctatacccgcgttagt

SEQ ID NO: 23744 - DNA, 260 bp, Unknown
  Description of Unknown: LeftRegion for integrase B10745 sequence
cgggatttggtgggcgcttttgcacaaggtctcttgcaaaatcgcaaaccatagctttttccgcgtctgtcagttggtcaaagattgcttttacttcttcgatggtcattgtttataactcctttttgttttcggctgtcgccgtgtttatagcgtaccaaaaacagacgggagattttgtaaaaaataggaggtaacaaatgggcggcggttttaaggtcggcgcggcctacatccgcgtgagcacggtagaacagact

SEQ ID NO: 23745 - DNA, 260 bp, Unknown
  Description of Unknown: LeftRegion for integrase B10746 sequence
ctttctaaaggtaacatagtacctttagaagacattaaacctatagaacaaaataaagatatgagtcatcttaaagcttatatgaaggctttttacaagttagataataaagaattaacagactcagagaaagagcttataaatataagtatagatattatgctagaacaaattagaaaacagagggagaaaatagcaaaatgacaaagaaaacaaaagtagctatttatgtaagagtatccactcaggaacaggctaag

SEQ ID NO: 23746 - DNA, 260 bp, Unknown
  Description of Unknown: LeftRegion for integrase B10747 sequence
gaaatcacgctggctcccggcactgtcttggttcgtgaatgggccgagcgtgaccactacgtgaaagtaaccgccgaggggactttcgaatacgagggcaagtacttcaagagcctatctgcggtggctcgccacatttctggcagctcgtggtctggcccactgttttttggcctgcgccgtccagcggagagtgtgctgtgaacgacaccccgagcaaaaaagcgcgccagcgctgcgcggtgtattgccgcgtatcc

SEQ ID NO: 23747 - DNA, 260 bp, Unknown
  Description of Unknown: LeftRegion for integrase B10748 sequence
cagcagctcaaagagatgggctctgacgcagtgtttattcagtcgctgggctggaaatctactaagccggtgttcactgcgaacgcgaagcatgtgtcagctcgtcagtaaaatccgaggtcaatttaaggaagggtggagccttgtcaaaagcgtggatctattgcagagtcagttcaaaagagcaagcaataaatgggatgtcattgacatctcaattcgaagagtgccgcaaacatgtcgacttcaagggcctgcaa

SEQ ID NO: 23748 - DNA, 260 bp, Unknown
  Description of Unknown: LeftRegion for integrase B10749 sequence
ttgacggcgaggaggctgttgttaaaaagattaactacggcgataactggatagaacttgaatcattcaatccttattatccaccgcgccgctttgagggttcggacgttcaacagatccgcgtcgtcggtctcgtccgtgaggttagcaaagaattgcagtaaaggagaagttatttatgaaaaagaaagggggatgttatgaacaccgatttaagaacagctgctgcgtacatccgcgtttcaactgacagtcaaacg

SEQ ID NO: 23749 - DNA, 260 bp, Unknown
  Description of Unknown: LeftRegion for integrase B10750 sequence
agatccataacgtgatggtagccgtatttgatacggctacttttctttttatctagcaactgtttccattttggaaacaactcaaaaaagccccacgctcagaagtttggcgaccgagagcgtgaggctaggagcaagaaaaaagcattaaaaagctgtttttcttgtacctattttatcaaaaaaggggtacaaattcaatgaaaacaatgaataaagtggctatatatgtcagggtttcgacgacaaaccaggttgag

SEQ ID NO: 23750 - DNA, 260 bp, Unknown
  Description of Unknown: LeftRegion for integrase B10751 sequence
tgatacggctacttttctttttatctagcaactgtttccattttggaaacaactcaaaaaagccccacgctctcggtcggcaaacttctgagcgtgaggctagcaattacaagaaaaacttttcaaaagatattaccttttgagatgttttcttgtacccattttatcattttttaggaaattttgaaagaggtactactatgataacaacaaataaagtagctatatatgtcagggtatcgacgacaaaccaggttgag

SEQ ID NO: 23751 - DNA, 260 bp, Unknown
  Description of Unknown: LeftRegion for integrase B10752 sequence
gcaggccgtccacttggagcgcgaccactacaagcgtgagatcgagctgtataaacgctcccttcgcacgcaccgcatcgtcaccatcatcctcgtctccatcctcgcccttgtcgcgatctcggtggtcatcgatcttctcgttcccaatgtcggctggattcgcgataccatgtccattttacgggaggtctccgcctatgcctgaaccacatatcgcagccgcctatgtccgcgtctcaaccgatgaccaaatggag

SEQ ID NO: 23752 - DNA, 260 bp, Unknown
  Description of Unknown: LeftRegion for integrase B10753 sequence
cttcaacaacacttatcgaaagaataaaaccaactgtttccaaaatggaaataactcaaaaaagccccacgctctcggtcggcaaacttctgagcgtgaggcatgtgacaggaaaagattttcatggagataacctctcatgatgtcttttcttgtacccattttatcattttttaggaaattttgaaagaggtactactatgataacaacaaataaagtagctatatatgtcagggtatcgacgacaaaccaggttgag

SEQ ID NO: 23753 - DNA, 260 bp, Unknown
  Description of Unknown: LeftRegion for integrase B10754 sequence
tattttaagttatgaagcctctgctatgggtgtaactaaaacaataaaaatggaaaaaaaataaaaaaaagactaaccgctgcaacgattagtcaaaggtacataaaaaattatatttatctcacaacagacaaatcttttttatgtacttcaattttactatatttttttaaaaatgtaaatattggaggtaattaattatgaatgaaaattttttagattttgatagtctatataatgactactatttaaaatcaaat

SEQ ID NO: 23754 - DNA, 260 bp, Unknown
  Description of Unknown: LeftRegion for integrase B10755 sequence
tcgttttagatgctaatgcgaaagtcattgcacaggagcaaaacggtaaaatggttttagataaataaaaaaagccccacgctctcaaactttggcgagtctgagcgtgaggcaatgcaagacaaagaaaggtttcaaaatgaatattttgaaaggtgtctttctatactctattttagcagaaaaggagtatagaaacaatggataagatcaataaagtcgctctatatgtgcgcgtttctaccacttctcagatggag

SEQ ID NO: 23755 - DNA, 260 bp, Unknown
  Description of Unknown: LeftRegion for integrase B10756 sequence
aacttgtaaaatatgagaaatttactcaggaagaggcagacagcgctgtttctaatctaaattaataaaaaaagacctcacgctcacaaagtttggcggctttgagcatgaggcatatgacaggaaaagattgtcatggagataacctctcatgatgtcttttcttgtacctattttatcaaaaagggggtacaaaatcaatgaaatcaataaacaaggtggctatttatgtcagggtatccactacctcacaggctgag

SEQ ID NO: 23756 - DNA, 260 bp, Unknown
  Description of Unknown: LeftRegion for integrase B10757 sequence
gcgcgtcggcgtcgacgacgcaaccccaaccgtggcgagtggatagacctcctggtgccgctggcgttcctggtgctgctgattcgcggccgaacgattcaagtcggcgcctgactcgctaatagctattcaaactgtcacgcgattgcaacgcctggttaccgtcatatcgcaccgctgccgaatagcatacgcaccatatgacagtaaccagtgtgcagacccgcgcccgcgccggtgtgacctacgccgtcggcgtg

SEQ ID NO: 23757 - DNA, 260 bp, Unknown
  Description of Unknown: LeftRegion for integrase B10758 sequence
aataaatgcatggtacacaaaagactacaaaggaattacattgaaaaatctgagcaagctggcatcatattttgatgtaagcatggaggctcttgtgtatggagaaaagccatcattgacattcactctggagaatttctctgaggctgaattgaaagccatttataaatattcagaatttatcaaggaaaacaggtctgatgagtaatgttgcaatatacctgagaaaatccagagatgaggagaatgaatccagagat

SEQ ID NO: 23758 - DNA, 260 bp, Unknown
  Description of Unknown: LeftRegion for integrase B10759 sequence
cgtcgaagccgcagggtacgaccccgccgaggatcgagcggcggacgtcgtagctgcgggccctctcggcctcgtggtcgatggttgtgttttgcatgaccattacaacgtccccccaggtcagggtacctcccgggcaacctgaataaatggttatttgtccccatggcgcacacgatcgatacggaaaccctcttatcatggagtgcatgaccaggacctccaccctcggcggggcgcctcgctgcgccgccgtgtat

SEQ ID NO: 23759 - DNA, 260 bp, Unknown
  Description of Unknown: LeftRegion for integrase B10760 sequence
gatgcttgcggtcggtatcacgtccgttgttggaaggagatcccgcggcgtgaatattgccatcatgattctctgcggcattggaatgatattcggcttctcgatggccggagaatatacggacctgatcatctggacctgctggcttgcggttttgttcgtaatggcgctgattgcccttctcagattcaagaaagcaaatggacgttaagatagccgcctgctatgtccgtgtatctacggacgaccaacaggaatat

SEQ ID NO: 23760 - DNA, 260 bp, Unknown
  Description of Unknown: LeftRegion for integrase B10761 sequence
gagacgaagcccgaaaataaaggatttctttttcacaaaaccaccgcaccaaaatattattttgatgtggtgtttgatgtgaataatgaaaatcgattcgcccggtcgatggattttcacatcaaaatttttcgttttgcggtgtttgatgtgaatttgatgtgaaagttttgtgaatgaaaaaggagagacaacgaaaaatgaaaagagttgctttatatgtaagagtttcgactcaagagcaagccgaggagggatat

SEQ ID NO: 23761 - DNA, 260 bp, Unknown; identical to SEQ ID NO: 22754
  Description of Unknown: LeftRegion for integrase B10762 sequence

SEQ ID NO: 23762 - DNA, 260 bp, Unknown
  Description of Unknown: LeftRegion for integrase B10763 sequence
actataaagagactattaactcagtatttgaggttaagcctagagacttgagcgagatacttaatatgagtatagacctactcactcaagacgatattataattgagggtaagccagttaataaagataatattaacgctttaatacattatatggagtttattttagagttagctaaaaaagataaggaggactaagagatgttagtaggtatttacactagagtatctacccaagagcaagtcgagggttatagttta

SEQ ID NO: 23763 - DNA, 260 bp, Unknown
  Description of Unknown: LeftRegion for integrase B10764 sequence
aaaaacatttctaataaaactgaactcaatgaaatagttgagcatactccagagaacattgaaaaatttagattcctaacaattgatggaaagccaatgaacaatgaggaaattgaattgttattggactgtttgaatttgacaattggactaattagaaaacaaagagaaagaaaaagtatttaaggagtagatgaaaaatgagagttgcattatatgttcgtgtatcaactcaagagcaagcaagagagggatattct

SEQ ID NO: 23764 - DNA, 260 bp, Unknown
  Description of Unknown: LeftRegion for integrase B10765 sequence
tgctcgggcgatgctaagagcgtttcaaattataaatttgataaaataactaaatggtaataaaaaagactagaactgctggaacagtctagtcaagcacataaaaaatataaaatccgctcggaaaataggattaatctttttatgtgcctctattatatcacttttatataaaaaagtaaattggaggtaagaaaaaaatggataattttttagaatttgacagtgtttataacgattattatttaaaatcaaatgaa

SEQ ID NO: 23765 - DNA, 260 bp, Unknown
  Description of Unknown: LeftRegion for integrase B10766 sequence
ctgctagcggttcagccgcttgtcgttgcgtacggcctggtcactgaccaacaggcggcgctgtgggttggcctgggttcggctgtgctgggcctgaccctggcatcggccaacaccaccaccaaaaagggtgaccacgccgcgtagcgtcggcagtgtgaactaggcaagcaacacgctcgtgtagtagtttgcagtgcatgaccacacaagccgccctgtacgtacgtgccagcctcgacaagaccggcgagggtgag

SEQ ID NO: 23766 - DNA, 260 bp, Unknown
  Description of Unknown: LeftRegion for integrase B10767 sequence
ggcgaacacctgcgagccgatggtggccgagtagccgaccgggacgtgtggccggtcgctggtggtgaagtcctcgttgcagacgatgcaggcgagcccgttcgcctgctcgttgttcaggtcgtggaagatcgcgttcacggacggtccttagtgtgattcaacatgtctctcgaacgagaggttatgctaatcacactatgactggcaatggtgtacgcgcggccgtttactgccgtatcagccgcgacagcgaagga

SEQ ID NO: 23767 - DNA, 260 bp, Unknown
  Description of Unknown: LeftRegion for integrase B10768 sequence
gagcggatcaccatatccgatgatgaggtcatatttcaactcaaagaaggaggcgcataccgatggcaaagacagtgagggtgattcctgcaactcccagagtgtttcggtcagaagttgcggcagaaccaagacggcgcaggacggcagggtacgccagagtttcgaccgaccatgaagaacaggcttccagttatgaaatgcagatggcgcattacaagaactacatcgaaagccgcgctgactgggatttcgtcggc

SEQ ID NO: 23768 - DNA, 260 bp, Unknown
  Description of Unknown: LeftRegion for integrase B10769 sequence
acttgctgaagaaagtggcgttgtaaacaaatctatgaaagtaaaagtaaacaactaaaataaaaagcccctgctctcctcgaccaaaatttgagcatgggacttaaaccaatttgaaaagcaacctaaaacactaagggtataggtcttttttctataccctattttaccataaaacttacaaaatagggaggctaacgatgaataaagttgctatttatgtgcgcgtgagtacaaaaggacaagcagaagagggttat

SEQ ID NO: 23769 - DNA, 260 bp, Unknown
  Description of Unknown: LeftRegion for integrase B10770 sequence
acttgctgaagaaagtggcattgtaaacaaatctatgaaagtaaaagtaaacaactaaaataaaaagcccctgctctcctcgaccaaaatttgagcatgggacttaaaccaatttgaaaagcaacctaaaacactaagggtataggtcttttttctataccctattttaccataaaacttacaaaatagggaggctaacgatgaataaagttgctatttatgtgcgcgtgagtacaaaaggacaagcagaagagggttat

SEQ ID NO: 23770 - DNA, 260 bp, Unknown
  Description of Unknown: LeftRegion for integrase B10771 sequence
tttgcattcaaaacctcaccccaaaacaccacctggccccagatgctggcggtctggcaagcggccgacgacatcgacgtctacgactcggggtggaccttcgaccacttctacccgatcttttccgacagcagcgggtgcctggagggctggacgacgttgactaggcttgtgccggtgtcaccactataatacaaggtgtgcataccgcgctatattcccgcgtgtcgcaggacgcgaccggtgaacggctagccgta

SEQ ID NO: 23771 - DNA, 260 bp, Unknown; identical to SEQ ID NO: 23769
  Description of Unknown: LeftRegion for integrase B10772 sequence

SEQ ID NO: 23772 - DNA, 260 bp, Unknown
  Description of Unknown: LeftRegion for integrase B10773 sequence
tgtactcttctttcatagcttggccccctagcagtgagaacgaatgttctgaatatagtataatatactattatattcaaaacaatggaaattgtttacaatattgttataactccgggggcgtgtcgaagtatatcaaaattagtatatgtataaaattttttttaaaataataaaaagggtataaaggagatggtttcatgtatacagtttataaacaattagaggaatacagacaagaaagaaagcaggtccgggtg

SEQ ID NO: 23773 - DNA, 260 bp, Unknown
  Description of Unknown: LeftRegion for integrase B10774 sequence
agaaggttgaccaaataatagaaagtaacaaataaaaaaaatcgccctctagtgctggaacactagagagcgacaccattacacagggtgcaatgatacatcaaaatgcaagtaatattgtatcatacccttgtaaatttttcaatataatttacaagggatttttgcacccttttttagataagaaaggagcaaaataaatggatgatttaaaaatcgcagctgcttacatcagagttagcacggatgatcagacagag

SEQ ID NO: 23774 - DNA, 260 bp, Unknown
  Description of Unknown: LeftRegion for integrase B10775 sequence
acgctagtctacttctttgaaaaaagcagttttccgaatatctacacattcgatacgccgattccggtggaaatctatgacaggaatctgacaattaccatttctgaattgctgtaaaaactaattgcaagacaagatgaaaaataaaaaaatccgtccgctggaaaacggacggaactatttttaaagggggtatttttatgaagacagccgcagcatatatcagagtcagcacagacgaccagacggagtattctccg

SEQ ID NO: 23775 - DNA, 260 bp, Unknown
  Description of Unknown: LeftRegion for integrase B10776 sequence
ctacctgctgggatatactgataagattgagaagccggcaggcgatgaaacggaccccgccaccaataagtttctggccgtaactctggccgagatcgacctgatcgaagcataccggcacgccggagctgagacccaggcagcgatcagagcgatcctgcacatttaacgggagaaccccgggaagggaggacggtgccatgcgcggcgtcatttatgcgagatattcaccaggcccgcaccagacggagcagtccatc

SEQ ID NO: 23776 - DNA, 260 bp, Unknown
  Description of Unknown: LeftRegion for integrase B10777 sequence
ctatttgctggggtattctgataaaatcacgcggctgtccggggatcacaccgaccccacatccggcccctgtgttgaagttactgctgcggagctggagctgctgaaggctttccggcacgccggagctgagacccaggcagcgatcagagcgatcctgcatatttaacgggaggaccccgggaagggaggatggtgccatgcgcggcgtcatttatgcgagatattcaccaggcccgcaccagacggagcagtccatc

SEQ ID NO: 23777 - DNA, 260 bp, Unknown
  Description of Unknown: LeftRegion for integrase B10778 sequence
cgacggcgataccgttgtcggcagcgtcggcgatgagacgtttgtgaagacgctccgccagaagtccgatcacttcgtcctgcaggggacgaacggcaaggtcgtgcaggccgcggacgcgacgatcgccggcgtggtgatccaggtcgtgcgggatgtgccgcgggggtaggagagttctccccgctcagggaggcccgatgcgagccgtagcctacatccgcgtcagcaccgaagagcagtccggccccgggcacgtc

SEQ ID NO: 23778 - DNA, 260 bp, Unknown
  Description of Unknown: LeftRegion for integrase B10779 sequence
tgaggaagaagattgcctttgggaagaagaacagcgcaaaaaggaaaacccgccgaccgaataaaacagtcggcaggcaataaaaaatccgcccggcgttaccagcaccggacggattgaaaagaggaatgcggtatacattcactccctacaagctaagtataccacattcctcctgaaaaatcaaggaggaattttttatgaagaaagttgcattctacgggcggtattcgtccgctatgcagaccgagcagagcatt

SEQ ID NO: 23779 - DNA, 260 bp, Unknown
  Description of Unknown: LeftRegion for integrase B10780 sequence
tgttctgtctctcttgaagcgtgccaaaattaagtatatttccgcttttgtccgtggtggtaaatactgctatcttgggaatcttgataatatccttgaagaagaggtttctccgagcatcactgtccgtattgcttatagcaagtaataaaaagtccccggcgtgatccgccggggacgctttgcaaagaggtgaaccgatgaagaatgcagctgcctatctccgtgtcagcacagagaagcaggacgaatacagcctg

SEQ ID NO: 23780 - DNA, 260 bp, Unknown
  Description of Unknown: LeftRegion for integrase B10781 sequence
cttgaaaataaaggatttctcttgtgacctctttgtgactgaatgtgaccgcaaaattattttgaagtcacaaaacgagtcacaaatcaatcgcccgaaaatttttgtgacctcaaaagtgaccgcaaaagtgaccgcaaaaatcactttcggtcacattgaagtcacaaacaagtcacaaaaggaaagagagacaaccaatgaaaaaagtcgttttatatgtcagagtctcgacaaaagagcaagccgaggagggatat

SEQ ID NO: 23781 - DNA, 260 bp, Unknown
  Description of Unknown: LeftRegion for integrase B10782 sequence
gggcatagccatcgggaccatccgcagcgccatggccaacctgcgcgagcgcgggctcatcgtgtccaccctcggcaaggggacgttcgtcgcgggcgcgcccagcgcgggatgactacctggccaggaggagacatgagaccatccaagcatgcactcacccgggtatcatcagacggtgaccactacaggtaaccgtcatgccgccgcgtcccgctgttaacgcggggccggtcagggccgggatctactgccgcatc

SEQ ID NO: 23782 - DNA, 260 bp, Unknown
  Description of Unknown: LeftRegion for integrase B10783 sequence
gaaaataaaatccccctcctttgaaccttgtgatatccttgatatcatagggttttttaatacaattaaggtggtgcccaaataggaagttggatgaatccatttttctaagtggacacataggacaatccttgatataattgggtttcaggtggtttactacctgaacacaacaattattgagagaaggaaatcacatcatggcagaccatattgaaacatttaaaaagattaaaaaagtagcaggttttttgaggata

SEQ ID NO: 23783 - DNA, 260 bp, Unknown
  Description of Unknown: LeftRegion for integrase B10784 sequence
acttgctgaagaaagtggcattgtaaacaaatctatgaaagtaaaagtaaacaactaaaataaaaagcccctgctctcctcgaccaaaatttgagcatgggacttaaaccaatttgaaaagcaacctaaaacactaagggtataggtcttttttctataccctattttaccataaaacttacaaaatagggaggctaacgatgaataaagttgctatttatgtgcgcgtgagtacaaaaggacaagccgaagagggttat

SEQ ID NO: 23784 - DNA, 260 bp, Unknown
  Description of Unknown: LeftRegion for integrase B10785 sequence
tgtgcatgatacgaacgaggtacagcttgcacacgaagaaaatggcgtgatgatttacgacaaataaaaaaagccccacgctctcaaagtttggcgacttcaagcgtgaggtttgaaaagataaagaaaggatttcaaaatgtttattttgaaaagggtctttctgtactctattttaccagaaagagggtacaaagacaatgaataaagtagcattatatgtacgagtctccacgacttctcagttagaagaaggctac

SEQ ID NO: 23785 - DNA, 260 bp, Unknown
  Description of Unknown: LeftRegion for integrase B10786 sequence
gacgatcacgagcagggccgtgcgaacggggtgggacttcttcggggcgggcttgaagttctgcgggccctcgaacggcgggtggttggacggctggttcgggtactgctggttcatggtgccccttgcgtaggattgtgtaggtgtcatcctgcggaaccagccgcgcattgtcaagcccgcacgtatatagtgctgccatggatactccgaagagtgcgggcgtctactgccgtctcagctacagccccgacggttcg

SEQ ID NO: 23786 - DNA, 260 bp, Unknown
  Description of Unknown: LeftRegion for integrase B10787 sequence
tgagacattgtgtgttaccagtaacacattctgtaaactcgggtttacattttgtgtccccggggacacattttgtcttgtcgacaagacattttgtcaccccggggagacattttgtgccatcaatggcacaaaacgaaaaaaccgcccggcataagcaaccgggcggcacgcatacgatatgaaaaggaggcatcgccatgaaaacagcagcggcatatatccgtgtatccacggaagatcagaccgagttttcaccg

SEQ ID NO: 23787 - DNA, 260 bp, Unknown; identical to SEQ ID NO: 23786
  Description of Unknown: LeftRegion for integrase B10788 sequence

SEQ ID NO: 23788 - DNA, 260 bp, Unknown; identical to SEQ ID NO: 22818
  Description of Unknown: LeftRegion for integrase B10789 sequence

SEQ ID NO: 23789 - DNA, 260 bp, Unknown
  Description of Unknown: LeftRegion for integrase B10790 sequence
ggacagaatcgttcctgtggagtcggataagtctcgaattgcagacatagacaggatcttggagaataccaaaagcaatatccaaggttatgattatctgacgataaacggagaaccaatgtcccagaatgagatcgatatgctcctggatgcaatcgacatcggcatcgagatcattaaaagaaacaggatcagacaaaatgaacagtgagaaaagagtctttctatacgttcgagtatcgacacaggaacaagcgaaa

SEQ ID NO: 23790 - DNA, 260 bp, Unknown
  Description of Unknown: LeftRegion for integrase B10791 sequence
cccccatggcggacgacggagcgcccaagctgagcccccgccccatcagcgggggctcagtgctatttggcgcccgcagcctgcacgatcgcaaggactacgcccgcgttgcatagttatactcacatccctgatggaccttcgcgcccgaccgcgcggcgtagacatagtaataacgctagcctgacgccatgacatccatgcccacccagccaccggaacagcccctgcgcgccttcatctacaaccgcgcctcccgc

SEQ ID NO: 23791 - DNA, 260 bp, Unknown
  Description of Unknown: LeftRegion for integrase B10792 sequence
gataagcgcatagaagctttctacaaggacggattcgctgttatatcaggcttcctgcactccatcggttatcttgtaggcatcaacatcccgaagcgttacagacggcatatggatgttctgagtaaggatatatattaaaaaaacagcccccacggtacatgctataccgtaggggataattttaagggagggattttatgaaaacagcagccgcttacatcagagtctcaacagacgatcagatagaatactctccg

SEQ ID NO: 23792 - DNA, 260 bp, Unknown
  Description of Unknown: LeftRegion for integrase B10793 sequence
atcgtaaaatgaaagaaccccaccacttcgtcaagtgatggggtctttacaaggaaggtatgaaaaaagtacaacaacgaaaaaaggagaacaataaaatgattaaaggagtacaactaaaaggggtgatttatggcaattggaggttttgccatgctttattttaccattgaaaagtcatttactgaaagcaggtcattatgaatgtagcaatctatacaagagtttccacacaacaacaagctgaacatggatattca

SEQ ID NO: 23793 - DNA, 260 bp, Unknown
  Description of Unknown: LeftRegion for integrase B10794 sequence
atctcctcgacctcgaacgaggtctcagccatcctgatctcctctcgatgctcgttttcacgcacgacagcccagccgtcaccgcgccgcctccgcaccctctcggtggccgtgccccgggcgatcggcagtcgcgccgattcacggcgaggcttccccgtcatgatacgggatcttcttcgccgtgtacactcccggccgtgaagccgtgggcaggctacatccgcgtcagccacgtcggcggccgaaccggcgacaga

SEQ ID NO: 23794 - DNA, 260 bp, Unknown
  Description of Unknown: LeftRegion for integrase B10795 sequence
ttagaaaaatataaaataaaaatagaaaaatgcatcaatgaaaaatgtatttattttcaagtaataggaaataagcatgaaaatcctgaactgttaaatttgctggaggaaaaaaatgactaaaaaagaaagtataaaactagctgcagtaaaaataagacagctggaacaaaaaataaaactgaaaaaaggtgcttaatatgtttgaaagttatggaaatgaaataaagcaggctataaagtacacaagagtttccact

SEQ ID NO: 23795 - DNA, 260 bp, Unknown
  Description of Unknown: LeftRegion for integrase B10796 sequence
ttgtctctcaaaagatgaacggagagatgaaagtcaaagtaaaataagaacaaaacaaaaaagccccacgctctctaagtttggcgactcagagcgtgaggctagtgacaagaaaaactttttcagaagatagtatcttttgagaggttttcttgtaccaattttatcatttttttggaaattttgaaagaggtactactatgatgaacagaaataaagttgctatctatgtacgtgttagcacacaggggcaagttgat

SEQ ID NO: 23796 - DNA, 260 bp, Unknown
  Description of Unknown: LeftRegion for integrase B10797 sequence
cgttttagatgttaatgcgaaagttattgcacaggagcaagacggtaaaatgattttagataaataaaaaagccccacgctctcaaactttggcgagtctgagcgtgaggttttgaaaagataaagaaaggatttcaaaatgttttattttgaaagggtctttctgtactctattttatcaaaaatggaggtgaaagacaatgaataaagtagcactatatgtacgagtttcaactacttcccagttagaagagggctac

SEQ ID NO: 23797 - DNA, 61 bp, Unknown
  Description of Unknown: LeftRegion for integrase B10798 sequence
tgtgcttgtctttaagctctcccgatttggcagaaatgcagccgatgttctgaactctttg

SEQ ID NO: 23798 - DNA, 260 bp, Unknown
  Description of Unknown: LeftRegion for integrase B10799 sequence
tcattgcattgattcaataattcaacaattctaattatgtattcttctttcatgcgaaaactcctttcaaccggggaagaacaaatgttctgaatatattatacaaaattactaaattctgaacaatggtaattgttgcattattgttatagcacaaccaaaaaatatattttgtcgaaaaatagaaggtggttaaaaaaatgttaaaaaaacgtgtattcgtatatgtaagggtgtcaacggctcatcaagcagaagaa

SEQ ID NO: 23799 - DNA, 260 bp, Unknown
  Description of Unknown: LeftRegion for integrase B10800 sequence
cttcgccgcgagactgctcatcgacgccgccgagtacgccgagctcgagcgcatcagtcccgatcctcactacctcgccgatgagctcagcgtcacggtcgacctgatccacgccttccgggaacattgcctcaccgctctgcgaggcgtcggctacgcccacgcgcgcatgggtaccggtcaggggtacaggagcgcccatgcgtaacctccgccccgtcgccgacacgccaccccgcgcgatcatctacctccgacag

SEQ ID NO: 23800 - DNA, 260 bp, Unknown
  Description of Unknown: LeftRegion for integrase B10801 sequence
caaggcaagattgtgcctgtggcacgttcggaaccggatccagtcaaaatagaatacatatttgatgaattgaagcagacactgctgaatggtgacaacttgaccatagatgacaagcctgccactgctgcagagatcatgacaattgttacaatgattgatgccacgcttcaaacaatcaaaaagcaaaggatgatgtgatgatcaaaacaggcttatatgtgagagtatccacgcatgaacaagcaaaagaaggttat

SEQ ID NO: 23801 - DNA, 260 bp, Unknown
  Description of Unknown: LeftRegion for integrase B10802 sequence
caaggcaagattgtgcctgtggcacgttcggaaccggatccagtcaaaatagaatacatatttgatgaattgaagcagaccttgctgaatggcgataatttgaccattgatgacaagcctgccactgctgcagagatcatgacaattgttacaatgattgatgccacgcttcaaacaatcaaaaagcaaaggatgatgtgatgatcaaaacaggcttatatgtgagagtgtctacacaggaacaggcaaaagaaggttat

SEQ ID NO: 23802 - DNA, 260 bp, Unknown; identical to SEQ ID NO: 23767
  Description of Unknown: LeftRegion for integrase B10803 sequence

SEQ ID NO: 23803 - DNA, 260 bp, Unknown
  Description of Unknown: LeftRegion for integrase B10804 sequence
agaatgcccaaaggcggatgccgcgattgttcccgttgcactgagaccggcgcgcaggggtgtctcgccatgccctggcgcatcgtctgggcaatctgcttctcgtggtgggctggcgcgtttacgaagaagtgcccccagtgcggccaccccatacgtaaccatcaccgccgcaaagacgggagtttccaggattgaccatgcgtgccgtcatcgtcgccgccgtctctaccggcgctcaggccagtgaagagcgttac

SEQ ID NO: 23804 - DNA, 260 bp, Unknown
  Description of Unknown: LeftRegion for integrase B10805 sequence
acactttgcactaagtaaaccctgtatgaggtatagtaaatctatatctgtgcagccagctaatagctcgctgattgtttctagtaaatagtctttttccatagctacacctcaatcgaacaaatgtttgttttataacaataataatattactataacttttctaaaaattcaatagtaaaattataggaggtctgaatatgtcgccaaaaaataaaaaaattgagcgtatagcctgttatatccgtgtttcttctcag

SEQ ID NO: 23805 - DNA, 260 bp, Unknown
  Description of Unknown: LeftRegion for integrase B10806 sequence
gtagctctaagtcattgcagttttggagtaattctttaatagtttcaattaaaacagttttttcatccatagcattacctcgctaacaaaataaagtagagaacacctgtttgtattttacgacataatataaacgtttgcaatatagtatatttttagaattgtaaaaatatgacaatttatttaaaggaggtcactatatgtcaccggtaaataaaaaatatcagcgtatagcctgttatattagagtgagcagccaa

SEQ ID NO: 23806 - DNA, 260 bp, Unknown
  Description of Unknown: LeftRegion for integrase B10807 sequence
tcaacactctacactaagcagatttttaattatgtacagcgtttcaatgtctgtacattctgccagtaattttttgatagtttcgattaaatattctttttccatagctacacctcgcaaatagaacaaacgttcgtgttacatgattatattactataattgtttaaaaatttcaatagtaattttatggagggttataatgtcaccagtaaataagaaaatagagagaatagcctgttatatacgtgtatctactcag

SEQ ID NO: 23807 - DNA, 260 bp, Unknown
  Description of Unknown: LeftRegion for integrase B10808 sequence
acttacgccctgttctgcgacggcaggcaggtcggcatggtcggctccatgcacgggttctacgagcatgcgttccgcgtcgggctccgcgtgttcgtcggcaccacgtgccatggcatgtacgactccgtaacgccggacatgtacatagacgggtggagctacgacgagtggaaggcgttcttcacggagctgggcaagtgaagcgcgccgccatctacgcccgatacagctcccacaaccagagggacgtgtcaatc

SEQ ID NO: 23808 - DNA, 260 bp, Unknown
  Description of Unknown: LeftRegion for integrase B10809 sequence
tagttttttgtacagatccggggatattttcagattcaattgcttcaaatttttggttatccatgcctgcgtggcttggtattttctctctttagcatccccctcatatgtcctaggtcttgccattttcacaccccctaactgtatattaactgtataattataacatggtagcaatgccattgaaaggatattttaaaatgaatgtagcaatatatgcaagggtatctacagaacagcaggctgaaaaagggtactcc

SEQ ID NO: 23809 - DNA, 260 bp, Unknown
  Description of Unknown: LeftRegion for integrase B10810 sequence
aatagtcaaaattaaattatatacaaaaaccgcccggtgctggtaacaccgaacggccttgcatagatttctcttaccggatgcccggaaagatatattcaaacctgaacactttgaattatatcattctttcgggcacctcgcaagaggtgtattttttatacccttttttaatatttttatacgaaaggatgatcgaaatgagaataggtgcagcttatatccgtgtcagcacggatgaccagctggatatcagcccg

SEQ ID NO: 23810 - DNA, 260 bp, Unknown
  Description of Unknown: LeftRegion for integrase B10811 sequence
aaattaaaggttctctggctagttcattagataatagtgatgaatattatgtcagagaagcttcggtctatataaaataaaaaaaaaacactccaagccgtccaaagttgggagtgttcgatctgatattacaaatatccacgctgtcgtgtggtgctatttgttatatcctattctatcacaaaataggaggaaaaaatatgataacagccatttatgtacgtgtaagcacggaagaacaagcaaaagaaggatactca

SEQ ID NO: 23811 - DNA, 260 bp, Unknown
  Description of Unknown: LeftRegion for integrase B10812 sequence
agatgatttgtatattataacctatatattttattataaaggcaatacaaatcatctggtgtgcctctttttgagatatatactttatatacttatttataacgactttgatgaaaatataaaaaagtataaaagtctaaccgtttttattcttgataaacaaataatatataaatttgtaacgtcaaaatattttgtgtatgaaagcaattctattgattagagttagtacagaggcacaggaccttgtacaacaaaga

SEQ ID NO: 23812 - DNA, 260 bp, Unknown
  Description of Unknown: LeftRegion for integrase B10813 sequence
gtagatcagataattcttgtctcaggagacagtgatttcgttccagctgcaaaacaaggcagacgtgaaggtcttgatataattcttgctcctatgggagctacaataaagccagatctacatgaacatattgacggtttgatcaatactgtcagaatgtataccgatgaagaacaaactgaaaagtaaggagtgattctatgcagacagctgccgcatacataagagtctcgaccgatgaccagatagaatactccccc

SEQ ID NO: 23813 - DNA, 260 bp, Unknown
  Description of Unknown: LeftRegion for integrase B10814 sequence
gaagcgacacttaaacgaattaaaaagcaaggagatacgttatttctaatgcctgaaaaccctaagtatactccatatattgttgatgaaaataacccagcgagaattattggaaaagcaataagctacgaaatgatattgtaaaaaagagctagacaaaaagtctgctctttctttatatcttgggaggagaattataaatgactgtaggaatttacattcgagtatctacagaagaacaagcaaatgaaggttattcc

SEQ ID NO: 23814 - DNA, 260 bp, Unknown
  Description of Unknown: LeftRegion for integrase B10815 sequence
tagagcctatatgtgaaaatatggagattaccatagaactggcacgacgtaaaaataagtagacacttgaaataataccagttagttttatgatagccaagtcttaaattttggtaaaagacgtggctattatatagattaaaaagtggctatttgtccatgttaaaaaataattaccagacaaaaggagacgatttaaaatgaaacgagaaataaaagacgataactataccaaactaggacgtaaagaccctaaacga

SEQ ID NO: 23815 - DNA, 260 bp, Unknown
  Description of Unknown: LeftRegion for integrase B10816 sequence
atgacgacatccgaactattggggaagttgtcagtgtgtatagagataaataaaccaactgtttccattttggaaacaactcaaaaaagccccacgctcagaagtttggcgaccgagagcgtgaggctgtagacaagaaaaaagcattaaaaaagctatttttcttgtacccattttatcaaaaaagaggtacaaattcaatggtaactacaaataaagtggctatatatgtcagggtttcgacttcatctcaggctgag

SEQ ID NO: 23816 - DNA, 260 bp, Unknown
  Description of Unknown: LeftRegion for integrase B10817 sequence
ccagcgccaggcccacggcggcgattagccccgtaagcaggtaagcgattctgcgcattttccgtcctctttggtgaggtttcgcgggttttcccgcagcggggtcgctgcggttagtgcatgtgagacgcctgagaggcgccattggagtacgtgctacgtaaatttatcggatgttcccttgcgttaccctgggttacatgcaagccggcccgcagaatctcagcgccgccatctacacacgcctgtccaaaggcttt

SEQ ID NO: 23817 - DNA, 260 bp, Unknown
  Description of Unknown: LeftRegion for integrase B10818 sequence
aagccgtcgagaacgcacagcgaatcatgggagccttggatgttattgtccataattcataaataaaaaaatccccacactcgcaaaagtttggcgactctgagtgtgaggttggtaattacaagaaaaacttttcaaaagagattcccttttgagacgttttcttgtacctattttatcaaaaaaggggtacaaattcaatgaaaacaacgaataaagtggctatatatgtcagggtttcaacttcttatcaggctgaa

SEQ ID NO: 23818 - DNA, 260 bp, Unknown
  Description of Unknown: LeftRegion for integrase B10819 sequence
acaataagcactgctagtggcggtagttctggttttggtggtggtgaccgtatccaagcgactatggtatttgagaaaatttaaaaaagccccacactcagaagtttgcagaccgagagcgtgaggctacgagcaagaaaaaaagcattaaaaagctctttttcttgtacctattttatcaaaaaaggggtacaaattcaatgaaaacaacgaataaagtagcaatctacgtcagagtttcaaccgcttcacaagctgag

SEQ ID NO: 23819 - DNA, 260 bp, Unknown
  Description of Unknown: LeftRegion for integrase B10820 sequence
tgcctcacgcactccagcgcccaggttttcgtaagcagtgcccttgctgctgagcagctccagcagagtgctgcgggtgatcggctgagcagtcagttctgaggtcgcagtcatggtgcggctttacgggtggtggcaggtaccaaccccgtccaaacgtggttggctagccactaccgtagccgaaggaggtgtgctgaatgcgcatcgggctttacgccagggtgtccaccggctctgacgagcaggaggcggcgctt

SEQ ID NO: 23820 - DNA, 260 bp, Unknown; identical to SEQ ID NO: 23433
  Description of Unknown: LeftRegion for integrase B10821 sequence

SEQ ID NO: 23821 - DNA, 144 bp, Unknown
  Description of Unknown: LeftRegion for integrase B10822 sequence
tgcaattcctctccagttgacatttgcttcgcaccagtcacatagggactcggtgaaaacatccctccttttcgacgtttacccatgaaagcattcctttacaatcgcgttagccataaggactccaaagcctctgacatcagt

SEQ ID NO: 23822 - DNA, 260 bp, Unknown
  Description of Unknown: LeftRegion for integrase B10823 sequence
aacctcgtagatttgagaaagaaaaaaggcgtcagtcaacttgacatttcgatagtagttgataagaaaagctcgtctgtcgcatcgtgggaacaagggatttcgcttccagacgtgacgacactctatcgactcgcgctatattatggcgtaatcatggaatatttttatcaaaaacacgacaaggtaggtgaagacgaatgatagctctttattgtcgagtttcaactcgtgaacaaacaaaagaaggttattcaatc

SEQ ID NO: 23823 - DNA, 260 bp, Unknown
  Description of Unknown: LeftRegion for integrase B10824 sequence
tttgttaaataatatttaatatttttgagtaaaagtattgactttgttaaattatgtttcgttttatacttttgatataatttgtttgaatttattatactaaaattataaaactattttgtcgaatgaaaaacattttttaattttgcaactgtaaactacactactaacgtaacaacagtcaaaaaattgttcacactatgtacaaagtcatttcattcacaagagttagttctcagcagcagaacctagaatctcaa

SEQ ID NO: 23824 - DNA, 260 bp, Unknown
  Description of Unknown: LeftRegion for integrase B10825 sequence
agacatgaactcaaaatatccgcagttgagactgaataaatccatgttgtccagatgggagaatgacttgaatgagccgaccttggagaatgccaagtatctatccatgtactttgatgtcagtctggattatctgattggactgaccgacacaagaaccccatcaagactactggcaaggagaaagaggacagaatcaaatgaatagatgtgccatatacgtcagagtctccacacaggagcaagcaagagatggatac

SEQ ID NO: 23825 - DNA, 260 bp, Unknown
  Description of Unknown: LeftRegion for integrase B10826 sequence
gcgcacgtctgtctcggccaccgtgacgcgacaccgcgccaggagcttcaggccgaccgctgggccgcgcgcaagctcgtccaccccgacgaactgagacaggccgcccggcacaaccccgatccggggatctggtgccacgacctcaacgtctcggcgtcgctcctcgaccgctacatcaaggaccacaggaggatctagtgcaaccccgacttgtgccagacaccccgccgagagcggtgatctacctccggcagtcc

SEQ ID NO: 23826 - DNA, 260 bp, Unknown
  Description of Unknown: LeftRegion for integrase B10827 sequence
tgtgccacacccggttcgggttggcttccgcgtcacggaaggtagcggcgtgcgtgacagaatgtgcagtcatggcgggaacctctcttcccgtctaggccccgtctggtgcgtgagaccaccagacgcgggccgcctaaactggggccattagcgagaggactggtcgcagaccgttcgctagtggcacactctaccgcatgacggtgaccgcacacagttacgcgaggatttccactcgcaaacagcgctccatcgag

SEQ ID NO: 23827 - DNA, 260 bp, Unknown
  Description of Unknown: LeftRegion for integrase B10828 sequence
tcagcgtttcgccaaagtcgtgccactcagtgaggcgcccctagccaagctgcaccgacttaggcgcgagctgtcgcgcatctctttggaaatggatgagtgcctggctgagctggagcgcggcaagtcttagaacgtcataagcccaactgctgccagcagctgtcaggctcataacgttttcctgtagactgcgtgtcatgacacacacactgacagcccacccagaccctgccatcatctacctgcgtcagtcgctg

SEQ ID NO: 23828 - DNA, 260 bp, Unknown
  Description of Unknown: LeftRegion for integrase B10829 sequence
aaaattcaaaaatcacacacaaaaatatggcggtatgccaaaattgtggatatagttggggaatataactttacgcaagcatattatataaattttcacatttttcataacaaaaaggggtataaatttcacattttcccctttactttactaaagataacgtataaacacgttatctttttattcataggaggtatataatgttaagagctgcagcatatataagggtttcaactgatgagcaaacagaatttagccct

SEQ ID NO: 23829 - DNA, 260 bp, Unknown
  Description of Unknown: LeftRegion for integrase B10830 sequence
gattacttgaaagatcagctaaacaagcaagaacaggaagcacagaaaaagaatgataatttgaatgaacagattgccaggcttcaaagggataatgattatctttgggcagaaaacaatcgcaaatccaaagtgatagatagtttcattgatgatgtttttaagaataaaacagaataaccacaaaggggaaatgcacaatgtacaaacagttggaacgatacagagcggaaaaaggtcgggtgcgcatagcaaaatat

SEQ ID NO: 23830 - DNA, 260 bp, Unknown
  Description of Unknown: LeftRegion for integrase B10831 sequence
gttagaaagaacattgttttttcttttaatcttaaatgatttgagttttgcattgttcttttctgcaactaaaatacctaatgtttcaaaaaatttttcaatattcatagcaacacctctatttgtttgttatactatatttattatattgtataaccttatatgttactatgagaaaaaattggtaagggatgatgcgtatgaccacatttgacaaagaaagaaaaatcaaaagagcctttgacacaagtaaagtaatc

SEQ ID NO: 23831 - DNA, 260 bp, Unknown
  Description of Unknown: LeftRegion for integrase B10832 sequence
cctaaaaaaatgattattctacatctagtcattggatgacctatatcgtgatattatgtattctagaaaaatattacaatagggggaaattataatgacagtaaaagtacaaaagaaaaatctaccagacgcggtaaaatattttactattgagaatgacgatatattaactgtggtaattaataaaaggggctgtaagcatgaaacgagtagcaatatatataagggtatcaacacaggagcaagctgacgagggttat

SEQ ID NO: 23832 - DNA, 260 bp, Unknown
  Description of Unknown: LeftRegion for integrase B10833 sequence
attattttggtgtatccgttgggtttttgataaccggggaaaatcagccgtttatggcattgtcatttgaagaacaacaattgatatgggcattccgaaagctaaacagcaacggaaagtctatgttgttggcacaactccgcatgatatccaatgatgaactttatacaaaagataccgcacaagcggcaggataatttatgtggattttgggcagtaaaaaaccctgccgggtaaagcggcagggcgatgaaatgaaa

SEQ ID NO: 23833 - DNA, 260 bp, Unknown
  Description of Unknown: LeftRegion for integrase B10834 sequence
gtattttattttttataaacaacataacattagtagggataaagatttgtccctactttttttggaggaaattgtactatgaaaaatattaaaataacagtaaaatgtaatacaccaagcgaggaagcactaaaacgctttgcagataaaattatgatgatatataatgtatctatgtcaaataagaaaggagcttaaaaatgggtacaattatatatttaagaaaatcgagagcagacgaaacaaaagctgatagctta

SEQ ID NO: 23834 - DNA, 260 bp, Unknown
  Description of Unknown: LeftRegion for integrase B10835 sequence
cttcatcgtggcgaccatttctggctggaggttcagggcttccggtactgtcacctcaccggccttgatgcttgctttcagttgcgctctagccagtctgatttcgttggcccggtcaagagcctctaggtgctgtggtgtcatttctcccgttctgcccttctgcgtggctgcttagtagatgctacggtgatgtccggatgaagaatctggcgggatatatccgcgtgtccagggtggccggtcgcagtggcgagcga

SEQ ID NO: 23835 - DNA, 260 bp, Unknown
  Description of Unknown: LeftRegion for integrase B10836 sequence
gacctactggcaggtaacccccacagagcctcaggagccgtcagcagggccaggggtgctgctggtgcccagaacagccctacggctcccctggggcatcctgagccgtctggtggcagcctgatgggtgtcctgagccagagctagcccagggtggctcagtctcagagcatcgtcccaggtcagcagggttaccgctggtgtacctgtgcaagcagtggtcaccctgtggtaacctggtggccatggcacatcacaca

SEQ ID NO: 23836 - DNA, 260 bp, Unknown
  Description of Unknown: LeftRegion for integrase B10837 sequence
gccggcaagaataacgtagagccgacgcttcagagttctgcgacaaagcgttagagtcggcccccatgcgaacggccgcctatgcccgcttcagttctgatcaacagcgcgccgcgtcgatcgatgaccagctgcgaaatataggcgagcgctgcaggcgcgagggctggccagcaccgcgggccttcgaggatcgcgcgatgacaggcgcgcgccacgatcgtccgggctaccaggcgatgcttgcggcggccgaggcc

SEQ ID NO: 23837 - DNA, 260 bp, Unknown
  Description of Unknown: LeftRegion for integrase B10838 sequence
cctcacggacgcccgctcccaggttttcatgggcctggccgtcgctactgagcagctccagcagagtgctgcgcgtgatcggctgagcggtcaggtctgagatcgcagtggtcatgcggcttttcggctgtggtttcaggccaagcagctctggcgcggctaagcctgtaaccacagaatagcctggagcgaattgaacgatgacgacggcgatttacgcccgcgtcagcaccgaaagcgaggatcaggcccacgcctta

SEQ ID NO: 23838 - DNA, 260 bp, Unknown
  Description of Unknown: LeftRegion for integrase B10839 sequence
gaagacggtgaaatcgcagctgttctaattaatgaaattgtttatttaaagagagtatttaaaaatgatggaatgttagtccttcaatcagaaaaccctaattatgcacctatttttaaaacagacgaggaccaggattccataaaagttctagggaaattaaaaaaggtcgtcattaacttatgagtgggtgagatgatatgtatgctgctatttatgtccgcgtatcgacagaggagcaagcagaacaaggatattcg

SEQ ID NO: 23839 - DNA, 260 bp, Unknown
  Description of Unknown: LeftRegion for integrase B10840 sequence
tcttggtatgctcgcggctctgaaaaagttaacattaaggttttaaaagatatagccgcgttttttaatatttcgttagaggtacttataaacggcgatactcttacgtctttatactttagcgaatacgaatatactaagcaagagttagagctaatagctaactttagcaaattcttaaaagaaagtaggttgaaataatgataaacgacgtagctatatacttgcgtaaatctcgtgaggacgaagagcttaaagag

SEQ ID NO: 23840 - DNA, 260 bp, Unknown
  Description of Unknown: LeftRegion for integrase B10841 sequence
tcaaatcaaatgaaacgttaattgcagaaataaaagacgttaccgaaaaaagaattgcagacattataaagtgttgtgaaacacgaattgcagatatgaaaagtaattatgatgaacgaattgcaatttacagggaccttttacaaaaagcatacccaacaatgtatagattggattaaaaacataaggggattaatgatatgtacaccaattataaacaattagaacgataccgacataatgataaagttatacgcatt

SEQ ID NO: 23841 - DNA, 260 bp, Unknown
  Description of Unknown: LeftRegion for integrase B10842 sequence
atcttttggatatattcttctttcatgggcaggctcctttcaccggggaacgaatgttctgaatttattttataacacgaatatatcaaagacaatggtaattgttagcacttggaaccggaagaattatttactaaaaaacatatttttttactgaaataatttttttcattgaaaaacataaaaaggcggagaaatacatgtataaacaactggaacggtatagaaaagaaggtaaaccgattcgcattgcaaaatac

SEQ ID NO: 23842 - DNA, 260 bp, Unknown
  Description of Unknown: LeftRegion for integrase B10843 sequence
atccgagtacaatacccaactaaaaaagacggagccgcaagccccgtccccgtcactcgttcagcttgagcaggagcaggatgaaccgcagtagcttttcatcctcacaccgccgcacgagttcagcgatctgatctttgatattcaatgcccttccctcctttctcatgggatgggacaattatatggagaatcacacaatgctacaaaaagacggcatctatgcaatgtacctacgcaagagccgggcagatgtagaa

SEQ ID NO: 23843 - DNA, 260 bp, Unknown
  Description of Unknown: LeftRegion for integrase B10844 sequence
acgtcaaattacaatgaagcgttggaaatcacatcgaaacttgaaatgatctttaagagtgatgatataggagagagtaaaaaagatgagatataccgtgaaatcatgcgcatttatcttgaaagcaaaaaataactccttgtgagtttttttaatttgaatgctacacatagaaaacattgaaaaggaattgatacttaatgaaactcgttaaaaatggtaaaaaggtatttatttatgtgagggtgtccacgcaagaa

SEQ ID NO: 23844 - DNA, 260 bp, Unknown
  Description of Unknown: LeftRegion for integrase B10845 sequence
agctggtacgctagaggctcggaaaaagttagtattacaatactcagaaaaatagcactatactttaacgtttcgttagaggtgcttattaacggcgatacaataacgtctttatactttactgagtacgaatacactaaggaagagctagagcttatagctaacttcggtaaatttataaaagaaagtaggttaaataaatgataaatgatgtagctatatatttacgtaaatcacgtgaggacgacgagcttaaagag

SEQ ID NO: 23845 - DNA, 260 bp, Unknown
  Description of Unknown: LeftRegion for integrase B10846 sequence
cctcgcggacgcccgctcccaggttttcatgggcctggccgtcgctgctgagcagctccagcagagtgctgcgcgtgatcggctgagcggtcaggtctgagatcgcagtggtcatgcggcttttcggctgtggtttcaggccaagcagctctggcgcggctaagcctgtagccacagaatagcctggagcgaattgaacgatgacgacggcgatctacgcccgcgtcagcaccgaaagcgaggatcaggcccacgcctta

SEQ ID NO: 23846 - DNA, 260 bp, Unknown
  Description of Unknown: LeftRegion for integrase B10847 sequence
gcccccggcacggtgatggtacgcgaattcaacggcatcaatcatcgcgtcacggtactggatgatggtcgcttcgaataccagggacggccctacaagagcctgacggcagtggcgcgcgccattaccggaaccacctactcggggccggtgttctttgggctcaaaccgtcgcaccgcgaacgtcagaaggggaacgtatgaaaccaaacatgacacgttccaccatcacgccgaaacggcgctgcgcggtatatacc

SEQ ID NO: 23847 - DNA, 260 bp, Unknown; identical to SEQ ID NO: 23843
  Description of Unknown: LeftRegion for integrase B10848 sequence

SEQ ID NO: 23848 - DNA, 260 bp, Unknown
  Description of Unknown: LeftRegion for integrase B10849 sequence
aatcagtttttgttatgtttttgttatggcaaaaagcctttatttatgggctttttcggctatatataacaaaatctctatttttttcttattttctaagaaaataaaatatataggtatatttatataaatatatagaaaaagtaattatatatagaatttcgcgatttttttgtgattttgttatggtgaggaaaaaaatgaagaaaaagaccagagtgcttttgtatgtgcgggtgtcctcacaggagcagatgatc

SEQ ID NO: 23849 - DNA, 260 bp, Unknown
  Description of Unknown: LeftRegion for integrase B10850 sequence
tgtttttaagtacaatggcaaaacttgctatactgcttgccgtatactgggcgatagcaagtatatgctttcggttgatgatacaatatacgatattccctctgaagaagaattcaattcagtaattgaaaagctgaaaatagcaccataaaaaagcccatcagtaaatctggtgggctaatctataaaggagtgattgaatgaaaatagcagccgcatatatccgtgtatcaaccgatgatcagacggagttgtctccg

SEQ ID NO: 23850 - DNA, 260 bp, Unknown
  Description of Unknown: LeftRegion for integrase B10851 sequence
aatgcaataaaagttgtaattttctacagaaaaattgacaaatttgttgatttttttatacaaaaaatctataatataagaacaaagaggttaagcctcaaactaaaattattataagcggtttagccgcaaaaaagataaggtcttgttcttatacgttcaaggccttatcttttttatttgtcataaggagcgaacatatgagcgaaactactcagataggtgttatttatgcccgatattcctcggacaaacaacgt

SEQ ID NO: 23851 - DNA, 260 bp, Unknown
  Description of Unknown: LeftRegion for integrase B10852 sequence
ggatggcggaggttttacaaaatcagaagtcaactacgctattaaacatttagaagacgaagattaaaataaacaaaaaagcccacgctcaaatttggacgaggagagcgtgagctaataattggtagtatagtaaaaagcctgcttttagtaggtctctttactatacccattttaacacagaaatgaggtataaatcaatgcaaacaaaacgaaaagtagctatatatagccgtgtctctacactacatcaagccgag

SEQ ID NO: 23852 - DNA, 260 bp, Unknown
  Description of Unknown: LeftRegion for integrase B10853 sequence
gcggatcgcttgctgcctggcaccatgctcagccgctactttgacgaccaagagcacaaggtggtcgtgcgcggcgtgcgcgactttgagtaccgtggccagcgattcaagagcttgtcggcgatcgcacggttgatcgctggttgcccatggtcggggcctgccttttttgggttgaagtccaccaagaaggaggtcgcatgagaacctcccgcacctcagtggcaagcgcgccctcgttcattcccaaaaagcgatgc

SEQ ID NO: 23853 - DNA, 260 bp, Unknown
  Description of Unknown: LeftRegion for integrase B10854 sequence
cccacccgggacccgcggttgccgccaccaggcacgaccctcacccgagtattccagggtgaggcgcacgacgtcgtcgtggaggcggtcggcttcacctaccgcggggagcggtacgcgaccctgtcgcaggtggcgaaggtgatcaccgggacggcgtggaacggattcgcgttcttctacctcgaacggcgcgtggcatgaagcggctcacctccgtgtcgacgtcggcgaccggccccgtgcgctgcggcatctac

SEQ ID NO: 23854 - DNA, 260 bp, Unknown
  Description of Unknown: LeftRegion for integrase B10855 sequence
tctcccccgttgtagctcccgttgcttgcgccgttctaggcccccgtacgaggcctcccgagcttgcctcgcatggcccgtgaccagggacgatgccagttgcacctagtgcccgattccaagcaatcggggagtgactgcaactggtggtaccctagggtttcggtagtttgacctttgtaaaggagaaagtttcaaccatggctagcaagcgtaaatctcaacaaacgattgactcggaaattaagcgagtcgctatt

SEQ ID NO: 23855 - DNA, 260 bp, Unknown
  Description of Unknown: LeftRegion for integrase B10856 sequence
cggagcccccggaccaacgcatcatcacgctatgatttcgcctacatccgggtcggctcgaaaggcaccgggggctactcgttcggattgaatcaaaaagccggctcttggccggctgcccgttgcggacttccacaactcaatttcggtataattgcaccaaccaccgctcaaggtcaatagtgcctggaggatagaccgtgtctggaactgaggtaagcgtacccaaaatattgcgttgtgcgatttacacccggaaa

SEQ ID NO: 23856 - DNA, 260 bp, Unknown
  Description of Unknown: LeftRegion for integrase B10857 sequence
aactcatggtttaaccgctcaagtgatggcgtagcccttaaatcgttggttaagatctcggaatacttcaatatttccttggacaacctagtatgtgacgatttagctctctctaaacccgcggagaataagctaagcgaggaagaagtagcccaattaaagagacttctcgcatattacgagaaaataggcggtaagttatgattaaagtagcgttatatttaaggaaatcccgagacgaagaaaacgaggataaggaa

SEQ ID NO: 23857 - DNA, 260 bp, Unknown
  Description of Unknown: LeftRegion for integrase B10858 sequence
gatcgcctactgccgggcacgatcctgacccgcatctatgatgatgtcgaacaccatgttctggtgcgcggcgtgcgcgacttcgaataccgagggcagcgcttcacgagcctgacggcagtggccagggtaatcacaggatgcccatggtcaggtccgctattttttggactcaagacgcgcagcaagcaggaggcaccatgagagcgaaccgcaccatagcgacgccttcgtcgacgatcgtccccaaaaaacgctgt

SEQ ID NO: 23858 - DNA, 260 bp, Unknown
  Description of Unknown: LeftRegion for integrase B10859 sequence
ctcggaaaaggaggaagtttcaatgcttgaaaatgaggttgattaccgtttggcgaagatgctgcttggctgtctttaccatgatggattacttacagaaaaacagatgcagaaggtctgggataaactgctggaatattatcatccgccgtttcagtcggttgaggtcagaaaagaaatcggagatggggtgacggtcggtgaaagataaaatagtcaaaaaggtagaacaccttccacagctaacggatgtgaaacga

SEQ ID NO: 23859 - DNA, 260 bp, Unknown
  Description of Unknown: LeftRegion for integrase B10860 sequence
gatcaccggcggcgacaacggcaggagctacggagtaaatatcaaattatttatgtaatcagcagtataaacaataaaaattccccgtcggtactggtaataccggcggggacggagctgtgcaactccaaatatgttttgaaaaaatccatgtatatattatagcacggctccctcaatttttcaaggagggattttttatgaaaacagcagcggcatacatcagagtttccaccgacgaccagattgaatactctccc

SEQ ID NO: 23860 - DNA, 260 bp, Unknown
  Description of Unknown: LeftRegion for integrase B10861 sequence
tttgttacgctttttgttacggcgaaaacccttgtaaatactgaccttttgagccttatataacataatctatatttttcttttaacttttaaggaaaaaagatatataggagtataaggtaataaaaaaataagagtatataaggaatacgcgaaaatttctttgtttttgttattctgttacgcgaggaggttaaatcatgatttcaaatactgtcgtcgcgctttatattcgcgtcagtacacaagagcaagcgtcc

SEQ ID NO: 23861 - DNA, 260 bp, Unknown
  Description of Unknown: LeftRegion for integrase B10862 sequence
tttttgttactcattttgttacccccgaaaccctcggaatattgggacttttgggaatgttcgcaacataataataaaattattttcaattctaaagaaaaataatatatatgatgtatatggatataaaataaaatatatagagagttaacagcttttttgttattctgttacgttcgtatcagaaaggaggtctttctgtgaaaaataaaaatgtcgtgggattgtatgtccgagtatccactcaagaacaggcgaaa

SEQ ID NO: 23862 - DNA, 61 bp, Unknown
  Description of Unknown: LeftRegion for integrase B10863 sequence
cctcgaaaaagagttcaactccctcgatgcccagcgtgaagccggcgaagcctacatcgcg

SEQ ID NO: 23863 - DNA, 260 bp, Unknown
  Description of Unknown: LeftRegion for integrase B10864 sequence
gtgtggagtatgacgtccgcgatgcctgaccggcaccgggaaaagccgctcagcctacgccttggggctgagcggcagccggtagaggaagccgccgagcgggacggcgtcccggtgcggcagtggatactcgccgcgatccgcgagcggctggcgcggcagtccccgcagtagcgtcatccaccgcagcacggcggggcgtgtgtgctagcatcacgcacgtgagagcagttctttacgcgaggcagagcctcgacaag

SEQ ID NO: 23864 - DNA, 260 bp, Unknown
  Description of Unknown: LeftRegion for integrase B10865 sequence
atttgatgtcccaatggaaagaaccacattttcctttgatgagcttttaaaacttgatgatatagaagtaagtaacagagattttgtattatcaatggacgaattatcaagggatatgacagttccacaaatggacaaagtcatgttgtatgcaaaatttattaaagaacaggacaaggataagaaggatggtgattgacatgattgccatttatacccgcgtttcaacaactgaacaggcacaggaaggatattcactt

SEQ ID NO: 23865 - DNA, 260 bp, Unknown
  Description of Unknown: LeftRegion for integrase B10866 sequence
ttatgggatttttaggagaaaaagggaagaagcaatggcactgtaacgagtgcagctgtatatttgagacaaaataaaaaaagccccacgctctcaaagtttggcgactctgagcgtgaggcgaatctagtatagtaaaaacctgctttaagtaggtctctttactgtactcattttaacaaaaaatgaggtaaaaaacaatgagaaaagtagctatttactctagagtaacaacaataaatcaagccgaagaaggatat

SEQ ID NO: 23866 - DNA, 260 bp, Unknown
  Description of Unknown: LeftRegion for integrase B10867 sequence
gccgatcgcctgctgcccggcacgatcctcacgcgcgtctacgacgacgtcgagcaccaggtgctggtgcgcggcatgcgcgacttcgaataccgtggccagcgcttcacgagcctcacggcggtggccaaggtcattaccgggtgcccgtggtccggtcctctgttcttcggcctcaagaccaagaagaaggaggaagcatgaaatcccatcgcaacacgccggcgccaccgacgcttgcgcccaggaagcgctgcgcg

SEQ ID NO: 23867 - DNA, 260 bp, Unknown
  Description of Unknown: LeftRegion for integrase B10868 sequence
gccgatcgcctgctgcccggcacgatcctcacgcgagtctacgacgacgtcgagcaccaggtgctggtgcgcggcatgcgcgacttcgaataccgtggccagcgcttcacgagcctcacggcggtggccaaggtcattaccgggtgcccgtggtccggccctctgttcttcggcctcaagtccaagaagaaggaggtcgcatgaaatcccatcgcaacacgccggcgccaccgacgcttgcgcccaggaagcgctgcgcg

SEQ ID NO: 23868 - DNA, 260 bp, Unknown
  Description of Unknown: LeftRegion for integrase B10869 sequence
tttacaaaagccgaggtgcgtgacctgccagtgaagatcgtgggagttgtgcagaggctggtgagggattattttgcataaaaaagaaccgcacccgaaggtgcggtcagaaagaaggtttaatgagaacaaacctaatgaaagattacaattattatatcatagccttcttttgattttcaacaaacggaggtggttttttgaatgttgttatctatacccgggtatctactgccgagcaggccaacgatggatattcg

SEQ ID NO: 23869 - DNA, 260 bp, Unknown
  Description of Unknown: LeftRegion for integrase B10870 sequence
aatatgagacgcataccggtcgatgtgctgaccagagtggcagctctgtataacgtcagcgtcgatgaattgctgggaaactctgtccgaccggatgcatctacaaacattatacacggaaatttcacaaaagagcagttacagaaaattcaaaaatatgcagagcttgtcagcaatgacgaattataggaggaaccataatgaacaacgtaatggaggaatataaaaaatggcaacgcgtaatccgcgtcgcgttctat

SEQ ID NO: 23870 - DNA, 260 bp, Unknown
  Description of Unknown: LeftRegion for integrase B10871 sequence
gtatttgagaactaaggtttcagagcttaccaaggacgctgggcttaaatcagtagagatcccttttgattttatatacaaaagcagttcaaaaaatgagaatcaatctaaatagggatactcaataattcaaatgaccattttgctttcagcaaagtggtcaaatactagtctctagtatttgattggaggaacatgtaatggaaaaaataagaaccggcgcgctatatatccgtgtcagtaccgctgatcaggccgaa

SEQ ID NO: 23871 - DNA, 260 bp, Unknown
  Description of Unknown: LeftRegion for integrase B10872 sequence
tcagggtttcaatgagttctatcagttgggccttgttgtcattcatggggagcactcctttcttccagggagaacaaatgttctgaatttattataataaaatactaatttcagaacaatgggaattttttacaattataattatgttatagcacttttcgacggcggatgttgtcgaaacaaggggaggatgaaaaaaaatgtataaacagctagaacggtacagacaagagggcaagcctatcagaatggcgaagtac

SEQ ID NO: 23872 - DNA, 260 bp, Unknown
  Description of Unknown: LeftRegion for integrase B10873 sequence
ctgatttcatcatatacattgacaatggggacattgaaaagattgttgaagaataaaactaaaatgccccggcagtgctgggaacactaccggggcggcgcacaatatattataccagatacaacataccatccgcaccattatactatcacttacggtgcgggaaataaaaggaaaaccgcagaaagtaggtgatttttttgataccagccattgaatacacaagggcttccacggaccatcaagaatattccgtgggg

SEQ ID NO: 23873 - DNA, 260 bp, Unknown; identical to SEQ ID NO: 20552
  Description of Unknown: LeftRegion for integrase B10874 sequence

SEQ ID NO: 23874 - DNA, 260 bp, Unknown
  Description of Unknown: LeftRegion for integrase B10875 sequence
gcaccgggcacaacactggtgcgcgagtacgacggtgtcacttaccgggtcaaggtcatggacgacggtcgattcgatctggacggccgcccatttcggagtctatcgaagttggccaaggagattacggggagcacccgctccggacctgtgttcttcgggttgaagcccgccagccgcgacagaaaggcggcacgagcatgaagcgtacaaccaaagaggcgccgacgctgaccccaaagaagcgctgcgccatctac

SEQ ID NO: 23875 - DNA, 260 bp, Unknown
  Description of Unknown: LeftRegion for integrase B10876 sequence
cgcctgttgcctggctccatcctgacgcgcatctacgatgacatcgagcatcgcgtgctggtacgcggcacgggcgatttcgaatacgaagggcaacgcttcaagagcctgtcggcgattgcgggtcgcatcaccggtactcactggtctggcccagcgttcttcggcctcaaatcccccgcctcgaagaaggtggcagcatgagttcgccgcgtgccaccccgcaaccggcggtcacgcccaagaagcgttgcgccgtc

SEQ ID NO: 23876 - DNA, 260 bp, Unknown
  Description of Unknown: LeftRegion for integrase B10877 sequence
cgtctgttgcccggctccgtccttacacgcatttacgacgacattgagcatcgtgtgctggtgcgtggatcgaatgatttcgagtaccaagggcaacgcttcaagagcctgtccgctgtagccaaacgcatcacgggcagccactggtcaggcccggtgttctttggcttgaaggcacctgcctccaagaagggggcggtatgagctcagtgcgtcgaaaccaaactcccgcaatcacgccaaagaagcgctgcgccgtc

SEQ ID NO: 23877 - DNA, 260 bp, Unknown
  Description of Unknown: LeftRegion for integrase B10878 sequence
gttgaaataattggaaaagttatagaagctagaaaaagaaaacaatttaaataaaaagagaaaatgttcctgtttggcgacacgacattttctctactcataaccactattgaaagtgattacttttatattatacactataaaagcctttattttcaatagtaaattaaaaatttataaaaaaatggaggttttttattatggataaaaacatatctttaaaatataagcaaaataaaaatggtataatctttgttgca

SEQ ID NO: 23878 - DNA, 260 bp, Unknown
  Description of Unknown: LeftRegion for integrase B10879 sequence
tctcctggtacgaccctggtgcgtgaatacgacggcatcacttatcgggtcaaggtaatggacgacggccggtttgacttgaacggccgtccattcaaaagcctgtcaagagtggcacgcgaaatcaccgggacggtgtattccggccctgtgtttttcggcttgaagccgtccagtcgtgaacgaaaggcggcccaggtatgaaaacgccagcaacacgttcgccggcactgacgccgaaaaagcgctgcgccatttac

SEQ ID NO: 23879 - DNA, 260 bp, Unknown
  Description of Unknown: LeftRegion for integrase B10880 sequence
actttattcttgatccgatgtgggccgacatacggccaaatctgtttgaacatattgacggactttactcgatgtggaaaaagaaacccgacgataaataaaataaccgctcccggtgctggcacaccaggagcgacgggaaggcgtagaccacagagcggcggctacccttctattatcggaataggaggattttgtcaatgtccacgttccccgacgacgcgacgtgcaagagcattcgtgcagcgctgtacgtccgg

SEQ ID NO: 23880 - DNA, 260 bp, Unknown
  Description of Unknown: LeftRegion for integrase B10881 sequence
cgcatagaatacacccgcccggagcaaagcaaagagaccaccttccgggcccaccagaatgccctctttctcgcgctcctggatgggggcgttgacctggacgggatgaagatcacccaggaggaagccctcctggtcgatgactgcctgacggccaccgtggagatcctccggcgccgtcgtgaacgtgaggcccggtcatgattgcgctctattctcgggtttccacccaggagcaagcggcagaaggctactcgata

SEQ ID NO: 23881 - DNA, 260 bp, Unknown
  Description of Unknown: LeftRegion for integrase B10882 sequence
cggatcgaattctgcaagccgcaaccggagaacgtcacggattttcgctctcatcagaaccggctccttctccgtctcatggagcagaccgtcaccatcgatgacgtccccatcacccaggacgaggcgctcctcgtggacgatttcctgaccgctgcagcggacaccatccgccgccgtcgtgaacgtgaggcccggtcatgatcgcgctctattctcgcgtttcgactcaggagcaggcagcagaaggctactcgatc

SEQ ID NO: 23882 - DNA, 260 bp, Unknown
  Description of Unknown: LeftRegion for integrase B10883 sequence
tgtttttgttactcattctgttacgccctttcgcccgataaatcaaggcttttcggctcctctgtaacataatctatatttctcttttaactcttaagaaaatatataagatatagagtaagagagataaaaaaataaatgtatataggagttgcgaataattctgttatttgttacgcgaccggagaggaggtcaatctatgaatgagaaaacggtcgtcggtctctatatccgagtcagcactcaagagcaagcctcc

SEQ ID NO: 23883 - DNA, 260 bp, Unknown
  Description of Unknown: LeftRegion for integrase B10884 sequence
actgacaaaaagaattgtgttacatgcaaaggtgagctatttcatactgacctcagatgcagttgtttaaggtcagagatgcaaagcggcgagcctttgagatgcatatctattaaagacgcaaaagcgaaaaaaatgacatattgcgccgactgctccagagtgcaatatttaattgatcatggaagggcggacgaggtttgaaacgtgcatttttatatgtccgagtgtccactcaggagcaggccaaagaaggatat

SEQ ID NO: 23884 - DNA, 260 bp, Unknown
  Description of Unknown: LeftRegion for integrase B10885 sequence
tattctttaaaaataaagaaaacttgatatttcttatattataccctaataaacagaaaaagtaaacttgcttgcataatttttttcttccaaaatttaatatctatgatcttattattgctaaatacattttgacatcgcgaacgtataataatataatccttataacgacgtttgttttataaaaaggagatatttatatgcttgagaaaatcttaagagtagcgttatatatacgtgtttccactcaggaacaagtt

SEQ ID NO: 23885 - DNA, 260 bp, Unknown
  Description of Unknown: LeftRegion for integrase B10886 sequence
ctaggggcaacgtcattgaggccaacgcgtctgccccggtcggcggcctggtcctgatgaccgccttgaccgccgcgatggtcgagaaggcttggagcctctacgaccagcggcggcgatcctacctgtaggcggcacgattaaacgtgtcgttattcatcctttgacacagcaaagacgaggccgtaccgtgtctagacatgacgccccgacgcaagcgcgcagccatctacgttcgcatctcccgcgaccgggaaggc

SEQ ID NO: 23886 - DNA, 260 bp, Unknown
  Description of Unknown: LeftRegion for integrase B10887 sequence
aaaggacgttagaacgacatgcctgaccgtcaaggatggctcatcatcgctgctactgccctgctcgtcgcggtcgggttcctcccgccctgctagcccggtacccactagggcccgtcctctccccgagggcgggcccttcgtcattctccagacacatgcaactaacgtttgcgctgcaggaagagtaagttacatgcatgacccctaacgcagcgatctacgcccggcagtccatcgacatagccgagggtatcgac

SEQ ID NO: 23887 - DNA, 260 bp, Unknown
  Description of Unknown: LeftRegion for integrase B10888 sequence
ccagatcaagcgggtctaccgtgagcccggcggcaacctggaacttcggtctgaaaacccggacttccctgtgaagacctacggggaaaaggacctggcaagcgggtgggtgaggatcgttggcaaagtcaaggccgtcatcaccgttccgaaacgcaaatcctgaagcggccgccatctacgccagggtcagcacggcgatgcaggtggaggggggcacgtcgctcccctcccagctttccgagtgccggtcgatggcc

SEQ ID NO: 23888 - DNA, 260 bp, Unknown
  Description of Unknown: LeftRegion for integrase B10889 sequence
ttaatccgtgtaatgcacctgacgtgattagtttattcattttatataattttatttattgaaatttaataactttttaaaatttatttttatacttaaaaaattgatttatttataataaaaaaattgatttttattatttaatagtataattaaattacaaaatttttgttaatttataaattcgttaaattaataaaatgaatcctatttataatacattacaaaatatgacgcaacaacaaggtaatcaaggtatg

SEQ ID NO: 23889 - DNA, 260 bp, Unknown
  Description of Unknown: LeftRegion for integrase B10890 sequence
acgccgcgataaacggcggattgtgtctgtccggaggaatccacccaagcctggaacggtggcaagggtcggagagaatagcccgccgcatcgaaacgcatcagtcggcaccgttctgggatcgacgaaacgttgatctggaggtaactgacttgcggtagtacgtttttttttttttttttttttttttttttttttttgtgggtgttgtgttgggtgcggctaccaattgcgacaaagccggcgtgattctggacggc

SEQ ID NO: 23890 - DNA, 260 bp, Unknown
  Description of Unknown: LeftRegion for integrase B10891 sequence
tggcgggcctcccacacatatacacgcaccattaccccctacaaaagcaaaagggccgcccccgtgttggcgcacgggaacggccaaagaacgcgctgcacggcaaaaactgccatacttcacgccccacagcacaaagtatagcataaaaacgccgcgcggcatagtacctttgtacaatttcgcggggtgtttttattatgttgtacggtaaaccgcaaaattattcgtggtatcgtgcgcgggtggttctttatatc

SEQ ID NO: 23891 - DNA, 260 bp, Unknown
  Description of Unknown: LeftRegion for integrase B10892 sequence
ctggcctcccacacaaatatgcgcaagcactgcccctctcttaaacacaaaaaggccgcccccgtgttggcgcacggaaacggccaaagaacgcgctgcacggcttttgtgccatacttcacgtcctcacagcacaaagtatagcacaaaaacgccgcgcggcatagtacctttgtacaatttcgcggggtgtttttattatgttgtacggaaaaccacaaaattatgcgtggtatcgcgcaagagttattttatacata

SEQ ID NO: 23892 - DNA, 260 bp, Unknown
  Description of Unknown: LeftRegion for integrase B10893 sequence
ttatttccggggcaaacaagcgtttggtcttgttgtaaaacagtatacttgtttgccttgtcaaataatacaggaatttgttgtattcaaaattacttcacaattcgcacatattttattcaaaaggtggtgatgccatttagagaaactttagagaagctttagagtaacaacaagaataaacaaaaggagatggcagcatgagagtagcattatatccaagggtatcggggcatgagcaagaagataactattccata

SEQ ID NO: 23893 - DNA, 260 bp, Unknown
  Description of Unknown: LeftRegion for integrase B10894 sequence
ggcgggcctcccacacatatacacgcaccattaccccctacaaaagcaaaagggccgcccccgtgttggcgcacgggaacggccaaagaacgcgctgcacggcaaaaactgccatacttcacgccccacagcacaaagtatagcacaaaaacgccgcgcggcatagtacctttgtacaatttcgcggggtgttttttattatgttgtacggtaaaccgcaaaattattcgtggtatcgtgcgcgggtggtgctttatatc

SEQ ID NO: 23894 - DNA, 260 bp, Unknown
  Description of Unknown: LeftRegion for integrase B10895 sequence
gcaaatgagtattgaagaaataaagaagatcaaaatccactcggaagttatagatcgcgcggttgagtcagtaaataaaaaactgagaaagcccgcaattccttgttgagccatttctaacatggtataatataggcagggcttaacagctctgccttatttttttatacaaaagaaggtgtgatgtggcaaaatcaaaaatgagaaaaccaaaagagaccaaagctacggagagggttgtgatagctaaatacatcaga

SEQ ID NO: 23895 - DNA, 260 bp, Unknown
  Description of Unknown: LeftRegion for integrase B10896 sequence
ggaaacagtttaaaaagagaacaaaaaatgaaagagtattttattttgctgaaaatatagaagaatataaactagatacaaatggaaatattattttagaaaatatatagttaaggaggtggggaagatgatatataaaaatgaaataattgaacttttatataaaataagaaataaacagttacaaagagaggcaacaaatggagaaattgaaagcagtagcatattgtagagtatccacaataatgcaagaagaaggg

SEQ ID NO: 23896 - DNA, 260 bp, Unknown; identical to SEQ ID NO: 20575
  Description of Unknown: LeftRegion for integrase B10897 sequence

SEQ ID NO: 23897 - DNA, 260 bp, Unknown
  Description of Unknown: LeftRegion for integrase B10898 sequence
ttctggattgtaaggatatttttcgaaaggtaatctggggaattacctgcctgatgttagaataaggccccagctatcacgctggggtcttacctcgtaacaccaaagccttataggcatgtggagaaacagcctatgtttattatatatcgctccacatgctttgtctcacaatcaaacattttatggaggattttataatgacaaaaacagtaaaacgtgctgccctttatatccgtgtaagcaccgacgagcaggcg

SEQ ID NO: 23898 - DNA, 260 bp, Unknown
  Description of Unknown: LeftRegion for integrase B10899 sequence
aatggctatacctaaggctaaccaaagagccgttgctaaatatacaaaatcgcattacgatgatattaaggttcgtgttcctaagggcgagcgagagaagatacaagttcacgctgaaaaaagaggagaaacagtgaacggtttcatcaagcgtgcaataaaagaaacaatagaacgagataatacagaggtataatgtaatgaaaataggcgctgcttatattcgtgttagtaccgacgagcaaaccgagctttcgcca

SEQ ID NO: 23899 - DNA, 260 bp, Unknown
  Description of Unknown: LeftRegion for integrase B10900 sequence
ttatgcaataactgcaaagaaatagggcccgatgccttacccttaccaaaataaagcaccgaaccctattccctttttcttcagtcaaaccattcagagaatattctgaaaaagattcgcgagaaaaacagcctagatatattatacatcctcccgcgaatcttgtccttcggtcaaaaaagattttgggaggtatttttatgtctattattaagcgtgctgcattgtatatacgggtaagcactgaagaacaggcccgt

SEQ ID NO: 23900 - DNA, 260 bp, Unknown
  Description of Unknown: LeftRegion for integrase B10901 sequence
cctgacctgcggccggtattttaccggcccgcgcaggtggcggtgcgacctcgcatacccggaccgacctgcggggacgtgaacgtacaagctgtcatgttactgaccaacaactatagagctggtacgttcaatctggtaccctctgtagggggggctatccgggcggaacccgggccttagtcggaagggtaacagtgatgggacttaagcctgcgggcggttggctgcgcgtgtcgaccacggcgcaagatgagcag

SEQ ID NO: 23901 - DNA, 260 bp, Unknown; identical to SEQ ID NO: 20626
  Description of Unknown: LeftRegion for integrase B10902 sequence

SEQ ID NO: 23902 - DNA, 260 bp, Unknown
  Description of Unknown: LeftRegion for integrase B10903 sequence
gaagtcctatgcggacaagcgtaacggttggatttctctcgattacgcaaccaagctgtaaggttttgcccggtggcatgagctgccgggcttccttttttacacacaaaaattcaccgaaaaatagcacggctattgcttgactaatcggcggcgtagagtgatatatagactaccacaaatggaaggaggaacagagcatgagaatcaaagtaatcaagcccacgaaggcagtacaccagcagaagaaaaaggtctgt

SEQ ID NO: 23903 - DNA, 260 bp, Unknown; identical to SEQ ID NO: 23490
  Description of Unknown: LeftRegion for integrase B10904 sequence

SEQ ID NO: 23904 - DNA, 260 bp, Unknown; identical to SEQ ID NO: 23491
  Description of Unknown: LeftRegion for integrase B10905 sequence

SEQ ID NO: 23905 - DNA, 260 bp, Unknown
  Description of Unknown: LeftRegion for integrase B10906 sequence
ttgtccgcaatcctgattgtcatttccgctgtttttctggctccgccgttttcaaacgtcaataagatttcaaagggtacacgggttgctgttataatcgttacatttatagcagcgttctgggtatcgataaaatagattgtatttccccggtgctgcccgcagttgccggggaaaattgtataaaaatggagatagcaatggacaaggcagtatttatttatacccgcgtatccacgcgtgagcaggcagacgagggc

SEQ ID NO: 23906 - DNA, 260 bp, Unknown; identical to SEQ ID NO: 23576
  Description of Unknown: LeftRegion for integrase B10907 sequence

SEQ ID NO: 23907 - DNA, 260 bp, Unknown
  Description of Unknown: LeftRegion for integrase B10908 sequence
gccccgatgccataattacgatgaggcaaaagctaaaggctttaaaccttgccgtatatgtatgcctgacagaaaatagccacaaacgcatttaaacaccccatacagccgtttttaaaataggggtatagatatataaaaatcagtcaaaaacgccatacacggcattttggtgcataatacgataaaggagtgatgatatgaaaatagcagcggcatacataagggtatcaaccgacagtcagaccgagttatcgcct

SEQ ID NO: 23908 - DNA, 260 bp, Unknown
  Description of Unknown: LeftRegion for integrase B10909 sequence
gtaaaaattctcggtgtggcaaccgatagtttcaaaaaaataaattattaaaaaaaagacctactgctggaacagtaagtcaaatttgaaaaatcacatttagtcggcaaactaaaaaaacaaaataaagttataatgttttggatttttccattatattataacactattttcaaaatttgaaaagagaggttataaaaatgaataaaaaaatacttagagcaggtatttatattagggtttctactgaagaacaagct

SEQ ID NO: 23909 - DNA, 260 bp, Unknown
  Description of Unknown: LeftRegion for integrase B10910 sequence
gaaaataatatcagcggagaacttaccaacagccagcttatccagaccaatcacggtgatgtagtggtcggcaaccatgccctatctcccgaatccgccgaacttctgcgtatctatgagtcgctttcaggccgggaacggctgaagttactcaactttgccgtggacatggaagataaaagcaaggacggtgcatcatcatgaaacgcgcagccctctacatccgcgtctcgacacaggaacaagctcaggagggctac

SEQ ID NO: 23910 - DNA, 260 bp, Unknown
  Description of Unknown: LeftRegion for integrase B10911 sequence
tagcgagaaacaaattaaatgcacccaccactcgactgtaaaagcacagaaacataaaatcgagttgaagtttgatgaacctcgcattcaacacggcggattcgattgagactgtatacaagattgagatgcgtgtaaagtttcgccctcaactttacatttcgcccattttgatgtaaaggaagcacctaagaggtcaaatgaacgttgccgcctatttaaggatgtccacagataagcaagacgatagcattgaaacc

SEQ ID NO: 23911 - DNA, 260 bp, Unknown
  Description of Unknown: LeftRegion for integrase B10912 sequence
gaggcagaaaacgagatgctgaaagacaaacttcgtaaaatagacgaacagcatcgtgaggatatccgggcgatcaaagaagaatacaaggaacagattatgttcttgagagagcagttaagagcatggcaacagagaccataaaggaggtgatgctgtaataggtttccgcaacaccaatacagaaaggggagtttaatatgagagtagcactatacccacgagtatcaggtcatgagcaggaggacaattattcgatc

SEQ ID NO: 23912 - DNA, 140 bp, Unknown
  Description of Unknown: LeftRegion for integrase B10913 sequence
aagaaaacaggtaagaaataaaaagtatataagagttggcactttttttgttattctgttatgtttttggtttttgaattatgagagcgatcatttatataagagtatcgacccaggaacaagcgcgcgacggttactcg

SEQ ID NO: 23913 - DNA, 260 bp, Unknown
  Description of Unknown: LeftRegion for integrase B10914 sequence
gacagaaccgaacatgggcatgattgaagagatgtgcaagattttcggatgtacaaagacagaactgattgacggcattattccagaatcaccacaagacaatgatgaacttatggcaaaaattcagaagttgtcacctgaacagagaaaagatgtacttctgtacattgatttcattttgacaagggagtgattgagccatgaaaaacaaaacaatagagcgagtagcgggttatgtccgcgtgtcttcagataaacag

SEQ ID NO: 23914 - DNA, 260 bp, Unknown
  Description of Unknown: LeftRegion for integrase B10915 sequence
atcgggccggccttgtcctcccggccctgggcaacgcggtcccggccgaggcggtcgagctcgtcgaggatctcggcctgggtgccctctgtgactctgtagtgcctcatggggacagggtagggcggcaacttcggcgacgacagaagactgtgtgcctttcgcatccacttcgtggtgtgaagctctaacatgcacacatgtcgagtactgacaaaggccccacccgagccgcactgtactgccggatgtccgtcgcc

SEQ ID NO: 23915 - DNA, 260 bp, Unknown
  Description of Unknown: LeftRegion for integrase B10916 sequence
ttggttcggagacaggactgggttgacgacggcaagattggtgtcgtccttatcaatggcgatgaggcgacgcttaagtatgtcttccacgaagattcttatttcatacttcaggcggccaatgcaacatatgcaccacgcaaggtgcctgtggaagaaacacgtattctcggccaagtcaaagaagtcgtgtggtccgtatgacggtcgctctttatattcgtgtgagtacggatgagcaggcaaaagacggattctcc

SEQ ID NO: 23916 - DNA, 260 bp, Unknown
  Description of Unknown: LeftRegion for integrase B10917 sequence
gctagaaaaaaagtaagtgacattgaataaaataatataatttatagcacaaaaaaagacttactgcaggaacagtaagccaatttgaaaaatcacaattagtcgacaaactaaaaaaacaaaataaggttataatgtttttggatttttctattacattataacaaattttcactaaaaagaaaagaggttataataaaatgaataaaataattagagtcgcaatttacattagagtatctactgatgaacaagcaaaa

SEQ ID NO: 23917 - DNA, 260 bp, Unknown
  Description of Unknown: LeftRegion for integrase B10918 sequence
tatgtgagaagaaacatagatgcctatgatgatctctgcatagatggcaaagagttgtctagagatgaatggatagacttgctagatggtgcagagatagtggttgaaatgatcagaaaaagaagagaacgatgatagactaaccaacactaaaagagtgccagtctgatcacattctaataatctcggagggaagaaagatgattgtagcgatatatgcaagagtatccacacaggaacaagcattgcatggatactcc

SEQ ID NO: 23918 - DNA, 260 bp, Unknown
  Description of Unknown: LeftRegion for integrase B10919 sequence
cggcggtatcccgcagcagaccgtctcgctgtacctgcgaggggaacgtgccttggacatggacctgttcgtgaccatgtgcgatgtgctcagcctcgacccgatagttgtgttcacggccgcgctgcgctctgtgaagtaggcctgcacctgcacggcttgggagaaaagaatctcggcgccggcgcacggggtaagtcatgagtgaacgcgcagtcttgtacctccgccagtccgtcgctcgcgaggattcgatcagc

SEQ ID NO: 23919 - DNA, 260 bp, Unknown
  Description of Unknown: LeftRegion for integrase B10920 sequence
gccaaaagcagaaaaaaggccattattgttttaggcacctgtcttggattgaccctgacgctgattatcgcggcgctgattatggacagactgaatcccgacattggcttcttctggctggggcagttgtttgcgcccagaggtttctctttcgcggatttatggaaatcactataactactaatggaaggatggtataaatggcttatgactacatagaggaggttgcggcttacatacgcgtgtccacccaagaacaa

SEQ ID NO: 23920 - DNA, 260 bp, Unknown
  Description of Unknown: LeftRegion for integrase B10921 sequence
ctttcctccttctgtatttgggatgtggttttgctgttttgtttgctgtggttttgctgtgttcttgatgttattataccagaaacaaggaagaaagcaacacggcataatgcacaaattatctcgtttatgtttgtctgaatcttaattcttatgggataatagggaatagtaagtattgatggaggtttgcaaagattatgaaaaaagtggttatctacataagagtgagcacagcgcgtcaagatcaggaagggtat

SEQ ID NO: 23921 - DNA, 260 bp, Unknown
  Description of Unknown: LeftRegion for integrase B10922 sequence
ggaaagtggacgatcaacgccagttatggcgatctgatcatccagcaatttgtcagcccagaagcgactatttacaaatatttcgatctcgttgactatggtgaaaatctcactgtcaacctgcaggagggctggatcgtaaaaatatcaaccagcaaagccgtatttaccccatacaccggcgcggcgctggggttcaaatgatcgccctgtacacccgcgtcagcacacaggagcaggcccgggaaggatattccatc

SEQ ID NO: 23922 - DNA, 260 bp, Unknown; identical to SEQ ID NO: 20675
  Description of Unknown: LeftRegion for integrase B10923 sequence

SEQ ID NO: 23923 - DNA, 260 bp, Unknown; identical to SEQ ID NO: 23471
  Description of Unknown: LeftRegion for integrase B10924 sequence

SEQ ID NO: 23924 - DNA, 260 bp, Unknown
  Description of Unknown: LeftRegion for integrase B10925 sequence
cggattcatattgtaccgccgccgctgattttctgtatcagcataaagggcatcgcgttttgttcgagctcatcaaggctgtgccggaggagaatattgaccgagtagcaatcgcattggaactcatgatcaaataagaaaagccccgagcgcgggaatcgctcggggctcctgtaacctccaaggagagattacaatgtatggtcaaatacagtatatctctcccggagaactattgcaaggaggatattcgaatgaaa

SEQ ID NO: 23925 - DNA, 260 bp, Unknown
  Description of Unknown: LeftRegion for integrase B10926 sequence
atgttttacacctccttacaggtttgggctgtgagttttctgtgtttcttctgtgcctacattttaccacttttctggggaaaatcaaggggttttctgcattttttctgttttctctgttttgcacaaaaacaaggattttgctctgtctattttgctaaatatgagataatggtcgaaaagcaaaaaggatgatggacatgaaaagggtagcgatatatgtaagggtttcgacgtcaaaacaggatgaggggtattcg

SEQ ID NO: 23926 - DNA, 260 bp, Unknown; identical to SEQ ID NO: 20730
  Description of Unknown: LeftRegion for integrase B10927 sequence

SEQ ID NO: 23927 - DNA, 260 bp, Unknown; identical to SEQ ID NO: 20754
  Description of Unknown: LeftRegion for integrase B10928 sequence

SEQ ID NO: 23928 - DNA, 260 bp, Unknown
  Description of Unknown: LeftRegion for integrase B10929 sequence
ccagggggtagcaccggcgggccagggggtgagggataaggcggcagcggcgagagcggtaagggcgatgcggattcgcatggtgggaagctttcgtctgcggcactcggtgccgggttgatctacatgactggtaacgggcattggagcacgccaatgcttgaaaccgttcatgtacgataccgcaggtggaagcgattttgtatgcccgagtgagcagtgacccctccggttacggcgtgtcggtctccaagcaggac

SEQ ID NO: 23929 - DNA, 260 bp, Unknown
  Description of Unknown: LeftRegion for integrase B10930 sequence
atttatttagtggaatacgagaaagatatattgataagaaagatattttataatgaatataatattaagttggttccactcaacgaaaaatatccggtaataacggtcaatttgccattggatattcattttaaaataataggtaaaataataggtaaaataacaagcccttaacttagggcttgttttgaaaggaaaaaatgaaaaaagtagcaatttatgttagagtatcaactcaagaacaagctgaaaatggcaac

SEQ ID NO: 23930 - DNA, 260 bp, Unknown
  Description of Unknown: LeftRegion for integrase B10931 sequence
gattatggatgtataaccaaataaccacaggtgccccatgaaacgccaaccccgcaaaatgatcgtcaaagtcctgtctatccctgagcatgagcgccacttcttagagcaaaggttgaatcagcttttggctcaaattgcccgtgaactgggagagcagcgccgtgcgggttgatatctggatcagggtttcgtcagacatgcaagttgagagcgatagccccgccatccatctcagtcgtgccatggactattgcagg

SEQ ID NO: 23931 - DNA, 260 bp, Unknown
  Description of Unknown: LeftRegion for integrase B10932 sequence
aaaaaacatataaatgttttaaatggggcatggagtaaaaaatatgaatgttgcattaactgtggttcaactacagttaaacataaaggcaatggcttatgtgttaactgctacgctacaatgttgcgccacaaaaaggaggtgatgccctatgtcgaacattagagccgcactctatgttcgcgtttaacgcaagcacgatggaacaagcgaccgacggatattccataggcgagcaaaaggataaattactgcactac

SEQ ID NO: 23932 - DNA, 260 bp, Unknown; identical to SEQ ID NO: 22603
  Description of Unknown: LeftRegion for integrase B10933 sequence

SEQ ID NO: 23933 - DNA, 260 bp, Unknown
  Description of Unknown: LeftRegion for integrase B10934 sequence
taattaggagacttttcttcgaaaattacaaaatattgttagtgccgttaaacgataatcacccaacaacaactataattttacctttaaaagatcacttcaagataataggtaagataataggtaaaataaaaacaagcccttaatatagggcttgttatcacagtatataggtatattataccagaaaggatattaatatgcaacgagtagcaatttacgctcgagtatcaactcaagagcaagctgaaaacggtaat

SEQ ID NO: 23934 - DNA, 260 bp, Unknown
  Description of Unknown: LeftRegion for integrase B10935 sequence
ccgcgcgagttcgatttcgcgccgggcacgatcctgctgcgcgaatggggcgagcgcgaacatcgggtgacagtcaccgccgaggggctgtttgagtaccaggggcgcaacttcaggagcctgacggcggtggcccgccacatcacgggcgcgcactggtcggggccgctgttctttggcctgagcaagggaggtgcgcgatgagcgatattgccagcaccaaggcccgcaagcgctgcgccgtctactgccgggtgtcc

SEQ ID NO: 23935 - DNA, 260 bp, Unknown
  Description of Unknown: LeftRegion for integrase B10936 sequence
caacatctgtcacgggcaaatacgtggatgctcccgaaagttggggtccgcaattgctcatggaaggcatgggcggcggtgcagtcatcaacggattctacctgtttgatatattgcccgatgccaccggacttaaattacttgtaaagggatggtcctggacggaaaagcaagaaggctatatcaatctcggtatatagatgaaaaccgccctcggctacatccgcgtctcccgcgaccgcgagggcgacaagctctcc

SEQ ID NO: 23936 - DNA, 260 bp, Unknown
  Description of Unknown: LeftRegion for integrase B10937 sequence
ttacgacaaataaaaaaagccccacgctctcaaactttggcgagtctgagcgtgaggcaatgcaagataaagaaaggtttcaaaatgacaaattttgaaaggtgtctttctatactctattttatcaaaaaaggagtattaagacaatgaatgaaattaataaagtggctctatatgtgcgcgtgtctaccacttcccagatggaagagggctactcgatagaggaacagaaagcaaagctggagagctactgcgatatt

SEQ ID NO: 23937 - DNA, 260 bp, Unknown; identical to SEQ ID NO: 23533
  Description of Unknown: LeftRegion for integrase B10938 sequence

SEQ ID NO: 23938 - DNA, 260 bp, Unknown; identical to SEQ ID NO: 20929
  Description of Unknown: LeftRegion for integrase B10939 sequence

SEQ ID NO: 23939 - DNA, 260 bp, Unknown; identical to SEQ ID NO: 20881
  Description of Unknown: LeftRegion for integrase B10940 sequence

SEQ ID NO: 23940 - DNA, 260 bp, Unknown
  Description of Unknown: LeftRegion for integrase B10941 sequence
cattgatatggacccgcgggtcaagggatttgttaaggaaagtccagacgggttttacaacatttacatcaattcgtgcttatgccatgaggcacaggtggaaacgtaccagcatgagcttgagcacatcgaaagagaccatctttcttcctgcagaggggtaatggaattagaagacgaggcagagaggaggcgaggcaatggttaatgtagcgctctatattcgcgtgtcaacgatggaacaggctacagagggttat

SEQ ID NO: 23941 - DNA, 260 bp, Unknown
  Description of Unknown: LeftRegion for integrase B10942 sequence
gctccggggagtttgcatctaacctgcgctggacatcattgcacggcatattatctatatgcataacccccgattcatgtggcaatacctgtggttcccccaatgaatacttctatgcagtttcagccaatcagcttatattaacgtgccgcacaacggacagaacggttacttatacccgctagacagaggtgattaccttgaaaacagccgtagcctacattagagtttcaacagaaatgcaaacggaatacagcccc

SEQ ID NO: 23942 - DNA, 260 bp, Unknown
  Description of Unknown: LeftRegion for integrase B10943 sequence
ttttggcatccggaagcggaaggcaggctgaatttgatacaaaataaaaggatcagccgttcccgcagctgatcccctgatttccctatccgcaccgcttcgtggtagaaataggcttcgcacctctcattctatcacggaaccgtgcgactgcataggtttcttttttatactcttttttaggaatggaaggtgatctgatgtatatgacacagtcagccccggaactgtacggcgtccgcgtcgtcaaatacatccgg

SEQ ID NO: 23943 - DNA, 260 bp, Unknown
  Description of Unknown: LeftRegion for integrase B10944 sequence
gatctgcctgatcagagcgttagcggtgaaatctttccccgaacctttccgaccgatcagacctagcagcggggcagaatctggatacatgggaactcctcaaggtagacatcgggaacacccgtagagagcgcctacagccgtcccgctacccatctacactgttaggtaagttcgtgcaggcgtagtaacctaaaagtgtgaaagccgccctgtacgtccgcctctcctcctaccggggtgccgccgacccatcgact

SEQ ID NO: 23944 - DNA, 260 bp, Unknown; identical to SEQ ID NO: 23115
  Description of Unknown: LeftRegion for integrase B10945 sequence

SEQ ID NO: 23945 - DNA, 260 bp, Unknown
  Description of Unknown: LeftRegion for integrase B10946 sequence
aatcgactattgatctttagccctgaatcaaccttcaaaaagtatcatgatattgttgttccatatgacacagttaatgatcttaaaatctatgctaaagtcatatggtatgccgtgttattagattgagtctttagcgctaaagatttaatcagggcgggcgacggctcgcccaatttttttctaaggggggttgactaatgagagtggccatttacgtgagagttagcacagacgaacaagcaaaagaaggtttttct

SEQ ID NO: 23946 - DNA, 260 bp, Unknown
  Description of Unknown: LeftRegion for integrase B10947 sequence
gatcgcgacggccttggcgccgcgcgggtcagtctcgggaaggcttatcgttgaactggtcatgcctgctaactccaggtattggcctcgggcaggtcggcggcttcaacgctggcctgccctctttgcttgctgagactatacaccatactagctagaattgcaattgtaagagacctctgtccgctacaattctagccatgcaggacagggtcccggcgcggctccgtgccgtcggggtgatacgtgtctccgaggtc

SEQ ID NO: 23947 - DNA, 260 bp, Unknown
  Description of Unknown: LeftRegion for integrase B10948 sequence
gatttcgaagctgctgtccgatcgctgaccgtaaagcaaaaaaataaaaggatcagccgttcccgcagctgatcccctgatttccctatccgcaccgcttcgtggtagaaataggcttcgcacctctcattctatcacggaaccgtgcgactgcataggtttcttttttatactcttttttaggaatggaaggtgatctgatgtatatgacacagtcagccccggaactgtacggcgtccgcgtcgtcaaatacatccgg

SEQ ID NO: 23948 - DNA, 260 bp, Unknown
  Description of Unknown: LeftRegion for integrase B10949 sequence
agtgggtgggactcccctccctgacctaggtggcgtgcactacggcgagtggtactgtacggcacctaggtcaacggcgagtaaggctaaactccatgaacgatctagctccggccttccgtgcacgacgcctgagggcagtaatctacgcccgcctgagccgctccactgaggaaagcacgagcatcgagcgtcaggtgatggcctgccggtccttcgctgaggcccgcgggtacgaggtggttcttgtctcagatgtg

SEQ ID NO: 23949 - DNA, 260 bp, Unknown
  Description of Unknown: LeftRegion for integrase B10950 sequence
gccgatcatcccgatcgaacccgacgctgacctcgaaccctgaccccggtcacggttccacctagatcgtcgccgcctgctgcccggcgacaccgtgaagagcccccgcccggtcacctccgccgggcgggggccttccgtcgttttcggccccggtatcaggtgacatatgcgaaccctgcccacgggagcgcttgctattgttactcgacgtgaggaccgtgatctacgcccgtctgtcgcgtcgttccgacgtgaac

SEQ ID NO: 23950 - DNA, 260 bp, Unknown
  Description of Unknown: LeftRegion for integrase B10951 sequence
tacttataccagacaattcactccatgaatatcggaacatgaattactctatatacgatatagctcgtattcatggagtgcctcccgagctatgcagtttgaaaaaactgtccaataaagggggtgttgaaaatgtgatcatgaaaagaaaaattttttaagctcgaaaccgaacgtatgtttctggagaggtggtttttatgactgtaggaatctatattagggtaagcacagaagaacaagcaagagaaggattttct

SEQ ID NO: 23951 - DNA, 260 bp, Unknown; identical to SEQ ID NO: 17746
  Description of Unknown: LeftRegion for integrase B10952 sequence

SEQ ID NO: 23952 - DNA, 260 bp, Unknown
  Description of Unknown: LeftRegion for integrase B10953 sequence
tatataataacagacggtgaaaactgcgtgatctgcaatagcgctttctatcatacaagccttgactgcgaaaaccttttgtatgaaggcagaaagtttatagccaaaaagattaaggacgccaaaaaagaaaaaatgacttattgtgctaattgctcacggcagaattatttatataagcacgggaggtttgatgagttatgattgcatgttatgcccgtgtttccacaactgagcaagccgttaacggccactccata

SEQ ID NO: 23953 - DNA, 260 bp, Unknown
  Description of Unknown: LeftRegion for integrase B10954 sequence
gcatattataaaagacgccggacaaaaatatacttaaagcaacgcatgtatactttctcttgcaggtatgtataaatacgcgataatagtatttcaacctgaaaaatatttaaaattatggttgaaattgcttgaataatgtgatatgataggagcaggcaaaagtctgctcctattttttttgcgcgcggaggtgtgctatggagactgatctgaccgctctctatgtaagggtatcaacatacgcacaagcagaagaa

SEQ ID NO: 23954 - DNA, 260 bp, Unknown
  Description of Unknown: LeftRegion for integrase B10955 sequence
cgtgatttcaactttgcgccgggcacgatcttgctgcgtgagtggggtgaccgggagcacaaggtggcggtcaccgcagaggggctgttcgagtacgagggcagcgccttcaagagcctgaccgccgtggcgcggcacataaccggcacgcactggtcggggccgctgttcttcggactgaatggcaaggcaggtgcgcaatgagcgacgccgcacagattgcctctcccaaggcgcgcaaacgctgcgcggtctactgc

SEQ ID NO: 23955 - DNA, 260 bp, Unknown
  Description of Unknown: LeftRegion for integrase B10956 sequence
tatgcagtattgatcgagatgcttatgttcagtaaccaccagctgagcaattttgacggtgtattcaaagtgtacatcgatggcgaatggattcccatctcagacgaaaacgtaagatttcttgagaatctgtccacagacttctgttcgactctcggagagctggcagcgaaacttgtgaagaaagacggtgaaaaataatgaaggctggattgtatgttcgtgtttccacaacagaacaggcgaacgagggctactcc

SEQ ID NO: 23956 - DNA, 260 bp, Unknown
  Description of Unknown: LeftRegion for integrase B10957 sequence
ggtaaaaaaatgattataaacttactaaaaatgatataaaaaaaaccaccctacgccaatagaatggttttcgctgataggttcacttagaattctctaccgctaaacagtacgccaatactgtttgtatagaaaagattaacccaccaagttaatactttttctataccctattttacacgaaatggaggtataaagcaatggcagttaaaaaaataagggtcgcttcttacttgcgagtgtccacagaggaacaaaaa

SEQ ID NO: 23957 - DNA, 260 bp, Unknown
  Description of Unknown: LeftRegion for integrase B10958 sequence
ttatgaaatcagaacaaaggttatgaacattctcattgaatgtcgtaaagaaaaaggcatatcgcaaaaggaacttgccaaaatactcgactccaaagaaacgaccgttgcttcttgggaacagggcaagtctttaccctctattgatatgctttacagattagccaagtactataacaaaacaatggattatatgtacggtgaagccgatgatagccatatacgttagggtcagcacaaacgaacaagctgaaaacggt

SEQ ID NO: 23958 - DNA, 260 bp, Unknown
  Description of Unknown: LeftRegion for integrase B10959 sequence
agaggtttttgccaaatattttggtgttgaactttctgatctgctattagatggagaaaagaacgcaaagagtgaacagaaaaaattgctgttcaaacaatgggaagcgcgtttcccggatgttatttggacgaaagaagaggtaaaagaaatattgcaattcgcggaattcgtgcttgcaaaaaggagagagtagaagaatggaagatctatacaaggccccaaacgttttaagggccgctttatacattcgtgtaagt

SEQ ID NO: 23959 - DNA, 260 bp, Unknown; identical to SEQ ID NO: 21101
  Description of Unknown: LeftRegion for integrase B10960 sequence

SEQ ID NO: 23960 - DNA, 260 bp, Unknown
  Description of Unknown: LeftRegion for integrase B10961 sequence
ctttgttgacttcgtgaaaggaaggaacaacgccagaatagttttcggagtggatgaaaagttcgggttctgctggtatgcggctgttcttgatgatgatatagcagggatatttgtccgtcaggcagacgagatagagtatcttctatacggaaacaatgtatcgtgtgagccagagtttaggaaggaggaaggaagggttgtttgcgacttcatcctcacatttacggaaagaaagaagcgagatcggtaaagtgaaa

SEQ ID NO: 23961 - DNA, 260 bp, Unknown
  Description of Unknown: LeftRegion for integrase B10962 sequence
gatcaccacggacgacatcacggtgatgaccttccctgacgaaacagccgcggagcatgttgcggaagtctatggcgaagacggtgcataccgctctggactcgtcgttctttcatacctcggggctcgtacgccggacgatgcgcgtcctgaatatgaggacatcgtgactgaactgcaggagcagtgatcacttcctcatgagcaatcacacccgcgctatcttgtacttgcgccagtccacgtaccgggaagagtcg

SEQ ID NO: 23962 - DNA, 260 bp, Unknown
  Description of Unknown: LeftRegion for integrase B10963 sequence
ataagtttttctgtggtttcaatggtaatgggtggtaagtcccattttatggacaggggagtgtcgaatacagtcgcattcaagtaacaaaataaaaaaacctgcccagtgaggacgcaccgggcaggctgcgctgaatcttctgtcctttcggacgggggaataatcagcgcatggattatatcatagggggaataattatgcaacaagaaaaggtactgcgtgtcgctctgtactgcagggtcagcaccgaggagcag

SEQ ID NO: 23963 - DNA, 260 bp, Unknown
  Description of Unknown: LeftRegion for integrase B10964 sequence
aatctcagacaggtaaaagaatctctcgattctgtatcattagaataataaaaaccgcccctgctggcaacaggaacggctttcatgtgttttgcagttgtaagtaaacatactatacacacttcatacatatatagtatagcatatttacttacacctgcaaaggtgtattttttatacctttttttaaggagaaaactatgattgagagatgtgcgatttatataagagtctccactgcagagcagtccatgaaagga

SEQ ID NO: 23964 - DNA, 260 bp, Unknown
  Description of Unknown: LeftRegion for integrase B10965 sequence
attttcaattatttgctattatttttatacttttgctattatttttatactttatgtatttaatttaaataacttttaaaaatttatttttatacttaaaaaattgatttatttataataaaaaaattgatttttattatttattggtattaataaactataaagtttgtgttaattcataaattcgttaaattaataaaatgaaccctaattataacaacttacaaaatatgatgcaacaacaaggcattcaaggtatt

SEQ ID NO: 23965 - DNA, 260 bp, Unknown
  Description of Unknown: LeftRegion for integrase B10966 sequence
acgcggcgttgcccacgaacttgaggtgaccgtcgaagtcctgcagcagcgcctcgaacaccttgtcgccgatgagcgcagctggcttgagcagagactggccggctgcgatgacgcggcctgaacgtcgcttgcggcccgtcccaaacacggcgccgcgagtgctggcgctcgtacgtgtctccaaggagcgcgagggtatggtgtctccggagctgcaggacatcgcgatcggcgactactgcgatcgcagcggctat

SEQ ID NO: 23966 - DNA, 260 bp, Unknown
  Description of Unknown: LeftRegion for integrase B10967 sequence
tcgatttacgagtatgcttaaatgcgagtattgtgggtcaaccctcaaacgccaggttacctacaagaaacaaatagtttgatgttgttccaagtatattaaagaaggtaaggcttcctgccgaggcatgcgcgtgcctgagaaagctattgaagagtggaaacttaggacacctgtaacagtgatagaaaggaacgaatatgggcaaaaacattacagttattccagccaagaaagtgcagctgacggtcacccatcag

SEQ ID NO: 23967 - DNA, 260 bp, Unknown
  Description of Unknown: LeftRegion for integrase B10968 sequence
gtcggctcgtctgggaccacgacgaataccacccgtttgggtatgctgagacacgttcgactccttagacagtcggacttggctcgtcgcgacttgtcctcgcggcgggccgtttttgtgggcctgcggcgagtgagtccgatcaatatcgaaatctgacgttgaatggaatcaacgccgcataaccatattgataccatgtggtggtgaaagccgtcatctacacccgcgtttccgcggaccgcgctggcggccgttcg

SEQ ID NO: 23968 - DNA, 260 bp, Unknown; identical to SEQ ID NO: 23051
  Description of Unknown: LeftRegion for integrase B10969 sequence

SEQ ID NO: 23969 - DNA, 260 bp, Unknown
  Description of Unknown: LeftRegion for integrase B10970 sequence
agtttacggatggtgaacttgacgcaatccaaagcatagcagacctatccgaagatgtgcgtgatagcattctccatcaaatcgaatacgaacgggaaaaggaaataaaacgccgtttacaaggcgcgtaacacaacatatcgcgttaagtcgcgtaacgatttctcaattaacgcaacatcttgtggtaggaggtgtctatggacgtaaaaacggtcgcggcttatgtgcgtgtctcgaccgatctccaaatggagcat

SEQ ID NO: 23970 - DNA, 260 bp, Unknown
  Description of Unknown: LeftRegion for integrase B10971 sequence
ctattcggatcacgtcatgctgaccagcgacaatcagcagtacgagccgatgatgtacagattcgatgagcactcgatccggatcctcggagtgccggtcggattcctgcggatgtacaaatgacattgtacaatgtacaaacaaaaaagaccccgatcagcgttgcagcactggtcggggcgttaggagatggtgcagtatgaaccaaaacaataataccacatccgctcgcgttttgcgagtggcttgttacgagcga

SEQ ID NO: 23971 - DNA, 260 bp, Unknown
  Description of Unknown: LeftRegion for integrase B10972 sequence
gtgatatacctgatgaagaaaaagacaaactacatagaactattttagaaatttacattaatagcaagaaaagttagccatttgaaacatctttgtttaaaaaaataatttcatagtcaatttttattttttcttgttcttcatataaagaaattaataaattgtaaaatttgtgaatgtccataatatcacctcccataatgatattatggttttttattactaaatatacattaaaaggaatgattatagtgaaaaaa

SEQ ID NO: 23972 - DNA, 260 bp, Unknown
  Description of Unknown: LeftRegion for integrase B10973 sequence
aagcgtgagttcaatttcgcgccgggcacagtgattctgcgcgaatggggcgaccgtgatcaccgggtgacagtcaacgtcgagggccgtttcgagtacgagggccacacattcaagagcttgacggcggtggcccggcacatcaccggccagcactggagcgggccgctgttcttcggcttcggcaagggaggtgcgcgatgaacgaaatcgccgctacccgcgcccgcaagcgctgtgccgtctactgccgggtgtcc

SEQ ID NO: 23973 - DNA, 260 bp, Unknown
  Description of Unknown: LeftRegion for integrase B10974 sequence
ttctaatgacgctcttcccgggctgggtggaatcacggcggcggagggtattactgcggcggcccccttggctggcgcggccggccctgacaccatcacgtttttctcaggcgggtcaacctcttccggggtctcaaccgttgacaccgtcctggggtagcccttacggctagagcccagttgtagcaagggttctgactatgtgcgctttagttacattctctaaagagaatgtagacatagcgcagaataggtgggga

SEQ ID NO: 23974 - DNA, 260 bp, Unknown
  Description of Unknown: LeftRegion for integrase B10975 sequence
gaactccttgacggctgtgacgagatggatatacagctcgacaaagttaaggagcatatagtgccgatggacaggcaagaagtaatcgacaaaatcatactggcgactcctgaacagttttcacagataaaggtttacgttgacttcgtgatgcaatcatagcacatttcaatgaatatttaaggccataaaggggacatatgcaaacagcctacgtatacgcgagattttcttctgataaccagcgcgaagagagcatt

SEQ ID NO: 23975 - DNA, 260 bp, Unknown
  Description of Unknown: LeftRegion for integrase B10976 sequence
actcgcacatccaagcagggcgagcgccgagggcagcatggacggcaaggtcgagccccccgatcccagagaagacggatccggcgacagcggcaccatcggccacgtcaccacggccttctcactagttcgggtttacttgcacctcgacctctcgatgtactactattcccgtaatgggaatccacgagagggcgggcatgaacacagcaacgatcgagggtctgaacgtcatcggtgtcgcgcggcagagctcgagc

SEQ ID NO: 23976 - DNA, 260 bp, Unknown
  Description of Unknown: LeftRegion for integrase B10977 sequence
gttggtgtagccatgtgattcccctttttcttgtgctgctgatgcttttgatgttctttcgatttgtcggcgagctcgcctgtcagaggcccagggtgatggccgccaggcccgggaaaacggcgaagacgaccgtcaggggcaacacgccgaagacgagcggaaccccaatagttagctataccccttactgttagggcatgaaacgcgtagcggtttacgtaaggcagagcgaggacaagaccggcgagggcgccgcc

SEQ ID NO: 23977 - DNA, 260 bp, Unknown
  Description of Unknown: LeftRegion for integrase B10978 sequence
ccgcgcgagttcgatttcgcgccgggcacgatcctgctgcgcgaatggggcgagcgcgaacaccgggtgacagtcaccgccgaggggctgtttgagtaccaggggcgcaacttcaagagcctgacggcggtggcccgccacatcacgggcgcgcactggtcggggccgctgttctttggcctgagcaagggaggtgcgcgatgagcgagattgccgctacccgcgcccgcaagcgctgcgccgtctactgtcgggtgtcc

SEQ ID NO: 23978 - DNA, 260 bp, Unknown
  Description of Unknown: LeftRegion for integrase B10979 sequence
gataaaatccattgtgtcatcagccaaggcaagtattatcacaccaatctgaactgtgaaaatctccaatgggagattgaccaaggctttccatccaagcagatcaccatcaaagaggcaaaatctcaaaaaatgatttattgtgccaattgctcaagggatgattatctctataggcatggcagagaggatgaaatcagatgattgccttatatacgagagttagtacccaagagcaaaaagagcatgggcattccata

SEQ ID NO: 23979 - DNA, 260 bp, Unknown
  Description of Unknown: LeftRegion for integrase B10980 sequence
gacattgaactggcacctggcactgttttgctgcgcgaatggggcgaccgtgaccacaaagtgacggtgaccgccgagggcacttttgaatatgaaggcaagtttttcaaaagcctgtctgcggtggccaggcacatctctggcaccccatggtctgggccactgttttttggtctcaaaacaaaccgcaaggaggcagcatgaacgccgccacccaaattgcatcacccaagccgcgcaagaggtgcgccgtgtattgc

SEQ ID NO: 23980 - DNA, 260 bp, Unknown
  Description of Unknown: LeftRegion for integrase B10981 sequence
cgcccgcgcaagttcgacttcgcgccaggcactgtgctgctgcgcgaatggggcgagcgcgagcatcgggtgacggtcgacgccgacggtcacttcgaatacgaaggccgccgcttcaagagcctgaccgccgtggcgcggcacatcaccggccagcattggagcggcccgctgttcttcggcctgaagggaggtgtctgatggcggagatcgcatcctcgaggccgcgcaagcgctgcgcggtctactgccgggtgtcg

SEQ ID NO: 23981 - DNA, 260 bp, Unknown
  Description of Unknown: LeftRegion for integrase B10982 sequence
aaacaaaaatacaacgtggaaataacaaaatctcatttatcacgttgggaaaatgggaaagttgtaccatctgtacgctatgcagggtatcttgctatctattacggggtaagcctcgattatttaatggggtttactgatagccgtgtgcccacggctcttttagcacaggtaaaaagcaagaagggtaaaagcaaagaatgaatatagcaggttatgcccgtgtatcatcagaggggcaattggatggctacagcatc

SEQ ID NO: 23982 - DNA, 260 bp, Unknown
  Description of Unknown: LeftRegion for integrase B10983 sequence
aaacaactactcacaatgagtcacaaatggagaaagtaccgcaaaataatcaaaatcaaggtgtagatcgtagaagttttaaagaaccattaccacgttcaactacaaatggagtggcaaatgaggcgtgggacggaaaaatataataattcatgggtagtccacctacccttattatttttttacttttttaaggggtgatgaattatgaacgtagctatttacgttcgtgtcaggtcagtacattagaacaaaaagag

SEQ ID NO: 23983 - DNA, 260 bp, Unknown; identical to SEQ ID NO: 21194
  Description of Unknown: LeftRegion for integrase B10984 sequence

SEQ ID NO: 23984 - DNA, 260 bp, Unknown
  Description of Unknown: LeftRegion for integrase B10985 sequence
aggaacaaatagaatgggcagaagaaaatggtaagttagaagacaactaataaaatcgtctactaacgatttaaatgacgaagcattgatagtgtataaattacttcttattaattaataatatctaggttggttatagtttaatattttttggggtagcacgactacccttattatttttttaccttttttagggagtgatgaattatgaacgtagctatttacgttcgtgtcaggtcagtacattagaacaaaaagaa

SEQ ID NO: 23985 - DNA, 260 bp, Unknown
  Description of Unknown: LeftRegion for integrase B10986 sequence
aaactccagtagaattaatccttgaaaatatagcaaccggtgaagtttacggttctcacacatatgaaataaattaatccaataaaaaaaacacaccttccccactcgccaaagtagaaaggtgtgtttgctacaataaaccacaataggcatggcttatttgttatgccttattatatcacagataaggagtatttcacatgaaaaaagtagctttatattcaagagttagtactttagaacaaaagaatgaaggacac

SEQ ID NO: 23986 - DNA, 260 bp, Unknown
  Description of Unknown: LeftRegion for integrase B10987 sequence
ataagcgttgaggaagtcgcccgtgggaatatcgcccctgcggcacttgaagcggccgaggacgctccacggaacataagggacgtactcgccgtgaatgagcatacgcttcttgacggtatcgccctcacagaaaaggaatgcgccgttctgcgtatggcgtttgatattgccatagccgccataagggaaaacaggaaatgaacgtaggcatatatgcccgtgtgtccacgcaggagcaagccgccgagggatattcc

SEQ ID NO: 23987 - DNA, 260 bp, Unknown
  Description of Unknown: LeftRegion for integrase B10988 sequence
ttgaaaaattggaggttttgaaatgattaaaataacaataaatggaaacgagataaaagcagaggatgtaactttatctgccgatattgtaaaaatcataacatcatgccttgattgacattatattttaaaaaggttagaatgtgtcgtaagtacgataaatgcggcacattctttttatataaaaggaggatttgaagatggaatgtgttgcgtacatgagagtatcgacagaaaaacaagcagaagatggaaacggg

SEQ ID NO: 23988 - DNA, 260 bp, Unknown
  Description of Unknown: LeftRegion for integrase B10989 sequence
catggaaggaatcatcggcagtggagtccgccggttaaccccagtggaatgtagtcgccttcagggattccctgacgattggttcgacggactggatctaagcgattctgcgaagtatcgaatgctgggcaacgcggtcacggtttcggtgatcaagtggattggagaacggcttttctcattagagttgtgagggcgacatgacacgagtctttggttacgtccgggtaagccatcaaaaatccgcggactctgggttg

SEQ ID NO: 23989 - DNA, 260 bp, Unknown
  Description of Unknown: LeftRegion for integrase B10990 sequence
cttacaaaccccaaagatattgaatccgttaggagaatctcaaatgaacttttaggttcaggaatgatggaagctggaatgcgattatcaatgggagcaaagactgaagatcaacttcaggtgacttaccaacgtactattatggagcagaattttttgattattagaaaactttgtgagatttctgaggctttaaaaaaatgattgcattatatattcgagtttcaacagctgttcaatttgaaaaaggaaactccgtt

SEQ ID NO: 23990 - DNA, 260 bp, Unknown
  Description of Unknown: LeftRegion for integrase B10991 sequence
aaccgggttattttgatactttcgacgctgtatggcatctgtttgagcttgattattgccgcgcttgtcgtggatatactaaacccggaaattggctttttctggctgcgcgggctgttttacccgcagggcgtccaagatttcggccatattacaggggagatattgagacatatacacacataaaaggggaaatttacatgacaattttaagagctggattatatgaacgcgtttcaacggatgaacaagccttgcgg

SEQ ID NO: 23991 - DNA, 260 bp, Unknown
  Description of Unknown: LeftRegion for integrase B10992 sequence
acactgttcacccgcgagtaccacggcaaggtgcaccaggtgatcgccacggccgacggccagtacgagtttgaaggtcgcccctaccgcagcctctcgatgattgcgcgagagatcaccagcagccgctggtcaggtcccgtcttttttgggctcaaggacgacgcagccaaatcttcagccaagaaaggcggctccaaatgagtgaagtattgaaacgccgcatgcgctgcgcggtttacacgcgcaagtccagcgaa

SEQ ID NO: 23992 - DNA, 260 bp, Unknown
  Description of Unknown: LeftRegion for integrase B10993 sequence
ttgtgagctagtgttccgccgcccccgaaacgggcccccgtagctccctctcgatcgagccgattgggcccgtgagcagggacgatggtcgtttcacgatggtaccgaacgcaagcgacccgtaacaggatgaaacggggtaggatggcgtctcccctactagacccgtgtctagtaccaacgaaaagaaagtctcaattatgaataccaagaccatcccgaaacgaacgggaatgcaaaatgccaaacggcgagtcgtt

SEQ ID NO: 23993 - DNA, 260 bp, Unknown; identical to SEQ ID NO: 21331
  Description of Unknown: LeftRegion for integrase B10994 sequence

SEQ ID NO: 23994 - DNA, 260 bp, Unknown; identical to SEQ ID NO: 21331
  Description of Unknown: LeftRegion for integrase B10995 sequence

SEQ ID NO: 23995 - DNA, 260 bp, Unknown; identical to SEQ ID NO: 23746
  Description of Unknown: LeftRegion for integrase B10996 sequence

SEQ ID NO: 23996 - DNA, 260 bp, Unknown
  Description of Unknown: LeftRegion for integrase B10997 sequence
gaggatggttggtactaccgcctagcaacctggcaccacggcccctggccgctgtacaacacccccgccgaagtgaaagcgccgttcacgcccgatgcccgtggtctcgttgccttgatggatcgcatgtacaccatcgtggatcacgtctacgatccttggcttgactggaagcgaacgcacccaatctttgaggggctgtgatatcccctgtccgtgtcgtcatctatctccgcatctcccttgacgctgtagggctg

SEQ ID NO: 23997 - DNA, 260 bp, Unknown; identical to SEQ ID NO: 23996
  Description of Unknown: LeftRegion for integrase B10998 sequence

SEQ ID NO: 23998 - DNA, 260 bp, Unknown
  Description of Unknown: LeftRegion for integrase B10999 sequence
aaaaactccaataacaaagtgtttgttaaccatattgatggtaataaaaaaaataatatagccgacaatttagaatggtgcacacatagtgaaaatattcaacatgcctataataataacttaatttctaggacaaaaaataggttttattattctcgtcataaaaaagacataaaattaatcgaaaaggaagtgttataatgaaagaaataaagagagttgcattatatataagagtgtctactgaacatcaagttaaa

SEQ ID NO: 23999 - DNA, 260 bp, Unknown
  Description of Unknown: LeftRegion for integrase B11000 sequence
gcacacgatcatgctcaaggaaggcaacctggacgtgaccgttgtcggatacgaaccaagggtgaccgtcgatgagggtgtggtcgaactccactagcatctacaaaacatcccacatgattcctcatgcgctactctttgtagatgactagaagcgtagcttcggcgtccagcgtcggactcctgaaaggagtcctagcgtgcgagtcttagggcgaatcagattaagtaggttgaccgaagaatccacttccgctgca

SEQ ID NO: 24000 - DNA, 260 bp, Unknown; identical to SEQ ID NO: 21405
  Description of Unknown: LeftRegion for integrase B11001 sequence

SEQ ID NO: 24001 - DNA, 260 bp, Unknown
  Description of Unknown: LeftRegion for integrase B11002 sequence
tttctactatattaatttataatcttgcatcttctataagcttttatttttacttggttggagctattattgctgttgtttttgggtatggttataccggtaaaacagaaagcaatatagatgaatacgtaggaaactacagacaattttttattttagaagatgaatatattgaaaaataacacgaaggaggtatacatatgaaggctgcaacatatttacgtgtatcgtcagaagagcaggcacaacaaggcttttcc

SEQ ID NO: 24002 - DNA, 260 bp, Unknown
  Description of Unknown: LeftRegion for integrase B11003 sequence
tatgagctgattatttctgaacatccggattcttggctttccttggatgtatcttttggccattatgcggaaatcgtgcgaaatccggattatgattgcgagtttgatgatgaaagtgaacgtaatatggtggagtatgattgtcttgatgaaccgcatgctacattgtccatacattataccacggaaaggagttattcatgaaagtcgcattatatatccgcgtttccactgcggtgcaatttgagaaaggcaattcc

SEQ ID NO: 24003 - DNA, 260 bp, Unknown
  Description of Unknown: LeftRegion for integrase B11004 sequence
actgacaaggtgaattgtgttgtatgcatgggaaagtattaccacacaagccttgattgtgacagtttgaaatgggaacttaaaaatagtgatttaaaacttaaaggaatggatgtgaaagaagctaaaaagcaaggaatgatatattgtgccgattgttcaagtgacctttatcattttaaaaaaggagatttacagaaatgagagtattcttatacatccgagtaagtacctcggaacaagcaaaagaaggctactct

SEQ ID NO: 24004 - DNA, 260 bp, Unknown; identical to SEQ ID NO: 22791
  Description of Unknown: LeftRegion for integrase B11005 sequence

SEQ ID NO: 24005 - DNA, 260 bp, Unknown; identical to SEQ ID NO: 21430
  Description of Unknown: LeftRegion for integrase B11006 sequence

SEQ ID NO: 24006 - DNA, 260 bp, Unknown
  Description of Unknown: LeftRegion for integrase B11007 sequence
gctccaagcagtcgagggcagcccaggtgccagccaaaggcgaggcatcatcgccgcagagcaggtgctcctcgatctggggcagaggcagcaaaaccttagtcatagcaatgggttctggcgtcaggtctctcggccactacctctggaagtagtggccaagtgtccttagggtacccacaagggagcccaggggtccagtgcagacggccatctacgcccgcgtcagcaccgcctccgacgatcaggccaacgccctt

SEQ ID NO: 24007 - DNA, 260 bp, Unknown
  Description of Unknown: LeftRegion for integrase B11008 sequence
ttgattttgtgaaatgagaggtgagcatatggcaattgttacgattgatggaaaagaaattgatatcgaacaaattgaactgccagaagaaattattaaaatcataattgaatgcttaggttgaccgcaaaaatattgtagtgtaaaatgtgtcgtaacatgatatgtgcggcacatttctacacaaaggaggaatagtcatggaatgtgttgcgtatttgcgtgtatcaacagaaaaacaggtcgaagagggaaatgga

SEQ ID NO: 24008 - DNA, 260 bp, Unknown
  Description of Unknown: LeftRegion for integrase B11009 sequence
gcggaacgatctgtatagtgacgggtcggctaatgagatcgaaaaagaagtggacgaaatggttcgttctattacacccgaaaaggtataaacaagacattgaatgtattgtttgatacagatcgggtataaaatgagcagaaaacaagacattggatgagcagattctacggttttctacactataatgaggtattccgatgaagtgtgctatttatatcagagtcagttcgcaagagcagaccatgcatggatatagt

SEQ ID NO: 24009 - DNA, 260 bp, Unknown
  Description of Unknown: LeftRegion for integrase B11010 sequence
tacaagaagatttgaatgatgtcaattcaaagttagataaattaacaagtgaatataatgaagctactgacttaataaatttattgagagatcaacttgaagaaaacgggattgaaccatatgaactataattaaattactaatgacaaagtgcttttattagcacttaaatttttaaaattattgcgaacggaggttttatgaaaaaagttgcatgttatgctagagtgtctacagatgaacaagctagatttggtttt

SEQ ID NO: 24010 - DNA, 260 bp, Unknown
  Description of Unknown: LeftRegion for integrase B11011 sequence
cagagtatcggaggaaaaacagatgaatgttgtggttacgcaaagtggtaaaaaagtgaatattgctgatattgttttgcctgatgatgtggcaagaacaatagctagcatgattggttgacaagtacataaatgacaagtagaatgtgccgtagaatgtagtgtatatgcggcacattttacgtaggagggtaataaaaatggaatgtgtggcatatataagagtgtcaacagaaagacaggttgaagagggttacggc

SEQ ID NO: 24011 - DNA, 260 bp, Unknown
  Description of Unknown: LeftRegion for integrase B11012 sequence
tgaactgatcttggaactccacacgatcatgctgaaagaagggaacctggacgtatacacggtgcaaggctgcggctgctgtgatggtcactcagaacccgaagtcaacatgcgtgaggataagcactacataacaggctacggtcccgcaggcatctacataacgtagcctgcgacaaatcagggtgtaccctgtgtagatgcgagtactaggccggatacggctatccaggttgaccgacgaatccacctccgctgca

SEQ ID NO: 24012 - DNA, 260 bp, Unknown; identical to SEQ ID NO: 21492
  Description of Unknown: LeftRegion for integrase B11013 sequence

SEQ ID NO: 24013 - DNA, 260 bp, Unknown
  Description of Unknown: LeftRegion for integrase B11014 sequence
cggagtatcggaggaaaaacagatgaatgttgtggttacgcaaagtggtaaaaaagtgaatattgctgatattgttttgcctgatgatgtggcaagaacaatagctagcatgattggttgacaagtatataaatgacaagtagaatgtgccgtagaatgtagtgtatatgcggcacattttacgtaggagggtaataaaaatggaatgtgtggcatatataagagtgtcaacagaaagacaggttgaagagggttacggc

SEQ ID NO: 24014 - DNA, 260 bp, Unknown
  Description of Unknown: LeftRegion for integrase B11015 sequence
atagaatcggaggtttaactatatgacagttgtgcttacacagaatgggaaagaaattaatccagaagatgtagttttgccgtcagaagtgctaaagctgattgcagaactgattaattgacgaaaaattgataatagtgtagaatgcgtcatgtgtagtgaatatggcgcattcttttatatctgatggaggaataagaatggaatgtgtcgcatatatgcgtgtttctacggagaaacaggcagaagagggaaacgga

SEQ ID NO: 24015 - DNA, 260 bp, Unknown
  Description of Unknown: LeftRegion for integrase B11016 sequence
ttcagttattagtttgatagtattttcacgttctgtcatactataatacctccatttttaatttttacgaacatctgttctaataactatttatataatagtatttttagtataaatttgcaagcactttattatattcaaataatttaatttacaaataagaaaaacatatcaaggaaatgtaaaaaaggagtaaaattatgtcaataataagagtagcctgttatattagggtatcaacacaagagcaaaagttacac

SEQ ID NO: 24016 - DNA, 260 bp, Unknown
  Description of Unknown: LeftRegion for integrase B11017 sequence
ataaataaactggggggattgacatgattaaaattactattgatggcaaagaagtaaaggcagaagatataaaactttctgctgatgttgtgaaagtcatatcatcatgccttgattgacattatagcaaaaagaggttagaatgtgtcgtaaagtacgataaatacggcacattctttttatataaagggggatttaagatggaatgtgttgcgtatataagagtatcaacagaaaaacaggttgaagaaggctacggg

SEQ ID NO: 24017 - DNA, 260 bp, Unknown
  Description of Unknown: LeftRegion for integrase B11018 sequence
gggctctgcaataggtgaagcgccgttggattctgtacacccgggtcagcaccgacgagcaggtatctggcgcatcgctggaggctcaactcgccgcctgccagtcattcgccaacgccaagggatggggcccggttgaagcgatcaccgatgccggtgccagtggaaagaatcttcatcggccaggagcggaacggatcatggctggggcgaatgagggtaacgtcgccggcctgatcgtctggcgtctcgatcgttgg

SEQ ID NO: 24018 - DNA, 260 bp, Unknown; identical to SEQ ID NO: 22560
  Description of Unknown: LeftRegion for integrase B11019 sequence

SEQ ID NO: 24019 - DNA, 260 bp, Unknown; identical to SEQ ID NO: 23198
  Description of Unknown: LeftRegion for integrase B11020 sequence

SEQ ID NO: 24020 - DNA, 260 bp, Unknown
  Description of Unknown: LeftRegion for integrase B11021 sequence
aatatgttatttgtatattaaaaaaagacaacgtggataaaataaataaagtaactataaaaacatcaccagtctataacagtgaaacgtatgacgaaattactaaatcgatgactatcaatattgaatttaaataaaagagagcctcagggcttttctttttaccgaaaaaagaacgtatgtgcgaaaggagaacggaaatgaaggcagctatttatatacgcgtatctactcaagaacaaatagagaattactctata

SEQ ID NO: 24021 - DNA, 260 bp, Unknown
  Description of Unknown: LeftRegion for integrase B11022 sequence
acccgcgagtaccgcgatgttgagtatcgggtcgtcgtgacacaggatgatcagtacgaatttcaggggcgtctgtaccccagcctgtccgtcattgcccgggagatcaccggcacacgctggtcagggccgctgttcttcgggctcaaggcaccgtcggcgcggaagaccaagaccaaggccaagaaaggagcacgcccatgagcgagaccctcaaacgccgcatgcgctgtgccgtctacacacgcaagtccagcgag

SEQ ID NO: 24022 - DNA, 260 bp, Unknown
  Description of Unknown: LeftRegion for integrase B11023 sequence
cctagaggatgcgagacgggagttggtgaggcttgccatgacggcagaccttgagaacgtaaagacggcattgatacttctcaatgctttggaacaaaaaaatgccacgcacaggtgagacggtcgtgcgtggcaaaggggcgctttggattgggacaagcaatccagagacagtttcagattatcagcgggggcgcaaaatgtcaataaaaagagtggcaatgtacataagggtaagcagtgataaacaggcacaggaa

SEQ ID NO: 24023 - DNA, 260 bp, Unknown
  Description of Unknown: LeftRegion for integrase B11024 sequence
tagcagctgctaaaaaagtacaggtagcagcatatgcgcgtgtttcaactgatagtgatgaacaatacacatcctttgaagctcaagtcagttattacacgaagaaaattcaagaaaatcctcgatgggaacttgttaaggtttatgcggatgaaggcatttccggaacctcaacaaagaatcgagaagccttccaagacatgatcaccgatgccaaaaacggcaagataaacatgatcatcaccaaatcggtatcaagg

SEQ ID NO: 24024 - DNA, 260 bp, Unknown
  Description of Unknown: LeftRegion for integrase B11025 sequence
cccttagaggatgcgcggcgggagttggtcagacttgctatgaccgcagaacttgagaatgtaaagacagcgctgattcttctcagcgcattggaacaaaaaaatgccccgcacgggtgagacggtcgtgcgggacaggggcgctatggattgggacaagcaatccagagacaaattcagattatcagcgggggcgcaaaatgtcaataaaaagagtggcaatgtacataagggtaagcagtgataaacaggcacaggaa

SEQ ID NO: 24025 - DNA, 260 bp, Unknown; identical to SEQ ID NO: 21704
  Description of Unknown: LeftRegion for integrase B11026 sequence

SEQ ID NO: 24026 - DNA, 260 bp, Unknown; identical to SEQ ID NO: 21741
  Description of Unknown: LeftRegion for integrase B11027 sequence

SEQ ID NO: 24027 - DNA, 260 bp, Unknown
  Description of Unknown: LeftRegion for integrase B11028 sequence
gtgctcacccgcgagtaccagggtgtcgagcaccgcgtcatcgtgacccaggatggccagtacgactaccagggccggatgtacccgagcctgtcgatgatcgcccgcgagatcaccggcacgcggtggtcagggcccctgttcttcgggctcaaaacgccagccactcccaagacagcggcgaagaagggagcccggcgatgagcgaagttctgaagcgccgcatgcgctgcgcggtctacacgcgcaagtccaccgac

SEQ ID NO: 24028 - DNA, 260 bp, Unknown
  Description of Unknown: LeftRegion for integrase B11029 sequence
gtatcataaacgatgaagaaaaggcgaaaatatgcgacttaattttgtctaaaattctttcgtgatttggcgctgtttcgctgggctcaattaaagttttacggtatgtttgtcctacccacttcaccatgggtaggacaaatttttttaagctacattcaagtccgaaaattaaaagatgtagttgaaaggaggtaagaatggcaaagcaaagagcagttgcatactgtcgagtatcaagcaaaagcaaagcacaaatg

SEQ ID NO: 24029 - DNA, 260 bp, Unknown
  Description of Unknown: LeftRegion for integrase B11030 sequence
acggtgctgacccgcgagtaccagcgcgtcgaataccgggtcgttgcgaccgccaatggccagtacgaatttgacggacggttgttccctagtttgtcgatgattgcccgcgagatcaccggtacgcgctggtctgggccgctgttctttggcctcaaggcgcaggccaagccaaaagccaaaaaacagggagcccagcgatgagcgaagtcctgaaacggcgaatgcgctgcgctgtatatactcgcaaatccagtgag

SEQ ID NO: 24030 - DNA, 260 bp, Unknown
  Description of Unknown: LeftRegion for integrase B11031 sequence
cctcgtcaggccgatcggtgtgcgctgccgccggccgcggcatgttcattggcggcggcgttcgtcccacatgcggccgagcttcacgagcccgaggagctgtccgaacagccagatctcgccgattatcaggatcatccagatcatgcgttagatgatggtgggcactccgaccatagtcaactgcatatactccggtcatgaccaaagagggcgtcgggtacctgcggatcagtgatgaccgggagggcctggagcgt

SEQ ID NO: 24031 - DNA, 260 bp, Unknown
  Description of Unknown: LeftRegion for integrase B11032 sequence
cttcctagatgcccttgcctcccgagggctactgaccctcagtcaggtacgcgccattcaccgtcagctcgccgcctcctgggatgggaccagggtggggtttacccgcgccaggacttgataaaccttgcctgtagagcgttcatgtcacacacgagaccaccaccggcgagacccacgcgggcagaaaggagcagtagatgagcccagattttaagaccatcacaccacgacgcacacccaccagccgtatccgcgtg

SEQ ID NO: 24032 - DNA, 260 bp, Unknown
  Description of Unknown: LeftRegion for integrase B11033 sequence
cgcggcgacgatatgccaatcatcggcacgcggctgatccgcgagtaccagggcgtgcagcacagcgtcaccgtactgcacgacggcttcgagtatcagggccacccctacaaatcgctgtcctccatcgcgcgcgccatcaccggcacccgctggaatgggtggctgttctttggcctgaagaaccggagggcagcagcatgaagcgcaagccagccgccgaggccgcgatgccggccacggtccggaaaatccgtgcc

SEQ ID NO: 24033 - DNA, 260 bp, Unknown
  Description of Unknown: LeftRegion for integrase B11034 sequence
tggtttcaaaaatgtcatgagcgtcctatgcaatgaatttgatagatgtattgctcaggatagggaaaaagaaagcaatatctcttgaatctcaataaactgaaatgaattaaactttttacctttaaaatctttaattcatttcagtttttcactatttcatttcgctttttacatttgaatttcacttaggaggcaatatgcaaatagcagcatatatcagagtcagcaccgacaagcaagctgacaagggttattct

SEQ ID NO: 24034 - DNA, 260 bp, Unknown
  Description of Unknown: LeftRegion for integrase B11035 sequence
gcactgcggcatatttacggcgatgactggaataaagatgatgttcaggaaatcgaattatctgcacacaaaaaaaggcactccgcaattaacagagcgccttttaccgagagagggaacaattagaacatccgcatgcaagccggaatgaaccgcacactaattttatcatattgaccgatacagtcaagaggtatcacatgaaaagagttgcattatatatgagagtgagttccgaaactcaggtgaaggaaggtgat

SEQ ID NO: 24035 - DNA, 260 bp, Unknown
  Description of Unknown: LeftRegion for integrase B11036 sequence
tttagatagttctgataattaattaactatttgaaacttcttgatctaaaaaaataagttcatattcaattttaagattttcctgctctccatagagtttaaacaacatatcataaaattttttaaaatccattttatcacctccttgtatctgatattatggattattttttaaatttaaacaaaaaggtgtgatatttttgaaaaaagttttaagaataggtggttatgtaagagtttcacatgaagaacaaaagaaa

SEQ ID NO: 24036 - DNA, 260 bp, Unknown
  Description of Unknown: LeftRegion for integrase B11037 sequence
tctgacaaatcaagtgttccggcagcagttgaagaagagatctacagtatgaacgagaaacaagtggatgaagcggctaatgcagaatcgccatacatcaggatgcttttagctgctgccctcaacgcttccgaccacgatatagccatggtcacggatatcttgctccgtctgtccgaaggatcaggaaggcggcaggcatgatacgggcggcgttatacgccagggtctcaacagacaggcaggcaaaagaaggcgat

SEQ ID NO: 24037 - DNA, 260 bp, Unknown
  Description of Unknown: LeftRegion for integrase B11038 sequence
cgaggcgacgacaagccaatcaccggcacgcggctgatccgtgagtaccagggcgtcgagcacagcgtcaccgtgctgcacgaagggtacgagtatcagggtcgcccctaccagtcgctctcctccatcgcgcgggccatcaccggcacgcgctggaatggctggctgttcttcggcctgaagaaccggaggggcacggcatgaagcgcaagccagccgccgagactgcgatgccggccaccgtgcggaagatccgcgcc

SEQ ID NO: 24038 - DNA, 180 bp, Unknown
  Description of Unknown: LeftRegion for integrase B11039 sequence
gccgcgggacagctcagccgggggcgagcacgtcgcactcatcggtggcatcgcatcagacgttgaagcggaactccaccgaattacgttgcagaaagacatgactgctagggtacgcccgtgcaccgccgctgcggcctctacgcccgccaatccaagggagatctcgacgggatcgac

SEQ ID NO: 24039 - DNA, 260 bp, Unknown
  Description of Unknown: LeftRegion for integrase B11040 sequence
tatatgtttcacgtggaacattatttaattttttaatttctatttgaaactttttctatagtatattttattttcaaatctttttgtttggaataaagagtaataagtaattcataaaacttatttacatccactttatcacctctttttgtttcattatgaaacattattctaaatttttcaactaggaggaactttttatgaaaaaaactttaagaattggtggataccctcgtgtatcaaaagatgaacaaaaaaag

SEQ ID NO: 24040 - DNA, 260 bp, Unknown
  Description of Unknown: LeftRegion for integrase B11041 sequence
agagtggataaccgaccaatcgcaggcacccgactgattcgggaatggcagggctgcccatatgaagttgttgtaggggtggaccactttgaataccagggacgaccctacaagtcactttccagtattgctcgctctattactggcaccaaccgaaacggttgggccttctttggtctttgctcagcaaggggagccgcatgagcaacgaacagaagcgcttgatctgcgcaatctacacacgcaagtccaccgaggaa

SEQ ID NO: 24041 - DNA, 260 bp, Unknown
  Description of Unknown: LeftRegion for integrase B11042 sequence
gcacggactcccaaaatggcgaacatagacatgctgtgcgattattttaatgtgccccggagcgcgctgatggaagtccataagaaaagaacgcaagaagatgtctcgaaagaacaggcagaacttatacagctcgccatgcactcaaatgcagacaatgtccgacttgctcttgatgttctaaaaagattggagcagaaatgactcgcaccgccatttatctccgcgtgagcagtgaccggcaggcccgcgagggcgac

SEQ ID NO: 24042 - DNA, 260 bp, Unknown
  Description of Unknown: LeftRegion for integrase B11043 sequence
tgtgtcagtcaaccctccgcagacatgcttgtggccatcgctatgctgtaccatgtgtccctgtctgatttgtgcggcgtagattatctggttgaatacagtccagaagagaaatacatgattgagtcttacagaaaagcagacgattccgaaaaattagtaattcagaaaattcttgccctgaataaagaggataaaaaatgaaaagagccgcaatctatatgagagtatccacggagaaacaggttaaggaaggtgat

SEQ ID NO: 24043 - DNA, 260 bp, Unknown
  Description of Unknown: LeftRegion for integrase B11044 sequence
catgccgaaattaaacagttcccgaaaaaagataaccgtcagaagatagcaagtctccgcagacagattgccagaatcaatacatccattcttaatatagattttcaagataaagacgcacaaaccaaatacgataaatataaagccaaactgagagaagccgaacaaaggttgtcctatctcactgaggaggtgatgtaatgccaattatcagagccgcactctacatgcgtgtaagtacagataaacaggtgaaggaa

SEQ ID NO: 24044 - DNA, 260 bp, Unknown
  Description of Unknown: LeftRegion for integrase B11045 sequence
aacggaagagcaaaagaaaatagtagagtatattttgaagatcaatgaaataacaatgagtatagaagaatagaaaacgcccgacacaaggccgggcgcgttagggggagaataccatgaaaaaatgattggtgcttctctttggggtaacaatattctaaacgacgcggacgggttccgcaacatgggggaaaagaaacatgaaaagaacggcgatttactgccgcgtatcgacatcgcgccaggaaaaagaaggggat

SEQ ID NO: 24045 - DNA, 260 bp, Unknown
  Description of Unknown: LeftRegion for integrase B11046 sequence
gaagacgcagaaagcggagaagtcgtaatcgcatccgtcaacggagatgacgcgacttgtaaaattcttcgcaaatacaatagtgggatcgaattgattccgataaacccaacatataaaccaatgtttttctcaaacgaagaaattcagaaccttcctgtaaccatcattggcagagttatcgagttgagggcgaaattatgaaaagggctgcaatatacatgagagtatccacacaaattcaagctcaggaaggcgac

SEQ ID NO: 24046 - DNA, 260 bp, Unknown
  Description of Unknown: LeftRegion for integrase B11047 sequence
gagtcaggtgcgatcgctgctgtaatagtaaatgacgacacggaagcgacactaaagcgcataaaaaagcagggtgatatgattatcctcatgccggataaccccgagcacgagccgattgttattacaccggacagccctgctcgcattattggccgagcggtccaggtaactcaaatactgtaaaggaggtatagatgatgagagcagctctttacttgagagtatccacacaagaacaaactgaaaactacagcatc

SEQ ID NO: 24047 - DNA, 260 bp, Unknown
  Description of Unknown: LeftRegion for integrase B11048 sequence
ccactcaaagcggtggccatgcccggcgcaacactggtgcgggaattcgacggcaaggaataccgggttcaagtgctggccgacggtcgctacgaatacaaccgccagatttacggcagcttgtctgccatcgccaagaccatcaccggcactcagtggtcaggacctgccttttttggcctcaaaaccaagggggaagcatgagcatgctgacgcccaaacgctgcgcggtctattgtcgtgtttcctctgacgagcga

SEQ ID NO: 24048 - DNA, 260 bp, Unknown; identical to SEQ ID NO: 21820
  Description of Unknown: LeftRegion for integrase B11049 sequence

SEQ ID NO: 24049 - DNA, 260 bp, Unknown; identical to SEQ ID NO: 23108
  Description of Unknown: LeftRegion for integrase B11050 sequence

SEQ ID NO: 24050 - DNA, 260 bp, Unknown
  Description of Unknown: LeftRegion for integrase B11051 sequence
atttagatagtagaaaaagttagctatttgaaacgttatcgcctaaaaaaataagctcatattcaacttttacattttcttgttcttcatatagcttgattaataattcataaaatttttctacgttcataatttattctcctttcattgctattattatgcaacaaatttcatttttattctaaaaagaggtggtaaaaatgcaaaaattaagagtagtaggatatgctcgtgtttctcacgatgagcaaaaaaaatat

SEQ ID NO: 24051 - DNA, 260 bp, Unknown
  Description of Unknown: LeftRegion for integrase B11052 sequence
ccactcaaagcggtggccatgcccggcgcaacactggtgcgggaattcgacggcaaggaatacagggttcaagtgctggccgacggtcgctacgaatacaaccggcagatttacggcagcttgtcggcgatcgccaagaccatcaccggcacacagtggtccggacctgcctttttcggcctcaaagccaagggggaagcatgagcatgctgacgcccaaacgctgcgcggtctattgccgtgtttcctctgacgagcga

SEQ ID NO: 24052 - DNA, 260 bp, Unknown
  Description of Unknown: LeftRegion for integrase B11053 sequence
gactaccgccgcatattatgtttctatttgaaacatagtatttaaaaatttttgcttttcacaacatatttaatttttaacttctcttgcttcccgtaaagttcaaaaagcaatttataaaagttgtcaatattcacgttatcacccctttaaattgactataaggggcttttaataaaaagtaaaggaatgtggtataaatgaaaaaagcgttaaaaatcggcggttatgtgcgtgtatcaacggacgaacaaaaaaag

SEQ ID NO: 24053 - DNA, 260 bp, Unknown; identical to SEQ ID NO: 21887
  Description of Unknown: LeftRegion for integrase B11054 sequence

SEQ ID NO: 24054 - DNA, 260 bp, Unknown
  Description of Unknown: LeftRegion for integrase B11055 sequence
aacaatgactgaagaaaaaattagacagatagctttctacggcaagggcggtatcggtaaatctaccacttctcaaaatactttagccgctatggctgaaatgggtcaacgcatcatgatcgtaggttgcgatcctaaagctgactctaccaagatatattgtatggtacatatagattattctactgtgagattattttatgaaaattggatataccagagtatcaacacgagaacaagcacaagacagcagcgcatta

SEQ ID NO: 24055 - DNA, 260 bp, Unknown; identical to SEQ ID NO: 21885
  Description of Unknown: LeftRegion for integrase B11056 sequence

SEQ ID NO: 24056 - DNA, 260 bp, Unknown
  Description of Unknown: LeftRegion for integrase B11057 sequence
agatagccgccaaagatgaccaattgtaccaccgggctatggccatgatggaacgttggaaagtagtccgccatttgagtaaagaagtcgatgcgcagaaattgtttcttctggcgtatcgtctcatcattgctgcctgtctggttctggccgctgtcggttttgccacggataaattgatttttataggagggtagcccatgccggacaaaagactgccggaaggcaagcgcaattgtgccatttatacccgcgtcagc

SEQ ID NO: 24057 - DNA, 260 bp, Unknown
  Description of Unknown: LeftRegion for integrase B11058 sequence
gcaattcatgaataggtggagaacaactaaaaagcgtcccggtgtgagcagcaccgggacgctcgtgcgcagagaaaggagtcaaaactgcgcacgtcaatatggaggagggtcaagtaacccttgcggacttattgtaggattttttagcaaaaatatcaacccattgcatcttttatgtgtatagggggcgataaaacttgcgggtcgcgctatattgccgcgtcagcacagatgagcaggcgcgtcacggacaaagc

SEQ ID NO: 24058 - DNA, 260 bp, Unknown
  Description of Unknown: LeftRegion for integrase B11059 sequence
catgcgattacaatgaccaaaaggatgcgattctgaaggacataaagccatgcgcaaacaagctgaagtgggacgaaaaacaaatcgagaaaattatccacatcatctccaaagaatgtggaaaattcaatgcggaaaaagttaccaaggaatatcggaaaataatccggtgaaaatctgggaattttgggagaaaagcaatgaaacgaacagcgatatatctccgggtcagcacagacaagcaggcacaggaaggcgat

SEQ ID NO: 24059 - DNA, 260 bp, Unknown; identical to SEQ ID NO: 21887
  Description of Unknown: LeftRegion for integrase B11060 sequence

SEQ ID NO: 24060 - DNA, 107 bp, Unknown
  Description of Unknown: LeftRegion for integrase B11061 sequence
cgccgtcaggaatcccctggcggcgtgatcttaggaggtgcgcatttgtgaaacgggctgcgttatatattcgagtcagtacagaagagcaggcccggcacggccta

SEQ ID NO: 24061 - DNA, 260 bp, Unknown
  Description of Unknown: LeftRegion for integrase B11062 sequence
aggcaatctgtagtccaaaacggcgaaatagccgcagttatcatcggagacgaggccacgctaaagcgagtgtttatctttgatgataagctgatccttcaagccgagaaccccaagtatcctccgctcgttttcgtgaaagaggaattgaacactatcagaatattaggcaaagcaatagctttccagagtgatgtcaaatgaacgtttttgggtattgtagagtttcaacaacaatgcaggctgaagaggggtattca

SEQ ID NO: 24062 - DNA, 260 bp, Unknown; identical to SEQ ID NO: 21966
  Description of Unknown: LeftRegion for integrase B11063 sequence

SEQ ID NO: 24063 - DNA, 260 bp, Unknown; identical to SEQ ID NO: 23057
  Description of Unknown: LeftRegion for integrase B11064 sequence

SEQ ID NO: 24064 - DNA, 260 bp, Unknown
  Description of Unknown: LeftRegion for integrase B11065 sequence
acctttcggctcgaaatgattctcgttgaaacattctgccgtaaaaaaaatatcatcaacaacataatcgatctgtatgtcttcctgtgatgcgtacagattgaatagcaatgaatagaatttgtctacgtccataatgtcaccgcctttcaacgatattatgggcatttttctgattttatacgcaaggatgtgattttatgaaaaaaagtttgcgtgttgccggatatgctcgtgtctcgacagacgaacagaaaaaa

SEQ ID NO: 24065 - DNA, 260 bp, Unknown
  Description of Unknown: LeftRegion for integrase B11066 sequence
gcaagggaaccagcattccatctgattaagaatttctgcgagttttacggagtaagcgcagattatctgcttggtcttgttgatgatccgcaagcgaagtatggacaagtttggaatccggcatcgatacctggaccacgaaaagtcaaagctcgtgccgcccgtcttaaagacaaaccgcacaaattaggaggcgcagaatgaaaaatgccgtaatctatgcccgatactccgccggaccgagacaaaccgaccaatcc

SEQ ID NO: 24066 - DNA, 260 bp, Unknown; identical to SEQ ID NO: 23167
  Description of Unknown: LeftRegion for integrase B11067 sequence

SEQ ID NO: 24067 - DNA, 260 bp, Unknown; identical to SEQ ID NO: 23045
  Description of Unknown: LeftRegion for integrase B11068 sequence

SEQ ID NO: 24068 - DNA, 260 bp, Unknown; identical to SEQ ID NO: 21997
  Description of Unknown: LeftRegion for integrase B11069 sequence

SEQ ID NO: 24069 - DNA, 260 bp, Unknown
  Description of Unknown: LeftRegion for integrase B11070 sequence
aatgtgaaaaatctgatcttattgaagaacattcctacgatagtcaatattacttgaagaaagaagtatcaagtctttttaacgatctttcaaatgaccctgaagctgtagagatatatcagaccataaaaaaactatctcccgatgaacgagagatagtaaaatcactgatgaaaaaatttataaaggaggaataataattgcaccaaaaagtaaaaagagcagccggatatatcagagtttcaacagtcgagcaatct

SEQ ID NO: 24070 - DNA, 260 bp, Unknown; identical to SEQ ID NO: 22030
  Description of Unknown: LeftRegion for integrase B11071 sequence

SEQ ID NO: 24071 - DNA, 260 bp, Unknown; identical to SEQ ID NO: 22087
  Description of Unknown: LeftRegion for integrase B11072 sequence

SEQ ID NO: 24072 - DNA, 260 bp, Unknown; identical to SEQ ID NO: 23170
  Description of Unknown: LeftRegion for integrase B11073 sequence

SEQ ID NO: 24073 - DNA, 260 bp, Unknown
  Description of Unknown: LeftRegion for integrase B11074 sequence
gttattatgccagaattgtggggaaaagcaagaggatttctgttttttttctgttttctacgttttgaacaaagacaccatttttttcttaagcacatttacttgctggtgtgtgataatagttacggtgatgaaaggtgaaaaaagtagcaatttatattcgggtgtctacagcccggcaggatcaggaggggtactctgtgccgctccaaaaggaaaggctgatagcttattgcaaagctaagggatgggtagtagca

SEQ ID NO: 24074 - DNA, 260 bp, Unknown
  Description of Unknown: LeftRegion for integrase B11075 sequence
acgcttgttgctatggccgctcttttcgatgttgatatagacgatctggcgaacaagaatcttgaatatgattcaagcaagaaggaattgtccgaacaggaaatgactgttttatccatttttgaaaaactggataacaacaaaaaatcagccgctatcgactatctcgatttcctatctagaaaaagaaggagtgaggaatgaaaagagttgcaatttatattagagtctctacttcactacaggcccaagaaggagac

SEQ ID NO: 24075 - DNA, 260 bp, Unknown
  Description of Unknown: LeftRegion for integrase B11076 sequence
tattctgaaaatattacgcagtaccagctaacgatggcaactgcaaaaaaactccataaattgaatattattaatgatgacgacttcagtttaattgaggaagaaacagcaaaaaaatattgtatcaaaaaagatagtctttatcgcattaataacttgatataaaccctctttttagtaaatatggtagtggctagattatgagtaaaaatgatacaaagattaagcgtgtaagacatcgaagcacactaccacgtaaa

SEQ ID NO: 24076 - DNA, 260 bp, Unknown
  Description of Unknown: LeftRegion for integrase B11077 sequence
tattctgaaaatattacgcagtaccagctaacgatggcaacagcaaaaaaactccataaattgaatattattaatgatgacgacttcattttaattgaggaagaaacagcgaaaaaatattgtatcaaaaaagatagtctttatcgcattaataacttgatataaaccctctttttagtaaatatggtagtggctagattatgagtaaaaatgatacaaagattaagcgtgtaagacatcgaagcacactaccacgtaaa

SEQ ID NO: 24077 - DNA, 260 bp, Unknown
  Description of Unknown: LeftRegion for integrase B11078 sequence
tattctgaaaatattacgcagtaccagctaacgatggcaactgcaaaaaaactccataaattgaatattattaatgatgacgacttcagtttaattgaggaagaaacagcgaaaaaatattgtatcaaaaaagatagtctttatcgcattaataacttgatataaaccctctttttagtaaatatggtagtggctagattatgagtaaaaatgatacaaagattaagcgtgtaagacatcgaagcacactaccacgtaaa

SEQ ID NO: 24078 - DNA, 260 bp, Unknown; identical to SEQ ID NO: 24075
  Description of Unknown: LeftRegion for integrase B11079 sequence

SEQ ID NO: 24079 - DNA, 260 bp, Unknown
  Description of Unknown: LeftRegion for integrase B11080 sequence
tattctgaaaatattacgcagtaccagctaacgatggcaactgcaaaaaaactccataaattgaatattattaatgatgacgacttcattttaattgaggaagaaacagcgaaaaaatattgtatcaaaaaagatagtctttatcgcattaataacttgatataaaccctctttttagtaaatatggtagtggctagattatgagtaaaaatgatacaaagattaagcgtgtaagacatcgaagcacactaccacgtaaa

SEQ ID NO: 24080 - DNA, 260 bp, Unknown; identical to SEQ ID NO: 24076
  Description of Unknown: LeftRegion for integrase B11081 sequence

SEQ ID NO: 24081 - DNA, 260 bp, Unknown; identical to SEQ ID NO: 23095
  Description of Unknown: LeftRegion for integrase B11082 sequence

SEQ ID NO: 24082 - DNA, 260 bp, Unknown
  Description of Unknown: LeftRegion for integrase B11083 sequence
gcttgcgccaaccaccacagtcttatgcagcgatcaggttcagattaattttttctgacctcaacatcataccggaatagcaagcagctggtgctatgaatagagaaggccagtcgtggccttgcttttcttggctgtgcgctatgccgtcgttttcattggatataggttagttagcgcatagccaccacgacagcccattggaaatcattggatacgctcgcgtcagtacggacgagcaggaagaagccctttcagca

SEQ ID NO: 24083 - DNA, 260 bp, Unknown
  Description of Unknown: LeftRegion for integrase B11084 sequence
cagaccgaggaccgtcttgaagtgtggcctcttggccccattgatcttggccagcaggcgctggagaatctcggcttgaatgtgtcctgcctggttggatggcatatcggctcgttcccttcgctacacgatggtgcccataactggacactcttcgtcaacagtagctgactttgggcaccgaggtctagagtgagggcatgcgcagcctcctgtacaagcggatcagcgaagatcagaccggcgaagaggtcggaatc

SEQ ID NO: 24084 - DNA, 260 bp, Unknown
  Description of Unknown: LeftRegion for integrase B11085 sequence
accaagaatggataaaattgatgcactctgtaaatattttaattgttcccgtatggatattatggagccttacggatcaaaacgggaaacaaaggaaataacagatgaccaagccgaattgatccgtttgaccatgaaagcaagcccggataacgttgccctggctcttgcattgctccgaaagttagaaggtgaatgatatgaaacgtgctgcaatttatgcccgtgtcagttccgatcggcaagctaaagaaggtgat

SEQ ID NO: 24085 - DNA, 260 bp, Unknown
  Description of Unknown: LeftRegion for integrase B11086 sequence
catttacggctgactataccgtcaggctgttgtcgcctaatctccgtccagccatttgcagacgcagtagctaactacgcccgccgcgacggagatcagaaagttgagcaggatatccacaagccatcaccccctcccatcgcaagatggtcggtttggcgacagaggcatcatagcacaaagacaggaggcgcgtcaacgtgaacgtcgctctttatatccgcgtgagcaccgaagagcaggcgcagcacggcctgagc

SEQ ID NO: 24086 - DNA, 260 bp, Unknown
  Description of Unknown: LeftRegion for integrase B11087 sequence
gctgaccagcgacaatcagcagtatgagccgatgcagtatgctttttccgagcacgacatccggatcctcggtgtgccggtgggatttttgaggatgtacaagtgatcggtacacttaggtacacttaggtacaaaccggtacaaaaaatccccggccagtgttggcagcaccggtcgggggaaagtgaggcatatacaaatggattatagcatacgcgtcgcctgctatgaaagagtcagcacggaagaacagtcaaaa

SEQ ID NO: 24087 - DNA, 260 bp, Unknown
  Description of Unknown: LeftRegion for integrase B11088 sequence
aaactgaggctcaccacaagaaaggagaatgacatggcacagaagaagaaaggcaccaacacgggcattcccggactgtccttcagtttgaacaaagcgctggggatcacggatgcgaaaaaaaagatcgctaaagctaccggcatcccgaccacaaaatcggggcgtcagaagaagcttggaaagattctgggcatcaaatgaaacacgccgccatctatgcccgcgtaagcagtgaccgtcaagcaagggagggagac

SEQ ID NO: 24088 - DNA, 260 bp, Unknown
  Description of Unknown: LeftRegion for integrase B11089 sequence
ggtttggtctcgtccatgtcaacccctttagtcagacaactatagcagatgctcgcgcgatgtttgccggggtcagttacagatttcaagacccagaccccctcgagccctggctcatccccgaacaggagtgggtgctgatcccggtcatgcctgtagagccggacgaagagccgaagccggagggcgactgagaaaccatgtctcaacttgctaccaaagcaacccccgccgccttcttgggccgagtctccacacaa

SEQ ID NO: 24089 - DNA, 260 bp, Unknown
  Description of Unknown: LeftRegion for integrase B11090 sequence
agctgcgatgcacatcgtgtaaatgcttgggacagggggaatttgtcgtgtaccgggcacggagatagacggtctggacatcacggataggcgtggtaagttcgagcggtcgccccacggcgtggtttgaaacgaaatcctgaatttgctttgcaaagcggcactcagccgcatgtcaccccatgcaaacaggataaaccatgcgctgcgcgatctatacccgaaaatcatcagacgagcggctcaacgccgaatacaac

SEQ ID NO: 24090 - DNA, 260 bp, Unknown
  Description of Unknown: LeftRegion for integrase B11091 sequence
taacggaaaacaataaactaagggttgccgcatactgcagagtctcaaccgataaatatgaacaagaagatagctatgaattacaatgtgctcacttcaaagaattcatagaaagcaaaccaaactggacactggtaaagatatatgccgatgaaggcaaatcgggaacacataaggcaaatagaaagaatttcctagaaatgatagaagatgccaaaaatggtaaaatagatatgatattggtaaaaagtatatcccgt

SEQ ID NO: 24091 - DNA, 260 bp, Unknown
  Description of Unknown: LeftRegion for integrase B11092 sequence
ctgtcagatccggaagaccttgcgagcgttaaaaagatcgcgcaggaacttgttggctccggcatgatggaggccggcctcaagctttccatggcgaaagcggaaatccaattaccgatcagctatcagcgggccatcatggaacagaattttatcatcatccggcagttggataagattgccagactgctcgaaaagtcatgaaatccgcggcgttatacctgcgcgtctcaagcgacaagcaagccaaagaaggcgac

SEQ ID NO: 24092 - DNA, 260 bp, Unknown
  Description of Unknown: LeftRegion for integrase B11093 sequence
gacataagcattgacggaattgcccggggaaaaattgaaccaacgaagcgatactcatttacggacctcgaacagctccgggatgacatcaacaaaaatccttttataagccttggctcaaggcgattaaccaaaaatgagctattccttttaaatgaacttttaacggcttgtatcaacgttttaaatgggtgtgagaaatgatagcgttatatgtgagagtatccacgcatgaacaggcagaaaacgggtattcgatt

SEQ ID NO: 24093 - DNA, 260 bp, Unknown
  Description of Unknown: LeftRegion for integrase B11094 sequence
gcaatgcagtaactatattaaaaatggaaaagacgcctgcagtggaacatcaattgatgatgaggttataagcaggcttaatatagaagaaccgataattgtgagggaggaattaagagatggcaagaaacattacagttatacctgcaagagcaaacagaaacaatctggcagagcagatacagccgcagaaaaagaaaatggcagcttattgcagagtatcaacagaccaattagaacagttatcaagctatgaagca

SEQ ID NO: 24094 - DNA, 260 bp, Unknown
  Description of Unknown: LeftRegion for integrase B11095 sequence
gactgttttgtgtttaccgccgtgttgccctccactataaacggattcattacggagaacgcggacgggcaaagcataatcatcataaactgtttgctgtccaaatcggaacagcttaaagcgttccgccacgaattgaaacatttgaaacggtgcgacttgcataggacagaaccggccagagtattggagagcgctatatgatcgccgccttgtatatccgcgtttccaccaccgaccaggcccagcacggatacagt

SEQ ID NO: 24095 - DNA, 260 bp, Unknown
  Description of Unknown: LeftRegion for integrase B11096 sequence
gatccccgcaatccggtggtggggaccaagcttatccgcgaatgggacgggattgagcacacagtcaccgtgctgaaggacggtttcggctggcagggctgcaaattcaaatcgctctccgccgtggcgcgtgaaatcaccggcacacgctggaatggctatcgcttctttggcctgcgcgagcgcaagcgggaggaagcatgatggacatcaacacccgccagaaccgtcgcctgcgctgcgccatctatacccgcaag

SEQ ID NO: 24096 - DNA, 260 bp, Unknown
  Description of Unknown: LeftRegion for integrase B11097 sequence
aagatatcgactattaccgcgcccagaagatcacgaaagccctactcgatgcggaactgatcagcttggaagaataccacaaattgagcgaattgaacgcgcaatctttctctccgtttctcgtggatatattccctaataccgttgataatactgcggttcagaggtaatatacgacactaccaaagggaggtgaaatagtgaaaaaggtcactaagatcaaggcaaagcaggctcctgcagcagaaaaagctaagctg

SEQ ID NO: 24097 - DNA, 260 bp, Unknown
  Description of Unknown: LeftRegion for integrase B11098 sequence
taacggaaaacaataaactaagggttgccgcatactgcagagtctcaaccgataaatatgaacaagaagatagctatgaattacaatgtgctcacttcaaagaattcatagaaagcaaaccaaactggacactggtaaagatatatgccgatgaaggcaaatcaggaacacataaggcaaatagaaagaatttcctagaaatgatagaagatgccaaaaatggtaaaatagatatgatattggtaaaaagtatatcccgt

SEQ ID NO: 24098 - DNA, 260 bp, Unknown
  Description of Unknown: LeftRegion for integrase B11099 sequence
gccgatccgcgcaatcctgtcgcgggaacccgactcgttcgtgaatggaacgggatcgagcacaccgtgacggtcatgaacgacggcttcgaatggcagggccgcaggttccgctctctttctgccgtggctcgggagatcaccggcacccgctggaatggttaccgcttcttcggcctgcgtgagcgggagggtgcctgatggagggcatggtcaacccgaaacgccgccttcgttgcgccatctatgcccggaagtcg

SEQ ID NO: 24099 - DNA, 260 bp, Unknown
  Description of Unknown: LeftRegion for integrase B11100 sequence
tgtccgttttattggacatagagaaaccgccccgtagtagcagtacggagcggctctctgaaaggaggtgacaaatgagcaaggacggtatggaggtctgaaagatggtatcttcattatacaaaaggtaatctgaaatgtcaagtattacacggagtatttttgaaaggtggtggtgtggggcatgaacatagcaatttatgcccgtgtttgttagtacagacgagcaagcaatacatggtttaagtatagattcgcag

SEQ ID NO: 24100 - DNA, 260 bp, Unknown; identical to SEQ ID NO: 22221
  Description of Unknown: LeftRegion for integrase B11101 sequence

SEQ ID NO: 24101 - DNA, 260 bp, Unknown; identical to SEQ ID NO: 22216
  Description of Unknown: LeftRegion for integrase B11102 sequence

SEQ ID NO: 24102 - DNA, 260 bp, Unknown
  Description of Unknown: LeftRegion for integrase B11103 sequence
ccgccagaccactcggccgccacgggccaccacttcccaggtcggcaggtcgctcatgggataggttgccgtcccagccctgagacccgctgcgccgcagccgttctgccctactgcctcagatgtgcgctttgttgccggcatctaaggaaaacgtgctcatagcgcaggctagtgtccgcaggcgttctcggcactctatggcgcccctggtcgtcggctacgcccgcgtctccaaagaagagcaggcagatgcactg

SEQ ID NO: 24103 - DNA, 260 bp, Unknown
  Description of Unknown: LeftRegion for integrase B11104 sequence
ggagaggaagagcagaagtactactttgatgaagaaagtgcaaggatcgcacagcgaatatgcgagaatcccggtcttcgtgttcttttcgatgcggcagaagacgtaccgcctaaagacttggaagttgttgccgatatgattaagaggctgaagaagacatacagacaatagaagcaagagcgcataggagatgaactatgagagttggaatttatgcgagggtttcaacagatattcaagccaaagaaggagattcc

SEQ ID NO: 24104 - DNA, 260 bp, Unknown
  Description of Unknown: LeftRegion for integrase B11105 sequence
tttttttacaaaagagaaaccgccccgtgttcgcagcacggagcggctctctgaaaggaggtgactttgagcaaaaggcggtagaaaatggaggtctgtttgatggtgcgatacattatacagaaagcaatcgtagctgtcaagtattacatgaggtattttttgaaaggtggtggttcgggacatgaacgtagcaatttatgtccgcgtttgttagtacagatgaacaggcggtgcatgggttaagcgttgacgcgcag

SEQ ID NO: 24105 - DNA, 260 bp, Unknown
  Description of Unknown: LeftRegion for integrase B11106 sequence
gcggacggcttggaacaccgccttgaaaataagcggctgaccatcggcctgatggagacagagctgaataacctacgtcattccgtaaaactatacaggtggatcatactcggtttgtcgctattgatcgtcggtctcttcgtctggtgcgtgtgggtagatattcgttgcgccaattacggcttttggaggggataatattgaatgttttacgcgcagcgctttatccgcgcgtcagtacggaagagcaggcgaagttt

SEQ ID NO: 24106 - DNA, 260 bp, Unknown
  Description of Unknown: LeftRegion for integrase B11107 sequence
tcggtcatcaccgatccgcgcaacccggtcatcggcacccggctggtgcgcgagtgggatggcgccgagcacgtcatcacggttctgaaggatgggtttgactggcagggccgccgatacaagtcgctgtcggccattgcccgcacgattaccggcacgcagtggaacggctaccgcttctttggtttgcgggggatcgcatgagagacggcactgcacccgtccgccgcctgcgctgcgccatctacacccgcaagtcg

SEQ ID NO: 24107 - DNA, 260 bp, Unknown
  Description of Unknown: LeftRegion for integrase B11108 sequence
gccgaccgcgaccttcccatcaccggcacgcgcctcctgcgcgagtggcagggcgtcgagcaggtcgtcacggtcaccgccgacggcttcgaatggcagggtcggccctacaggtcgctgtcggccatcgcgcgcgcgatcaccggcacgcgctggaacggctgggtcttcttcggcctcaagaaccatagggcgcggacatgacgaaaccgcctgaaaaatcgaaggtcgtccgcaagttgcggtgcgcggtctacacc

SEQ ID NO: 24108 - DNA, 260 bp, Unknown; identical to SEQ ID NO: 23042
  Description of Unknown: LeftRegion for integrase B11109 sequence

SEQ ID NO: 24109 - DNA, 260 bp, Unknown
  Description of Unknown: LeftRegion for integrase B11110 sequence
tgacaaaaaaacagtttgaagcagaaaaggattaccggattttagcttattttgttgaagatatgatggaaaacgggatcttaacaaagaaggaagcaagccggatgaaggcccaattacttcgggaaatatctccagttatatcttcaatttaacccaaaacaacttgattatccgggggagtagagctaacatttgacatgcgaaaggaagagaagatggagcgcattattcataaagttgaaacctcccccggcaag

SEQ ID NO: 24110 - DNA, 260 bp, Unknown
  Description of Unknown: LeftRegion for integrase B11111 sequence
gaccacaagatagctgtagtccgcaagtcaaagagaagagaagagtacgaaagacgaatcgaggcgaaaaagagaagaaaggaactcaacaagaagaagatgctggaacagcagaaaagaaaatctgcaagaaaggcaggttacaagaagaacaggtctgaaggaagtaagacagctactccagagaaagctgtggaagaatgaggatagcaggctatctccgagtctcaacgctgaagcaggcggaagatggcgtatca

SEQ ID NO: 24111 - DNA, 260 bp, Unknown; identical to SEQ ID NO: 22754
  Description of Unknown: LeftRegion for integrase B11112 sequence

SEQ ID NO: 24112 - DNA, 260 bp, Unknown
  Description of Unknown: LeftRegion for integrase B11113 sequence
gctgttatcgtgggatatatcttttttgactaccgtattccccaccaggggcttattcagggtggagaggccagcatattcgcatggatcgtctttttgctgcttgccgtcggcatcggcatttttgccgctattttgatgatgtatttgcgctatgcaaaaaagtatacattgtcgccagataatggaggagatgaacaatgagtgtagtattgcgggcagcattatacccgcgtgtgtccacagaagaacagaaaaag

SEQ ID NO: 24113 - DNA, 260 bp, Unknown
  Description of Unknown: LeftRegion for integrase B11114 sequence
ccaaacgaaaattttcgaaagccacaggaattccgacaacaaaagctggacgcaagcggaaagcccaaaacatcctgtggaaagctctatttggcaagaaatgaagtgttcgccgcccggtctgatcctttggattgggcggcatgtgtattttttatacatatttttacaaaactttggaatagaaaggagcaaaaacaatgattaactgtgcgatatatccgcgaaaatcaaaggccaacgacaattcgcaatcaatg

SEQ ID NO: 24114 - DNA, 260 bp, Unknown
  Description of Unknown: LeftRegion for integrase B11115 sequence
gacgtgcgagcaagaacaaaaaagggaaaagcacgtctccggcttgactgccggacgctgcacactgcggcttctcgcatgtcaacgcagtggttttttatatactggctaagtcgcagctcagaagctgccaagaggttgaaaagaaatatatattattatagcacaaaacagacgagaaaaagaagagcaggaacaaaatgaatgtaattttatatgtcagagtatcaacggaagaacagagtcgctcaggattaagt

SEQ ID NO: 24115 - DNA, 260 bp, Unknown
  Description of Unknown: LeftRegion for integrase B11116 sequence
gatccccgcaatccagtggttggcacgaagttgatccgcgaatgggatggtatcgcccacaccgtcaccgttctgaaggaaggcttcgaatgggacggccgccgctacaagtcactttcagcagtggcgcgcgccatcaccggcacgcgttggaacggataccgcttttttggattgcgcgaacgcaagcggggtgaggcatgaaggatgtgtccacaaaacccgcccgccgtctgcgctgcgccatctacacgcgcaaa

SEQ ID NO: 24116 - DNA, 260 bp, Unknown
  Description of Unknown: LeftRegion for integrase B11117 sequence
agacggtctgaaagcagttgtagcttgccagaatgaagaactgtcgcaactgtaccagaccaaggaatttttgcaagagcgaatccgattcatgcaagaccagattaccaagaaagatgacagaatcgataagctcatggagaaagtattataagtcaagccacggaataaccgtggcttttgtttaaggtggtggcagtatgcgtgtagcattatatgctcgcgtaagtacggaggaacaggcaaggcatggaatcagt

SEQ ID NO: 24117 - DNA, 260 bp, Unknown
  Description of Unknown: LeftRegion for integrase B11118 sequence
gtcaagaagattgcggactatttcggcgtggatgtttcgttctttgatgaaccattcccagaagcacctctgccggaagagccgaagtacatccctgttcaagtcatcacatcggaagagagccagatgctgacgctgtacggcaagctgacggagcaggagaaagccgccgtgttcacgctgatcgagatgcttgcaaaatgagagccgtaggatatatccgcgtaagcacaaccgagcagaaactgcacggatacagc

SEQ ID NO: 24118 - DNA, 260 bp, Unknown; identical to SEQ ID NO: 23134
  Description of Unknown: LeftRegion for integrase B11119 sequence

SEQ ID NO: 24119 - DNA, 260 bp, Unknown; identical to SEQ ID NO: 23086
  Description of Unknown: LeftRegion for integrase B11120 sequence

SEQ ID NO: 24120 - DNA, 260 bp, Unknown; identical to SEQ ID NO: 22977
  Description of Unknown: LeftRegion for integrase B11121 sequence

SEQ ID NO: 24121 - DNA, 260 bp, Unknown
  Description of Unknown: LeftRegion for integrase B11122 sequence
cggcggtggcgtgagcagcagggctggacccactcgtggatgaggcgtttgatgtgccggtcgctgcagccaagagcctcggccgcctccgcaacagtcagcagcggccggccttttttgctctgcgctctgctgccggtgtctaaggaaaacgaatccatagcgcagggtagtgtgagtggccgttctgggccgatcctatggccgtcatcggctacgcccgcgtcagcaaagacgatcaggcaggcagcctcccagcc

SEQ ID NO: 24122 - DNA, 260 bp, Unknown
  Description of Unknown: LeftRegion for integrase B11123 sequence
aactacgcagtatttgctcactggtgaggatgagccggcggagacgcaagaggtggcggagatcatgcgcaagtccaacgactcggagcgtaaacagatcttatcttttgcgcggtatatccaggctttccgcgactctctcccagatgatgcggtagtcttccagcagaccaaggacgcacccaaaaaggagggcacaaatgattagggccgccatatatgccagggtgtcaaccgatcagcaggccaatgagggcgac

SEQ ID NO: 24123 - DNA, 260 bp, Unknown
  Description of Unknown: LeftRegion for integrase B11124 sequence
atgaccgcatggacaggaaagacagagttctcgatcagaaagacgatgaaatacgccaactgcggaacaggatagaccaactggtagaccaactgcttgccgcgaatagtcgttaactgtctgtgatttgtggtttctactctgtttgcgagtataatagagatggtgtccaataaaacggatagtggaacattagtaaggtggtgatttttggatatgaaggtagcactttatgtccgggtctagtcagttccgaagaa

SEQ ID NO: 24124 - DNA, 260 bp, Unknown; identical to SEQ ID NO: 22988
  Description of Unknown: LeftRegion for integrase B11125 sequence

SEQ ID NO: 24125 - DNA, 260 bp, Unknown
  Description of Unknown: LeftRegion for integrase B11126 sequence
aatgaggtcgaaatcaagaacaagcacaaagggattttctggtggatttttgtcggctggtggtggcttccgatcaaatggcttgtttttacgctcccggcgctgatcttcaaaatcttcggtcgcaaaaagcaaaaggccgtcaacaagcaaaaaactgtctgcgtttgccagaactgcggatattcttggacgttgtaatgaatgtcgcattgtacgcccgcgtctcgacggaagaacaggcgaggcacgggatcagc

SEQ ID NO: 24126 - DNA, 260 bp, Unknown; identical to SEQ ID NO: 23055
  Description of Unknown: LeftRegion for integrase B11127 sequence

SEQ ID NO: 24127 - DNA, 260 bp, Unknown
  Description of Unknown: LeftRegion for integrase B11128 sequence
ttctattacgatggctccgccgtgcagctcatagcagaaaatccaaagtttcccccgcaggtatttgcgggggagaacatcaaccggattaaagtcattggtctggcagtagcatatacccatgtgattcattaagatgttggcaaataaaaacccgcccccggtgatgatacaccagaggcgagaaaggagtggtatttatggaaagagcggcattgtatatacgtgtcagctcagaagagcaagccatacacggactt

SEQ ID NO: 24128 - DNA, 260 bp, Unknown
  Description of Unknown: LeftRegion for integrase B11129 sequence
aaagggagtcaaggcatgtaaagggataaggattgatgatgccgaattgcagggcttaaacattgcggaacagacagtgattgaggaggtggttaaaaatggcaagaagcattactgttataccagcaaagcagatttcgaatgcggaatcaggaacagcacagtcagtgcagaaattaaagatggcagcgtactgccgagtgtcaaccgaccaagaagaacagttattaagctatgagaatcaggtcaattattacaca

SEQ ID NO: 24129 - DNA, 260 bp, Unknown
  Description of Unknown: LeftRegion for integrase B11130 sequence
ctgcaagaagcgcaaaattgacttgattattacaaagtcggtttccaggttttcgcgcgatgtgaggaagttcgaaaagataatgagcattttgaaaaaatgcggggtaggcgttttcttcgagcttgaaaacctatattcccttgatgcggaagcggctctccggtttgatatgcttttggcagattgaggagggtgaaatggaaaggacggtacagttagtaagacctacgcttccgaaggcagcgcaaataaaaagg

SEQ ID NO: 24130 - DNA, 260 bp, Unknown
  Description of Unknown: LeftRegion for integrase B11131 sequence
gagttccgctatcgggtcgccctggccttggtccaggagctcaagggtgaagggctgattacggaagatgacttcacagtggtccaagcgcgcctgatccatcgttttcatcctgttctggagggtttatatccccagaattgactggatacaatgcgctttcagaggtaacatgcgacctgccagggaggtgatgaagcatggcaagcgtaaagcaagtgctgcccgcaaaggccccggagctcaagacggtccgcgtc

SEQ ID NO: 24131 - DNA, 260 bp, Unknown; identical to SEQ ID NO: 22701
  Description of Unknown: LeftRegion for integrase B11132 sequence

SEQ ID NO: 24132 - DNA, 260 bp, Unknown
  Description of Unknown: LeftRegion for integrase B11133 sequence
ctttttcttttgtttgagagtcagtaacaaatgatgcactcatgctgtttatacgattaaattttagaacatacgtacatatcaagttatttcgtctgtcgccttgtatttaaccattcataggagtggttttacagaaggcgacggaagaaactagattgactagcacgtatgtaagtacaatatcctagttgagtgtaatgtcaaacacgcttcttcctcaaatagttggctacgcaagggttagcacaaagaatgga

SEQ ID NO: 24133 - DNA, 260 bp, Unknown
  Description of Unknown: LeftRegion for integrase B11134 sequence
cttttgttgaagagtcagtaacaaatgatgcactcatgctgtttttacgattgtatgaaaggcacatacataagtacttggttcctttttgctcttgtcgccttctagatgcctaatcctatgattagttaacagcaaggcgacgaaagcctaaagtaatgacttacgtatatatgcttaatctagcctagcgaggtctaatgtcaaacaagactttccctgatgtagtcgggtatgcgagagtcagcacagaacaaaat

SEQ ID NO: 24134 - DNA, 260 bp, Unknown
  Description of Unknown: LeftRegion for integrase B11135 sequence
tttttcttttgtttgagagtcagtaacaaatgatgcactcatgctgtttatacgattaaattttagaacatacgtacatatcaagttatttcgtctgtcgccttgtatttaaccattcataggagtggttttacagaaggcgacggaagaaactaaattaactagcacgtatgtaagtattattgccataagtttttgtaatgtcaaacacgcttattcctcaaatcgttggttacgcaagggttagtaccgcctctggc

SEQ ID NO: 24135 - DNA, 260 bp, Unknown; identical to SEQ ID NO: 23051
  Description of Unknown: LeftRegion for integrase B11136 sequence

SEQ ID NO: 24136 - DNA, 260 bp, Unknown; identical to SEQ ID NO: 23067
  Description of Unknown: LeftRegion for integrase B11137 sequence

SEQ ID NO: 24137 - DNA, 260 bp, Unknown; identical to SEQ ID NO: 23072
  Description of Unknown: LeftRegion for integrase B11138 sequence

SEQ ID NO: 24138 - DNA, 260 bp, Unknown; identical to SEQ ID NO: 23141
  Description of Unknown: LeftRegion for integrase B11139 sequence

SEQ ID NO: 24139 - DNA, 260 bp, Unknown; identical to SEQ ID NO: 24023
  Description of Unknown: LeftRegion for integrase B11140 sequence

SEQ ID NO: 24140 - DNA, 260 bp, Unknown
  Description of Unknown: LeftRegion for integrase B11141 sequence
acaaccttcaaaatcctcctggttcgaggcgcaataacagccgaggattacgccataattgatacaaagatgcgggcaaaatactctccattattaggtagtttataccctcaaaatgacttgataattcaagggaatgacggtaatatgtgtaacaccgaagatgtatctgaaggtgactaataaaggaggtgttccgtatgaaaaagacaatacgggttattgaacccaccataccgcttctcaaaaagaaaaagcgt

SEQ ID NO: 24141 - DNA, 260 bp, Unknown
  Description of Unknown: LeftRegion for integrase B11142 sequence
aagaaactccttgcagactatttcggtgaagatgtgtccatcttcgacaaccctattccagagccgccgcctttagacgagccgaagttcattccagttcacgttataacaagcgaagaaagtcagttgatccatctgtatagcaagctgacggagaaagagaaagttgccgtgttcacgatgatcgagatgttagcaaaatgagagccgccgcatatatcagagtcagcacagccgagcagaaactacacggcttcagc

SEQ ID NO: 24142 - DNA, 260 bp, Unknown; identical to SEQ ID NO: 23091
  Description of Unknown: LeftRegion for integrase B11143 sequence

SEQ ID NO: 24143 - DNA, 260 bp, Unknown
  Description of Unknown: LeftRegion for integrase B11144 sequence
tttagagatgtattacttatctattgcacccattaaatcaatgttagaggagggtatattaagtaaatttgaataccttaaagcagaggcatttttagcagaaaaatattgtatcaataaaggtaacatttaccgccttaacaacttgactaaaccccctaaaagagtgatatatagtgtaaccaaagaggaggtagaagatgaaggaaaagaagataaccaaaatcgaagcattatccaaattaccaaagaaaactaga

SEQ ID NO: 24144 - DNA, 255 bp, Unknown
  Description of Unknown: LeftRegion for integrase B11145 sequence
cggccaggacaacgatcaacggggtaagcgcccagaacaggacgcaggagatagaggtgagcattgctgtccccaggggccgatctgctggcctcgcctggggtgagcagaccgtagcaccttcgcagcgctatgggtcacctatctaaggaaaaggtggacatagcgcacaatggacgggcacttcccgagcctatggccctccgcctcggatacgcccgttgcagcaccgatgaacaggccgacgccctcgcc

SEQ ID NO: 24145 - DNA, 260 bp, Unknown
  Description of Unknown: LeftRegion for integrase B11146 sequence
catgatttttttaagcaagaataccttgatggtattgaggctatgacacctgcatcatgtacaggtaaggaaactttcagcgaaatagttcgtcgcattatatccggtgaagattactctggattactgccacaaaagatgtcattacgtgaaggtgagctattagaggaagctttggaagaattagaaaggcggaagtaatgaaacgagccgcaatttacgtccgtgttagcacggcggaacaacgagacaaaggttta

SEQ ID NO: 24146 - DNA, 260 bp, Unknown
  Description of Unknown: LeftRegion for integrase B11147 sequence
ccacgacgagggctacaagggccctcagggcaacgctcactggcgaggggtggtcgtgttgcatcaagtggagaacggcgggttcgacccgatgttcgtcagcctcgactacctgtgccgcaagtacgaaggtgtggatcttggtacattccgcgacttgaccaaggagaacatgtcaggcgtaccatgacgccgtgcatgtgatctacacccgcatctccaaggaccacgatggcagctccacctccccccaggcgcag

SEQ ID NO: 24147 - DNA, 260 bp, Unknown
  Description of Unknown: LeftRegion for integrase B11148 sequence
gaggttcttgagcggaacattgctgtgtcgcaagctgtattagctgaaagacggcttcacgctcggattcagacagagaagaaagaaaatcagtaaccatgtcgtgggcggtcattggctcacctccatgatcagatgataccacaccgggagggcgaaatatcacccttccggtcgaattttagcttgtgaggcgaattatgattgcattgtacgcaagagtctcgacagaggagcaggcggtgcatgggctgtcgatt

SEQ ID NO: 24148 - DNA, 260 bp, Unknown; identical to SEQ ID NO: 23169
  Description of Unknown: LeftRegion for integrase B11149 sequence

SEQ ID NO: 24149 - DNA, 260 bp, Unknown
  Description of Unknown: LeftRegion for integrase B11150 sequence
tgaaaaagcctatcgcgctgcgatttccatcgccaaatcgatgctgaaaagtggattgattactgaacaagaataccaggaaatcgatgtttcattgctcgaaaaatatcgtccggcacaggggtgtttagggtgctaaatgagttgctataagagcaaatccagaggtaacatatggtctgggaaaggagggttcacgtgtggagcggattgtaaggaagataaaaccgcgggcgtcaataccgtccaagcaaaagcgg

SEQ ID NO: 24150 - DNA, 260 bp, Unknown
  Description of Unknown: LeftRegion for integrase B11151 sequence
tgaaaaagcctatcgcataacactttctatcgccacatccatgcttaggagcgggctgattactgaagaagaatacaagaaaattaatgttttaatgtatgaaaaatttcgcccgatacaaggctgtttgggctgctaaatgagttgctattagggcaaatccagaggtaacatgtggtctgggaaaggagggttccagtgtggagcggattataaggaagataaaaccgcaggcgtcgatggcgtccaagcgaaagcgg

SEQ ID NO: 24151 - DNA, 260 bp, Unknown
  Description of Unknown: LeftRegion for integrase B11152 sequence
cggcctgctgtgggaatgggtgccccgtgatcgcggctcaggggccaggccgacgcctctcttgtccggcgcggaggatcggggccgtgcatcccgcttgtggctgaggccattatagcctcagtgtgcgcttagtcacccctatccaaggaaaaggacgacatagcgcagctaaggtctggagccggttctcggatcctatggccaccctcggatacgcccgtgtctccaaggacgagcagtccgacagtctccccgcc

SEQ ID NO: 24152 - DNA, 260 bp, Unknown
  Description of Unknown: LeftRegion for integrase B11153 sequence
atcagtcgaaacggagagaatataatgaatcgctcaaacataaccgatatatccacgtcgaaagacaagtcgcgcgtgttgcggaaactcatactaaaaacaaaactccgcttattcggcgcttatgcaaggcgtgagtatgccaaagttgctatcaaataccatgagtggagaataaagaagataaagggggaatgactatgcgagttgcactctatgaaagggtctcgacggaggaacaggcaaagcacggaatcagc

SEQ ID NO: 24153 - DNA, 260 bp, Unknown
  Description of Unknown: LeftRegion for integrase B11154 sequence
gggggaagcccgtgacaaatacgtcggggctgtgctgttggcactccgggcaatgtgtgaagccggaaagaaatgacgggcgttttttgcatcttaaatgtgggtatttgcacaaaaagtgcagttttggacgtttaaacggagatttttccgttttttgaaagaaggtggtttaatgaaacgagcggctttgtacgttcgtgtttagcgcaagcaccgcagaacaaaaaaagcacggcctgtccgtggatagccaaata

SEQ ID NO: 24154 - DNA, 260 bp, Unknown
  Description of Unknown: LeftRegion for integrase B11155 sequence
gattattgcgtccgtgtaatcaacttccctacctatattggtggggcggtagtggtagatgaggacgggttctacaacgtgtacctcaatgcaagatgttcgtgggagaagcagaaaaaatcccttgcccatgaacttatgcacttggagaacaacgatttctacaacggggaggatatttccgtaattgaaagaaggtgatgcccaatgcgagtgtgtttatacgctcgtgtctagcctcctcagacgagcaagccaag

SEQ ID NO: 24155 - DNA, 260 bp, Unknown; identical to SEQ ID NO: 23058
  Description of Unknown: LeftRegion for integrase B11156 sequence

SEQ ID NO: 24156 - DNA, 260 bp, Unknown
  Description of Unknown: LeftRegion for integrase B11157 sequence
atcgagaagggccgctggcgcttcgccgggtccaaggagacggcgatcctcgatcgactcgacatctcggcgacgcggttctaccagcacctcaacgtcctcatcgactcacccgccgcgctggctgcggagccgatgctggtgaaccggttgcgccggcagcgggacgctcgtcgacgagagcggactcggcacagcgcatgacccgacgcgggctcaggccggtccccgacgtcccgctgcgcgcggtcgcctatgta

SEQ ID NO: 24157 - DNA, 260 bp, Unknown
  Description of Unknown: LeftRegion for integrase B11158 sequence
cgtatggccttaccatgacgcagtttcggaaagatatcaaagaagcaatgaaaacagaaaagtaagtgaaaaatctgccgcaggcttaatctctgtggtagattttttttagacaggagcaatttgcgcagacggatttttaacactttgaaacagccaaaatgcttgactttaggcggctttagagtgattaatgtattatggaaaaggaggtaaaatcgatgcaaattaaagttatggaaccgaagaaaaaagccggc

SEQ ID NO: 24158 - DNA, 60 bp, Unknown
  Description of Unknown: LeftRegion for integrase B11159 sequence
acccaagagcagaagttgcatggtatatccctcgatgcacagagagagaaactgacggag

SEQ ID NO: 24159 - DNA, 260 bp, Unknown
  Description of Unknown: LeftRegion for integrase B11160 sequence
ctgggtctgcagcaagtatatccgagaagggaaggccgcttgcattggtatgcgcgtgccagacagtgcagtccaggattggagtatttatgaacccacagtggtaaaggaggagaatatcagtggcaaaaaacattacagttattcctgccaagaaaatgatacaagtcgagcaggagcaacacattcagaaaatccgaatggcggcctattgccgagtgtccaccgaccaagacgaacagctatcaagttatgagaac

SEQ ID NO: 24160 - DNA, 260 bp, Unknown
  Description of Unknown: LeftRegion for integrase B11161 sequence
agaaaaatgcgtacattgttacgatgtctttggctaaatctatgcttgaaaaaggcataataaacgaagaagagtacgacaaaattgatacaattatgctcaaaaaatacggcttaaattcgtgtactttatgtttgtaatttactggataataatagataacagaggtaatatgtgtcataccaaggaggtgatttttgatggaaagagtaattgaacgggtagcgtttgatacattgagcattgcaaggctaaagaaa

SEQ ID NO: 24161 - DNA, 260 bp, Unknown; identical to SEQ ID NO: 23714
  Description of Unknown: LeftRegion for integrase B11162 sequence

SEQ ID NO: 24162 - DNA, 260 bp, Unknown
  Description of Unknown: LeftRegion for integrase B11163 sequence
gcaggacaggcaggagcagcagggccagggcccaggcgatggtggtcatggtggtgaatgctgtggggtgatcagccaggggtcagcgaccgcgcctggttgatgggatcaccctacatcgccgaagcgcttatgcgtcggtatctaaggaaaacgtcgccaaagcgctagggtccagatcactgcagcgcagcctatctatgaagctgggatacgcccgtgtgtccaaggaggagcaggccgattctttgccggcccag

SEQ ID NO: 24163 - DNA, 260 bp, Unknown; identical to SEQ ID NO: 23020
  Description of Unknown: LeftRegion for integrase B11164 sequence

SEQ ID NO: 24164 - DNA, 260 bp, Unknown
  Description of Unknown: LeftRegion for integrase B11165 sequence
cccgggggctttttcatgcctgccctagcatcacctcgccaggtcgtcccatcttccgcaaggggggagccgtggccagcttcgatggggctggactgaaacggtaccgaaggcctggctctttttgttgcgctttcagaccgctatccaaggaataggattccaaagcgctaccctgtcgcagtccggcttctcagcctatgcgactgggttacgcacgttgctcaaccgatgaacaggccgatgccctcgctgctcag

SEQ ID NO: 24165 - DNA, 260 bp, Unknown; identical to SEQ ID NO: 23207
  Description of Unknown: LeftRegion for integrase B11166 sequence

SEQ ID NO: 24166 - DNA, 260 bp, Unknown; identical to SEQ ID NO: 22952
  Description of Unknown: LeftRegion for integrase B11167 sequence

SEQ ID NO: 24167 - DNA, 60 bp, Unknown
  Description of Unknown: LeftRegion for integrase B11168 sequence
gaaatgcaaaaacttctgaaagcagtatcgaaaaggcaatacaaagcagtacttgtcgtg

SEQ ID NO: 24168 - DNA, 260 bp, Unknown; identical to SEQ ID NO: 23074
  Description of Unknown: LeftRegion for integrase B11169 sequence

SEQ ID NO: 24169 - DNA, 260 bp, Unknown
  Description of Unknown: LeftRegion for integrase B11170 sequence
cgctatggaggtttccggtgcctacatgcgcaagctgtacaacggcacagagcacaccgtctacagcctcggcaaggggcgtttcagctacgccggaaccgtgtacagctcgcttaccccggtagccaaggccatcaccgggtataaggtgtccggtcgccgcttcttctcaaccacaacaaccatcttcccccgtcccaatgcgtaattccaaacacattcccgccccggttccgctccgccgctgtgccgtgtatgtc

SEQ ID NO: 24170 - DNA, 260 bp, Unknown; identical to SEQ ID NO: 23145
  Description of Unknown: LeftRegion for integrase B11171 sequence

SEQ ID NO: 24171 - DNA, 260 bp, Unknown
  Description of Unknown: LeftRegion for integrase B11172 sequence
tcagcaacatcgtcaggatcgccgcaaaacgatagatcggataattggtcgcataaatgccgaatttgcatacattcttccccgcagctgtcagcgacaagtgaaaggcgttccaggacagttgatttcaagctttttcctctgagtgcaaggtcacaatatcagcccattagaagaagacaagggggtattgtttaaaaatggcaaaaccaattcgcattggatacattcgtgtatctaccgatacagatgaacagttg

SEQ ID NO: 24172 - DNA, 260 bp, Unknown; identical to SEQ ID NO: 23069
  Description of Unknown: LeftRegion for integrase B11173 sequence

SEQ ID NO: 24173 - DNA, 260 bp, Unknown
  Description of Unknown: LeftRegion for integrase B11174 sequence
gaagatgggccgaagaagcggaagaactcggttactatcgtggatatgaggatggttacgaggccgggggaaaagacgctgcccgttttgtcgatatgccggccgacctggaatctgcgtataataacggttacgacgacggttattatgatggctatcaggacggtcactacaccggcacccacgggatggagtagattatgagagtagcattatatgcccgcgtgagtacggaggaacagacgcacggcctctccata

SEQ ID NO: 24174 - DNA, 260 bp, Unknown
  Description of Unknown: LeftRegion for integrase B11175 sequence
gcggactattgtgtgcgtttggttgacctacccatcggtgttcacggatgtgtttcaaaggacgcagacgggtatttctccgtctacatcaacgcaaatgacagctatgaccgacagcgtaaggctgcggatcacgaaataaaaaagcacatcgccaatgatgatttcaccaaggacgatgtgcgtgagattgaggacttatgagggttgcattatattcccgtgtcagtacacaggaacaggcagagcatggcctgtct

SEQ ID NO: 24175 - DNA, 260 bp, Unknown; identical to SEQ ID NO: 22350
  Description of Unknown: LeftRegion for integrase B11176 sequence

SEQ ID NO: 24176 - DNA, 260 bp, Unknown
  Description of Unknown: LeftRegion for integrase B11177 sequence
cagcagatacagacatgaggaaccttacgcaaagagaaagaaaaccaagaaggcatctcattactggcagaagagaaaaaagagaagagataccattacatcatggtctcttgacgaaaagaaacagtcatagggggtggaaatcatttccaccttttttttataatagagcatatgttttcagagaggagagaatttatatgagaattgcaggatatctgagggtatcgacacagaagcaggcggattttggagtctct

SEQ ID NO: 24177 - DNA, 260 bp, Unknown; identical to SEQ ID NO: 24157
  Description of Unknown: LeftRegion for integrase B11178 sequence

SEQ ID NO: 24178 - DNA, 260 bp, Unknown
  Description of Unknown: LeftRegion for integrase B11179 sequence
gtttagagtagttggttttataccttttgacaagtaaaacaaaaaaagaattagaaagtgtttgagttttcgcacagcacaaccacttatctaattccgacaatcactattgaaagcgatttctctaatattatacattagagttacctcgttttcaatagtttaataaacaaatttattgaaaagtgaggttttttattatgaaatatgtagcttgctactgtagagttagtaccgaagaacaaaaaaaattcggtttt

SEQ ID NO: 24179 - DNA, 260 bp, Unknown
  Description of Unknown: LeftRegion for integrase B11180 sequence
aaacagtccgccgtttcaggcgccagttccgcgtcagacaagcggtgaagtagacgcactagctcggcagcctcgttcacacactcctccgcaaccgccgaaatgcgctgtggcgcaatgaaagtcacgtgtgttcctgtagagacagggtgagagtacctactccccacagaaagtcaagacgttttagcgtcagtcccatgggtccgtccgtgcgcctcggttacctgcgcgtgtccacggacaacgaagaacagctg

SEQ ID NO: 24180 - DNA, 62 bp, Unknown
  Description of Unknown: LeftRegion for integrase B11181 sequence
tccagaaaagagatattgaaaattattgtagaaaaaatgagttagtaataacagactggtat

SEQ ID NO: 24181 - DNA, 260 bp, Unknown
  Description of Unknown: LeftRegion for integrase B11182 sequence
tattgaatgctactacaattcattatccatcataaaaacgatgaagcaaagaggcttaattaacgataatgaatttgctactgcagagaagattttagctaaaaaacattgtatcaaaaaaggtagtatttatcgttcaaataacttgataaattccgactttagagcgatatatataatgcaaaaaaaggaggtagaaaatgcaagaaagaacgataatgaaaatagatgcgttaccacaattagaaaggaaaactaga

SEQ ID NO: 24182 - DNA, 260 bp, Unknown; identical to SEQ ID NO: 23121
  Description of Unknown: LeftRegion for integrase B11183 sequence

SEQ ID NO: 24183 - DNA, 260 bp, Unknown
  Description of Unknown: LeftRegion for integrase B11184 sequence
aaaaaatctaagcctggtgaagtacatcaggctttttctttttgattttttcttaaaaccggaaaaatctatcttgaaagtacctatttaggtaagaggacaataaagacattttgttaaagtacagggttgctgattacttgactaatatagcgtttagagggatatatagtgtgtaaaaacttcttctaggaggaaaaatgaatataagaaaaattgaagcaaagaataacaaaagaaaaaagagaatttgtgcatat

SEQ ID NO: 24184 - DNA, 260 bp, Unknown
  Description of Unknown: LeftRegion for integrase B11185 sequence
aaaaaatctaagcctggtgaaatacatcaggctttttctttttgattttttcttaaaaccggaaaaatctatcttgaaagtacctatttaggtaagaggacaataaagacattttgttaaagtacagggttgctgattacttgactaatatagcgtttagagggatatatagtgtgtaaaaacttcttgtaggaggaaaaatgaatataagaaaaattgaagcaaagaataacaaaagaaaaaagagaatttgtgcatat

SEQ ID NO: 24185 - DNA, 260 bp, Unknown; identical to SEQ ID NO: 20886
  Description of Unknown: LeftRegion for integrase B11186 sequence

SEQ ID NO: 24186 - DNA, 260 bp, Unknown
  Description of Unknown: LeftRegion for integrase B11187 sequence
gtatctatggcggttttgcgaaatttcctaaaatccggactgctgacccagtcggaatttgtgcaatgtgaacaaactctcgccgagaaatgcgggttatctttgggcagtattttccgagaaagtgcttgactttctgcccccagtagagggaatatgttagcaagcatacgcttaatacaaagaaacaggtgatgaaattggagcgaaaagtacatcgggtgcagcagcgaccgtccaagccgaagctgctaaaagtc

SEQ ID NO: 24187 - DNA, 260 bp, Unknown
  Description of Unknown: LeftRegion for integrase B11188 sequence
ggagcatccagcaggttctgaccgtggccgcgactctggtggccgctgctgccctggccatcacgttggttgaccgcaacccgcctgatccgccgcacctgcagaggtttggacaacagcgctaaacctgcgggatcgcgcactatgacccgtagtgaactgacctgagggctagtgtcctaggggttacacccctcgaaatgctgttgcgggttggatactgccgggtttccaccgcctctgctgagcagcagcaggcc

SEQ ID NO: 24188 - DNA, 260 bp, Unknown; identical to SEQ ID NO: 22549
  Description of Unknown: LeftRegion for integrase B11189 sequence

SEQ ID NO: 24189 - DNA, 260 bp, Unknown
  Description of Unknown: LeftRegion for integrase B11190 sequence
acggacgcgacttcgagcgttgacgagttggcgtcatggatcgtggtgcatctcgtgcgcgctgcccgggagccggactggcgtcgcatcgccatccgctgctgggagttggatggccgcgaggagatcagccggcagctggagccgggccagttcggtgcactcatggcggccgtgaaagccgagcaggggccacgagcgtgaacaccaccactgtccgccgatgcgtgctctacgcccggatcagcctcagcaaagaa

SEQ ID NO: 24190 - DNA, 260 bp, Unknown
  Description of Unknown: LeftRegion for integrase B11191 sequence
ttaaagaagagtttaataaggctattcctgatgaaacagttaagaaattatatgaagcaatgaaaaaactatagatgtattagttacacgttctattgagcgtgtttttttattgtaaaaaagtagaaattttaaagattccaattacttgatataatagttgtatattatattaattttagcaatggtaggaggacaatatgcagaaaaaacgtggtgtactatatgtgcgtgtatctactacgaaatttgaacaagaa

SEQ ID NO: 24191 - DNA, 260 bp, Unknown
  Description of Unknown: LeftRegion for integrase B11192 sequence
aaaaatctaagcctggtgaaatacatcaggctttttctttttgatttttttcttaaaaccggaaaaaactatcttgaaattacctattaaggtaagagggatatatagacattttattaaagaacagggttgctcattacttgactaatatagtgtttagagggatatatagtgtgtaaaaacttcttgtaggaggaaaaatgaatataagaaaaattgaagcaaagaataacaaaagaaaaaagagaatttgtgcatat

SEQ ID NO: 24192 - DNA, 260 bp, Unknown; identical to SEQ ID NO: 22583
  Description of Unknown: LeftRegion for integrase B11193 sequence

SEQ ID NO: 24193 - DNA, 260 bp, Unknown
  Description of Unknown: LeftRegion for integrase B11194 sequence
gactattgcgttcgtaccgtaccgttgcctatcggtgtccacggatgcgtgtctaaggatgccaacgggttcttcaacgtgtatgtaaatgaacgtgatagtcatgagcgtcagcttgaagcattagaccatgaagtaaaaaagcacatccagggcgatgatttctcaaagccggatgtgcgtgagattgagggattgtaatgcgtgtagcattgtactgccgcgtatcgacagaggagcaagcgatgcacggtttgtcg

SEQ ID NO: 24194 - DNA, 260 bp, Unknown; identical to SEQ ID NO: 23083
  Description of Unknown: LeftRegion for integrase B11195 sequence

SEQ ID NO: 24195 - DNA, 260 bp, Unknown
  Description of Unknown: LeftRegion for integrase B11196 sequence
tgctctctaaaagttaagccttcgtcagcgtcagaaagccggtgaagatttgtaacaatttgagaggcaagttgaacgcaggattctgcagtgatttggctgagatgaggcggaggagcaacgattgtcacgtttttcttgtttgggcctgctcaagataccagctggctacggtaaaagcaagtaatcagagccctgccatgaagatcgggtatctacgtgtgtctacagacacagaggcacagcgatccgccctggaa

SEQ ID NO: 24196 - DNA, 260 bp, Unknown
  Description of Unknown: LeftRegion for integrase B11197 sequence
ctattttgtgtacgttgttccgttcccgccgaatgttcatggtgcagtagtaaccaacgaggacggcacgttctctgtttacatcaacgcaaacgatacaagagagcgtcagcggaaagccggggaacacgaaatcaaacggcacatagagaataacgattttgccaagtcggatgtggtcgaaatagagggcttataaaatgcgagttgcactttactgccgtgtcagtacagaagaacaggctttgcacggcctgtct

SEQ ID NO: 24197 - DNA, 260 bp, Unknown
  Description of Unknown: LeftRegion for integrase B11198 sequence
ttttataagttcattataacatacttgtatctcagcgtgttgaaatagccacgctttttctttttgcttttttcaaaaactgcggaaaatttgtttccaaatttacttagtaatatggagggagtaggtttgcgaaaagcttgacttatcttccctttagagtgatatatggtgtacaaaagttataggaaggagcctgaatggcagtaaggttaattaagacaaaaagtaatcgtaaaaaacaacgtgtctgtgcttat

SEQ ID NO: 24198 - DNA, 260 bp, Unknown
  Description of Unknown: LeftRegion for integrase B11199 sequence
cagcaacgaggaggctgcggaatgagcgacgttcccttctaccgcacgcagatgggccaccgcttcttcgaagccaccgtgcccggcctggtgcgtgagctcgcccggttgaacgacaacctggagcgcctcgccaaggtcctcgagcgcgaccctcgcgcccccgagccaccgccgccgcccctgcccgaggagccccgatgacgcgcaagaagcccgcggccgtcacgccgcccccggaggtgcggcgctgcgcgatc

SEQ ID NO: 24199 - DNA, 260 bp, Unknown
  Description of Unknown: LeftRegion for integrase B11200 sequence
acgccattggtcatggtgtccatggggaagcctccttccggtgtggtggatgtgcctgatgggcccggagcgcaactcaggcgctcaacggcaggcgtgaaaagggttgcgagaacaggcgtggcccgccctcacttcatcactataacccctatggaactaaagcgagcatcagttccataggggttacattccctcacatggaacggctccgcctgggttactgccgcgtctcgaccgccagcgacgagcagcagcag

SEQ ID NO: 24200 - DNA, 260 bp, Unknown
  Description of Unknown: LeftRegion for integrase B11201 sequence
tagagtgtattgccgatttttttaatgtagatacggactacttgcttggaaggactaattacaagccagaatattcattagaagaaaaatggattatcgaatgttatcgaagagcaccaaccaatatgcaagatggcattaaaaacattcttaggacttttgatgaaaaaagtatatcgcagaaggtcgtgtgatcccatatgaaaagagccgctttatacgcaagggtaagcactgatgagcaggcaaggcatgggtac

SEQ ID NO: 24201 - DNA, 260 bp, Unknown
  Description of Unknown: LeftRegion for integrase B11202 sequence
gcagcaaagaagatagatgtggtggttaccatgagggctgccacgattgcacgtaactggggacagtttatggagttcatgctgatttgcagtaagagaaatgtggaagtggtgtgcattgacaaggtagaagatgcacaggccattttccaaaggattcaggagtttaagaaaaggttttttgaaggaagtgatgtaacgtgcgagtaaaagtaattaacaaacgaccagcttcggtcttacaaaagaaaagggtttgt

SEQ ID NO: 24202 - DNA, 260 bp, Unknown
  Description of Unknown: LeftRegion for integrase B11203 sequence
ctcgatgcacaggcccatcccgcacacccgccagaccagctggcccccgcgggggatcacttcccaggtcggcaggtcggtcatggctcaggttgccggtctcaacgggtgagatcggctgcagtggctggcatctgatccgctgtatcctgtggggaactaaggcgagggtcagttctccacgggctacattcccgtgcatgacgctcaccgtcgcctacgccagggtatccaccgcctcgggcgagcagctctcggcg

SEQ ID NO: 24203 - DNA, 260 bp, Unknown
  Description of Unknown: LeftRegion for integrase B11204 sequence
ggacttcctgctgcggctgagcgacccggatgccaccaagcgcgtaccaggcgagatcaggaaggaagcacgggccttactgcgccacttccccatcgctgagaagcttcgccctgtcctgcaggagggactccagaaacaggaagaacctctattgaactaaggcgagcgttggttcaataggggatacactgcctggcatgcggttgcgcgtcgcttacggccgggtctcaacaacgtcgggagagcagctctcggcg

SEQ ID NO: 24204 - DNA, 260 bp, Unknown
  Description of Unknown: LeftRegion for integrase B11205 sequence
ggacttcctgctgcggctgagcgacccgcaggccacccggcgggtgcccggggaggtgaggaaggaggcgcgcgccctgctgcgccatttccccatcgctgagaagcttcgccctgtcctgcaggaggggctacataggcaggaaggacctctattgaactaaagcgagccttggttcaatacgggatacactgcctggcatgcggttgcgcgtcgcctacggccgggtctcaacgacatcgggagaacagctctcggcg

SEQ ID NO: 24205 - DNA, 260 bp, Unknown; identical to SEQ ID NO: 24204
  Description of Unknown: LeftRegion for integrase B11206 sequence

SEQ ID NO: 24206 - DNA, 260 bp, Unknown
  Description of Unknown: LeftRegion for integrase B11207 sequence
gaccttcagcgtgccttgctggggcatacggtttccaaggaaacatgggaaaagatccgtactgctgcgagggaaatcgcttcttctgaagaaaacgccagaggctccaattccaaacctacactcgccgaagtaaaagaaatgttacaaagtttaaatgactactttgattcgcagaagaccagctgagaggggcgcctatgagagttgcattgtattgtcgcgtatccagtgaggaacaagtacgcaacggactgagc

SEQ ID NO: 24207 - DNA, 260 bp, Unknown
  Description of Unknown: LeftRegion for integrase B11208 sequence
tatagaacagtactattcatcgcttgtacatattattgcaatgaagaataaaggaatattaaacgatgctgatttcctaaaagccgagtctgttttggcaagtaaatattgtatcaaaaaagatagtctttatcgggctaatgacttgataaataatcgttttagagtgatatatatactaccaaagaaggagggccaaaatggatcagaaacggataaccaagatagatgcgttaccaaagttacaaaagaaaactaga

SEQ ID NO: 24208 - DNA, 260 bp, Unknown
  Description of Unknown: LeftRegion for integrase B11209 sequence
aaaaaatctaagcctggtgaagtacatcaggctttttctttttgattttttcttaaaaccggaaaaatctatcttgaaagtacctatttaggtaaggggacaataaagacattttgttaaagtacagggttgctgattacttgactaatatagcgtttagagggatatatagtgtgtaaaaacttcttgtaggaggaaaaatgaatataagaaaaattgaagcaaagaataacaaaagaaaaaagagaatttgtgcatat

SEQ ID NO: 24209 - DNA, 260 bp, Unknown; identical to SEQ ID NO: 23037
  Description of Unknown: LeftRegion for integrase B11210 sequence

SEQ ID NO: 24210 - DNA, 260 bp, Unknown
  Description of Unknown: LeftRegion for integrase B11211 sequence
ggatcgccgagaggaggtcctcggtgacctcaaccagctcttcgacgatggccgtgatcctgaagcaattccgctgcattgcagggtgtgtgcagttacctggctagataatcaggtcaatacagggactgcaagcccctcgtcgcaaatttggggagtcttctgtgtcgcaacccgcgaggcagcagcgcgttggctacgtgcgcgtgtccaccgccagcggagaacagctcgccgcactcgaaaaccagcgcgcccgc

SEQ ID NO: 24211 - DNA, 260 bp, Unknown
  Description of Unknown: LeftRegion for integrase B11212 sequence
atgcttgacagtatttgccgtttcttggtctgcacacaggaagaccttatgacagaccacagtaagccggttccgatgctaccgcaggacatcatagccgaagagatagagaacgatcctaaactaatgcggatcatgttcttatgcatcaagatgactgaagaagaaaaagacaagctcatagaaaggttatcaagaaaatgaaggtctttatttatgaaagagtatcaagcgaagaacaggcgaagcacggctattca

SEQ ID NO: 24212 - DNA, 260 bp, Unknown
  Description of Unknown: LeftRegion for integrase B11213 sequence
gatgagatatgcagagtattaaggtgtagcagagaagatttgatggtggatcatgacagacaggtgattcttgcaccagaagatgtgttagctgaagagatgagattaagggaagacctctatacagttttcaatgcgctaatcaatatgaatgattcagacctcaagttggtcaccgatcttatcaagaggttgtcaatatgagagtatttctatatgaaagagtatcaagtgaagagcaggtcaagcatggttattct

SEQ ID NO: 24213 - DNA, 260 bp, Unknown; identical to SEQ ID NO: 17928
  Description of Unknown: LeftRegion for integrase B11214 sequence

SEQ ID NO: 24214 - DNA, 260 bp, Unknown
  Description of Unknown: LeftRegion for integrase B11215 sequence
cggcacaatcatacgccgcctgtacaaaggcaagtaccacgaggtcacagtcatcggcaaaaacatgttcgcatacgatggcgtgaagtacgacaacctgaccgcgattgcttggaaaatctgcggctacgccaaaagcggcaactacttctttaacctccccatgactcccagaaatgatgacaacaagtaatccagtaatgccaacaaagcggtgtgctatctacacccgcaaatccattgccaaagggctcgaccaa

SEQ ID NO: 24215 - DNA, 260 bp, Unknown
  Description of Unknown: LeftRegion for integrase B11216 sequence
ctgcagcctgtagacgccatggcaggcccagcggaacggcacggcccaatgggtggccacaaggtcaagcgcacggtgcctggggtcgtccacgcatggccgcagccccagttgctgcagcagccattcaaggctctcttccgtgagggttagagggaagtccaccttggtagtgttcgctttgaccacactaggacgccatgcgggtgggctactgccgcgtcagcaccaagactgccgagcaggccgcatccatcgcc

SEQ ID NO: 24216 - DNA, 260 bp, Unknown
  Description of Unknown: LeftRegion for integrase B11217 sequence
gcagtggtttatcgccgttttgcaagcaacattagctgataaacgatttcaagctcgtcagggtcaaggctctgaagaaaagcggtaaattcttcttcggtcattggtttgtcctccttatgcttgaagtatagcacatcggaagtccgtattttgtcgcttccggtcagaaattcgcctattaagcgaaaaggtaaaacatgagagtagcattatacgcaagagtatcaacggaagaacaggccatccacggcctgtcg

SEQ ID NO: 24217 - DNA, 260 bp, Unknown
  Description of Unknown: LeftRegion for integrase B11218 sequence
caatatgatgctttatcagacggctatggcaatggcaaaaaatatgcttgataaaggcattataaccgtggctgaattcaacaaaatcgaggcggaattttgtaaaaaatattgtattaatatttcctcaatttttcgcagaatagctggataaatacctgcttatgcggtaatatggacataccaaaaaggaggtatttatggaaagaaaaatcataaccgtaacgccctcaaaagaccccaccttgcaggtgaaacgg

SEQ ID NO: 24218 - DNA, 260 bp, Unknown; identical to SEQ ID NO: 13002
  Description of Unknown: LeftRegion for integrase B11219 sequence

SEQ ID NO: 24219 - DNA, 260 bp, Unknown
  Description of Unknown: LeftRegion for integrase B11220 sequence
aagccccaggagaccccgcgggtgcctggagacgtgcgtggcgaggcgcgggccctgctgcggcattacccgctaccggagcggctgcggccgatcctggaggatgggttgaaccggcagggcggggtcgatgccccctagtgctttagggaccttcttcaaccagtagtactcttaagcactagcccctggttgcgtggatggcagcgcctgagatcgtcggctacgccagggtttcaaccaagaccgacgagcaggcc

SEQ ID NO: 24220 - DNA, 260 bp, Unknown
  Description of Unknown: LeftRegion for integrase B11221 sequence
gcgccttggggttgagtgggcagcctagaaatactgccgtacaaccagtacagcgtttagagaggtagaccaaggtaggaacaccgggaaacctgttccccctcgtctacatgacgtatcgtattgtttccacctagtgcgtgcctacttgtaactagcaccagcacaagatacaatctggcacaatcccgcacaggagcgtgcccgtgaccagttacggctacatcaggcagagcaggagagcagacctagacgttgct

SEQ ID NO: 24221 - DNA, 260 bp, Unknown
  Description of Unknown: LeftRegion for integrase B11222 sequence
tatcaaagaaggaaaaaattcctgtaaaggtatgagagtccctgaaagggatattgaagattggaaactaagttcaccagtaattgtgttagaaaggattgaagatggagaaaaacattacagttataccggccaaaaaggtacatcaaacagtcatatctcaaattcagaaaaaaatcagagtagccgcttattgtcgagtgtctacagaccaagacgaacagctatcaagctatgagaatcaggttaattattaccgt

SEQ ID NO: 24222 - DNA, 62 bp, Unknown
  Description of Unknown: LeftRegion for integrase B11223 sequence
aagacgctcttactcggtacgtgctagacaaaccggattatgttctggcaggagtttacatt

SEQ ID NO: 24223 - DNA, 260 bp, Unknown
  Description of Unknown: LeftRegion for integrase B11224 sequence
cgtgagctcgtgagcttcttgggcgaggtcgcgctccgtccaaccgaacagggcggtgtcttctgtaatgcgttgcatttctgcagaggatctgtcgtgtgtcttaggtggtactcgtttctggaataccgtcgacctactgctgcgtagccccagcaggggtcgccgcaagtgtgcctcctgcagcgcgtgtgtcaaccatggttttgagaatcggatacgcccgcacctcgacggcccaagaggagcaggacaagtcg

SEQ ID NO: 24224 - DNA, 260 bp, Unknown; identical to SEQ ID NO: 23098
  Description of Unknown: LeftRegion for integrase B11225 sequence

SEQ ID NO: 24225 - DNA, 61 bp, Unknown
  Description of Unknown: LeftRegion for integrase B11226 sequence
aagagtatcaagcgaagaacaggcgaagcacggctattcactcgatgcacagcacgatgcc

SEQ ID NO: 24226 - DNA, 260 bp, Unknown
  Description of Unknown: LeftRegion for integrase B11227 sequence
attcaataagtcataagggattaattaagaaaataacactaatggaatatcttgaaaaagctagtgaacctaatgttaatagattatatgattatatgaaatttttaatcatgcaagagaaggaaggtgataaataatgaaacgagcagctttgtatgttcgtgtcctaagttagtacaatcgaacagcgtgaaaggggtatgtctgtagacacccaaataacggccctagaggcctattgtaaggcgaataacctcata

SEQ ID NO: 24227 - DNA, 260 bp, Unknown; identical to SEQ ID NO: 24183
  Description of Unknown: LeftRegion for integrase B11228 sequence

SEQ ID NO: 24228 - DNA, 260 bp, Unknown; identical to SEQ ID NO: 24191
  Description of Unknown: LeftRegion for integrase B11229 sequence

SEQ ID NO: 24229 - DNA, 260 bp, Unknown
  Description of Unknown: LeftRegion for integrase B11230 sequence
aaaaaatctaagcctggtgaagtacatcaggctttttctttttgattttttcttaaaaccggaaaaatctatcttgaaagtacctatttaggtaagaggacaataaagacattttgttaaagtacagggttgctgattacttgactaatattgcgtttagagggatatatagtgtgtaaaaacttcttgtaggaggaaaaatgaatataagaaaaattgaagcaaagaataacaatagaaaaaagagaatttgtgcatat

SEQ ID NO: 24230 - DNA, 260 bp, Unknown; identical to SEQ ID NO: 24208
  Description of Unknown: LeftRegion for integrase B11231 sequence

SEQ ID NO: 24231 - DNA, 260 bp, Unknown; identical to SEQ ID NO: 24184
  Description of Unknown: LeftRegion for integrase B11232 sequence

SEQ ID NO: 24232 - DNA, 260 bp, Unknown
  Description of Unknown: LeftRegion for integrase B11233 sequence
tatcaaagaaggaaaaaattcatgtaaaggtatgagagtccctgaaagggatattgaagattggaaactaagttcaccagtaattgtgttagaaaggatagaagatggagaaaaacattacggttataccggccaagaaacttcagcaaacggtcaaatctcaaactcagaaaaaggtcaaggtagccgcttattgtcgagtgtctacagaccaagacgaacagctatcaagttatgagaatcaggtcaattattaccgt

SEQ ID NO: 24233 - DNA, 260 bp, Unknown
  Description of Unknown: LeftRegion for integrase B11234 sequence
gcggactactgcgttagacttgttcctctcccggctggagtgcatggatgcgtttcggaggattgtgacggtttctataacgtatatataaatgtaagagacagctatgaccgtcagcgcaaagccggggcacatgagataaaaaagcacatcgaacgaggagatttctccaagtctgatgcgtgtgaggcagaggatatatgagagtagcactatactgccgtgtgagttcggaggaacaggttcgccacggcatatcc

SEQ ID NO: 24234 - DNA, 260 bp, Unknown; identical to SEQ ID NO: 24197
  Description of Unknown: LeftRegion for integrase B11235 sequence

SEQ ID NO: 24235 - DNA, 260 bp, Unknown
  Description of Unknown: LeftRegion for integrase B11236 sequence
ttttataagttcattataacatacttgtatctcagcgtggtgaaatagccacgctttttctttttgcttttttcaaaaactgcggaaaatttgtttccaaatttacttagtaatatggagggagtaggtttgcgaaaagcttgacttatcttccctttagagtgatatatggtgtacaaaagttataggaaggagcctgaatggcagtaaggttaattaagacaaaaagtaatcgtaaaaaacaacgtgtctgtgcttat

SEQ ID NO: 24236 - DNA, 260 bp, Unknown
  Description of Unknown: LeftRegion for integrase B11237 sequence
aatcctataaggacaagcgaaatggctggatttccctcgattatgtcagcaaaatctaaggctctgcccggtggcaaaacgctgccgggcacccttttttacctatgaaaattctttgagaaatagcccttttattgcttgactaatcggcgatagtacgggaatatacgataacccccaaggaaaggaggaaacgacctatgcgaatcaaagtcatcaagcccacagtggcagcggaaaataaacggttgaaggtatgc

SEQ ID NO: 24237 - DNA, 260 bp, Unknown; identical to SEQ ID NO: 23264
  Description of Unknown: LeftRegion for integrase B11238 sequence

SEQ ID NO: 24238 - DNA, 260 bp, Unknown; identical to SEQ ID NO: 24232
  Description of Unknown: LeftRegion for integrase B11239 sequence

SEQ ID NO: 24239 - DNA, 260 bp, Unknown
  Description of Unknown: LeftRegion for integrase B11240 sequence
tccgtatgcttgaccgcaggacaaaacacgagtttatgtcgatggtatatgagtacgagaacagggccgcattacagggggataagggagaaacaggctcggctgttggctgagattagaaaagaaaaagtcatcccatttgaggtcgtacagacctatcacgagatgactgagcgtagaaaagtattggaggtgaaattatggtcaaagcggtagcatatgcccggtactcatcccacaatcaacgtgaggagagcatc

SEQ ID NO: 24240 - DNA, 260 bp, Unknown
  Description of Unknown: LeftRegion for integrase B11241 sequence
gttattttttaatgaaataacttttcaggtaacgataaatctggcaaggaaaatgttgaatgataaacttattaccaagaaggagtaccagtccttcaagaaggaaatgcttcataaatatcaaccgtttttcggagggctatacacttgataattctactggttagagtgatatatatagttggaaggagggctcaactatggaaaagaaaatgtggaaaatagaacagaaggttaccgaaatttccaaacggaagcgg

SEQ ID NO: 24241 - DNA, 260 bp, Unknown; identical to SEQ ID NO: 23902
  Description of Unknown: LeftRegion for integrase B11242 sequence

SEQ ID NO: 24242 - DNA, 260 bp, Unknown
  Description of Unknown: LeftRegion for integrase B11243 sequence
ttaaacaatacatacatagaaataatagacaaaaaactttttaaataaaaaagacctcggctggcaccgaagtcaaaatataaaatacagaaaacaaaataatctatctaccacgataagaatatatctttttctctgctatttcattatagcataagaaaaagaacttttcaataaaatttaaggaaggatgtgctataatgtacgaaacaaatttaactatttttgatgtcgatgacattttaatatatctaagaaaa

SEQ ID NO: 24243 - DNA, 260 bp, Unknown
  Description of Unknown: LeftRegion for integrase B11244 sequence
atggaattgagaatccggatttgatttaccctggccaagtactgcggattgaataagcaaacagagtctgtttggaacccttcatgcaggctctttacatagacagcatttcaagtagaaaagtgcttgaatgagtgggctgaatacttgataaatttggcctttagagtgatatataataaggaagaaaggagagtgggatgaagccagaaaagaaacgagtttgtgcttatgcgcgtgtttcaaccatgactgaaaag

SEQ ID NO: 24244 - DNA, 260 bp, Unknown
  Description of Unknown: LeftRegion for integrase B11245 sequence
atggaattgagaatccggatttgatttaccctggccaagtactgcggattgaataagcaaacagagtctgtttggaacccttcatgcaggctctttacatagacagcatttcaagtagaaaagtgcttgaatgagtgggctgaatacttgataaatttggcctttagagtgatatatagtaaggaagaaaggagagtgggatgaagtcaggaaagataagagtttgtgcttatgcgcgtgtttcaaccatgacagaaaag

SEQ ID NO: 24245 - DNA, 260 bp, Unknown
  Description of Unknown: LeftRegion for integrase B11246 sequence
atggaattgagaatccggatttgatttaccctggccaagtactgcggattgaataagcaaacagagtctgtttggaacccttcatgcaggctctttacatagacagcatttcaagtagaaaagtgcttgaatgagtgagctgaatacttgataaatttggcctttagagtgatatataataaggaagaaaggagagtgggatgaagccagaaaagaaacgagtttgtgcttatgcgcgtgtttcaaccatgacagaaaag

SEQ ID NO: 24246 - DNA, 260 bp, Unknown
  Description of Unknown: LeftRegion for integrase B11247 sequence
ttgtcaaacagtacattacggacggagtcaacatctatctccgttctctaaacagagagcggaaagacctcgatgtcgatatatgggatagcggaaacgatactgttgtcggatacggcacagtcatttataagaagattccgcttgtaaggcaatgagagggcctttctggccctctttgatagaacggagtgattctattgcgcgttgcgttatatgcgcgtgtaagcacacaggaacaggcacaacatggcctctct

SEQ ID NO: 24247 - DNA, 260 bp, Unknown
  Description of Unknown: LeftRegion for integrase B11248 sequence
gctcggagggcgggccaatatgagcgcgatcgtgcaggccgtgccaaagcttcaggtgagcgttatgcctgccgcagtagaccccgcccgtgagctgctggccctgcgctggctgatcgaccgcgccaacgaacacgctcgcaagaaagccgccgaatccaatgaccgagaggcagcctgaagctttataatactcgcccatggacacggtacttatctacgcgagggtttcgactgaagaccaactggaaaagtatggt

SEQ ID NO: 24248 - DNA, 260 bp, Unknown
  Description of Unknown: LeftRegion for integrase B11249 sequence
ttaatggaattgaaaatccggatttgatttatcccggtcaagtgttacgaattgaataatccatcaaggtctgtgtggttgtctatgcaggccttttacatagacagcatttcaactagaaaaagcttgaatgagtgggctgaatacttgataaatttggcctttagagtgatatatagtaaggaagaaaggagaatgggatgaagccaggaaagataagagtttgtgcctatgcgcgggtttcaaccatgacagaaaaa

SEQ ID NO: 24249 - DNA, 260 bp, Unknown
  Description of Unknown: LeftRegion for integrase B11250 sequence
tgcggagctggatgagctttcatctctaatacaatatctaagatatcgaaaagttcgtgaactgtctgagggtcaaggctcaaaagatactccttgatttcttcactggtcaatattaccacctccatgattggagactaccacaccatgtgtccgttctaaaggactgtcataaagtttttagcttaataggagaaattatgcgtgtagcgttgtacgcccgtgtctcgacagaagaacaagcattacacgggctttct

SEQ ID NO: 24250 - DNA, 260 bp, Unknown
  Description of Unknown: LeftRegion for integrase B11251 sequence
gctataaaagactttcgcaatttttaaaaaatttacaatcggcggtttttgaggagcgtcgtggaggtttttgggaaaaggggcacttgttcaaggaatttccgaaaaaattgatcccgtactcttttccaaaacttttttgaattttgaaacgcaacccccaattcaaagagcgggtttgccgtgagggggagtgatgcgtggtgagcgtggaagtgggtgaaagcgggcgtgctgagaccgaaacgccgatgcgggag

SEQ ID NO: 24251 - DNA, 260 bp, Unknown; identical to SEQ ID NO: 23902
  Description of Unknown: LeftRegion for integrase B11252 sequence

SEQ ID NO: 24252 - DNA, 260 bp, Unknown
  Description of Unknown: LeftRegion for integrase B11253 sequence
gccgaaatcgttaagctcaccacccgtgttctggaagccgaagcctccgcctccacgcttgacgaagcccacgaccaacactgccgcgatatccaccgccgctatcgcttgctttcctggggctgcattgctgttgtgatcgttgccctcctgctgggctggtttattcctccaccctggatgctataaggagtgatcccatgtactgcatctatctgcgcaaatcccgtgcagactatgaagccgagcagcggggcgag

SEQ ID NO: 24253 - DNA, 260 bp, Unknown; identical to SEQ ID NO: 23210
  Description of Unknown: LeftRegion for integrase B11254 sequence

SEQ ID NO: 24254 - DNA, 260 bp, Unknown
  Description of Unknown: LeftRegion for integrase B11255 sequence
acccggtctgcacttttattgtagcatgatccccctcagaacacaatccgacaaaaaagaatccccggcagctctgtacgatagagccaccggggccagatggggaatctgtctgtcggagaataatcataggataagaaaacacgcctgctgagcaagttcattgtaccatgatcctgctcagcgcacaaggagcaatcatggcaagaagaaagaaagtgtctcccgggaaccgtctggttgcctactaccgttacagc

SEQ ID NO: 24255 - DNA, 260 bp, Unknown
  Description of Unknown: LeftRegion for integrase B11256 sequence
caacaagaacttacctaccaactgactatggcacaggccaagcagctcctgtctcaaggtctgatttctgaagccgtcttccaagaatttaaggaaaaaatgctcgaaaaatatgagccatttctgagccaattagtggcctaaaaacttgataaataagggctttagagtgatatatagttgcgaaaggagatgtatcaatgaaacaaatcaaaacgatacaagcccaaaaggtaactaccatcaaaaggttaaaggtg

SEQ ID NO: 24256 - DNA, 260 bp, Unknown; identical to SEQ ID NO: 23434
  Description of Unknown: LeftRegion for integrase B11257 sequence

SEQ ID NO: 24257 - DNA, 260 bp, Unknown; identical to SEQ ID NO: 22981
  Description of Unknown: LeftRegion for integrase B11258 sequence

SEQ ID NO: 24258 - DNA, 260 bp, Unknown
  Description of Unknown: LeftRegion for integrase C1 sequence
aagcgtggaccgaagcgcccgcacaagctcaccgaggagaatcttgctgtcctggcgcaggccatacgagagagcgaacagatgccaggcggtgcggagttggctgccctactcgtcgaacgatgcggcatcagtgcccacccccggagcatcctgcgaagactgcttccctatctgaaccagccggaaaaaaaactgctgtgaccgtcgatgcgctcccgctcgataccatgcagttcaccgcgcaatacgagctgatc

SEQ ID NO: 24259 - DNA, 260 bp, Unknown
  Description of Unknown: LeftRegion for integrase C2 sequence
acgcccggaagcctgcgcgccctggttcggttggtcaaagcctgccgcacgtccctgcctgcggaggctcgccatgccaaccccgatcccgatgttgtggaacattctgccgccggaggcccagagccccatggttgcgctgtggagcgatctgcttcggcgccggctgacgggccggatggcttgcaaggaaacgccccatgaccccctcgcccaagatcgaaccccgccatcagcgactgcaggcgatcgtctacatc

SEQ ID NO: 24260 - DNA, 260 bp, Unknown
  Description of Unknown: LeftRegion for integrase C3 sequence
cttcttgaacggcgcggcgagtcgccgcccgatgacaaggaggagcgacatgcaactgaagctgagattcgccgaggaagaccgcaagcggcctcccgacccacccacctgggagacgctggacgccgaggcgcgggcggaggcgttgcgccggctcgccctcgtgatcgcgcgcatgctgacagtgagggaggccggtcatgactgaacacagcaaaatcgccgccggtcaccaggcccggctggctgtcgtctacctg

SEQ ID NO: 24261 - DNA, 260 bp, Unknown; identical to SEQ ID NO: 24260
  Description of Unknown: LeftRegion for integrase C4 sequence

SEQ ID NO: 24262 - DNA, 260 bp, Unknown
  Description of Unknown: LeftRegion for integrase C5 sequence
cttcttgagcggcgcggcgagtcgccgcccgatgacaaggaggagcgacatgcaactgaagctgagattcgccgaggaagaccgcaagcggcctcccgacccacccgcctgggagacgctggacgccgaggcgcgggcggaggcgttgcgccggctcgccctcgtgatcgcgcgcatgctgacagtgagggaggccggtcatgactgaacacagcaaaatcgccgccggtcaccaggcccggttggctgtcgtctacctg

SEQ ID NO: 24263 - DNA, 260 bp, Unknown; identical to SEQ ID NO: 24260
  Description of Unknown: LeftRegion for integrase C6 sequence

SEQ ID NO: 24264 - DNA, 260 bp, Unknown
  Description of Unknown: LeftRegion for integrase C7 sequence
acgcccggaagcctgcgcgccctcgtccggctggtcaatgcctgccgcacaacctcgtccgcggaggccccccatgccaaccccgatcccgatgctatggagcattctgccaccggaggcccagaggccgatggtggggttgtggagcgatctgctgtggcgccggctgacgggccggatggcccgcaaggagacgtcccatgatcctctcgcccaagatcgaagcccgtcatcagcggttgcaggcggttgtctacatc

SEQ ID NO: 24265 - DNA, 260 bp, Unknown
  Description of Unknown: LeftRegion for integrase C8 sequence
gtcgccaaaatagaggcaaccgaatcaccctcagaggacgctctaccatgcccgagcgatacgagcccccccgtctgcttgcccgctgaatcagagtcggtgggcacgcctgccccacccaaatcgccaacgtctaatttgtgtggtcagccagatgttggagcagcacctgagcgcccaatccaagccggaggtgcctcatgactcctcccactaatcctggattcgggctgtcagacaaaattcaatggccgcatctc

SEQ ID NO: 24266 - DNA, 260 bp, Unknown
  Description of Unknown: LeftRegion for integrase C9 sequence
ccgcttatggcccgtagcggcctgatgctctttctgcgccggggcatgtggggatgggctcaggcgctgacagcaacagcaagcaccccgcgagaacagatttacccatcgtcaatggcttggccgctgcacggcgggcacagcgccgttgttcacgtccttgcgacaatcgccatgagcatcaacgatcggagatcaccatgaatgtacatctcaaagtccagcctcatcacctcgaacgcggcgcctacctgtacatc

SEQ ID NO: 24267 - DNA, 260 bp, Unknown
  Description of Unknown: LeftRegion for integrase C10 sequence
tgcaatggttgctcatgcattagcacttcggatggcggtatctcttccggaggccaacgttccactggtaaggatcaagcgagactcgcccaatctttggaacgatctcccaccggtatgtcagcaccaactcgcgcagatgcttgcgactctgatccgccggatgccgccgaccgcgccggcggtgagggaacagtttgatgttggccgtcccgggtaattctgacgagcggctcacggccgtccggcgttcaaagttc

SEQ ID NO: 24268 - DNA, 260 bp, Unknown
  Description of Unknown: LeftRegion for integrase C11 sequence
gcgaatcacctttagtaactcaatggcgagttgcgatggttgctcatgctttggcgcatcggattgcggtgtctctaagccagatacgcccagcctttggaacaatctcccaccggtatctcagcaccaagtcgcgcagatgctcgcgactctgatccgccggatgccgccgaacgcgccagcggcgagggggcggtttgatgttggctattccgagcagtcctgacgagcggctcacggctgtccgacgttcaaagttc

SEQ ID NO: 24269 - DNA, 260 bp, Unknown
  Description of Unknown: LeftRegion for integrase C12 sequence
agctctcgtccttcgaggaagaaggagaagggtgatgcgaaacaggcgacatcaaaatcgcgaccaactcgttttggagttggagcgtcaaaatcgtcaggttccggtggtcaagaacgtcaaaggactggtggagacgctggcggatcttctgttggaggctttggaagcgagcaaaacggcgaagacgggaggcgtagatgaacacgaagatcacgtctgaccatctgggccgcgccgcggttgtctatgtccgccag

SEQ ID NO: 24270 - DNA, 260 bp, Unknown
  Description of Unknown: LeftRegion for integrase C13 sequence
ggcctgcgccaaggacaagggcgccattgttttccacggcctgtggcaagggctggcggtgctgatcgcgagcccccagccttccccgccgacgcatcggcggccggaaccaccgcccacggcctcggccgcagtgcacgatcgccagctcgtgcacatgctcgccaacatggtgctggcagcagagacccgagggaaccatgtctactgacatcgccatgaaggttgacgccgaccatctgcggcgtgatgcattcctc

SEQ ID NO: 24271 - DNA, 260 bp, Unknown
  Description of Unknown: LeftRegion for integrase C14 sequence
tgccccttgcccggagggtatggcggcaattcgttatcacggcatgctgcatggactttccatgcttgcgatgacggtcccggcgaccagcgacgctcccgaatctcgcaaagaggaacgcatgggcgcactcccagccagcgacgaattggtacgtctgttggccaatctcgttctgcgcacccattcggagctcgcccatgtctactgaccggtaccagaaagtcacggctgaccacttgcgccgcgacgcctttcta

SEQ ID NO: 24272 - DNA, 260 bp, Unknown
  Description of Unknown: LeftRegion for integrase C15 sequence
cgcccggctgatcaccggatcaggactcgtaaccctgcaccgtcaaggcatggtcgcctggatcaaggccgcaacgacaactcccaactttacgccgccttgcccggtacatcgccccccgtcggcaggcgcgatcgccaccagcgagctcaccctcatccttgccagccttgttgtcacgctaaccgcggagccagcacatgcctgacctcaaagtcaccgccgatcacctgcggcgcgacgcctacctctacatccgt

SEQ ID NO: 24273 - DNA, 260 bp, Unknown
  Description of Unknown: LeftRegion for integrase C16 sequence
gagaaacgcaatgggcaatctgccaaacgtcgttccagcaggtcaacaatcgtcgcagtcgataccgcagcagatgagcataacgttcgatgcgcccgaactccaggggatgagcatggtgcaacgagcaaacgcactcagtcatcttgcgattctgctgatgcgggccgccggcatcaagactgcgaaggagtgtgacgatgacgaacgttgatcgtttgcccgcagatcttctcaaacgcaaggccgtggtttatgtc

SEQ ID NO: 24274 - DNA, 260 bp, Unknown
  Description of Unknown: LeftRegion for integrase C17 sequence
cgagatcatcgaggagatctgcgagatcaatcgcgaactattacgccgccgcgaggcgctataaggggcgtcggtgagccagtcgccgctgtcgctcaccaactccatcgacctgcaatcggccggcgtactcatcgccaacatgctcgaagcctggctcatcgcagagcccgcgctggagttgaccgaggaggccgtcgatgaacaccaagatcaccccccaacatcagagcaagccggcgtacatctatatccgccaa

SEQ ID NO: 24275 - DNA, 260 bp, Unknown
  Description of Unknown: LeftRegion for integrase C18 sequence
gcctcgcgaggaggatgtgatcatgcgaccacgatacgaccagcagagagacttgttcgaggtggatcgaacgctgacggagtttccagttgcgcagaggcgcgagcttgtccgcctgatcgagtgccttctgatcgaggcagttgccgcttgcgaggcaaacgtgccatccgacggccccgagacgaaggaggctgcgcatgagcaagatcacgcatgagcacctgggccgtcaggccatcgtctacattcgtcagtcg

SEQ ID NO: 24276 - DNA, 260 bp, Unknown
  Description of Unknown: LeftRegion for integrase C19 sequence
cgaggtggacgtagaatcactcaggaggaagatgatgagatcccgcaatacgctggtgccggcgtcgggccgacagctcgacctgatattcaagacgcgaacactcgacggactgagcgacaaagagcgcaagcaggcgacatcaacactggcttgcctgctgatgcaggctgccggtctggtcgtcgaggagctcaacgatgagcagcactgacttaattccggcagcgctcctcgcgcgcaaggcagtcgtttatgtg

SEQ ID NO: 24277 - DNA, 260 bp, Unknown
  Description of Unknown: LeftRegion for integrase C20 sequence
cgaggtggacgtagaatcactcaggaggaagatgatgagatcccgcaatacgctggtgccggcgtcgggccgacagctcgacctgatattcaagacgcgaacactcgacggactgagcgacagagagcgcaagcaggcgacatcaacactggcttgcctgctgatgcaggctgccggtctggtcgtcgaggagctcaacgatgagcagcactgacttaattccggcagagctcctcgcgcgcaaggcagtcgtttatgtg

SEQ ID NO: 24278 - DNA, 260 bp, Unknown
  Description of Unknown: LeftRegion for integrase C21 sequence
accttgcttcgcgacgattcccgttgcgaaggaggagacaagcatgaagcatcgtcaatcctgtcaccgccaactcgatctctttgtgcccaagaccccgccggcaccgatagcaccggccgagcggacgaagctattgccactggtgagcgcgctgctgtcggaagcacgcggcgcagccgcagcgacggaggccggtgatgaagatcacgtctgaccacctggcgcgcggcgcctacatctacatccgccaatcgacc

SEQ ID NO: 24279 - DNA, 260 bp, Unknown
  Description of Unknown: LeftRegion for integrase C22 sequence
cggggtggacgtagaatcactcaggaggaagatgatgagaccccgcaacacgctggtgccggcgtcgggccggcagctcgacctgatattcaaaacccggacgctcgacggactgagcgaccacgaccgcaagaaggcgatattaacgctggcttgcctgctgatgcaggcggccggtcaggtcgtcgaggagctcaacgatgaccagcactgatttgtttccgacagcgctgctcgcgcgcaaggccgtcgtttatgtg

SEQ ID NO: 24280 - DNA, 260 bp, Unknown
  Description of Unknown: LeftRegion for integrase C23 sequence
ctacgttttctgcagagcgactcacgccagccaggagacgaccatgcagcgcaggcaatgccgaaccgaccagccagacctgttttccacgaaggctccgccatcgagtcttccaggcgaagtccgggaacgcaccctcccgctgatcgagaccttgctgagggaagcggtggtgagccagacggaacgggaggcagatcatgaagatcaccgctgaacatctcgcgcgcggcgcctatgtctatgtccggcagtcgacg

SEQ ID NO: 24281 - DNA, 260 bp, Unknown
  Description of Unknown: LeftRegion for integrase C24 sequence
cggagagatgttcatgcctcgccagcccatgacatgccagttcgatctgttctcggccccgcagcgggggaagacggcagggacgccgcaatggtcggagttgccggaggagacccgccaagcgttgacggtgctcatcgtgcggctgttcgtcgatcacgcaaagtgcggacatgcctgccaacagaaggaggccggtcatgatgcatgagaagatcgcgccgcatcatctggagcggaaggccatcctctatgttcgg

SEQ ID NO: 24282 - DNA, 260 bp, Unknown
  Description of Unknown: LeftRegion for integrase C25 sequence
cggggagatgtccatgccacgccagtccatgacatatcagttcgatctgttctcggccccacaccgggggaagacagcggcgacgccgcaatggcaggagttgccggaagagacacgccaagcgctgacggctctcatcgtgcgactgttcgtcgaccacgcaagcgatgcgagcgcctcccagcagaaggaggtcggtcatgatgcatgagaagatcggggcgcaccatctggagcggaaggctatcctgtatgttcgg

SEQ ID NO: 24283 - DNA, 260 bp, Unknown; identical to SEQ ID NO: 24282
  Description of Unknown: LeftRegion for integrase C26 sequence

SEQ ID NO: 24284 - DNA, 260 bp, Unknown
  Description of Unknown: LeftRegion for integrase C27 sequence
cggagagatgtccatgcctcgccagtccatgacatgccagttcgatctgttttcggctccgcagagggggatgaccgcaggcatgccacaatggccggagttgccggaggaaacccgccaggcgctgacggttctcatcgtgcggctgttcgtcgatcacgcaaactgcgagcgcacctcccagcagaaggaggccggtcatgatgcatgagaagatcgggccgcaccatctggagcggaaggctattctctatgttcgg

SEQ ID NO: 24285 - DNA, 260 bp, Unknown
  Description of Unknown: LeftRegion for integrase C28 sequence
gccggcctatcgttggtctccggttgggatcagggagggcgccatggcacgaggcggagtatccgcgcaacgggaactgttcgggacgacggagctggcggccagcctgccctcggaggtggcgaggcggctcctgccgctgctggagcagctcctgacggaggtcatggcggccgaggccgcagcgacggaggggagcgatgagcaagatcacgcctgaccacctggcgcgacaggcctacgtctacgtgcgccagtcc

SEQ ID NO: 24286 - DNA, 260 bp, Unknown
  Description of Unknown: LeftRegion for integrase C29 sequence
ccagaaccccatcgtcagcgtcgagtggcgcaaggccaggtggaccccggccgagcgcgaacgcctcgcccgcatcctcctcggaccggtcgccaagaaggactgacttcagctacagttacatacggcgcgagacgccccccgagccttctggccggggggcttcggcgtttctgtgtaagtggaactggagggggaccatgcgtaccaagacactgcctcgcaagaccaagacgctgcgggtggccatctacctgcgc

SEQ ID NO: 24287 - DNA, 260 bp, Unknown
  Description of Unknown: LeftRegion for integrase C30 sequence
gccgtgagcgacagccccatcgtgagcgtggagtggcgaaggacgaagtggaccccggccgagcgggagcgcctggcgcgcatcctcttcgggccggtcgccaagaagaagtaaagtcgttacacttgcatacggcgcatgacgccccccgtgccattccggccggggggtttcgtgcgtcctggatcaggaggggaatcatgcgaaccaagacgctgccgcgtcagcgcaaggccctgcgcgtcgccatctacctgcgc

SEQ ID NO: 24288 - DNA, 260 bp, Unknown
  Description of Unknown: LeftRegion for integrase C31 sequence
agcgagagccccatcgtgagcgtcgagtggcgccgcaccaagtggacccccgccgagcgcgagcgcctcgcccgcatcctgctcggaccgatggcgcgaaaggactgagttaggtacagttacacacggcccccacgccccccgagtcttctgattcggggggcttcgacgtatccagatgcagtcaagagagggagatcatgagcaagaaggccctgccgcgacagcgcaaggtgctccgcgtggccatctacctgcgc

SEQ ID NO: 24289 - DNA, 260 bp, Unknown
  Description of Unknown: LeftRegion for integrase C32 sequence
gagccgctgaaccatccggaccggggtccgtctgtgccgacgcagacgggccccttttcgtgcctgaaaactctctgaccaggggtattgcagcctgccccaactgggagatagcttggcctcacccagttaggacaggctgttaaccggcacgctccctgactggggaagacacctcagtcccggacggagcggcccccttgaccccgcacattgaagagatcccccatatcctcgcggctggatatgacaggcagtca

SEQ ID NO: 24290 - DNA, 59 bp, Unknown
  Description of Unknown: LeftRegion for integrase C33 sequence
tcgtcaatcagaagcggatgttgacacagtatgcagaacagcatgggtatgagaatatc

SEQ ID NO: 24291 - DNA, 260 bp, Unknown
  Description of Unknown: LeftRegion for integrase C34 sequence
ttatcaggaggaaaaattttggaacaaacagttgtaaaatatagtctgcagttatcaatgcttaattttttatactctaaagaattgttatctaaaaatgaatatgaaaaaatcagaaacagactgcgtattgagtacacaaaatagctgacctttttattagaacgcggtaatatagaatcaaaaggaggggtttcagtatgaaaacaaataatgttgaaataataaaagctgattctttagttcgacgtagaggtgtc

SEQ ID NO: 24292 - DNA, 260 bp, Unknown
  Description of Unknown: LeftRegion for integrase C35 sequence
agcgctgccccggtcacgcttacgtcccaggcacccgccctctcctgggacgagctcaccacttgcgtggccgaggccagcgcgatcctctgggccgtcaaactgcgccgtgaggctcgcctggccgatcttgcagaagcgcagaccctcatagaggccacgcaggaagagcgcggccctagcccgaaaggtctagggctatgagaaaacccaacacaaagaagcctacgcgcttcgcctcttatcttcgctgctcgaca

SEQ ID NO: 24293 - DNA, 260 bp, Unknown
  Description of Unknown: LeftRegion for integrase C36 sequence
ccaaaagggcaagtacaaatgattatcagtcgagaatatatcggcacacagaccgttgcagaagcgtttgtcccgattatctccgaggatattcggaagaagattgccgagggcgacaccttcgacaatgaggggctgtccgcttagaatgtacgcaatggaacatgaaaacgttaggacagatatggaggttttacagtatggcaggaataagaacggagaacaagatttatgaagtcggcatttactgccgcttatca

SEQ ID NO: 24294 - DNA, 260 bp, Unknown
  Description of Unknown: LeftRegion for integrase C37 sequence
ttatcaggagggtaagttttggaacaatcagtagtaaaatatagtatgcaactttcaatgcttaattttttatattccagaaatatgttgactaaaaaggaatatgaaaaaattaaaaatagactgcgcattaagtacacaaattagctgaccttttgatttgaacgcggtaatatagaatcaaaaggaggaatttcagtatgaaaaaaaataatgttgaaataataaaagctgattctttagttcgtcgtagaggcgac

SEQ ID NO: 24295 - DNA, 260 bp, Unknown
  Description of Unknown: LeftRegion for integrase C38 sequence
tccgaacgaggtgtgcccatgccgcgaaccagaagcccgccggcggcgcgggactggacgatccggtcggtcttcgtccgtacacgcgacggctccgcccgtctcgcccgcgcctatcgccatctgctccagactgatcagcccgaaccgccaggggacggctccgacagtcccgattcgatcattgaaggaggagcgccatgcgcgccgccatctatgcccgtgtctccactgagcgccaggaacgccagcaaaccatc

SEQ ID NO: 24296 - DNA, 260 bp, Unknown
  Description of Unknown: LeftRegion for integrase C39 sequence
aactacctccccgacttcgggaggtcttaaatggatgagttagcaagattttatcgaagaaatgcttgaaaaatatggtaataaaatagatgaaaaaaaagaagcagaggacccaagtgaaaaattgagtattgaagaataaaagtatataatacttagagaacgtgaaattgtgtccaaacttttttaggaggaaacaaatgataaaaaagagagcgtatatctatacccgtgtttctacaggtatgcaagttgaaggt

SEQ ID NO: 24297 - DNA, 260 bp, Unknown
  Description of Unknown: LeftRegion for integrase C40 sequence
gccagcaagcgttagcgcggtagcttaataagtgtacagatagagagtgcttaaaatactggtgttaatactatgtcgagaaaaacttgacacatacggagaaaaataagagttgtaattgaataccaaaagtcatacaataggtatagcgaaccgaaattgctatacctatttttttatataaggagaggattgaatttatgattaataaagatagaaataccatgaaatggactgctggaatttatgcacgagtatct

SEQ ID NO: 24298 - DNA, 260 bp, Unknown
  Description of Unknown: LeftRegion for integrase C41 sequence
taccggctagcaaggatcggagcgccgaaaccggcgcagcagtaaggagaggggccctcggtgggagaccgccgggggcccttttcgctggtcatggctgaggttattagggtgcacaacttccggggaagttgcatcacctaatcggctcggctgataccctgtaggggtcctaacggccctaacccgagggtaggcgagtgagcgagattgtgtggtccggcaccgatgaccggtccggcgagatcaaatacgttgac

SEQ ID NO: 24299 - DNA, 260 bp, Unknown
  Description of Unknown: LeftRegion for integrase C42 sequence
cgacggcgagcaagacagctcagcggctccggttggccccgtccgtgctggtctagcgggcggggctttttcatgtcttcccgcaggtcagaggggaggttattgtgttgttcaacctccggggtggttgtcacacctaatcggctcacttagccaacccacctcgggggtcctagacgacctagacccgaggtgtacgcgtgagcgagatcgtatggaccggcacatctgacgatgcgtcagagatcaagtacgttgac

SEQ ID NO: 24300 - DNA, 260 bp, Unknown
  Description of Unknown: LeftRegion for integrase C43 sequence
aaaaaaatcgcccgtctttaaaagtccagggcttataataattcacaatacatatgcctaaatctaaaactagatagatcaacattcaaagaatacaaatctttcaaattattttgttgttttcgtattcaatgttagatagaatgtttttacagatacttctgttttgacattaaacacaataaagaggtgctaaatttttggagttaaaaaacattgtcaattcttacaacatcacaaatattttaggttatcttaga

SEQ ID NO: 24301 - DNA, 260 bp, Unknown
  Description of Unknown: LeftRegion for integrase C44 sequence
gcagtgctggatgaccgcagccgtgtgctggtgccgagcccgacccgctacacgcgctaccagcgaaacatcctgatcaagcagcttgacgagcaagggaaagcgccgcgcgaaatcgtcggcgagatcaagcggctgttgggtgagcagatcaacgagaaccacgtgcagcggctgctgcacaagcttagggtttgaccatggaaccgaccgccgtcatctatgcccgcgtcagcgatcgcaaacaggccgagaacgag

SEQ ID NO: 24302 - DNA, 260 bp, Unknown
  Description of Unknown: LeftRegion for integrase C45 sequence
cgtcgcgccgtggctggtcgccgcaattcgcaccgcagcccacgacgccgcatatctcacctaccacgccgaccgcgagtacgaccgcaccgttcgcaccgcgccgacccccgaccgccggacccggtaacacaggcccgcgccccaagccccgagcatcctgcccggggctgatctgtaccccgagagaagggaaacccgtgctcccacgccctcgaccacccgcagacgacgcccccgcctacatcggctacatcaga

SEQ ID NO: 24303 - DNA, 260 bp, Unknown
  Description of Unknown: LeftRegion for integrase C46 sequence
cgtcgcgccgtggctggtcgccgcaattcgcaccgcagcccacgacgccgcatatctcacctaccacgccgaccgcgagtacgaccgcaccgttcgcaccgcgccgacccccgaccgccggacccggtaacacaggcccgcgccccaagccccgagcatcctgcccggggctgatctgtaccccgagagaagggaaacccgtgctcccacgccctcgaccgcccgcagacgacgcccccgcctacatcggctacatcaga

SEQ ID NO: 24304 - DNA, 260 bp, Unknown
  Description of Unknown: LeftRegion for integrase C47 sequence
aatgaagcgagagttcgttagatttgtaaacgaacaaaaaggatttacgtacttaaccattaaaaagaagtagctttttctgcctttatagttaatttgttaaagttgtgttatattagaactaacaactatcaaaaatctaacagtaagtgatagtaattctgatataatacagctttttctctataaaggaggctactatgaagatcggcgctatctatgcgagagcatctacagataaacaaggtgatacagtagaa

SEQ ID NO: 24305 - DNA, 260 bp, Unknown
  Description of Unknown: LeftRegion for integrase C48 sequence
taaaagagcatttttccgaaaagggcaaaacaatggaagaacttctaactgatgtcatgctggaaaaagcaaagcagacaatcgcataaaatcggtgcagttgtaagaaatagattgaatgacaaaaagtacccgtgttatactttacttgcaagcaggtattgtaaacacgggttagttataaaggaggataactgacaatgaaacaacagatttacaatactgcactttatcttaggttaagccgagatgatgaatta

SEQ ID NO: 24306 - DNA, 260 bp, Unknown
  Description of Unknown: LeftRegion for integrase C49 sequence
ggtagtgcgcgccggtggggagtcgcggtgactccccaccggcgcggagtgtggatcagtactcggcgatgaagaccggccagtgggggccggggcgggtggtccagcggaggatcggccgccagtaggtggtggtccggtagccgaggttctgtaaacgcacctacctctcgatgagagctaggaaggcggtggctgagatgagccacgatcagcaggaacgaaccgcaggcaatgagccgaacgaccaggcgacggcg

SEQ ID NO: 24307 - DNA, 260 bp, Unknown
  Description of Unknown: LeftRegion for integrase C50 sequence
cagctctctctcgagttcgcagcgcgcatgagaagccgactggctgccgaacttcttcctgtacacagcctcacttctgaatttgaagccgcaaaatcagtcatggtcggcgaccacgtaaccttgcgctgacgctcgaatctatttccatgcatcataattgaactgtgcagggaaatatcaaaatgtaagaactcatcatggaggatcttatggtcgcgtccgtctttccaggcgctgcactttatatgcgagcatca

SEQ ID NO: 24308 - DNA, 260 bp, Unknown
  Description of Unknown: LeftRegion for integrase C51 sequence
ctctcgctggtcctcgggcagggccaagaccgactcggccaggcgctccagggtctgcccgttcacgggtgttcccgcaggtcagagctctgccggacagtgagcgggagcatcttcccgccagtcggtgccagttgtggccatgtgtccatctgggggcagatggatgcaaggtcacatccagtggtaggttcctcaccatgagcaaccgactacatgagtacgacgtcgaggcggagtggagtccagccgacctcgcc

SEQ ID NO: 24309 - DNA, 260 bp, Unknown
  Description of Unknown: LeftRegion for integrase C52 sequence
cctcacgctccacctcggacgccgactccagcaccttggccagatgctccagcactcccccgctcatcgacgttcccgcaggtcaggggcctgtcggaccgcgagcgggagcatcttcccgccaggtggtgccagttgtggccatgtgtccatctgggggcagatggcaacggggtcacatccacgctacgctgctcaccatgagtgatcgagcagctacctacgacatcgaggcggagtggagtccagccgacctcgcc

SEQ ID NO: 24310 - DNA, 260 bp, Unknown
  Description of Unknown: LeftRegion for integrase C53 sequence
gcaccaagcacgtctacaagtgtgtccgtcactgcggcggaggccgcggcaaggtcgagaccaccgatccgtggtgatctaacctcgcataccaagaaaccccctacccggcccgcgaaggctaggtagggggctttttcgcgttcaggggacctgatcgctcagcgacccatctccgatgggatcgcgtttgcgtttcagtgggtgtggccgtgatgacctgtgtcttcgtggtttgtctggtcaaccaccgcggtctc

SEQ ID NO: 24311 - DNA, 260 bp, Unknown
  Description of Unknown: LeftRegion for integrase C54 sequence
gaaccccgtgttcaacgacgacggctcgtacaagaccgttcacaaaaacggcaaagaccacaaggtctacaagtgcgttcggcactgcggcggaggccgcggcaagaccgagaccaccgatccgtggtgatctaaccccgcataccaagaaaccccctacccggcccgcgaaggctaggtagggggctttttgtgtttcagtgggtatggccgtgatgacctgtgtcttcgtggtttgtctggtcaaccaccgcggtctc

SEQ ID NO: 24312 - DNA, 260 bp, Unknown
  Description of Unknown: LeftRegion for integrase C55 sequence
cggcaagctgaagaccgtgtacggctgcgaggtccgctgcggcggcggtcgccacgccaaagaggtcaccgaaacctactgacctcgcataccaagaaaccccctacctagccttcgcgggccgggtagggggctttctcgcgttcaggggacctgatcgctcagcgacccatctccgatgggatcgcgtttgtgtttcagtgggtatggccgtgatgacctgtgtcttcgtggtttgtctggtcaaccaccgcggtctc

SEQ ID NO: 24313 - DNA, 260 bp, Unknown
  Description of Unknown: LeftRegion for integrase C56 sequence
gcaatccgcaccaccgcttacgatgccgcctacctcgcctaccttgccgaccgcgaacacaaccgcgccgccgccgcgacgacaccgcccgcacttgtccgcagcataggccgccgtgcccggtagaccgggtccgctactaccaggccccggccgcaccaccgcgccggggccatgccatacccacagaaagggcagaagtgatatctgagccagagccgtacatcggctacatacgcgtcagcatgtggcgcgaggaa

SEQ ID NO: 24314 - DNA, 260 bp, Unknown
  Description of Unknown: LeftRegion for integrase C57 sequence
tgactggacctacgccaagcacgccgacggctcgtacaagatggacggcaccaagcacgtctacaagtgtgtccgtcactgcggcggaggccgcggcaagaccgagaccactgatccgtggtgatctaaccccgcataccaagaaaccccctacctagccttcgcgggccgggtagggggctttttgcgtttcagtgggtgtggccgtgatgacctgtgtcttcgtggtttgtctggtcaaccaccgcggtctcagtggt

SEQ ID NO: 24315 - DNA, 260 bp, Unknown
  Description of Unknown: LeftRegion for integrase C58 sequence
taaatgatctgcggacgcttgcaacgttttacggtgtcggcttggattatttcggcgtaactcccccggatgaaataacggaactaatagcacgcgcacgcaaattatttaataatcctgatctaagcgaaacacaaaaagatttattatataaagatttatcaaaactatatttcaaaataaaataaagggtgtaaaacatgaaaaacaataataaaaatattcgcgccgctgtttatgtgcgcttttcttcacaacgt

SEQ ID NO: 24316 - DNA, 260 bp, Unknown; identical to SEQ ID NO: 24315
  Description of Unknown: LeftRegion for integrase C59 sequence

SEQ ID NO: 24317 - DNA, 260 bp, Unknown
  Description of Unknown: LeftRegion for integrase C60 sequence
gattatcgatgaggatatgtttagacaagtgcaacaaataaggcatgagaatgctatcaggaatcatcgttataaagagcctaagccaataaaggaaattcggcttattacaagctaccagttagaaaaggtagaaaagaaatacgatgatccttatcggcaagcagtatacgcgtacagtcaaatcaaggaggtgtaaaatgaatgccaacgttacaattattccaccaagaaaaatagcggggaatacggtagataag

SEQ ID NO: 24318 - DNA, 190 bp, Unknown
  Description of Unknown: LeftRegion for integrase C61 sequence
acaccacgcagtcaataaaaaatgacatacctactgtgttttttaaaataagtatggaaactcctgataaaaagtggtattctctagttagttaaatatagcaccatgtacggagaaagggaatacgccgatgattaagaatcttgagaacatacaacatgtagctatataccttaggattagtcaggag

SEQ ID NO: 24319 - DNA, 260 bp, Unknown
  Description of Unknown: LeftRegion for integrase C62 sequence
cacccgcagggtgcgaataagccttgccgccccacagggcggtgcgcggtgatatcaccgcgcctatcctgccacaacacgacaggtgaaaaaccgacaaagatcgacagactttgacaaacatcgacaaacttcgacaaaggtgcacagacgcacggcctagttgcctgaggggccttcagcagtcataagggcgggccatgaccatgatccgcccccttcgcattgccatttacgcccgctattccagcgatttgcag

SEQ ID NO: 24320 - DNA, 260 bp, Unknown
  Description of Unknown: LeftRegion for integrase C63 sequence
gacctacgccaagcacgccgacggctcgtacaagatggacggcaccaagcacgtctacaagtgccagcgccactgcggcggaggccgcggcaagaccgagaccaccgatccgtggtgatctaaccccgcataccaagaaaccccctacccggcccgcgaaggctaggtagggggctttttgtgtttcagtgggtgtggccgtgatgacctgtgtcttcgtggtttgtctggtcaaccaccgcggtttcagtggtgtacgg

SEQ ID NO: 24321 - DNA, 260 bp, Unknown
  Description of Unknown: LeftRegion for integrase C64 sequence
gacctacgccaagcacgccgacggctcgtacaagatggacggcaccaagcacgtctacaagtgccagcgccactgcggcggaggccgcggcaagaccgagaccaccgatccgtggtgatctaaccccgcataccaagaaaccccctacccggcccgcgaaggctaggtagggggctttttgtgtttcagtgggtgtggccgtgatgacctgtgtcttcgtggtttgtctggtcaaccaccgcggtctcagtggtgtacgg

SEQ ID NO: 24322 - DNA, 260 bp, Unknown
  Description of Unknown: LeftRegion for integrase C65 sequence
ctacgccaagcacgccgacggctcgtacaagatggacggcaccaagcacgtctacaagtgtgtccgtcactgcggcggaggccgcggcaagaccgagaccactgatccgtggtgatctaaccccgcataccaagaaaccccctacctagccttcgcgggccgggtagggggctttttgcgtttcagtgggtgtggccgtgatgacctgtgtcttcgtggtttgtctggtcaaccaccgcggtctcagtggtgtacggtac

SEQ ID NO: 24323 - DNA, 260 bp, Unknown
  Description of Unknown: LeftRegion for integrase C66 sequence
tacgccaagcacgccgacggctcgtacaagatggacggcaccaagcacgtctacaagtgccagcgccactgcggcggaggccgcggcaagaccgagaccaccgatccgtggtgatctaaaccccgcataccaagaaaccccctacccggcccgcgaaggctaggtagggggcttttcttgtttcagtgggtgtggccgtgatgacctgtgtcttcgtggtttgtctggtcaaccaccgcggtctcagtggtgtacggtac

SEQ ID NO: 24324 - DNA, 260 bp, Unknown
  Description of Unknown: LeftRegion for integrase C67 sequence
ggattttcgttttgaaatagccgaaaaacttaccgtttcactctttgaaaaagggcttatcagcgagcaagaaaaagaaaaaataagccgtcttaacagggaaaaatttcacccgttttacaaggaattattgggttaaaagcttgataaacactgcttttagagtgatgaatagtattagctgaaagtgagggggaatagtgaaagagataataaaaatagactctacaatacgaaaaactggttttgagaaaaagacg

SEQ ID NO: 24325 - DNA, 260 bp, Unknown
  Description of Unknown: LeftRegion for integrase C68 sequence
tgataaagagatatttgataaagctgaagaagttagagataaacgtgcaaaggatttaggacgagtggtagagcttgccgctttcacctctccccctcccaaagaacgattcaaaatgaaaaaggcagataataagatgccagtggatccttttgaacgagcagaatacttatacagtctgatagaaagcgaggaataaagtgacagagaaaaatataatggttattcctgctcgtaaaagagtaggaagtacagccgca

SEQ ID NO: 24326 - DNA, 260 bp, Unknown
  Description of Unknown: LeftRegion for integrase C69 sequence
tgacaaagaagtctttgaacaggcggaaattgaaaggcaaaaaagagccaggaagctaggcagaatttatggaagtaaagagcaagaaaagccagagcaagagtttgattttactataggttctatagatgaagattatgaagacccttttgctcaagctgaatatgtttatggcttaataagaagaaaggagtgttcaaatgatacctaataggaatgtagttattattccggcaatgaagcgagctggtaataacggt

SEQ ID NO: 24327 - DNA, 260 bp, Unknown
  Description of Unknown: LeftRegion for integrase C70 sequence
ctacgccaagcacgccgacggctcgtacaagatggacggtaccaagcacgtctacaagtgccagcgccactgcggcggcggccgcggcaaggtcgagaccaccgatccgtggtgatctaaccccgcataccaagaaaccccctacctagccttcgcgggccgggtagggggctttttgtgtttcagtgggtgtggccgtgatgacctgtgtcttcgtggtttgtctggtcaaccaccgcggtctcagtggtgtacggtac

SEQ ID NO: 24328 - DNA, 260 bp, Unknown
  Description of Unknown: LeftRegion for integrase C71 sequence
tgcaggacaagagatgccaaaggtgttgaggcttgtctaggacgtactattacagaagaacaactttttcaagcttttggcgagaccttaaaggcagaagatattcaccatatttcttttaatagcgtgaccaatgaagctaaagctacctatagaaatggagaagaaaaacacatcatcattcagaaaggacggtagacatgaaaaaagtcatcacgatagaaccagctaaacaagtaagccataaggttgacctgccg

SEQ ID NO: 24329 - DNA, 260 bp, Unknown
  Description of Unknown: LeftRegion for integrase C72 sequence
gcatcatcatgtccatgtaggacgctaggagaaaagcgacttttggcctcgtttaaaagcaagttaggtattgttccatataaagagtgggttgaaaataatattaaacacatcgagtatgactttggtcatcgtatcatcagggttacaccagtaaaaggaaggaaatataccatagaaattagagaggggcgatattagtgaagaaagtaattactattgaggctacaccaactattattaggtcaagttcagatgat

SEQ ID NO: 24330 - DNA, 260 bp, Unknown
  Description of Unknown: LeftRegion for integrase C73 sequence
gcctcatcatgtccatgtaggacactaggagaaaagcgacttttggcatcgtttaaaagcaagttatgcattgtcccagataaagagtgggttgaaaataatattaaacacatcgagtatgactttggtcaacgtatcatctgggttataccagtaaaaggaaggaaatatcctatagaaattagagaggggcgatattagtgaagaaagtaattactattgaggctacaccaagtattattaggtcaagttcagatgat

SEQ ID NO: 24331 - DNA, 260 bp, Unknown
  Description of Unknown: LeftRegion for integrase C74 sequence
gggtttcccatgagttgaaagccatggtttccaaagcgcaaaggaaacgggcatacccgctgatctcaacggccgatatagttgcgcacggatggatgcggccgacggctcgcattcgaagcaaactcgacatgttttcctaaccaaatcgcaggcggtacaggctcctattatcaggtctgagtaccatggcccgcgcgatggacaaagcaaccacaccccccgagtttgaaaggcgaagggctcgcgctgctcaatac

SEQ ID NO: 24332 - DNA, 260 bp, Unknown
  Description of Unknown: LeftRegion for integrase C75 sequence
agttgaaagccatggtttccaaagcgcaaaggagactggcatacccgctgatctcaacggccgatatagttgcgcacggatatatatatatctggatgcggccgacggctcgcattcgaagcaaactcgacatgttttcctaaccaaatcgcaggctgtacaggcccctattatcaggtctgagtaccatggcccgcgcgatggacagagcaaccacaccccccgaatttgaaaggcgaagggctcgcgctgctcaatac

SEQ ID NO: 24333 - DNA, 260 bp, Unknown
  Description of Unknown: LeftRegion for integrase C76 sequence
ggcggggggtttttacgtcgagcgaggtcagcctggcatatgcgtcaagctatgtccacaatgtctaaagatagggaactcgatgtttagactttgtgaaagtgctgtcttcatgcagaactgtaacacgttctagtcggacctccctggcttcggcgagcctattttgcgggaatgcgaacgtccgatatgctcctgacatgcgagttctcggaagaatcaggctctcaagggctacagacgaaagtaccagcgtcgag

SEQ ID NO: 24334 - DNA, 260 bp, Unknown
  Description of Unknown: LeftRegion for integrase C77 sequence
gacggttccggctgttgccattgggacggcagatagaatcctcatgcaccgctcctatcggtgtgaagtggcccctcgtctgttagcgcaggcggggggttttcaagttggaccgtaccacggcgaggctcctacctggcaagatagtttcccaagtggctcagagtactggtatagtgatcgttatgggaattacgaagttgcaggtcagagcactggtcggtgctcgcgtgtctcacgtccaaggcgaggaaaagaca

SEQ ID NO: 24335 - DNA, 260 bp, Unknown
  Description of Unknown: LeftRegion for integrase C78 sequence
agatcggctagagaagggaaaaagaataagtagcgataaattaccagtagaagggacagaattaatactagagagaggggaagagacgcatgcggtaatggtaacagataagggtttaatctacaaagaagagttttatacgtcattgtcagcagtagcagggaaaataatgggaatgagttacaacggaccgttattgtttggaatgcgtgataaaaatgggagctgaagaggagaaaatgctaaaagaagtaaggtgt

SEQ ID NO: 24336 - DNA, 260 bp, Unknown
  Description of Unknown: LeftRegion for integrase C79 sequence
gcacgagttcgacatgtgaaatcaggccccctgggttcggcttcggccggcctggggggtcttttttttgtgcccaacaaatacatagctttcctatgtatatgggaaggctctgcccggaggctacgatcacgatgtgcgggcaggggtgtgttctcatcgtgttgggactttccagcaggttccgatacacttacaaaatgagttcagcgccaagagccctggtcggggcacgagtctcggtagtccaagggcctcag

SEQ ID NO: 24337 - DNA, 260 bp, Unknown
  Description of Unknown: LeftRegion for integrase C80 sequence
gttgcgccggcgcgtggagcgcgggcaaatggagctgatgcagaaatgatccaacccacacctataacccctggggttattcgctctgacgaacacgccggcgtgctcacgcctgacggcgcccgcctggccgaggtcctcgcacgcattgcgcgccggctcacgtcggataatcggccggcagaagtgagcagatcaaaatgacggccgccgcgatctatgtccgggtgtccagtgagatgcagctcgacgggcactcc

SEQ ID NO: 24338 - DNA, 260 bp, Unknown
  Description of Unknown: LeftRegion for integrase C81 sequence
agagccgccgtcacgaagccccgctcgcgtagcaggtggatgccctcgggccagggggtgcgagtccacggcacctggaagacggtgcccatcgagacgcggatcgagcgccggtagagagggtctgcgcaacgaggcgtgaccaggacggcgtccactcccagggctgcggcactacggaagccagccccgaggttcgtgtgatcgactacgtcctcgaagacggcgatacgcccctgacctgcgcttctctgtgtacc

SEQ ID NO: 24339 - DNA, 260 bp, Unknown
  Description of Unknown: LeftRegion for integrase C82 sequence
atccacgcctgcgacaccccgttggccgctgacagctcactcagcgccgtgaacgacaacgcgaaggccaggctgccgaccgcgaccgttccggccgtcgctaccttgacgggcgatagtatttgcactggtgagaggtcctttctcatcgacttccaaagtgtttgtttctgccagcagaacccggtacattggaaactatggcacaaccactaagagccctggttggggcgcgagtcagtgtagtccaaggcccgcag

SEQ ID NO: 24340 - DNA, 260 bp, Unknown
  Description of Unknown: LeftRegion for integrase C83 sequence
atccatgcctgcgacacgccgttggccgctgacagctcactcagcgccgtgaacgacaacgcgaaggccaagccgccgaccgcgaccgttccggccgtcgccactctgactggggatagcatttgcactggtgaggggtcctttctgatcgacttcaaatgtgttggattctgccagcagaacctgtaacattggaaactatgccacaaccgctaagagccctggtcggggcccgagtcagtgtagtccaaggaccgcaa

SEQ ID NO: 24341 - DNA, 260 bp, Unknown
  Description of Unknown: LeftRegion for integrase C84 sequence
ggactttcgcgccgtcggcgtcggtgatggtgacgggctccccgatcgcgacctcgatcgctccgcgcgagttcgtcggcaccgacgaggatgatgcatcggtcgagatggggctcgtggcggcggggtcgtcgccgctgccgcacccggcaacgaggacgatcgcggctgccgtgcagagggctgggaggtagcgtgtcatgtttccgcagcgtattcgacgtgcgcctcggagacagggctacgcgcgtgatccgtgg

SEQ ID NO: 24342 - DNA, 260 bp, Unknown; identical to SEQ ID NO: 18339
  Description of Unknown: LeftRegion for integrase C85 sequence

SEQ ID NO: 24343 - DNA, 260 bp, Unknown
  Description of Unknown: LeftRegion for integrase C86 sequence
agggggaccatccacgcctgcgacactccgttgtccgctgagagctcactgagcgccgtgaacgacaacgcgaaggccaagccgccgaccgcgaccgttccggccgtcgccactctgactggggatagcatctgcactggtgaggggtcctttctcatcgacttccaatgtgttggattctgccagcagttcctgtaacattggaaactatgccacaaccgctaagagccctggtcggggcccgagtcagtgtagtccaa

SEQ ID NO: 24344 - DNA, 260 bp, Unknown
  Description of Unknown: LeftRegion for integrase C87 sequence
ccgctgcggcggaggccgcggcaagaccgagaccaccgatccgtggtgatctaaccccgcataccaagaaaccccctacccggcccgcgaaggctaggtagggggctttttgtgtttcagtgggtgtggccgtgatgacctgtgtcttcgtggtttgtctggtcaaccaccgcggtctccgtggtgtacggtacaaacccatgagagccctggtagtgatccgactgtcccgcgtcaccgatgctacgacctccccggag

SEQ ID NO: 24345 - DNA, 260 bp, Unknown
  Description of Unknown: LeftRegion for integrase C88 sequence
atccacgcctgcgacactccgttgtccgctgagagctcactgagcgccgtgaacgacaacgcgaaggccaagccgccgaccgcgaccgttccggccgtcgccactctgactggggatagcatctgcactggtaggaggtcctttcccgttgacttacaatgtgttggattctgccagcagttcctgtaacattggaaactatgccacaaccgctaagagccctggtcggggcccgagtcagtgtagtccaaggaccgcag

SEQ ID NO: 24346 - DNA, 260 bp, Unknown
  Description of Unknown: LeftRegion for integrase C89 sequence
atccacgcctgcgacactccgttgtccgctgagagctcactgagcgccgtgaacgacaacgcgaaggccaagccgccgaccgcgaccgttccggccgtcgccactctgactggggatagcatctgcactggtgaggggtcctttctcatcgacttccaatgtgttggattctgccagcagttcctgtaacattggaaactatgccacaaccgctaagagccctggtcggggcccgagtcagtgtagtccaaggaccgcag

SEQ ID NO: 24347 - DNA, 260 bp, Unknown
  Description of Unknown: LeftRegion for integrase C90 sequence
ctacgacgagttcaacgcccggcccgccctcgtggcctaggcatgttctacgtcagcttcaggaccgcctccggccgcttcgtgcggaaggagttcgcgacccggcgcgatcaacggcgctggatactccgggctccggccgccttcacgataacctcatacaactagcaagagccctcggatatccgggggctcttttagtgtcaataggtgaactacggcggtccggacttgacctattgcgctatcctcgtcacatg

SEQ ID NO: 24348 - DNA, 260 bp, Unknown
  Description of Unknown: LeftRegion for integrase C91 sequence
ccactgcggcggcggccgcggcaagaccgagaccaccgatccgtggtgatctaacccctcataccaagaaaccccctacccggcccgcgaaggctaggtagggggctttttgtgtttcagtgggtatggccgtgatgacctgtgtcttcgtggtttgtctggtcaaccaccgcggtctcagtggtgtacggtacaaacccatgagagccctggtagtgatccgcctgtcccgcgtcaccgatgctacgacttcaccggag

SEQ ID NO: 24349 - DNA, 260 bp, Unknown
  Description of Unknown: LeftRegion for integrase C92 sequence
ccactgcggcggaggccgcggcaagaccgagaccaccgatccgtggcgatctaaccccgcataccaagaaaccccctacccggcccgcgaaggctaggtagggggctttttgtgtttcagtgggtgtggccgtgatgacctgtgtcttcgcggtttgtctggtcaaccaccgcggtctcagtggtgtacggtacaaacccatgagagccctggtagtcatccgcctgtcccgcgtcaccgatgctacgacttcacccgag

SEQ ID NO: 24350 - DNA, 260 bp, Unknown
  Description of Unknown: LeftRegion for integrase C93 sequence
gcactgcggcggaggccgcggcaagaccgagaccaccgatccgtggtgatctaaccccgcataccaagaaaccccctacccggcccgcgaaggctaggtagggggcttttcttgtttcagtgggtatggccgtgatgacctgtgtcttcgtggtttgtctggtcaaccaccgcggtctcagtggtgtacggtacaaacccatgagagccctggtggtcatccgactgtcccgcgtcaccgatgctacgacttcacccgag

SEQ ID NO: 24351 - DNA, 260 bp, Unknown
  Description of Unknown: LeftRegion for integrase C94 sequence
gaggtccgctgcggcggaggccgcgcccacaaagaggtcaccgaaacctactgacctcgcataccaagaaaccccctacctagccttcgcgggccgggtagggggctttttgtgtttcagtgggtgtggccgtgatgacctgtgtcttcgtggtttgtctggtcaaccaccgcggtctcagtggtgtacggtacaaacccatgagagccctggtagtgatccgactgtcccgcgtcaccgatgctacgacttcaccggag

SEQ ID NO: 24352 - DNA, 260 bp, Unknown
  Description of Unknown: LeftRegion for integrase C95 sequence
ccactgcggtggaggccgcggcaagaccgagaccaccgatccgtggtgatctaaccccgcataccaagaaaccccctacccggcccgcgaaggctaggtagggggcttttcttgtttcagtgggtatggccgtgatgacctgtgtcttcgtggtttgtctggtcaaccaccgcggtctcagtggtgtacggtacaaacccgtgagagccttggtagtcatccgcctgtcccgcgtcaccgatgctacgacttcgccggag

SEQ ID NO: 24353 - DNA, 260 bp, Unknown
  Description of Unknown: LeftRegion for integrase C96 sequence
tccgaccgcgactgttcctgctgtggcaaagctgaccggggatagaatcttcattgcacgggcctcttccgtgtagtagccctctgccagtcctgcgcctaaacagctggtagggggctcttttcgttgttgtggagcgatacggtacaccatctcaagtgtgtttgcttcgggcaaccgagcagcgtacatttgaaatcatgacccaaacactccgcgccctggtaggcgcacgtgtcagcgtagtccaaggtccgcag

SEQ ID NO: 24354 - DNA, 260 bp, Unknown
  Description of Unknown: LeftRegion for integrase C97 sequence
ccaagaacaagcgagccaagaagaaccgcaccccgcagggcgtgtacgagtgtcggtgcggtggcttccacctgtccgatgctcggcgtgtagtcgtcctcgggggctaagaagagggaggccgggtgcagacgaggggctgcatccggcctccccttttttatatccagatacatagtttttctaactaactagtttgagtgccctttaatcacaaggagttatatcgtagaatgacacccatgacagcaaccctcgaa

SEQ ID NO: 24355 - DNA, 260 bp, Unknown
  Description of Unknown: LeftRegion for integrase C98 sequence
accccgcataccaagaaaccccctacccggcccgcgaaggctaggtagggggctttttcgcgttcagggggtctgatcgctcagcgacccatctccgatgggatcgcgtttgtgcttcagtgggtgtggccgtgatgacctgtgtcttcgtggtttgtctggtcaaccaccgcggtctcagtggtgtacggtacaaacccatgagagccctggtagtgatccgcttgtcccgcgtcaccgatgctacgacttcaccggag

SEQ ID NO: 24356 - DNA, 260 bp, Unknown
  Description of Unknown: LeftRegion for integrase C99 sequence
cctcgcataccaagaaaccccctacctagccttcgcgggccgggtagggggctttttcgcgtttcagggggcctgatcgctcagcgacccatctccgatgggatcgcgtttgtgtttcagtgggtgtggccgtgatgacctgtgtcttcgtggtttgtctggtcaaccaccgcggtctcagtggtgtacggtacaaacccatgagagccctggtagccatccgactgtcccgcgtcaccgatgctacgacttcaccggag

SEQ ID NO: 24357 - DNA, 260 bp, Unknown
  Description of Unknown: LeftRegion for integrase C100 sequence
ggaggccgcgcccacaaagaggtcaccgaaacctactgacctcgcataccaagaaaccccctacctagccttcgcgggccgggtagggggctttttgcgtttcagtgggtgtggccgtgatgacctgtgtcttcgtggtttgtctggtcaaccaccgcggtctcagtggtgtacggtacaaacccatgagagccctggtagtgatccgactgtcccgcgtcaccgatgctacgacttcaccggagcgccagctggagtct

SEQ ID NO: 24358 - DNA, 260 bp, Unknown
  Description of Unknown: LeftRegion for integrase C101 sequence
ggccgcggcaagaccgagaccaccgacccgtggtgatctaacccgcataccaagaaaccccctacccggcccgcgaaggctaggtagggggctttttgtgtttcagtgggtatggccgcgatgacctgtgtcttcgtggtttgtctggtcaaccaccgcggtctcagtggtgtacggtacaaaccatgcgagccctggtagtgatccgcctgtcccgcgtcaccgatgctacgacttcgccggagcgtcagctggagtct

SEQ ID NO: 24359 - DNA, 260 bp, Unknown
  Description of Unknown: LeftRegion for integrase C102 sequence
gcggtgtccgcggagtcgggcccacccccatatctccctcagcatggagcacaacgtactccaccgccccctccggggaacccgttttgggctccgcggagggggtgttctgcgtttcagtgggtatggccgtgatgacctgtgtcttcgtggtttgtctggtcaaccaccgcggtctcagtggtgtacggtacaaacccatgcgcgctttggtagtgatccgcttgtcccgcgtcaccgatgctacgacttcaccggag

SEQ ID NO: 24360 - DNA, 260 bp, Unknown
  Description of Unknown: LeftRegion for integrase C103 sequence
ccagggatgatttacgggcagacgtgttcgactatatcgaaaggttctacaatccacgccggcgtcattccactctcgggtatatcagcccggtacagtttgaaaacctaaaatgcgcctaacggaagtgtccgtgacgatgggggaaggccacttcttactctacaggtctcgccggtagctcaacaaggagcgcacgcgtgtcatcaagccagccaattcaggccgcaatttatgtgcggatgtcaaccgagagccaa

SEQ ID NO: 24361 - DNA, 260 bp, Unknown
  Description of Unknown: LeftRegion for integrase C104 sequence
acacacatgagcttattgattacttcctgattccggcagtgaaactcgcgaacggtccgctctatttgaaagagtcgaaccttgagcgcctcgccgaattacgatacctgtccctggcgtcaatgttcggcccgtaagccagttcgacgcacagcctgaagcgcaacataccgacatcagcattagtgaggagttccgccatggcccggcttgtttcccgtggcgccgcactgtacgtgcgagcgtcgactgagcatcag

SEQ ID NO: 24362 - DNA, 260 bp, Unknown
  Description of Unknown: LeftRegion for integrase C105 sequence
gccctggcacagcgcgccgtggccgatcatctcacccccaaaccagcatcagaacaggctgagtccgcacagcgaccgaatcaccccgcattgccagaccggcagcgggcggcataacttcggctatgagagtcgccgcctacgccagatattcgtccgatcaacaacgtgcagcatcgctggatgatcagctgcgcaacgtgcggcactggtgccagcgcaacggcgtgcccgagcccgtcgcctacaccgacgccgcc

SEQ ID NO: 24363 - DNA, 260 bp, Unknown
  Description of Unknown: LeftRegion for integrase C106 sequence
agtccagcccagccacgtctcaatcgagatggggctacttgtgctggcctgacacggtgaggggctaggtccgtgggtcgcattgggacaagcccgcagggctagggggacaaagcgagggccaagagtctagtcgcccgaagggcgtccttacggtcaggggagcccccgtcaggggccaatctccaggagccgttccgatgccaacgtacgatagatccatgcgcgtgataggccgactgagaatctcccgacaaacc

SEQ ID NO: 24364 - DNA, 260 bp, Unknown
  Description of Unknown: LeftRegion for integrase C107 sequence
cctatgacagaggaagagaaagccaacgtggccttaattcttcaacaacacttatcgaaagaataaaaccaactgtttccaaaatggaaataattgcaaacaaaaaaaagccccacgctctcaaaactttggcgagtctgagcgtgaggcatgtgacaggaaaagattttcatggagataacctctcatgatgtcttttcttgtacccattttatcattttttaggaaattttgaaagaggtactactatgataacaaca

SEQ ID NO: 24365 - DNA, 260 bp, Unknown
  Description of Unknown: LeftRegion for integrase C108 sequence
aaagtttaggtttggattttagatccataacatgatggtagccgtatttgatacggctacttttctttttatctagcaactgtttccattttggaaataactcaaaaaagccccacgctctcggtcggcaaacttctgagcgtgaggctagcaattacaagaaaaacttttcaaaagatattaccttttgagatgttttcttgtacccattttatcattttttaggaaattttgaaagaggtactactatgataacaaca

SEQ ID NO: 24366 - DNA, 260 bp, Unknown
  Description of Unknown: LeftRegion for integrase C109 sequence
tcctatgacagaggaagagaaagccaacgtggccttaattcttcaacaacacttatcgaaagaataaaaccaactgtttccaaaatggaaataattgcaaacaaaaaaagccccacgctctcaaaactttggcgagtctgagcgtgaggcatgtgacaggaaaagattttcatggagataacctctcatgatgtcttttcttgtacccattttatcattttttaggaaattttgaaagaggtactactatgataacaaca

SEQ ID NO: 24367 - DNA, 260 bp, Unknown
  Description of Unknown: LeftRegion for integrase C110 sequence
ttcgagatggggctacttgtgctggcacgacacggtgagtggctaggtccgtgggtcgcattgggacaaagcccgcagggctagggggacaaggcgagggccacaggtctagccgcccgtagggcgtccttacggtcaggggagcccccgtcaggggtcagtctccaggagccgtttcaacgccaacgtacgatagatccatgcgcgtgataggccgactaagaatctcccgtcagtccgaggagtctacgtcgatcgac

SEQ ID NO: 24368 - DNA, 260 bp, Unknown
  Description of Unknown: LeftRegion for integrase C111 sequence
tacgacggcgagccggagctcgcgcccctcgattgcttcggtactcccaacgccggagccgtcattcagcaggagcgaaacgcggacggcaaatgggaggcgatcaactagccgaaaccctcgggaaaccgggggttttttcatgccctcgttagctcaaaccgacggtaggggttctcgtagcgtcggtttgagctattatggtccgcatgaagccccgcgccgttctctaccttcgcctctcggccgtcgtcgacgac

SEQ ID NO: 24369 - DNA, 260 bp, Unknown
  Description of Unknown: LeftRegion for integrase C112 sequence
ggagaaggacgcggacggcaaatgggccgcgataaactgatccgctgagaggcccggagaggccctagaaaaacctctctgggccaatcaccctaccgaatatcgaaacttacgcgagagcccctgggacgcctgtcctgggggcttttctgtagctcaaagagacgctacgacttctcgtaccgtcggtttgagctatcatggctcccatgaaacctcgcgccgttctctacctccgcctctcggccgtcgtcgacgac

SEQ ID NO: 24370 - DNA, 260 bp, Unknown
  Description of Unknown: LeftRegion for integrase C113 sequence
aggagtttagctccataaagtttacatttggattttagatccataacgtgatggtagccgtatttgatacggctacttttctttttatctagcaactgtttccattttggaaacaactcaaaaaagccccacgctcagaagtttggcgaccgagagcgtgaggctaggagcaagaaaaaagcattaaaaagctgtttttcttgtacctattttatcaaaaaaggggtacaaattcaatgaaaacaatgaataaagtggct

SEQ ID NO: 24371 - DNA, 260 bp, Unknown
  Description of Unknown: LeftRegion for integrase C114 sequence
gacgagtcccctcgggctggccttcgggctggcccggggggtcttttttgtgcctgactcatgcacatattcgcatatgtcttcgtatcgaacgccgtcgtcaatctgacgctgccgttccttgtccatgccgccacgctacgcgggagtggttgaatgtccgcaagatgcgacgattcgcacctgttacagttaccaccatgcgtgtgctgggaagggtgaggttgtcgcggttttctgacgagtctacgtccgtcgag

SEQ ID NO: 24372 - DNA, 260 bp, Unknown
  Description of Unknown: LeftRegion for integrase C115 sequence
aagtacttttgaaggttatttttatagaattgttgaaagtaaatttttagtggaacgaagaaaagagtgtagagacaccttatatgattggcttacagaataagtaaaaaggattgtagggataagattttgtttgtatactttaatcattcacattttattgatatgagtaattataactagtaaagatggtgatttgattgaagtatggagtttatgttcgggtatctacagacagggacgaacaagtctcatctgta

SEQ ID NO: 24373 - DNA, 260 bp, Unknown
  Description of Unknown: LeftRegion for integrase C116 sequence
aagcacttttgaaggttatttttataggattgtggaaagtaaatttgtagtggaaagaagaaaagagtgtagagacgccttatatgattggcttacagaataagtaaaaaggattgtagggataagattttgtttgtatactttaatcattcacattttattgatatgagtaattataactagtaaagatggtgatttgattgaagtatgcagtttatgttcgggtatctacagacagggacgaacaagtctcatctgta

SEQ ID NO: 24374 - DNA, 260 bp, Unknown
  Description of Unknown: LeftRegion for integrase C117 sequence
gctggccgatggagggcttcggtaccaccgagtgtcaactcgaggccctgaggatgatgggtcagtaaagagagggggtcgggtgcagtcgaggggctgcatccggccccttttttatttgccaaaatttagttagttcggcttcctatattgtttcggtgcccttcaaatacaagctccaacctgctaagatggcacctatgacagcaaccctcgagcgacacctcgacaccccgcagcaggaggccctgcgggtgggt

SEQ ID NO: 24375 - DNA, 260 bp, Unknown
  Description of Unknown: LeftRegion for integrase C118 sequence
ctgttttcgcacaaaaagcaaataaaattagaagtacttttgaaggttatttttataggattcttgaaagtaaatttgttgccgaaagaagagaagaatgtcgagggttattgttcgattggttaaatgaataatatgaaattgcccacagggaaaaatttgtatataatttacttatcatattattagtaaaaaagtgggtgaagattttgaagtacgctgtttatgtacgagtttcaacggatagagatgagcaagtt

SEQ ID NO: 24376 - DNA, 260 bp, Unknown
  Description of Unknown: LeftRegion for integrase C119 sequence
cagaaaaagcaaataaaattagaagtacttttgaaggttatttttatagaattgttgaaagtaaatttgtaatggagagaaggaaagaatgtcgaggattattgttcgattggttaaatgaataatataaaattgcccacagggaaaaatatatatataatttaattatcatattcttagtaaataagtgggtgaaaattttgaaatacgctgtttatgtacgagtttcaacggatagagatgagcaagtttcatctgtt

SEQ ID NO: 24377 - DNA, 260 bp, Unknown
  Description of Unknown: LeftRegion for integrase C120 sequence
gtgcgggtggtggctcgtgggctaccttctccggctctgccggtaagggtggccgagcacagacctggttcgttgcacgacaaccctagcgacacaaagaaacccccttcgggccttcgggctcgttgggggtctttttttgtacctctagggtttcacactgtgttgttagatatgtgtaacatgatacactccgtgtaatgactatccgagccgtcgtaggggcacgagtctcccacgtccaaggacccgagaagacg

SEQ ID NO: 24378 - DNA, 260 bp, Unknown
  Description of Unknown: LeftRegion for integrase C121 sequence
agtggaagggcgcggcggtcggaagtgccatgggcgtcacggcccagaacatctatgtcgacgtcacctggccgaacggctacaccatgtccgggctcggcgtcggtgaggccgacgcgttgaagttcatcgagctcgtgaacaggctcgcccagcgctgacggcgtgtccggtgacgtacgcctgagaaacatctcccaatgttgcggtttcacctgaaactgtcagatagggactgtactgtccagctcgtgcgagcg

SEQ ID NO: 24379 - DNA, 260 bp, Unknown
  Description of Unknown: LeftRegion for integrase C122 sequence
taccgcccccttcctgttaccgcaggtagggggctctttttctgttgacggtcggttacgctaccacagttgtcaaagtctaaagatggggaactcaatattcatgctttgcgaaagcgctgttctcacggctacactcctctgacatgcgggttcttgggagaatacgactctccagaatgatggaggagtctaccagtgtggaacgccagcgtgagttcatcgagacatgggcgcggcagaatgatcatgaaatcgtc

SEQ ID NO: 24380 - DNA, 260 bp, Unknown
  Description of Unknown: LeftRegion for integrase C123 sequence
gcttgctgaagaaagtggcattgtaaacaaatctatgaaagtaaaagtaaacaactaaaataaaaagcccctgctctcctcgaccaaaatttgagcatgggacttaaaccaatttgaaaagcaacctaaaacactaagggtataggtcttttttctataccctattttaccataaaacttacaaaatagggaggctaacgatgaataaagttgctatttatgtgcgcgtgagtacaaaaggacaagcagaagagggttat

SEQ ID NO: 24381 - DNA, 260 bp, Unknown
  Description of Unknown: LeftRegion for integrase C124 sequence
gaatcgctgaaagttcgagatttggatgcaatttcaattgatgatcttcaaaactttaaaatagaatatcgtggcgtggaattaaccgaagatgaaaaaaggcaagtaatcagattgttgcgctcagtccttgaactaaagaaagaataaagttctcaaacttatatattagtataagagtattaaaggagtcgatttcgatgagagtttgtaagtacagacgagtatcgactgacatgcaaagggaagaaggagtatca

SEQ ID NO: 24382 - DNA, 260 bp, Unknown
  Description of Unknown: LeftRegion for integrase C125 sequence
cgaccacgagcgggaccatccatgcctgggccacgccgttggctgccgccagctcggagagcgcggtgaaggacagggagaatgccagggccccaacggcaatggtgcctgtcgtggcgatccggaccgggttgatcttcatcatgtctacagaccctataccgcgagaagtccttgtcaagttgttgtagactcgtgtcgtggcaggtcaacgagttctggggcgtattcgcctctcgcgtctcaccgaggagtcgacc

SEQ ID NO: 24383 - DNA, 260 bp, Unknown
  Description of Unknown: LeftRegion for integrase C126 sequence
tccaggcgatgcgcctgctcctgtcacccgcgaggcgtccgccgagtcgagtggacgaagctcgcacgatgagaccggcccccagctctcctctccccccgtggggaggctgggggccttcccttttgcctgcacgggccgggcggagcatgtaccctcaagctgtaacagccgaacgagcggtacaccttgggggtaccatgcatttcatgcaaaaccgcgggtcagggccggatgccgagtgcgacatctacgtccgc

SEQ ID NO: 24384 - DNA, 260 bp, Unknown
  Description of Unknown: LeftRegion for integrase C127 sequence
gtctatgacgatccggcggctgagcgggctggcttcctgacgtctgggcggtatatcgcggaggtggaggcgaacaactacgccctccccttctggcggctggaccgcgtgccggaaccgacagaacgcttcccagcggaggccagggccacgttcgcccggctgccgggcggatcacgtctcctgggcatctgcggcgcatgacgccccgtcctgccatcggctgcactcgcctgtctacaggcccgcaggcccgcatg

SEQ ID NO: 24385 - DNA, 260 bp, Unknown
  Description of Unknown: LeftRegion for integrase C128 sequence
ggggttacaatcgacatgcaccagctcctgtctcaaaactcagttggtgtactgccctcggagatctgccggtctccgggggcttctacgttctaccaggcagaatgccccgacgccaggttagtaacaaagcacgaacatcgactggccgatgtttgctctttcatactcgggctgataccgtccctgacatgcgggtattgggcagaacacgtatctccaggtcgacagaagagtcaacgagtatcgagcgccagcgc

SEQ ID NO: 24386 - DNA, 260 bp, Unknown
  Description of Unknown: LeftRegion for integrase C129 sequence
atcggcctcttcggcgagccgttcctgcgtccatccctcgcggcgccgatggtttcggacgttctcttggagcgacatggaatcacctcccaaccagcgtactgtgaacggggaatcccgtgtgaggactggcctcgggcatgtaccctcaagctgtaacagccgaacgagcggtacaccttgggggtaccatgcgaagcatgaatcatcgcagttcccaggccgatgcggagtgcgacatctacgtacgcatcagccag

SEQ ID NO: 24387 - DNA, 260 bp, Unknown
  Description of Unknown: LeftRegion for integrase C130 sequence
cagttaatggatacgatgctacgcttaaaagattttataaattccaagacgggataaccttagaaccggaaagttataaccccaacatcacgactcagtttttcagttccaaagaacaggagtacaaccccattcatttaaaaggaaaattagtttggtatatggcccctctcgacattaaattctaggaggaaaactgaatgaaatgtattgcctacgttagagtatccacggaagaacaagcgaaacatggatactct

SEQ ID NO: 24388 - DNA, 260 bp, Unknown
  Description of Unknown: LeftRegion for integrase C131 sequence
gtaaacattgagctagtcctattgggtaggccggactcccgaacgacccgcacagcggcggctacggcctcatgcaccgaggcgtcactcggcgcctccccgctggccggagcacctgacggggctaccgaaaacgcgacgatcatttcatatcccctttagccaaccatgcgccctcatgagtgcctaaaggtgttatggtgcttcgcatgagaattatcggctacgttcgactctccagagcctcccgcgaggagtcg

SEQ ID NO: 24389 - DNA, 260 bp, Unknown
  Description of Unknown: LeftRegion for integrase C132 sequence
gtaaacattgagctagtcctattgggtaggccggactcccgaacgacccgcacagcggcggctacggcctcatgcaccgaggcgtcactcggcgcctccccgctggccgaagcacctgacggggctaccgaaaacgcgacgatcatttcatatcccctttagacaaccatgcgccctcatgagtgcctaaaggtgttatggtgcttcgcatgagaattatcggctacgttcgactctccagagcctcccgcgaggagtcg

SEQ ID NO: 24390 - DNA, 260 bp, Unknown
  Description of Unknown: LeftRegion for integrase C133 sequence
atcggcctcttcggcgagccgttcctgggtccagccttcgcggcgccgatggtttcggacgttctcctggagcgacatggaatcacctcccaaccagcgtactgtgaacggcgaatcccgtgcggggcttgggctggggcgtgtaccctgaagctgtaacagccgaacgagcggtacaccttgggggtaccatgccattcatgcaaaatcgcgggtcagggcaggtcgccgagtgcgacatctacgtccgcatcagccag

SEQ ID NO: 24391 - DNA, 260 bp, Unknown
  Description of Unknown: LeftRegion for integrase C134 sequence
ctacgtcgacgagctcggcaaggtccgccgctcgtaaccccctcctccctcaaggcccccgtgctcacctccgagcatgggggcctttttgcgccctcatcagggcaatcgggaatatccgcccgatataaccgccccctgcatggctagtaacgcccgggctattgtgctgacgatggtctgaccgttactatcagcctatgagcccagacaagcccctccgcgccgtcggctacgtccgcctctccaaggccaccgac

SEQ ID NO: 24392 - DNA, 260 bp, Unknown
  Description of Unknown: LeftRegion for integrase C135 sequence
cgtcggcgagcgactggcgctcgatccggaacatctgcctgatcctccggcgcctcgggatcgacgtgcgccgcacctgaagtgtcgtgggtgtgacaacccgccagaggtctgatacactcacaccagaggaagctgggctgtcgaggagagcctggtcaggagtagaggacccaccgttgaaacccaagtcggcagccgtgtacgcccggatctcggatgacaccgaggggcgggccgctggcgttgcccgccaggtc

SEQ ID NO: 24393 - DNA, 260 bp, Unknown
  Description of Unknown: LeftRegion for integrase C136 sequence
aagcctatgcccggctatcaggcccgcgccgtcctcgcccgcaagcaggaggccgacgtcgacaacctctgggactaccgcctcgtcgaagtcccgacgaaccccgccaactaagcaaaagccccccggatctccgaggggcttttcttatgtcctctttgggcactcatgcgccctcatgagtgcctaaagggtatatggtgatccccatgaaaatcatcggctatgtgcgcctctcccgagcctcccgcgaggagtcg

SEQ ID NO: 24394 - DNA, 260 bp, Unknown
  Description of Unknown: LeftRegion for integrase C137 sequence
agaagaacgcggacggcaaatgggaggcgataaactgacccgctgggaggccctgagagcccctagaaaaacctctcagggccaaccgcccacccctaaaccgaaacttcgccagagccccgagcgccgcccgctccggggcttttcttatgtcctctttgggcactcatgcgccctcgtgagtgcctaaaggggttatgatgatccgcatgagaattatcggctacgttcgactctccagagcctcccgcgaggagtcg

SEQ ID NO: 24395 - DNA, 260 bp, Unknown
  Description of Unknown: LeftRegion for integrase C138 sequence
agagaaggacgaggacggcgtctggcgggcgataaactgacccgctaggcggccctgagagggcctagaaaaacctctcagggccaaccgcccacccctaaaccgaaacttcgccagagccccgagagccgcccgctccggggcttctcatgtaccctttgggcactcatgcgccctcgtgagtgcctaaaggtgttatggtgcttggcatgagaattatcggctacgttcgactctccagagcctcccgcgaggagtcg

SEQ ID NO: 24396 - DNA, 260 bp, Unknown
  Description of Unknown: LeftRegion for integrase C139 sequence
cactacgacggcgagccggaactcgccccgctggattgcttcggcactccgaacgccggagccgtgattcaggaagagaagaacggcgacggcaagtgggaagcgatcaactaacgcgaaaggccctcgggaaaccgggggcctttcctatgtcctctttgggcactcatgcgccctcgtgagtgcctaaagggtatatggtgattcccatgaaaatcatcggctatgtgcgcctctcccgagcctcccgcgaggagtcg

SEQ ID NO: 24397 - DNA, 260 bp, Unknown
  Description of Unknown: LeftRegion for integrase C140 sequence
gtatgacgcttcatcggcgcgtgccacgggggccgctgcgagggtgagcgctcccgcaataatcgcgggagccgccgcgtggcgcagtgtcatgggcgcaccgtaccaggtcagggggtgaatcgcgggaagtggccaacctcggctatgggcgaacgcaaggctgggcatgggtgcgccaatagcctaagttggagggcgtgaataaatcgccccgtgttgtggtctacctgcggcaatccgaggatagggccgacgac

SEQ ID NO: 24398 - DNA, 260 bp, Unknown
  Description of Unknown: LeftRegion for integrase C141 sequence
ggacggcaagtgggaggcgataaactgacccgctgggaggccctgagagcccctagaaaaacctctcagggccaaccgcccacccctaaaccgaaacttcgccagagccccgagcgccgcccgctccggggcttttcctatgtcctctttgggcactcatgcgccctcgtgagtgcctaaaggggatatgatgctgaggcatgagaataattgggtacgttcgcctctcccgagcctcccgcgaggagtcgacttcggta

SEQ ID NO: 24399 - DNA, 260 bp, Unknown
  Description of Unknown: LeftRegion for integrase C142 sequence
gtcttatcaaaccgctaagaatatcgcttctcaacttaacgtaaatatggaagatttatatgatttcattcagttggatgaacagtgagaatttctcactgggccaaatagtcaatcaaatgattgacccatacatttgtctaatttgctttgataaaacatatgatatagaaatttagttaagaaaggagtatgtgcaaatgaagtgtgtaatttatagacgcgtatctactgatatgcaagttgaagaaggtatttca

SEQ ID NO: 24400 - DNA, 260 bp, Unknown
  Description of Unknown: LeftRegion for integrase C143 sequence
ctggatgggccagaccggcggaggaagaggaccacgatggccaagctttgcaagaggcgccggcccctgcgccttgaggtcggcttcgaggtcagacggggcagtcgggacgtcttgggacgcgcctacgagcgcctcctgcctgcgcacccagttcgtgtcatcacgtgcaccggcaccgttgtctaaggaaggttgccatgagaactcagcacctgagagccgtttcgacaccgcagaccctgcaggttgccctttac

SEQ ID NO: 24401 - DNA, 260 bp, Unknown
  Description of Unknown: LeftRegion for integrase C144 sequence
tgtacgaggacaccatgcgctacttcctacctggtagttacggaggcgggtacctgtgaaactaggcccctgggctggccctaaccggctggcctgggggcttttttcgtacctaaaccacatctagaatagttactatacgacttctcatgtgggaagcattgtagactcgccctatgcgagtactaggacgggtgcgtttgtccaggttgaccgaggaatccacgtccgtcgaccgccaacgagaactgatcgagaag

SEQ ID NO: 24402 - DNA, 260 bp, Unknown
  Description of Unknown: LeftRegion for integrase C145 sequence
gtggctggtccattggatgccgtcgtggtagcgctggtggggcatgcccgaggggtcggggtaccagccgggggcggtcatggcggctactatacggccagcacctgctttaccaggcattatggggcggcatacgacatgacgggtattgaacgctgaaacatttccgtgtcgcatagggtgcatgtactctgactgctgtgcgggcgatcatttacaaccgggtgagcagtgatcccactggtagagcgcgttctgtt

SEQ ID NO: 24403 - DNA, 260 bp, Unknown
  Description of Unknown: LeftRegion for integrase C146 sequence
actgctgcaactggccaggagggcgatcgcggccgctgcgtagagggctgggaggtagcgtgtcatgttgccggagcgtattcgacgtgtgcgtcgtcgacagggttaaaagcatcatgcgaggtgacggccctgagacacatctcccatttcatcggtttacccgctaactgtcggaatgggactgtactgtccggcgcatgcgagcgatcatctactgccgcgtctcatccgatccgcacgcgcgcggcaaatccgtc

SEQ ID NO: 24404 - DNA, 260 bp, Unknown
  Description of Unknown: LeftRegion for integrase C147 sequence
cgcttgtgcaccgtcaatcagttgtagaaaatggagacatggccttgatcgccgtaaatgatgaaaatattgatcagacgcgtttataaagataagaatgaaattacacttgatgcattgttgagaaaacaaactattgatgaaagagaaactttattctctgttatcggaaaagtaacaaaggttataggtgaatactaatgaagtgcgctatatatagaagggtttctacagatgaacaggccgaaaaaggattctca

SEQ ID NO: 24405 - DNA, 260 bp, Unknown
  Description of Unknown: LeftRegion for integrase C148 sequence
ccgggcaccgtgctgacgcgggacttcatgggccagacccatcgtgtcgtggccatgccgaatggtgagttcgagtacaacggcaagccctacagcagcctgaccgcgatcgcctgcgaaatcgcgggcacgcgctggtcggggccggcgttcttcggcctgcgtgatggcgcgaagaagccgcgcaaggggaccggtgcatgaggctcgaagcaaacaagaaacgccggcgctgcgcggtctacacgcgcaaatcctcc

SEQ ID NO: 24406 - DNA, 260 bp, Unknown
  Description of Unknown: LeftRegion for integrase C149 sequence
aagaaatggaaaataatccggacaaaaaccaacatgctggaggtgggccaggaatgtcgttaacacaccctaatcagtcatatgatagttttagaaaagaagtaggaaaagcaagaagcgaagcagaagtaatacgataataaaatttcgggtagcccgcctacccttattattttttgccaattttgaggagggagcacatgaaagtagcaatttatactagagtaagtacacttgaacaaaaagaaaaaggacactct

SEQ ID NO: 24407 - DNA, 260 bp, Unknown; identical to SEQ ID NO: 21214
  Description of Unknown: LeftRegion for integrase C150 sequence

SEQ ID NO: 24408 - DNA, 260 bp, Unknown
  Description of Unknown: LeftRegion for integrase C151 sequence
ggacttgacccaaacttcgtacgacataatgacaacatggtaaaagaatggcaaaatcaaatgcgagaacacaacgaaaactttaatcctgaatctggtggagatttgtataacgtcgaaaccggtaactacgttgatgatgaataaaattatggggtagtccacctacccttattatttttttacttttttaaggggtgatgaattatgaacgtagctatttacgttcgtgtcaggtcagtacattagaacaaaaagag

SEQ ID NO: 24409 - DNA, 260 bp, Unknown; identical to SEQ ID NO: 21214
  Description of Unknown: LeftRegion for integrase C152 sequence

SEQ ID NO: 24410 - DNA, 260 bp, Unknown
  Description of Unknown: LeftRegion for integrase C153 sequence
cgaaaagaattctttaaagtatctcttgatgaaattgaaaaagttgttttagaaaattataacggaactgtatcttttactaaactagctcaagctgaacaatacagaagatcattagaattaacagatgtgtagtaaaaagattagccttcgggcttttcttttacaacgataagaacatacattcgaaaggagataacatgaaacgagtagcattatatatgagagtatcaactgaacaacaagccaaacatggagat

SEQ ID NO: 24411 - DNA, 260 bp, Unknown
  Description of Unknown: LeftRegion for integrase C154 sequence
cgggtcgatgatcgcccccttgcggggacccgtctgatccgcgagtggaatggtcagccccatgaggtgctcgtcaacctcagcgattttgagtatgcaggccagcggtacaaatcgctttctcgcatcgccagagtcattaccggaaccaaccgcaacggctggaccttttttggtttttctagcgcacgaggccttaaatgaacgcaacagacaaagtgctctgcgccatatacacacgcaaatccactgaagagggg

SEQ ID NO: 24412 - DNA, 260 bp, Unknown
  Description of Unknown: LeftRegion for integrase C155 sequence
tattttctggtggtctggagctcacgattccgaccgatcaaaaactgaccgatctcattcattacccaggtggcaccactccgtacaaaacccagctcttgtggagtatcatatcaggaccctgacccgctaccatagcgggttttttagtttgcacggtgacaagagtttggtatccttttctagtaggagggtaaatcatgaaatgttcactatacatacgcgtatcatcccaacaataccaggaagaaaagaaggaa

SEQ ID NO: 24413 - DNA, 260 bp, Unknown
  Description of Unknown: LeftRegion for integrase C156 sequence
cataaaggaaggaaaagcagcttgtcaagggatgcgtgtgccagaagtagatatttcaaattgggtgattacctcaccggttacagtaatagaaagggatggaaatggggaaaagtattacagttattccggccaagaaagtgcagaccagcgttcttcatcaggtcaggaagaaaatcaaggtagccgcatattgccgagtgtccaccgaccaagacgaacagctatcaagttatgaaaaccaagttaattattaccga

SEQ ID NO: 24414 - DNA, 260 bp, Unknown
  Description of Unknown: LeftRegion for integrase C157 sequence
tataaaagagggaaaagtagcttgtcgagggatgcgagtgccagaagtagacatttcaaattgggagataacctcaccaattacagtattagaaagggatagagatggggaaaagtattacagttattccggccaagaaagtgcagaacagcgttcaacatcaggtcagaaagaaaatcaatgtggccgcatattgccgagtgtccaccgatcaagacgaacagctatcaagttatgaaaaccaagttaattattaccga

SEQ ID NO: 24415 - DNA, 260 bp, Unknown
  Description of Unknown: LeftRegion for integrase C158 sequence
cataaaagagggaaaagcagcttgtaaggggatgcgtgtaccagaagtagatatctcaaattggacagtaacctcgccagtaacagtaatagaaagggatagagatggggaaaagtattacagtaataccggccaagaaagtgcagaccagcgttcttcatcaggacaggaagaaaatcaaagtagccgcatattgtcgagtgtccaccgaccaagaagaacagctatcaagttatgaaaaccaagttaattattaccga

SEQ ID NO: 24416 - DNA, 260 bp, Unknown
  Description of Unknown: LeftRegion for integrase C159 sequence
tataaaagagggaaaagtagcctgtcaggggatgcgagtgccagaagtagatatttcaaattgggtgataacctcaccaattacagtaatagaaagggatagaaatggggaaaagtattacagttattccggccaagaaagtgcagaccagcgttctgcatcaggtcaggaagaaaatcaaggtagccgcatattgtcgagtgtccaccgaccaagaagaacagctatcaagttatgaaaaccaagttaattattaccga

SEQ ID NO: 24417 - DNA, 260 bp, Unknown
  Description of Unknown: LeftRegion for integrase C160 sequence
cattaaggaaggaaaagcagcttgtcaagggatgcgtgtgccagaagtagatatctcaaattggacagtaacctcgccagtaaaagtgatagaaagggatagagatggggaaaagtattacagttattccggccaagaaagtgcagaccagcgttcaacatcaggtcagaaagaaagtcaatgtagccgcatattgccgagtgtccaccgaccaagacgaacagctatcaagttatgaaaaccaagttaattattaccga

SEQ ID NO: 24418 - DNA, 260 bp, Unknown; identical to SEQ ID NO: 24417
  Description of Unknown: LeftRegion for integrase C161 sequence

SEQ ID NO: 24419 - DNA, 260 bp, Unknown
  Description of Unknown: LeftRegion for integrase C162 sequence
cataaaagagggaaaagtagcttgtcaggggatgcgagtaccagaagtagatatttcaaattgggtgataacctcaccagttacagtaattgaaagggatagaaatggggaaaagtattacagttattccggccaagaaagtgcagaccagggttcttcatcaggtcaggaagaaaatcaaggtagccgcatattgtcgagtgtccaccgaccaagaagaacagctatcaagttatgaaaaccaagtaaattattacaga

SEQ ID NO: 24420 - DNA, 260 bp, Unknown
  Description of Unknown: LeftRegion for integrase C163 sequence
cataaaagagggaaaagcagcttgtaaggggatgcgtgtgccagaagcagatatctcaaattgggcgataacctcacctgttacagtaatagaaaggcataaaaatggggaaaagtattatagttattccagccaagaaagtgcagaccagcgttcttcatcaggtcaggaagaaaatcaaagtagccgcatattgtcgagtgtccaccgaccaagaagaacagctatcaagttatgaaaaccaagttaattattaccga

SEQ ID NO: 24421 - DNA, 260 bp, Unknown
  Description of Unknown: LeftRegion for integrase C164 sequence
catcaggctttattttttttgcctttttttcaaaaagtgcggaaaaattactcccaaacctacctagtaaggtaggaggaatatttgtattccatgaactatggcataaatctatcaggtcgaattagtttgtctgataacttgactaattttccctttagagtgatatatagtgtgccattacataggaaggagagtaaatgtccgtaaaaaagattagagtcaataaacaaaaacacaagcagaggatctgtgcctac

SEQ ID NO: 24422 - DNA, 260 bp, Unknown
  Description of Unknown: LeftRegion for integrase C165 sequence
acatcaggctttatttttttgcctttttttcaaaaagcgcggaaaaatcgctcccaaacctacctagtaaagtaggaggaatatttgtattccatgaactatggcataaatttatcaggtcgaattagtttgtctgataacttgactaatatcctttttagagtgatatatagtgtgccattacataggaaggagagtaaatgtccgtaaagaagattagagtcaatagacaaaaacataggaagagggtctgtgcctac

SEQ ID NO: 24423 - DNA, 260 bp, Unknown
  Description of Unknown: LeftRegion for integrase C166 sequence
catcaggctttatttttttgcttttttttcaataagtgcggaaaaattactcccaaacctacctagtaaggtaggaggaatatttgtattccatgaactgtggcataaatttatcatgtcgaaatagttggtctgataacttgactaatattccctttagagtgatatatagtgtgccattacataggaagggagagtaaatgtccgtaaagaagattagagtcaatagacaaaaacataggaagagggtctgtgcctac

SEQ ID NO: 24424 - DNA, 260 bp, Unknown
  Description of Unknown: LeftRegion for integrase C167 sequence
acatcaggctttatttttttgactttttttcaaaaagtgcggaaaaatcgctcccaaacctacctagtaaggtaggaggaatatttgtattccatgaactatggcataaatttatcaggtcgaattagtttgtctgataacttgactaattttccctttagagtgatatatagtgtgccattacataggaaggagagtaaatgtccgtaaaaaagattagagtcaataatcaaaaacacaagcagaggatctgtgcctac

SEQ ID NO: 24425 - DNA, 260 bp, Unknown
  Description of Unknown: LeftRegion for integrase C168 sequence
tcaggctttatttttttgccttttttttttcaataagtgcggaaaaattactcccaaacctacctagtaaggtaggaggaatatttgtattccatgaactgtggcataaatttatcaggtcgaattagttggtctgataacttgactaatatcctttttagagtgatatatagtgtgccattacataggaaggagagtaaatgtccgtaaagaagattagagtcaatagacaaaaacataggaagagggtctgtgcctac

SEQ ID NO: 24426 - DNA, 260 bp, Unknown
  Description of Unknown: LeftRegion for integrase C169 sequence
agatgacctatcaacttacaatgatacaagcaaagatacttctaaataatggagcaatcactattgaggaatttgaactttttaggcaattgatgcttgaaaaatatcaaccgtttataagtcaattatcgacctaataactggataattttttcttttagagtgatatatagtgtgccattacataggaaggagagtaaatgtccgtaaaaaagattagagtcaatagacaaaaacataggaagagggtatgtgtctac

SEQ ID NO: 24427 - DNA, 260 bp, Unknown
  Description of Unknown: LeftRegion for integrase C170 sequence
acatcaggctttatttttttgcctttttttcaataagtgcggaaaaattactcctaaacctacctagtaaggtaggaggaatatttgtattccatgaactatagcataaatttatcaggttgaattagttggtctgataacttgactaatattccctttagagtgatatatagtgtgccattacataggaaggagagtaaatgtccgtaaagaagattagagtcaataaacaaaagcataggaagaaggtctgtgtctac

SEQ ID NO: 24428 - DNA, 260 bp, Unknown
  Description of Unknown: LeftRegion for integrase C171 sequence
tcaggctttatttttttttggcctttttttcaataagtgcggaaaaattactcccaaacctacctagtaaggtaggaggaatatttgtattccatggactatggcatgaatttatcaggtcgaattagtttgtctgataacttgactaatattccctttagagtgatatatagtgtgccattacataggaaggagagtaaatgtccgtaaaaaagattagagtcaatagacaaaaacataagaagagagtctgtgcctac

SEQ ID NO: 24429 - DNA, 260 bp, Unknown
  Description of Unknown: LeftRegion for integrase C172 sequence
aagatgagatgacttaccaactgaccatgatacaggccgatagactcctaaaatctaggattattagtgaggaagttcatcagcaatttaaggaaaagatgcttgaaaaatatcaaccatttattagcagattatcgacctaaagacttgataaatgaggcctttagagtgatatatagtagcgaaaggagtgtatcaaattgagaacagttagacgaattcaaccaatgatgacaccgcaaaaacctaagttgcgtgta

SEQ ID NO: 24430 - DNA, 260 bp, Unknown
  Description of Unknown: LeftRegion for integrase C173 sequence
ataatgagatgacctatcaacttacaatgatacaagcaaaggtacttctaaataaaggagcaatcactattgaggaatttgaactttttaggcaaatgatgcttgaaaaatatcaaccatttataagtcaattatcgacctaataactggatatttttttcttttagagtgatatatagtagcgaaaggagtgtattaatttgagaacagttagaagaatacaacccataaaatcgccctgtaggccaaaattaaaagtt

SEQ ID NO: 24431 - DNA, 260 bp, Unknown
  Description of Unknown: LeftRegion for integrase C174 sequence
ataatgagatgacctatcaattgacaatgatacaagcaaaggtacttctaaataaaggagcaatcactattgaggaatttgaactttttaggcaattgatgcttgaaaaatatcaaccatttataagtcaattatcgacctaataactggatatttttttcttttagagtgatatatagtagcgaaaggagtgtattaatttgagaacagttagaagaatacaacccataaaatcaccctgtaagccaaaattaaaggtt

SEQ ID NO: 24432 - DNA, 260 bp, Unknown
  Description of Unknown: LeftRegion for integrase C175 sequence
tgactgataaatggatttatggaaaaaaaggagtgcccgaactataaaaatatttacaggagaaactatgagaaaaaaggtattaactgtaacttgtcgatatgaacctgatgagttagcagagcaacatctagcagacgcttatgagctgttactaagatatgcggtaaaaagaaacaacgaaaaggagatgaaagaaaatgacaacagtagcattatatgcgagagtttcatcgaagaaacaagcgcagaacaataca

SEQ ID NO: 24433 - DNA, 260 bp, Unknown
  Description of Unknown: LeftRegion for integrase A1 sequence
aagagcgcaagcgccgcgcgcaaggcgtatcgcggcgtcgaggtggccccgaaagaccccgttgaaacccattttcagaagctgttgacggactgggcgcgggcgcccaaggccgcgcggcggcggttcgtgcgcgagcgggcggacgatctggccgcgctcatggccgatctgccggacgcatcggaaggcggtgcggcatgagccgggagcctgcccaactgtggtggacggctgcggagatcgccgcggcagggttg

SEQ ID NO: 24434 - DNA, 260 bp, Unknown
  Description of Unknown: LeftRegion for integrase A2 sequence
ccgaaataccgggctcaacggctgagctacgacagctggggtgatcaggcgatcaactgacaaaggagccgccgggggtgtgctgaccccacggcggcatgacgaagcaaggagaagatgatggacggagcaggaatggtcaacagggtgacgacagtcgcgccactgcgcaatgtgatgctgctgacggagctgatcgaacgggttcggaaccgcgacgacgatctgccgggcatggcatgcttttcggggccgagcgg

SEQ ID NO: 24435 - DNA, 260 bp, Unknown
  Description of Unknown: LeftRegion for integrase A3 sequence
caatccgcagaataccgggggttcgcgcgcatgcgccgggccttcggcgaagacgaataacgagaaaaggagcagagcatgacaccgtccatcgcgcccctgcgcaatgtcgccgctctcgtcggtctcgtcgatcgcgtgcagaaccgcgcgttcggcctgccggggatggcgaccttctacggcccctcgggctggggcaagaccaccgccgtcaccttcgcaggcaacgagttccaggcgcatgtcgtccaggtcaa

SEQ ID NO: 24436 - DNA, 260 bp, Unknown
  Description of Unknown: LeftRegion for integrase A4 sequence
aaatgtgtgccacgggacatgaagaagttaaatcaaatcattaagattctgcatatgtaacaaaaccaacccagtataaagacgggttggttttatatattataaaatcattaaaatgtcatccactgctgctctgtaagcaaattcaatcaattcagatttagagtgaaataggtcctcaagatataaataattttttacttcattttcaggaatatatttcataagctccttaaagcttttctcgaatttcagaactg

SEQ ID NO: 24437 - DNA, 260 bp, Unknown
  Description of Unknown: LeftRegion for integrase A5 sequence
gaaagtctatttcatgttattgaaacaactatatcaggtaggagagtaaaagcatcatgagaatggtcgatttaattgcgaaaaaacgggatggttatgagctttcaaaagaagaaattgattttatcatccgcggttacacgaacggcgacattcctgattatcaaatggcttctatgttaatggcaatttatttcaatggcatgtctaaagaagaaatctctgccttaactaatgccatgattaattctggtgaaaca

SEQ ID NO: 24438 - DNA, 260 bp, Unknown
  Description of Unknown: LeftRegion for integrase A6 sequence
gacgttgacggacggggttcacggatgcagatagcctgcgtcgcatcgttgacggtatgagcaagcgcgcggcggcctccaccagcgaggactaggagtccatgcgaagggccgggcagggattactccctcccggccctttctgctgccttcagccttgtcgagggtgcgggaacgcccgcacgagatgctcggcgcacgtctccgcgctcggtccggcaaccggctggccgcaggggtagccgtgcacccacgtggcc

SEQ ID NO: 24439 - DNA, 260 bp, Unknown
  Description of Unknown: LeftRegion for integrase A7 sequence
acgggtacatcatcttcccgaatcctcttcgctcagatggatttcaatccaactcgctgagagcgggaactcgggcccccaccttacgaggtgggggcctcttcgcgtccaagggccctctctggaggcgccatccctacgtgcccaatcggcgtacgctggttgggaggtgattcgatgtcgctccaagagaacatccgtagccatcggcgccggaaggggtggacccaagagcagcttgccgaggaggcagacgtctc

SEQ ID NO: 24440 - DNA, 260 bp, Unknown
  Description of Unknown: LeftRegion for integrase A8 sequence
acgggcacatcatcttcccgaatcctcttcgctcagatggatttcaatccaactcgctgagagcgggaactcgggcccccaccttacgaggtgggggcctcttcgcgttcaagggccctctctggaggcgccatccctacgtgcccaatcggcgtacgctggttgggaggtgattcgatgtcgctccaagagaacatccgtagccatcggcgccggaaggggtggacccaagagcagcttgccgaggaggcagacgtctc

SEQ ID NO: 24441 - DNA, 260 bp, Unknown
  Description of Unknown: LeftRegion for integrase A9 sequence
gggattcgcgggaacgcttcaggtttcgagttcgagatcggcagcaccaaggcgtcctgactggtcaactggcccccggcgtaactggctcagccgtactcttgacgcatgagcgtcgacctgggtgagcggattcgcgaggtacgcaagcgtcggggcctgactcagcgccaactggccgaactgtcaggcgtgtccctctccctcgtccggaaactggagcagggggagaggagcgacacgcggctggagacggcgcg

SEQ ID NO: 24442 - DNA, 260 bp, Unknown
  Description of Unknown: LeftRegion for integrase A10 sequence
acgggcacatcatcttcccgaatcctcttcgctcagatggatttcaatccaactcgctgagagcgggaactcgggcccccaccttacgaggtgggggcctcttcgcgttcaagggccctccctggaggcgccatccctacgtgcccaatcggcgtacgctggttgggaggtgattcgatgtcgctccaagagaacatccgtagccatcggcgccggaaggggtggacccaagagcagcttgccgaggaggcagacgtctc

SEQ ID NO: 24443 - DNA, 260 bp, Unknown
  Description of Unknown: LeftRegion for integrase A11 sequence
ggaattcgcgcgaccacttcaggtttcgagttcgagatcgcgagcacgaaggcgtcctgaccagggcaaacagagggccccccgccttgcggcagggggccttcgtcatttccggcgccactggatggggatcgggggctgccgatcgaagtgatcgacgcacctgtcagtgaggcggctcatcgctggcttcccgcacaggtagccgtatgcccactgctcggcgatgctcccatcctctcgcttgaaccggatcttct

SEQ ID NO: 24444 - DNA, 260 bp, Unknown
  Description of Unknown: LeftRegion for integrase A12 sequence
gcatcgtgcggatgtgattgcgggacttaagaaaagaaagctctctttatcagctctttcccggcagtttggttatgcgccaactacattagctaatgcgctagaacgacactggccaaagggtgagcagattattgctaacgccttagaaactaaaccggaagtaatctggcctagccgatatcaagcaggtgaataacatggaactttgggtatcaccgaaagagtgtgcgaatcttcctggtttgccgaaaacatcg

SEQ ID NO: 24445 - DNA, 260 bp, Unknown
  Description of Unknown: LeftRegion for integrase A13 sequence
cagaactttagccaaagcgtttcaaacctgtttgaacagaaattcaaaaacaagctttaaaccctatttaaaccttccataaatggagattgatatgaatacaaacgtagttgaactaggcaatgcagaagcgaagcaaaccgacatattaatgcgcattcgtgcattaacagaatcgaaggctgtttcagcgtctcagattgcaaaagagatcagcgtatcacctgccacgctaagccaaatcttgaacggttcataca

SEQ ID NO: 24446 - DNA, 260 bp, Unknown
  Description of Unknown: LeftRegion for integrase A14 sequence
agattggcacagagctgacatcgttgcagagctacgaaaacgcaatatgtcactagctgaattgggaagatctaatcatctttcgtcttcaacattaaaaaatgctttggataagagatatccgaaagcggagaaaatcattgcagatgcactgggaatgacaccgcaagatatttggccgtctcgatactaggtgcgctatgaaagaatggtatacagcaaaagagttgctcggtttggcaggtttaccaaagcaagcc

SEQ ID NO: 24447 - DNA, 260 bp, Unknown
  Description of Unknown: LeftRegion for integrase A15 sequence
agactggcatcgggctgacatcgttgctgagttacgaaaacgcaatatgtcactggccgaattgggaagatcgaatcatctttcgtcttcaacattaaaaaatgctttagataagagatacccaaaagcggaaaaaatcattgcagatgcattgggaatgacaccgcaggatatctggccatctcgatactaggtgcgctatgaaagagtggtatacagcgaaagaattgcttggttttgctggtttgccaaagcaagca

SEQ ID NO: 24448 - DNA, 260 bp, Unknown
  Description of Unknown: LeftRegion for integrase A16 sequence
gagctgagctacagcacactcaaatctgcgttagacaaatcttatccaaaatgtgaacgaatcattgcgaatgcaattggcgtaccgcctgaagttatatgggctgagcgatttgcacaacgtaattttcgtccaaaattaattgataagttttaatcataaacaacttttacgttaaatgaaagagaaaaggaacgtttatgagtaacttaaaaataaaaacgcactactctgcaatggagattgcctcatttaagtta

SEQ ID NO: 24449 - DNA, 260 bp, Unknown
  Description of Unknown: LeftRegion for integrase A17 sequence
accaaggggattcgcgggaacgcttcagctttcgagttcgagatcggaagcacccggtagtcctgaccagccaactggcccccgtcgcaaggcgggggcttcttcatgtccaatgacgcgcgactccccagggccgtactctcgaaccatgagcgccaacattggggaacgactccgggatgttcgtaagcgccgggggatgagtcaacgcgagctggccgagcggtccggcctgtccatctcgctgatccgtaagctgg

SEQ ID NO: 24450 - DNA, 260 bp, Unknown
  Description of Unknown: LeftRegion for integrase A18 sequence
gccagccaggacgacttgttaacccttcagtccaccttgaatgacgcggtcactctgctggcccagttctacaaagggaacctggaaagtgaggaagtgatggccggcctgaccactgccatgggccagctggctggacatcgctgtaacgtcgagaaagcgccggcaccggagctgggcttgtttgttggaggtgacgaatgagccaggactggtttacggcgaaagagttggctgggctgagtggtatgcctggcact

SEQ ID NO: 24451 - DNA, 260 bp, Unknown
  Description of Unknown: LeftRegion for integrase A19 sequence
aaaatatatttaaaacagttaattgaaaattttaaccttgataaagattattttaagtaaaataaaaagagtaggaaaatccagtttatattcctattaatatatatacagttatatttaggtatatataaactagaaataataaaggctaggtattccctagcctttatataattcaatttatatacacttttctttagtttccaatatgtcttttctatataacttatgtgcatcaggagcagttgaaaaatccccct

SEQ ID NO: 24452 - DNA, 260 bp, Unknown
  Description of Unknown: LeftRegion for integrase A20 sequence
catttcgatgagcaggttaagtcgtgaaaacggtctagcgtcgacaactcttgcaaatgcccttgatcgcccttggcctaaaggtgaaaaaattatagctaaggctctagatttaaaccctagcgaaatatggcctagtcgctatgcagaattaagaaatgcggggtaaccacatggaatggttcgtcgtaagagatctcatgggattttctgggttaccaacaacagagcgtggaattcgaaaattagttgaaaactta

SEQ ID NO: 24453 - DNA, 260 bp, Unknown; identical to SEQ ID NO: 24452
  Description of Unknown: LeftRegion for integrase A21 sequence

SEQ ID NO: 24454 - DNA, 60 bp, Unknown
  Description of Unknown: LeftRegion for integrase A22 sequence
gtggataaagactggaatggattggccgatttaatagcaaatcttattacaaagtatgct

SEQ ID NO: 24455 - DNA, 260 bp, Unknown
  Description of Unknown: LeftRegion for integrase A23 sequence
cgtcgtcgccccgctccgcgaacggctcatcaggtacggcgtgccgacggtcgaggcgggcggcgtatgggccaaccaggaagggccggtaagcgtcacggcacgcgccgactgagagacgtttccgcaggtcaaccccgttccagcccaacagtgttagtctttgctcttacccagttgggcgggatagcctgcccggcatgagcgtgaaggttgaaggcatggtcattctggcaggcggctacgaccgacagtcggcg

SEQ ID NO: 24456 - DNA, 260 bp, Unknown
  Description of Unknown: LeftRegion for integrase A24 sequence
acacgtaccgctgcccgtggacgggggccgaacggcttccctgaacggccgacgaaggcgcaccgctcagcgtctcccccagggcgccgggcggggcgttttcccaggtcagcgcgtactacccaactgttgtagactttggctttacccagttgggtcggctaacctcaaacctcatgacacaagggacggtcagcggcatgaccattcacgcggcaggatacgaccggcagtcggcggagcgcgacagtgggagcgcg

SEQ ID NO: 24457 - DNA, 260 bp, Unknown
  Description of Unknown: LeftRegion for integrase A25 sequence
ggttacacgacgcccctctatggcccgtactgacggacacaccgaagccccggcggcaaccctcagcggatgccccggggcttcacgttttcccaggtcagaagcggttttcgggagtagtgccccaactggggtaacctttgagttctctcagttgggggcgtagggtcgccgacatgacacaaggggttgtgaccggggtggacacgtacgcgggtgcttacgaccgtcagtcgcgcgagcgcgagaattcgagcgca

SEQ ID NO: 24458 - DNA, 60 bp, Unknown
  Description of Unknown: LeftRegion for integrase A26 sequence
agcgtgaactgggtgcgggcgcggtcaaggttgtggtcggggcgggcggtgtggaaatag

SEQ ID NO: 24459 - DNA, 260 bp, Unknown
  Description of Unknown: LeftRegion for integrase A27 sequence
tactgtcggctcacagcaccggtcggcagtaaggtcgagaagccccgtccgtgcgtctccccccgtggcgccggacggggcttcagacgtttcgggtgctgggttgttgtctctggacagtgatccatgggaaactactcagcaccaccaatgttcccaaaagaaagcgcaggtcagcgcccatgagccaagatctaggcatgtcgcccttcatcgctcccgacgtccctgagcaccttctagacactgttcgcgtcttc

SEQ ID NO: 24460 - DNA, 260 bp, Unknown
  Description of Unknown: LeftRegion for integrase A28 sequence
gtcgtggccgtccatagtccgcaacgcggtagggaggggacggtgcaggagctccctcaggtcgatgatgacgtctgattcgggggccgggccgtgcccgtacccgaacgagacgacggtgcaacgcggcatgggggacattagccctcccactttcggccgcaggtctgacagcgggtgacgatcgggccgcccgccgtttggatagtgacccacgtgtggcccgggtcggtgcagcggtccgctgctacggctacgct

SEQ ID NO: 24461 - DNA, 260 bp, Unknown
  Description of Unknown: LeftRegion for integrase A29 sequence
gtccgtgcgtcgttcccccgtggcgcatgggcggggcttcgctatgtccgtgcgcggtaccctgggctagccccgatcggctgtctgtccgcaaacacactgccggtcggggttttcgctggtcaggcgcacctatgtcgtgtagttgaagcgaggcaaacgactacgcaacataggtggggtccgctaggatcatgctcatgcggacagacacgttggcgacggcaactgagattgccgccggaaggacacccatgcga

SEQ ID NO: 24462 - DNA, 260 bp, Unknown
  Description of Unknown: LeftRegion for integrase A30 sequence
gtttccctgccccgtccgtgcgtgcctcccccgtcgcgcatgggcggggctccgtcgtaccctgggcttgccccgatcggctgtctgtccgcaaacacactgccggtcggggttttcgctggtcaggcgcacctatgtcgtgtagttgaagcgaggcaaacgactacgcaacataggtgctctcggctaggatcatggccatgcggacagacacgttgacgacagcgaccgaagttgctgccggaaggaagcccatgcga

SEQ ID NO: 24463 - DNA, 260 bp, Unknown
  Description of Unknown: LeftRegion for integrase A31 sequence
aacgggccggacgcgatcgaggctgccatcgaggccgccctcgccgaggctgacgcgtagccacctcgcaccctgtctccccctttaaacgcactgtcccacaacagtgagcgcaaagggggagatccgccgggcgtcgcggacgcccccgacatggaacagagaacggccccggtacctcgcggaaggtaccggggccgctccatgtggcccaccgcgccgcacgggggggaacggacagcggcgggccggtcaccctt

SEQ ID NO: 24464 - DNA, 260 bp, Unknown
  Description of Unknown: LeftRegion for integrase A32 sequence
tttcccctgccccgtccgtgcgtgcatcccccgtcgcgcatgggcggggcttcgtcgtaccctgggcttgccccgatcggctgtctgtccgcaaacacactgccggtcggggttttcgctggtcaggcgcacctatgtgccgtagttgaagcgagcatttgggctacgcaacataggtgctctccgctaggatcatgcccatgcggacagacacgttggcgacggcgactgaggttgccgccggaaggacacccatgcga

SEQ ID NO: 24465 - DNA, 260 bp, Unknown
  Description of Unknown: LeftRegion for integrase A33 sequence
  modified_base (114)..(177): a, c, t, g, unknown or other
aggatctcggaacaactgtaaataaaatatctggaggtgtacttatgagcagcactgaaactcaggaagaaaaagaacgtcaggagcaagttcaggaattgcaacggctactgnnnnnnnnnnnnnnnnnnnnnnnnnnnnnnnnnnnnnnnnnnnnnnnnnnnnnnnnnnnnnnnngtatgtgaactaagtatagccccatggaggggctatttctttttgatggaggaattatgaagaaaaactttaagatgcccgga

SEQ ID NO: 24466 - DNA, 260 bp, Unknown
  Description of Unknown: LeftRegion for integrase A34 sequence
aggatgttaaatcaaattgaatacagtgtttgcctgatgatgttgaatcagttgttggaagcgaagcagatcacgaaaaaagaatatgacaaagttaaaattagcttaatgaaggagtatcaaatatcttctgaaatattaagtggataagtgaaaagagttcgggtagtatgtgtgctaagaaagaggtggtgagatatatggctaaagtagaaatcattaaagccaataaagaactgtcgaatcgcaataagaaaggt

SEQ ID NO: 24467 - DNA, 260 bp, Unknown
  Description of Unknown: LeftRegion for integrase A35 sequence
aagagtaaatggattgatggaaaaaaggagtggtaaggctccttgcactacaaaaacatttgcaggagaaactatgagaaaaagaacattaacttgccgatacgagccagatgaattagcggaacaacatctagcagacgcctatgagctgttattaaggtatgcggtaaaaaaaaacaatgaaaaggagataaagaaaaatgataacagtggccttatatgcaagagtttcatcgaagagtcaagcgcagaacaataca

SEQ ID NO: 24468 - DNA, 260 bp, Unknown
  Description of Unknown: LeftRegion for integrase A36 sequence
ctcgccccccgggtctgtcgcaacaaggaatgcgccgcgttcggctccgacgtcatttagacactgaggtgcacgccacagtgtgtaaacgacgtcgctccggggtcgcctagttgacctgcggaaacggcgcggccccgcctcccatcatgggacgcggggccgcgctgcgcatgttcactcggcgaggtcggacgcgaacgacgtgaacgacgaccaggccgccggcgccacggtgagcatccctgcgccgtgatcct

SEQ ID NO: 24469 - DNA, 260 bp, Unknown; identical to SEQ ID NO: 24468
  Description of Unknown: LeftRegion for integrase A37 sequence

SEQ ID NO: 24470 - DNA, 60 bp, Unknown
  Description of Unknown: LeftRegion for integrase A38 sequence
acctcaattttgctcaaaaacggcattgaactacgattttcgtacaaaaccgccgaataa

SEQ ID NO: 24471 - DNA, 260 bp, Unknown
  Description of Unknown: LeftRegion for integrase A39 sequence
aagcacattcccggcccggggccgctggtctgccccgacggaaaatgccagcgcgcttgattgtttccgggcctgctgccaccctctgaccaagcaacggaccatcgagccggaggggatccgccgtgcacagatgctcccctttagagccaccgtcccacgacaggggctctaaaggggagcgacacgagatggttgcttgacctgcggaaacacgacggccccgcctcccagccagggacgcggggccgttgccgtgc

SEQ ID NO: 24472 - DNA, 260 bp, Unknown
  Description of Unknown: LeftRegion for integrase A40 sequence
attattaacgaaccgttgggccaggagagtggcagcggcgggtttgctatggagttctgatgaagaagcgcacctacaaaaacaaacacactgccagcagtggcagtgccggacagcctgatatctctgacgctctcagaagcgatccggcgctcagcgccttcacgtttgacgggccatattcagtaacagacggctatgatctgctggacagcatgtgctgcgtcgataacggtcggtactacgagacgccaatagac

SEQ ID NO: 24473 - DNA, 260 bp, Unknown
  Description of Unknown: LeftRegion for integrase A41 sequence
gccgcgcccgcgggggtcgggtgcggcgcggccgtcagggggcgaccaactcgatcttgatcgcgagggcgccgagcgcttccttttcgggcccgtagatgttgcggatgttggcgagctgctgctcgcgggtcgacgtcgggttgacgttggccggcccctcgccgtcgagcagagcctcgaagtcggggtactccgtcacctgcttcacgagcacgtcgcaggtctcgtcggtgcccttgatcctgaagcggatcacg

SEQ ID NO: 24474 - DNA, 260 bp, Unknown
  Description of Unknown: LeftRegion for integrase A42 sequence
aacgcgaaacacaaccgggagtaccggagacgacaacggaaacagccggctaaccccgctgagtgaccagacccccgtccatgaggcgggggtttcgtcgtttgcccaggtcagcggtaggtgtaccctgtgggggagccatcaaggacgcacccccacgggggtaacatccactcatgacactaggagtagtgaccggtatggacacccacgccggagtgtacgcacgccagtccaagcggcgggccaacaaatcggag

SEQ ID NO: 24475 - DNA, 260 bp, Unknown
  Description of Unknown: LeftRegion for integrase A43 sequence
ggtccggccacggcacataaggccatggggttctacgtgatgggtggccagtgcgctaacccgcgctgcccctgcaatacggctggtcggctgcatggtcctttgatcccccattttgagaagtgagttatcaagggtccatagacgcgctaccctaaaggggctggtcaagcgtgccagcaaccctaggaggggacagcgtgacagggagaagagccgactaccagacactagtcagtctggggctcagcgaagacgac

SEQ ID NO: 24476 - DNA, 260 bp, Unknown
  Description of Unknown: LeftRegion for integrase A44 sequence
gcccggaaggacgaaccggccgaggtcgacgaccgcgccgacggggaaaccctgttctgaccagggcttttttatttgcccctttagaaccacagttccacaactgtgagcctaaaggggcatccccacccttgggcggcgacgacctcgccgagcaggacgcggccccggtacctcgcggaaggtaccggggccgttccttatggcccaccgcgccgcacgggggatgacggcagcggtgggcccttcccccccctacc

SEQ ID NO: 24477 - DNA, 260 bp, Unknown
  Description of Unknown: LeftRegion for integrase A45 sequence
gcccgcagggacgagccggccgaggtcgacgaccgcgccgacggcgaaaccctgttctgaccagcccttttttatttgcccctttaggcgcactgttccacgactgttcgcctaaaggggcatccccgccagggactcgacgacgccctcgccgagcagacagcggccccggtacctgaccaggtaccggggccgttccgttccggcccgccgcgccgctcgggggatacggcgacggcgggcctccccgctaccgtctc

SEQ ID NO: 24478 - DNA, 260 bp, Unknown
  Description of Unknown: LeftRegion for integrase A46 sequence
aatatactaagtgttaagtttaaaaatggcttagttacagaatttatctataacaattaaccatgtcaaaaattcttctttactcataccatttgacaaccccaagtttcaataaagaatgtacctttttgattcttatctgaatgtattgtatttactatattgttcaacatttattcctccatttattttaaaatatttttgtatctattaatataaatactataccataaactataggataaaaaaatatccttatt

SEQ ID NO: 24479 - DNA, 260 bp, Unknown
  Description of Unknown: LeftRegion for integrase A47 sequence
tcctgcgggtcaagaccatttcgcctgacaaacagcctacatagaaaaagcgccgcgaggcgcttttttcgtttacgcgctcccctgaccgagttgtctgataatatattttcggacacgctcggcaacccgaacgagagtcaaaatacatttgcgatgtgccggcgcatcgcctgattttacgcacttccgaacccgtcatggcgaagaaaccgaaagccaaggtctacagctatctacgcttctccgatccgaagcag

SEQ ID NO: 24480 - DNA, 260 bp, Unknown
  Description of Unknown: LeftRegion for integrase A48 sequence
gtgccgacacctcggactcgtggttcgccttggcgcggatcggctgacaaagaaacccccctctcagggccttcgggctccgggaggggggcttttttgcgtttcagggcatcaatggtgatgatgtccgtgaccgtgtccgtggtcagcaccatcatccgatggtacaacctcgacaatcgcggtctcagtcgtttaggatgtaccacatgccatcgaagagagccttgctggtcatccggctcagccgggtgacggat

SEQ ID NO: 24481 - DNA, 260 bp, Unknown
  Description of Unknown: LeftRegion for integrase A49 sequence
cgtgtaactagcataaaatttaaaaatggaattaacttaaactttatatacaacacataaaccttcatatctccacattttaaactcttccgtacttacactaatggacaaccccaagtacaaatatagaaggttttttctttagttcgttttgtatttttatttatgttaattttaatatttttatccatataaagttcctccaataattaaatagatttcttaaatttctacagtattatagcataacaaatatataa

SEQ ID NO: 24482 - DNA, 260 bp, Unknown
  Description of Unknown: LeftRegion for integrase A50 sequence
taggcatgacgactcccgtcaatcccgctgggttggtgacgtccacgctacgcagtccagggggcgggaacgggcttgagcgcacggcaactttcctgggaaacggactgacccggacacgttggacatgctagaactgtcgttcacgcgcctccggaaacccgaaggtgctcaactgacagttcaggagagccctacccgtgtcggcaacagcccaggtcagcgccacgtcaccgactcccttcatggcgggcatgacg

SEQ ID NO: 24483 - DNA, 147 bp, Unknown
  Description of Unknown: LeftRegion for integrase A51 sequence
ggacgtcataacagtgaagctattgtatttgctttcgccaatctgcagattaaaaggtaaggattacttaatgtatcggtgtcttatgtttaattttttgcagtatatagatactgtatgtctttacaaaacttcatctacatctag

SEQ ID NO: 24484 - DNA, 260 bp, Unknown
  Description of Unknown: LeftRegion for integrase A52 sequence
tggcaggcagccgaggaactagcctctcacgacatcccgcttccgcaggccgccgaatagcatcgaaatattctcaatcactcaacaccatttttctcgattgcagtacaatcgaggctcgatcaacgcacgagagtgccaaggagagaggagtgaacgagaaacttgcgcgggccgtcatcgacgcggcccgagactttgcccttacagggagcggcttcgacgcgatgtgccgcgcgatcgaagcctacgagacgcag

SEQ ID NO: 24485 - DNA, 260 bp, Unknown
  Description of Unknown: LeftRegion for integrase A53 sequence
cctcggactcgtggttcgccttggcgcggatcggctgacaaagaaacccccctctcagggccttcgggctccgggaggggggcttttttgcgtttcagggcatcaatggtgatgatgtccgtgaccgtgtccgtggtcagcaccatcatccgatggtacaacctcgacaatcgcggtctcagtcgtttaggatgtaccacatgccatcgaagagagccttgctggtcatccggctcagccgggtgacggatgcgacgacc

SEQ ID NO: 24486 - DNA, 260 bp, Unknown
  Description of Unknown: LeftRegion for integrase A54 sequence
cgctggcagctcgcgaacaggcccctgggcagttggtccgggggccttgcgcttgcccgcgagagaggcgagcagggcttccctctcctcctcggggagcgacatgagcatgtcggcaagccgctcgatcatgcgcgttccagcaggtcagacggcttcttgaccgtgagcgggagcatcttcccgccaggcggagccagttgtgggcttgttcccatctgcgggcagatggaaccacgcctacatccagtagtaccctg

SEQ ID NO: 24487 - DNA, 260 bp, Unknown
  Description of Unknown: LeftRegion for integrase A55 sequence
cgctggcagctcgcgaacaggcccctgggcagttggtccgggggccttgcgcttgcccgcgagagaggcgagcagggcttccctctcctcctcggggagcgacatgagcatgtcggcaagccgctcgatcatgcgcgttccagtaggtcagacggcttcttgaccgtgagcgggagcatcttcccgccaggcggagccagttgtgggcttgttcccatctgcgggcagatggaaccacgcctacatccagtagtaccctg

SEQ ID NO: 24488 - DNA, 260 bp, Unknown
  Description of Unknown: LeftRegion for integrase A56 sequence
tggagtgtcgtgcgcagcttcgagtttcatcccgtgtgggagcccgacccctggtcttgaccgctggagcgcaaaccatgcaggcgcgcttgattgtttctccgcctgctgccaccctctgaaaaccgcacctcagtgcagggagagggggaacgatgctcgcgagtcctttagagacactgacccacgtcagtggatctaaaggaccacatcggagcgcgaagaacggccccggtacctacctcaggtaccggggccgt

SEQ ID NO: 24489 - DNA, 260 bp, Unknown
  Description of Unknown: LeftRegion for integrase A57 sequence
tggagcctggtgcgtacctacgagttccaccccgtgtgggagcccgacccctggtcttgaccgctggagcacaaaccatgcaggcgcgcttgattgtttctgtgcctgctgccactctctgaaatccgcacctcagtgcagggagagggggaacgatgctcgcgagtcctttagagccactgacccatgacagtggatctaaaggacgcaaccaccgcaggtggcagtacgagaacggccccggtaccgagcaggtaccg

SEQ ID NO: 24490 - DNA, 260 bp, Unknown
  Description of Unknown: LeftRegion for integrase A58 sequence
cgctggcagctcgcgaacaggcccctgggcagttggtccgggggccttgcgcttgcccgcgagagaggccagtagggcttccctctcctcctcggggagcgacatgagcatgtcggcaagccgctcgatcatgcgcgttccagcaggtcagacggcttcttgaccgtgagcgggagcatcttcccgccaggcggagccagttgtgggcttgttcccatctgcgggcagatggaaccacgcctacatccagtagtaccctg

SEQ ID NO: 24491 - DNA, 260 bp, Unknown
  Description of Unknown: LeftRegion for integrase A59 sequence
cgctggcagcgtgcgacaaggcccctgggcggttggtccgggggcctcacgcttgcccgcgagagaggcgagcagggcttccctctcctcctcggggagggccatgagcatgtcggcaaggcgctcgatcatgcgcgttccagcaggtcagacggcttcttgaccgtgagcgggagcatcctcccaccaggcggagccagttgtgggcttgttcccatctgggggcagatggaaccacgcctacatccagtagtaacctg

SEQ ID NO: 24492 - DNA, 260 bp, Unknown
  Description of Unknown: LeftRegion for integrase A60 sequence
gcgacaaggaccctggtgagttggtccaccgggctcacgctggaccgcgagagaggcgaggagagcttccctctccccctcgggcagggccatcaggctctccgccaggcgctcgaccacgtcgcgcttcatgcgcgttccagcaggtcagagggcttcttgaccgagagcgggagcatcttcccgccaggcggtgccagttgtgggcttgttcccatctgggggcagatggaaccacgcctacatccagtagtaccctg

SEQ ID NO: 24493 - DNA, 100 bp, Unknown
  Description of Unknown: LeftRegion for integrase A61 sequence
acccctatcctaaggtttaatttcatttttgacctcacagccactaatagtttccactaagaaaagtagtaagtatcttaaaaaacagataaagctgtat

SEQ ID NO: 24494 - DNA, 260 bp, Unknown
  Description of Unknown: LeftRegion for integrase A62 sequence
gtagcgggagagcgttttgagcaatccccccagattattttgggccgtttcgtagcatagatttctttcaggaacgctacacactaagtcataacgcataatttcaatgacttatggtgagatcaataatcccgcctactgcattccgacaaggccagatcggaaggcatacacatccagacggtgattggcagcttccagtaagcaaccgcctcactgataaggtattcgtgtttcaggcagccggccggattgacctt

SEQ ID NO: 24495 - DNA, 260 bp, Unknown
  Description of Unknown: LeftRegion for integrase A63 sequence
cccgccgatgacgcccaggaggacgctgcccgctgtatccgggcacgccacggccctggtcccgcgctcccccgtgatgtcccacgtcaggaccacgcccgcctcacgcactggatgcccggagaccgtttctcctccacatcgggcccctgtctgtccctggatgtccgtcaagtccaccctgtcaccccttgtgacgcgtgtctgaggagatatccgctcccgccgaacttcccccaaacacacatcaggcccgctac

SEQ ID NO: 24496 - DNA, 260 bp, Unknown
  Description of Unknown: LeftRegion for integrase A64 sequence
gagcagagcctccctctcctcctcgggtagggccatgagctggtctgccagccgcttgatggtcgcgccgttcatgcgcgttccagcaggtcagagggcttcttgaccgagagcgggagcatcttcccgccaggcggtgccagttgtggccatgtatccatctgggggcagatggagacaaggtcacatccagtgatagcttgctcaccatgagcagccggaagcgacagccagccgcagagcgcgcggcctacaacatc

SEQ ID NO: 24497 - DNA, 260 bp, Unknown; identical to SEQ ID NO: 24496
  Description of Unknown: LeftRegion for integrase A65 sequence

SEQ ID NO: 24498 - DNA, 260 bp, Unknown
  Description of Unknown: LeftRegion for integrase A66 sequence
gagcagagcctccctctcctcctcgggtagggccatgagctggtctgccagccgcttaatggtcgcgccgttcatgcgcgttccagcaggtcagagggcttcttgaccgagagcgggagcatcttcccgccaggcggtgccagttgtggccatgtatccatctgggggcagatggagacaaggtcacatccagtgatagcttgctcaccatgagcagccggaagcgacagccagccgcagagcgcgcggcctacaacatc

SEQ ID NO: 24499 - DNA, 260 bp, Unknown
  Description of Unknown: LeftRegion for integrase A67 sequence
gcgcgagaagcgaagccggaaccccttccgaagcggcgtcgactgaagaaggtggacagcgcagccgtccgccagtgggccaacgagaacggcgtcgaggtcccggctactgggcgaatcgcgcgggccgtggtcgagcagtacgaggcagcacagcagggctgagtagtgctacctgaaggacacgctggtcgagcaacgtgcgtgaggtagcagaagccggtaccctgctgagcgtgacgacatcggtactcgaacag

SEQ ID NO: 24500 - DNA, 74 bp, Unknown
  Description of Unknown: LeftRegion for integrase A68 sequence
gacaccatggaagtagtcataaagccattttgcactaataaaaaaaaaggcgctctttaatgtagcgcccaaat

SEQ ID NO: 24501 - DNA, 260 bp, Unknown
  Description of Unknown: LeftRegion for integrase A69 sequence
ctccctctcctcctcgggtagggccatgagctggtctgccagccgcttgatggtcgcgccgttcatgcgcgttccagcaggtcagagggcttcttgaccgagagcgggagcatcttcccgccaggcggtgccagttgtggccatgtatccatctgggggcagatggagacaaggtcacatccagtggtagcttgctcaccatgagcagccggaagcgacagccagccgcagagcgcgcggcctacaacatcgacgccgag

SEQ ID NO: 24502 - DNA, 260 bp, Unknown
  Description of Unknown: LeftRegion for integrase A70 sequence
gtcggcgtgggttgccccgcaccccgccccgctgccgctgttcaccgcgccactggtggagttcgagtttcacggcgcgcttgtgttcctgacaaccccggacgtgctggcgctgatcgcgtcggcaatcatgcttgttcggttcgttgcgtgggcaattcagcccgtcacccgccgcctgaaggggaaaggggcctgccgtgaatgcaatgaccgcgattgaacatcgcccggccgaaatcaccccggccgaggcccgc

SEQ ID NO: 24503 - DNA, 260 bp, Unknown
  Description of Unknown: LeftRegion for integrase A71 sequence
gtcggcgtgggttgccccgcaccccgccccgctgccgctgttcaccgcgccgctggtggagttcgagtttcacggcgcgcttgtgttcctgacaaccccggacgtgctggcgctgatcgcgtcggcaatcatgcttgttcggttcgttgcgtgggcaattcagcccgtcacccgccgcctgaaggggaaaggggcctgccgtgaatgcaatgaccgcgattgaacatcgcccggccgaaatcaccccggccgaggcccgc

SEQ ID NO: 24504 - DNA, 260 bp, Unknown
  Description of Unknown: LeftRegion for integrase A72 sequence
agggatcctgatgattttgagttaacacttcatcctaagattcttcaaaattattactgatatcccgatggttcatactcttctgtaccatggtgttatcaataataaaaaccaaactccttctatatatagtgtggagtttggttttttattatttattctttgaactccctcccttccctaaacccttgcttgaatgtttcagcagcaaggtttatacgggagttatacatgtcctccaattgaagcaactcttttaa

SEQ ID NO: 24505 - DNA, 260 bp, Unknown
  Description of Unknown: LeftRegion for integrase A73 sequence
cagcgctgactggacctacgccaagcacgccgacggctcgtacaagatggacggcaccaagcacgtctacaagtgccagcgccactgcggcggcggccgcggcaaggtcgagaccaccgatccgtggtgatctaaccccgcataccaagaaaccccctacccggcccgcgaaggctaggtagggggctttttgtgtttcagtgggtgtggccgtgatgacctgtgtcttcgtggtttgtctggtcaaccaccgcggtctc

SEQ ID NO: 24506 - DNA, 260 bp, Unknown
  Description of Unknown: LeftRegion for integrase A74 sequence
ggcggtgcaggagctgactggacctacgccaagcacgccgacggctcgtacaagatggacggcaccaagcacgtctacaagtgccagcgccactgcggcggaggccgcggcaagaccgagaccaccgatccgtggtgatctaaccacgcataccaagaaaccccctacctagccttcgcgggccgggtagggggcttttcttgttttcagtgggtatggccgtgatgacctgtgtcttcgtggtttgtctggtcaaccac

SEQ ID NO: 24507 - DNA, 260 bp, Unknown; identical to SEQ ID NO: 24506
  Description of Unknown: LeftRegion for integrase A75 sequence

SEQ ID NO: 24508 - DNA, 260 bp, Unknown; identical to SEQ ID NO: 24506
  Description of Unknown: LeftRegion for integrase A76 sequence

SEQ ID NO: 24509 - DNA, 260 bp, Unknown
  Description of Unknown: LeftRegion for integrase A77 sequence
aagaccgttcacaaaaacggcaaggaccacaaggtctacaagtgcgtccgtcactgcggcggaggccgcggcaagaccgagaccaccgatccgtggtgatctaaccccgcataccaatatggtcccttatcggacctattgacgcaaagaaaccccctacctagccttcgcgggccgggtagggggcttttcttgtttcagtgggtatggccgtgatgacctgtgccttcgtggtttgtctggtcaaccaccgcggtctc

SEQ ID NO: 24510 - DNA, 260 bp, Unknown
  Description of Unknown: LeftRegion for integrase A78 sequence
ccggcggagccagcgctgactggacctacgccaagcacgccgacggctcgtacaagatggacggcaccaagcacgtctacaagtgtgtccgtcactgcggcggaggccgcggcaagaccgagaccaccgatccgtggtgatctaacctcgcataccaagaaaccccctacccggcccgcgaaggctaggtagggggctttttgtgtttcagtgggtatggtcgtgatgacctgtgtcttcgtggtttgtctggtcaacca

SEQ ID NO: 24511 - DNA, 260 bp, Unknown
  Description of Unknown: LeftRegion for integrase A79 sequence
ggtcccggtgaagaacccggacggctctatcaagaaggtcctcaagaacggcaagctgaagaccgtgtacggctgcgaggtccgctgcggcggaggccgcggcaagaccgagaccaccgatccgtggtgatctaaccccgcataccaagaaaccccctacccggcccgcgaaggctaggtagggggctttttgtgtttcagtgggtgtggccgtgatgacctgtgtcttcgtggtttgtctggtcaaccaccgcggtctc

SEQ ID NO: 24512 - DNA, 260 bp, Unknown
  Description of Unknown: LeftRegion for integrase A80 sequence
cctctcgctggtcctctgggagggccatgaccatctcggccacgcgctccaccgctcccccgctcatgcgcgttctcgcaggtcagcaggctttttgaccgtgagcgggagcatcttcccgccagccggtgccagttgtggccatgtgtccatctgggggcagatggaaacgcagtcacaaccggtgtactgtcctcaccgtgagtgaccgagcgagtacctacgacatcgaggcggagtggagtccggccgacctcgcc

SEQ ID NO: 24513 - DNA, 260 bp, Unknown
  Description of Unknown: LeftRegion for integrase A81 sequence
ctctcgctggtcctcgggtagggccaagaccgtctcagccaggcgctccaggatctgtccgttcacgggcgttcccgcaggtcagagccctgtcggaccgtgagtgggagcatcttcccaccgggcggtgccagttgtggccatgtgtccatctgggggcagatggagacggggtcacatccagtggtaggttcctcgccatgagtaaccgactacatgagtacgacgtcgaggcggagtggagtccagccgacctcgcc

SEQ ID NO: 24514 - DNA, 260 bp, Unknown
  Description of Unknown: LeftRegion for integrase A82 sequence
gacccagaggtccagggaccacctggcgtggcctacagagcccacccaccggtcggcagagagcagatacgcgaagaccccccggtcgatgagtgactggggggtccttcgcttgtcggcacgctcagccttgtgatacttcgcgaacacgctggtcgcagaaggtgcgcgaggtatcactagcagctaccatggtcgacatgaccagctccgtcctcgaacagctccgccaggcgaagtccggcgcacccaagctgtcc

SEQ ID NO: 24515 - DNA, 260 bp, Unknown
  Description of Unknown: LeftRegion for integrase A83 sequence
aggagctgactggacctacgccaagcacgccgacggctcgtacaagatggacggcaccaagcacgtctacaagtgccagcgccactgcggcggaggccgcggcaagaccgagaccaccgatccgtggtgatctaaccacgcataccaagaaaccccctacccggcccgcgaaggctaggtagggggcttttcttgtttcagtgggtatggccgtgatgacctgtgtcttcgtggtttgtctggtcaaccaccgcggtctc

SEQ ID NO: 24516 - DNA, 260 bp, Unknown
  Description of Unknown: LeftRegion for integrase A84 sequence
gcaccaagcacgtctacaagtgccagcgccactgcggcggaggccgcggcaagaccgagaccaccgacccgtggtgatctaaccccgcataccaagaaaccccctacccggcccgcgaaggctaggtagggggctttttcgcgttcaggggacctgatcgctcagcgacccatctccgatgggatcgcgtttgtgtttcagtgggtatggccgtgatgacctgtgtcttcgtggtttgtctggtcaaccaccgcggtctc

SEQ ID NO: 24517 - DNA, 260 bp, Unknown; identical to SEQ ID NO: 24311
  Description of Unknown: LeftRegion for integrase A85 sequence

SEQ ID NO: 24518 - DNA, 260 bp, Unknown
  Description of Unknown: LeftRegion for integrase A86 sequence
aggagctgactggacctacgccaagcacgccgacggctcgtacaagatggacggcaccaagcacgtctacaagtgccagcgccactgcggtggaggccgcggcaagaccgagaccaccgatccgtggtgatctaaccccgcataccaagaaaccccctacccggcccgcgaaggctaggtagggggctttttgtgtttcagtgggtatggccgtgatgacctgtgtcttcgtggtttgtctggtcaaccaccgcggtctc

SEQ ID NO: 24519 - DNA, 260 bp, Unknown
  Description of Unknown: LeftRegion for integrase A87 sequence
gactggaccccggtcatgaactccgacggcacctacaagaccgttcacaaagacggtcaggaccacaaggtctacaagtgctcccgtcactgcggcggaggccgcgcccacaaagaggtcaccgaaacctactgacctcgcataccaagaaaccccctacctagccttcgcgggccgggtagggggcttttcttgtttcagtgggtatggccgtgatgacctgtgtcttcgtggtttgtctggtcaaccaccgcggtctc

SEQ ID NO: 24520 - DNA, 260 bp, Unknown
  Description of Unknown: LeftRegion for integrase A88 sequence
gaaccccgtgttcaacgacgacggctcgtacaagaccgttcacaaaaacggcaaagaccacaaggtctacaagtgtgtccgtcactgcggcggaggccgcggcaagaccgagaccaccgatccgtggtgatctaaccccgcataccaagaaaccccctacccggcccgcgaaggctaggtagggggcttttcttgtttcagtgggtatggccgtgatgacctgtgtcttcgtggtttgtctggtcaaccaccgcggtctc

SEQ ID NO: 24521 - DNA, 260 bp, Unknown
  Description of Unknown: LeftRegion for integrase A89 sequence
gaaccccgtgttcaacgacgacggctcgtacaagaccgttcacaaaaacggcaaggaccacaaggtctacaagtgcgtccgtcactgcggcggaggccgcggcaagaccgagaccaccgatccgtggtgatctaaccccgcataccaagaaaccccctacccggcccgcgaaggctaggtagggggcttttcttgtttcagtgggtgtgtccgtgatgacctgtgtcttcgtggtttgtctggtcaaccaccgcggtctc

SEQ ID NO: 24522 - DNA, 260 bp, Unknown
  Description of Unknown: LeftRegion for integrase A90 sequence
actgtaaccgctacgtcggcgggttcggatcactgggccagcatcttcgtgccgttctgatcaccagagggtcgcgtcgcgccactgcggcggaggccgcggcaagaccgagaccaccgatccgtggcgatctaaccccgcataccaagaaaccccctacctagccttcgcgggccgggtagggggcttttcttgtttcagtgggtgtggccgtgatgacctgtgtcttcgtggtttgtctggtcaaccaccgcggtctc

SEQ ID NO: 24523 - DNA, 260 bp, Unknown
  Description of Unknown: LeftRegion for integrase A91 sequence
aagtgggtcccggtgaagaacccggacggctctatcaagaaggtcctcaagaacggcaagctgaagaccgtgtacggctgcgaggtccgctgcggcggaggccgcgcccacaaagaggtcaccgaaacctactgacctcgcataccaagaaaccccctacctagccttcgcgggccgggtagggggctttttgcgtttcagtgggtgtggccgtgatgacctgtgtcttcgtggtttgtctggtcaaccaccgcggtctc

SEQ ID NO: 24524 - DNA, 260 bp, Unknown
  Description of Unknown: LeftRegion for integrase A92 sequence
aagtgggtcccggtgaagaacccggacggctctatcaagaaggtcctcaagaacggcaagctgaagaccgtgtacggctgcgaggtccgctgcggcggcggtcgccacgccaaagaggtcaccgaaacctactgacctcgcatactaagaaaccccctacccggcccgcgaaggctaggtagggggctttttgcgtttcagtgggtatggccgtgatgacctgtgtcttcgtggtttgtctggtcaaccaccgcggtctc

SEQ ID NO: 24525 - DNA, 260 bp, Unknown
  Description of Unknown: LeftRegion for integrase A93 sequence
ggccttccggcctcgcctctcggctctttctccagaggcagcccgcggcgctgacgctgccggtggaagttgcacagccctttggaatggtgagggcggccgcagccctcgacttcgcaatcccccattgatcaatggtacaaaacagccccctcccgggaatccgtttggactcctgagagggggctttttgcgtttcagtgggtatggccgtgatgacctgtgtcttcgtggtttgtctggtcaaccaccgcggtctc

SEQ ID NO: 24526 - DNA, 260 bp, Unknown
  Description of Unknown: LeftRegion for integrase A94 sequence
gttctgatcaccagagggccgcgtcgcgccactgcggcggaggccgcggcaagaccgagaccaccgatccgtggtgatctaaccccgcataccaagaaaccccctgcccggcccgcgaaggctaggtagggggctttttcgcgttcagggggtctgatcgctcagcgacccatctccgatgggatcgcgtttgtgcttcagtgggtgtggccgtgatgacctgtgtcttcgtggtttgtccggtcaaccaccgcggtctc

SEQ ID NO: 24527 - DNA, 260 bp, Unknown
  Description of Unknown: LeftRegion for integrase A95 sequence
ggctgtacgaggcgggcaaccggatcgctacgatcgccacgtcggcgagcgactggcgctcgatccggaacatctgcctgatcctgcgccgcctcgggatcgacgtccgacgtcgaagctgaggctcagccttgtgatacctcacgaacacgctggtcgaggagggtgcgtgaggtatcacaagatggtaccctggtggggtgaccagctctgtgctcgaccagctccgccaggcgaagaccggaccagctccgaaggag

SEQ ID NO: 24528 - DNA, 260 bp, Unknown
  Description of Unknown: LeftRegion for integrase A96 sequence
ggcaagcagggcttccctctcctcctccgggagggccatgagcatgtcggcaaggcgctcgatcatgcgcgttccagcaggccagacggcttcttgaccgtgagcgggagcatcttcccgccaggcggagccagttgtgggcttgttcccatctgggggcagatggaaccacgcctacatccagtagtaccctgctcaccatgagtgcgcgcgactacgacatcgaagctgagtggacaccggccgacctcgccctgctg

SEQ ID NO: 24529 - DNA, 260 bp, Unknown
  Description of Unknown: LeftRegion for integrase A97 sequence
ggcgagcagggcttccctgtcctcctccgggagggccatgagcatgtcggcaaggcgctcgatcatgcgcgttccagcaggtcagacggcttcttgaccgtgagcgggagcatcttcccgccaggcggagccagttgtgggcttgttcccatctgcgggcagatggaaccacgcctacatccagtagtaccctgctcaccatgagtgcgcgcgactacgacatcgaagctgagtggacaccggccgacctcgccctgctg

SEQ ID NO: 24530 - DNA, 260 bp, Unknown
  Description of Unknown: LeftRegion for integrase A98 sequence
ggcgagcagggcttccctctcctcctcggggagcgacatgagcatgtcggcaagccgctcgatcatgcgcgttccagcaggtcagacggcttcttgaccgtgagcgggagcatcttcccgccaggcggagccagttgtgggcttgttcccatctgcgggcagatggaaccacgcctacatccagtagtaccctgctcaccatgagcgcgcgcgactacgacatcgaagctgagtggaccccggccgacctcgccctgctg

SEQ ID NO: 24531 - DNA, 260 bp, Unknown
  Description of Unknown: LeftRegion for integrase A99 sequence
ggcgagcagggcttccctgtcctcctccgggagggccatgagcatgtcggcaaggcgctcgatcatgcgcgttccagcaggtcagacggcttcttgaccgtgagcgggagcatcttcccgccaggcggagccagttgtgggcttgttcccatctgggggcagatggaaccacgcctacatccagtagtaccctgctcaccatgagtgcgcgcgactacgacatcgaagctgagtggacaccggccgacctcgccctgctg

SEQ ID NO: 24532 - DNA, 260 bp, Unknown
  Description of Unknown: LeftRegion for integrase A100 sequence
ggcgagcagggcttccctctcctcctcggggagagacatgagcatgtcggcaagccgctcgatcatgcgcgttccagcaggtcagacggcttcttgaccgtgagcgggagcatcttcccgccaggcggagccagttgtgggcttgttcccatctgcgggcagatggaaccacgcctacatccagtagtacgctgctcaccatgggtgcacgcgactacgacatcgaagctgaatggacaccggccgacctcgctctgctg

SEQ ID NO: 24533 - DNA, 260 bp, Unknown
  Description of Unknown: LeftRegion for integrase A101 sequence
cgtgttcaacgacgacggctcgtacaagaccgttcacaaaaacggcaaagaccacaaggtctacaagtgcgttcggcactgcggcggaggccgcggcaagaccgagaccaccgatccgtggtgatctaaccccgcataccaagaaaccccctacccggcccgcgaaggctaggtagggggcttttcttgtttcagtgggtatggccgtgatgacctgtgtcttcgtggtttgtctggtcaaccaccgcggtctcagtggt

SEQ ID NO: 24534 - DNA, 161 bp, Unknown
  Description of Unknown: LeftRegion for integrase A102 sequence
cctactgtgtttttaaaaataagtatggaaactcctgataaaaagtggtattctctagttagttaaatatagcaccatgtactgagaaagggaatacgccgatgataaagaatcttgagaacatacaccatgtagctatataccttaggattagtcaggag

SEQ ID NO: 24535 - DNA, 260 bp, Unknown
  Description of Unknown: LeftRegion for integrase A103 sequence
aaagaatggttgaagcctgagcaatttgaacttgaagttatcttgcggttccctacataggggaccgttctgtatatatgtcggtgggttatactgattgaactccccaagatatatacggactaaccttaaaaataacttacttcttattatattcatcacaaactgattatgtagcaatatccactacatcttctacaggtatccaccaaaaatcctcatcattctttaacttaatttgtttatacgttgagtcaaac

SEQ ID NO: 24536 - DNA, 260 bp, Unknown
  Description of Unknown: LeftRegion for integrase A104 sequence
gtgaagaacccggacggctctatcaagaaggtcctcaagaacggcaagctgaagaccgtgtacggctgcgaggtccgctgcggcggaggccgcgcccacaaagaggtcaccgaaacctactgacctcgcataccaagaaaccccctacccggcccgcgaaggctaggtagggggctttttgtgtttcagtgggtatggccgtgatgacctgtgtcttcgtggtttgtctggtcaaccaccgcggtctcagtggtgtacgg

SEQ ID NO: 24537 - DNA, 260 bp, Unknown
  Description of Unknown: LeftRegion for integrase A105 sequence
acctacgccaagcacgccgacggctcgtacaagatggacggtaccaagcacgtctacaagtgtgtccgtcactgcggcggaggccgcggcaagaccgagaccaccgatccgtggtgatctaacccccgcataccaagaaaccccctacccggcccgcgaaggctaggtagggggcttttctcgtttcagtgggtgtggccgtgatgacctgtgtcttcgtggtttgtctggtcaaccaccgcggtctcagtggtgtacgg

SEQ ID NO: 24538 - DNA, 260 bp, Unknown
  Description of Unknown: LeftRegion for integrase A106 sequence
ccagattattgatgaggatatttttgcaaaggcacaggaaatcagagaacataatgtgagaagtcaaaatcgcataggaatttatagacctcacccaaaagcagaaatcggagcttttaagattagaaagacagaagaaaaatataaggatccatataagcaggcagagtatgcatatagtcaaatattggaggtagcaaatgaatgagaacgtaacattgatacctgccagaatacgagctggtaatcgaataacaagg

SEQ ID NO: 24539 - DNA, 260 bp, Unknown
  Description of Unknown: LeftRegion for integrase A107 sequence
gaaggaatagtgaataagattgaggaagaaagagcccgtcgtgaaaaagcattaggaagagatagaaagaaacaaggaaaaactgttaggggagtagtatatacaaaatttcttattccccaaatagatgtgaaatatgaaaatcctatgaggcaagcagaatatgcatatagtttaatcggaaatgaggtgagcacttaatgaatcttgctaaaaatattaccatgattcctacaagaagaatggtgggtacgcaaaag

SEQ ID NO: 24540 - DNA, 260 bp, Unknown
  Description of Unknown: LeftRegion for integrase A108 sequence
ctgttcacaccaggggagatccccgaaggcgagccgctaccggagccctcgccacgttagagagaaggagatagagaatgaacaccccgacgcctgctgccggttggtacccggaccccagtggagcgcccggacagcgctacttcgacgggaccgagtggacctcccactctcagccgccagcgcacacacctcagccggtggcagtgctgccgaagaagaccaaccacgcgctgcatctgctgctgtccctcctgacc

SEQ ID NO: 24541 - DNA, 260 bp, Unknown
  Description of Unknown: LeftRegion for integrase A109 sequence
tacgagcagcatctcaggctcggcagcgtggtcgaacggctacacaccgggatgtcgtagagcgactacccccgagaacgcagaaaagccccctacgcgccgtgtaagggcacgcagagggctctctggtagtctctattcagttgtggggttgcgtccgtcagcgtggacgctagaggggtttacgggacctttccagcctgccgcgtccgggtatacgcggcgtctgccgtccgggtatacgatagtaaccggcttcc

SEQ ID NO: 24542 - DNA, 260 bp, Unknown; identical to SEQ ID NO: 24540
  Description of Unknown: LeftRegion for integrase A110 sequence

SEQ ID NO: 24543 - DNA, 260 bp, Unknown; identical to SEQ ID NO: 24540
  Description of Unknown: LeftRegion for integrase A111 sequence

SEQ ID NO: 24544 - DNA, 260 bp, Unknown
  Description of Unknown: LeftRegion for integrase A112 sequence
aagaacccggacggctctatcaagaaggtcctcaagaacggcaagctgaagaccgtgtacggctgcgaggtccgctgcggcggaggccgcgcccacaaagaggtcaccgaaacctactgacctcgcataccaagaaaccccctacccggcccgcgaaggctaggtagggggctttttgtgtttcagtgggcgtggccgtgatgacctgtgtcttcgtggtttgtctggtcaaccaccgcggtctcagtggtgtacggtac

SEQ ID NO: 24545 - DNA, 260 bp, Unknown
  Description of Unknown: LeftRegion for integrase A113 sequence
gaacccggacggctctatcaagaaggtcctcaagaacggcaagctgaagaccgtgtacggctgcgaggtccgctgcggcggaggccgcggcaagaccgagaccaccgatccgtggtgatctaacctcgcgcaccaagaaaccccctacccggcccgcgaaggctaggtagggggctttttgtgtttcagtgggtatggccgtgatgacctgtgtcttcgtggtttgtctggtcaaccaccgcggtctcagtggtgtacgg

SEQ ID NO: 24546 - DNA, 260 bp, Unknown
  Description of Unknown: LeftRegion for integrase A114 sequence
gtcggcgggttcggatcactgggccagcatcttcgtgccgttctgatcaccagagggtcgcgtcgcgccactgcggcggaggccgcggcaagaccgagacctccgatccgtggtgatctaaccccgcataccaagaaacccctacccggcccgcgaaggctaggtagggggcttttcttgtttcagtgggtgtggccgtgatgacctgtgtcttcgtggtttgtctggtcaaccaccgcggtctcagtggtgtacggtac

SEQ ID NO: 24547 - DNA, 260 bp, Unknown; identical to SEQ ID NO: 24546
  Description of Unknown: LeftRegion for integrase A115 sequence

SEQ ID NO: 24548 - DNA, 260 bp, Unknown
  Description of Unknown: LeftRegion for integrase A116 sequence
gacctacgccaagcacgccgacggctcgtacaagatggacggcaccaagcacgtctacaagtgtgtccgtcactgcggcggaggccgcggcaagaccgagaccaccgatccgtggtgatctaaccccgcataccaagaaaccccctacctagccttcgcgggccgggtagggggctttttgtgtttcagtgggtatggccgtgatgacctgtgtcttcgtggtttgtctggtcaaccaccgcggtctcagtggtgtacgg

SEQ ID NO: 24549 - DNA, 260 bp, Unknown
  Description of Unknown: LeftRegion for integrase A117 sequence
acctacgccaagcacgccgacggctcgtacaagatggacggcaccaagcacgtctacaagtgccagcgccactgcggcggaggccgcggcaagaccgagaccaccgatccgtggtgatctaaaccccgcataccaagaaaccccctacccggcccgcgaaggctaggtagggggctttttgtgtttcagtgggtatggccgtgatgacctgtgtcttcgtggtttgtctggtcaaccaccgcggtctcagtggtgtacgg

SEQ ID NO: 24550 - DNA, 260 bp, Unknown
  Description of Unknown: LeftRegion for integrase A118 sequence
acatcctcttgtcctagtaagactctatctgaaaaacggatattagctacatttgaagataaaattggatttaaaccagataaaaattgggttaccgaaaatatcaagaaggttatttatgactcatcagtaggtttaattaccgtctttcctataaaaggtagaaaatatgaactgaaggttagaaaggagcacttcttatgaaaaacgtcataactattgaagcaaatgcgcctaggaactcagagttagctagcatt

SEQ ID NO: 24551 - DNA, 260 bp, Unknown
  Description of Unknown: LeftRegion for integrase A119 sequence
gcccgcgccgccgaggagcggcgcaagtacgggatcccggatgacgaggtggctctgtgagcgacgttgatcgcccgctacgggtgacggtggggtatctggtaggccgtcaggtgactctgggccagatgttgaccgcgctggggatgtcccgcagcacctactacgcgcagatggaagctgggacgctgcacagcgccgatcacctcgtaaagacggcgcggcacttccacctcaaccccgtcgacctgctcgtaagg

SEQ ID NO: 24552 - DNA, 260 bp, Unknown
  Description of Unknown: LeftRegion for integrase A120 sequence
aagaacccggacggctctatcaagaaggtcctcaagaacggcaagctgaagaccgtgtacggctgcgaggcccgctgcggcggaggccgcgcccacaaagaggtcaccgaaacctactgacctcgcataccaagaaaccccctacctagccttcgcgggccgggtagggggctttttgtgtttcagtgggtatggccgtgatgacctgtgtcttcgtggtttgtctggtcaaccaccgcggtctcagtggtgtacggtac

SEQ ID NO: 24553 - DNA, 260 bp, Unknown
  Description of Unknown: LeftRegion for integrase A121 sequence
gattttgaatatgaaatagcccaaaaactaacacaatctttgttggagcaaggacttatttccacagaagaatacaacaaaatcaaggtgttgaacatagaaaaattttcacctttttataaggatttgatggatatatgacttgataattacagcaagtagagtgatatatagtactgataaaataaggaggtgagacaatggcaaggataacaaaaatcgaaactacaaaaagcttcgtgaaagaaagaaaaatacgt

SEQ ID NO: 24554 - DNA, 260 bp, Unknown
  Description of Unknown: LeftRegion for integrase A122 sequence
acatcctcttgtcctagtaagactctatctgaaaaacggatattagctacatttgaagataaaattggatttaaaccagataaaaattgggttaccgaaaatatcaagaaggttatttatgactcatcagtaggtttaattaccgtctttcctataaaaggtagaaaatatgaactgaaggttagaaaggagcacttcttatgaaaaacgtcataactattggagcaaatgcgcctaggaactcagagttagctagcatt

SEQ ID NO: 24555 - DNA, 260 bp, Unknown
  Description of Unknown: LeftRegion for integrase A123 sequence
acacggcaacaatacggtatatcaacttgcccaagtaaaaccttatcagagcgtcgtttggtacggacagttaaggaacaactaggagattatctcggtagcattcaaaaggttatgtttgattctagttcaaatcaagtcacactctattttgacgacgacaacattcaaatactaacacttaagcgaggacaattgaaatgaagaaagtcattaccattgaacctgctagacctgttcaccaagtagaagaaacctca

SEQ ID NO: 24556 - DNA, 260 bp, Unknown; identical to SEQ ID NO: 24328
  Description of Unknown: LeftRegion for integrase A124 sequence

SEQ ID NO: 24557 - DNA, 260 bp, Unknown
  Description of Unknown: LeftRegion for integrase A125 sequence
tgcaggacaagagatgccaagggtgtcgaggcttgtctaggacgtaccgttacagaagaacagctctttcaagcctttggtgagagcataaatacagaagacattcaccatatttcttttaatagcgtgaccaatgaagctaaagcgacctatagaaatggagaagaaaaacacgtcatcattcagaaaggacggtagacatgaaaaaagttatcacgatagaaccagccaaacaggtcacccataaggttgacctgccc

SEQ ID NO: 24558 - DNA, 260 bp, Unknown; identical to SEQ ID NO: 24557
  Description of Unknown: LeftRegion for integrase A126 sequence

SEQ ID NO: 24559 - DNA, 260 bp, Unknown; identical to SEQ ID NO: 24557
  Description of Unknown: LeftRegion for integrase A127 sequence

SEQ ID NO: 24560 - DNA, 260 bp, Unknown
  Description of Unknown: LeftRegion for integrase A128 sequence
tggggtgatccaagtgggcaaaaaaaagaaggcttttacaattaggtatatcccctgcgatgaggcagaaggcaaacttaatgagatagtaaaggatttaattaaagaaaagataaacaccgccttgtcccagtatgattctatagaatataatgatattgaaaaatcaattagccattatataacaggggtatatagttatgaaaaacaaaatagcaatttatgttcgggtatcgactacaaaagaatctcaaaaggat

SEQ ID NO: 24561 - DNA, 260 bp, Unknown
  Description of Unknown: LeftRegion for integrase A129 sequence
tggggtgatccaagtgggcaaaaaaaagaaggcttttacaattaggtatatcccctgcgatgaggcagaaggcaaacttaatgagatagtaaaggatttgattaaagaaaagataaacagcgccttgtcccagtatgattctatagaatataatgatattgaaaaatcaattagccattatataacaggggtatgtagttatgaaaaacaaaatagcaatttatgttcgggtatcgactacaaaagaatctcaaaaggat

SEQ ID NO: 24562 - DNA, 260 bp, Unknown
  Description of Unknown: LeftRegion for integrase A130 sequence
aaggtctacaagtgcgtccgtcactgcggcggaggccgcggcaagaccgagaccaccgatccgtggtgatctaaccccgcataccaatatggtcccttatcggacctattgacgcaaagaaaccccctacctagccttcgcgggccgggtagggggcttttcttgtttcagtgggtatggccgtgatgacctgtgccttcgtggtttgtctggtcaaccaccgcggtctcagtggtgtacggtacaaacccatgagagcc

SEQ ID NO: 24563 - DNA, 260 bp, Unknown
  Description of Unknown: LeftRegion for integrase A131 sequence
ggtgtcatcgttgcgaactggatcgagccacacgacatcgagaagcgcctggcctcttgaccgttcgtgtgccaggctcctcggtgccatgcaccactcagggataggagacctgatgtacgcgaatgtcccaccgcccgtgccgttccagcctcagcggaaggcggcaccgaacccgctgttcctcgtcctcgcgatcctgtcgtccctgccgactgcattcttcgtgctctgcttcatcttgtccccctcgatgctgt

SEQ ID NO: 24564 - DNA, 260 bp, Unknown
  Description of Unknown: LeftRegion for integrase A132 sequence
ggaatatgactttcacatagccgagagtattatcgcaaacctatataaagaaggtaaaattacagtggatgaattacacaaaatatcagccttgaacaggcagaaattctctccccgtttagccgagattatgtcctaaaaagcttgctattaatagcttttagagtgatgtatgtaatgggcgaaagcgaggtgagatgatgaaaaagataacaaaaatagatgaactgccccagggacagctacctaatacgaaactt

SEQ ID NO: 24565 - DNA, 260 bp, Unknown
  Description of Unknown: LeftRegion for integrase A133 sequence
tgataaagagatatttgataaagctgaagaagttagagataagcgtgcaaaggatttaggacgagtggtagagcttgccgctttcacctctccccctcccaaagaacgatttaaaatgagaaaggcagataataagatgccagttgatccttttgaacgagcagaatacttatatagtctgatagaaagcgaggaataaagtgacagagaaaaatataatggttattcctgctcgtaaaagagtaggaagtacagccgca

SEQ ID NO: 24566 - DNA, 260 bp, Unknown
  Description of Unknown: LeftRegion for integrase A134 sequence
gccgcatggtcgctcgccgaggcgtgggcgcccggcgcgctcatcctctccgggagccactcgcgcgacctcgccgagtaccgagccgctcgcggcctctagctcgccctcgcaaggccctcgcttaggcgggggccttttcgcgtattctcgatgcgcactaggtacataccgcgcccgcattctgtacctagtgcgcattgggttgtcgctcgtgtaggctcttgcgcatgtcgactcccgcaagccctccgcgcgcc

SEQ ID NO: 24567 - DNA, 260 bp, Unknown
  Description of Unknown: LeftRegion for integrase A135 sequence
gcatcatcatgttcatgtaggacgttaggagaaaagcgacttttggcatcgtttaaaagcaagttaggcattgtaccagataaagagtgggttgaaaataatattaagcacatcgattatgattttggtcaacgtatcatctgggttataccagtaaaaggaaggaaatatcctatagaaattagagaggggcgatattagtgaagaaagtaattactattcaggctacaccaagtattattaggtcaagttcagatgat

SEQ ID NO: 24568 - DNA, 260 bp, Unknown; identical to SEQ ID NO: 24567
  Description of Unknown: LeftRegion for integrase A136 sequence

SEQ ID NO: 24569 - DNA, 260 bp, Unknown
  Description of Unknown: LeftRegion for integrase A137 sequence
tgacaaagagatatttgataaagctgaagaagttagagataagcgtgcaaaggatttaggacgagtggtagagcttgccgctttcacctctccccctcccaaagaacgatttaaaatgagaaaggcagataataagatgccagttgatccttttgaacgagcagaatacttatatagtctgatagaaagcgaggaataaagtgacagagaaaaatataatggttattcctgctcgtaaaagagtaggaagtacagccgca

SEQ ID NO: 24570 - DNA, 260 bp, Unknown
  Description of Unknown: LeftRegion for integrase A138 sequence
ggaatatgattttcacatagcagagagtattgtcgcaaacctatataaagaaggcaaaatcacagcggatgaattaaacaaaatatcagccttgaacaggcagaaattctctccccgtttagccgagattatgtcctgaaaagcttgctattaatagcttttagagtgatgtatgtaatgggcgaaagcgaggtgagatgatgaaaaagataacaaaaatagatgaactgcccaagggacaactacctaatacgaaactt

SEQ ID NO: 24571 - DNA, 260 bp, Unknown
  Description of Unknown: LeftRegion for integrase A139 sequence
ggcgtcatcgtcgcgaactggatcgagccacacgacatcgagaagcgcctggcctcttgaccgttcgtgtgccaggctcctcggtgccatgcaccactcagggataggagtcctgatgtacgcgaatgtcccaccgcccgtgccgttccagcctcagcggaaggcggcaccgaacccgctgttcctcgtcctcgcgatcctgtcgtccgtgccgactgcattcttcgtactctgcttcatcttgtccccctcgatgctgt

SEQ ID NO: 24572 - DNA, 260 bp, Unknown
  Description of Unknown: LeftRegion for integrase A140 sequence
ggcgtcatcgtcgcgaactggatcgagccacacgacatcgagaagcgcctggcctcttgaccgttcgtgtgccaggctcctcggtgccatgcaccactcagggataggagacctgatgtacgcgaatgtcccaccgcccgtgccgttccagcctcagcggaaggcggcaccgaacccgctgttcctcgtcctcgcgatcctgtcgtccgtgccgactgcattcttcgtactctgcttcatcttgtccccctcgatgctgt

SEQ ID NO: 24573 - DNA, 260 bp, Unknown
  Description of Unknown: LeftRegion for integrase A141 sequence
ggtgtcatcgtggcgcactggatcgagccacacgacatcgagaagcgcctggcttcttgactggacatgtgccaggctcctatctcccagcaagttcacagggataggagacctgatgcacaacttcaccatcgccctcgtcgccgttgcggctgcagccaccatcgccgggtgctcggcaccgacccccaaggtcgacagcagtccgaagagctctgcgccgagcagcgagcctgccgcgacggagctcgcgaccacgg

SEQ ID NO: 24574 - DNA, 260 bp, Unknown
  Description of Unknown: LeftRegion for integrase A142 sequence
ggggaaacggactgacccggacacgccggacatgctagaactgtatttcacgcgcactcggaaacccgaaggcgctcaactgacacttcaggagagaccttcccgtgacagcaaacgcccaggtcagcggcacgtcaccgactcccttcatggcgggcatgacgacccccttgcgtggcctatccgtactccgtctgtctgtgctcacggacgagacgacaagccctgagcggcagcgtggcgccaaccatgacgccggc

SEQ ID NO: 24575 - DNA, 260 bp, Unknown
  Description of Unknown: LeftRegion for integrase A143 sequence
ggggaaacgggcttacccggacacccgggacatgctagaactgtatttcgcgcgcctccggaaacccgaaggcgctcaactgacacttcaggagagaccttcccgtgacggcaaacgcccaggtcagcgccgggtcaccgactcccttcatggcgggcatgacgaccccccttcgtggcctatccgtactccgtctgtctgtgctcaccgacgagacgacaagccctgagcggcagcgtgccgccaaccatgacgccggc

SEQ ID NO: 24576 - DNA, 260 bp, Unknown
  Description of Unknown: LeftRegion for integrase A144 sequence
agaagcctatactggaacacttgtcttacaaaaaacgtatcatgtagggcacaaaggacgttcagttgaaaataaaggagagcgaacaaagtacattgtagaaaatgcccatgaggcgattatctcaagagaaatgtttgaagaggtgcaacaagagaaagcaagaagaagtttacacaacaagaaaaaggaggggcgtcatgactaaaaagattattacgatagaacctgcaaaaatcttacgatcatcagaactaccc

SEQ ID NO: 24577 - DNA, 260 bp, Unknown
  Description of Unknown: LeftRegion for integrase A145 sequence
ccccggaacatcgaggtcgtcgtgccccaggaccgcgtggcggttgacctggctatttgacatcgcctatgccagggtgtgtgtcatgtcaaatccggtgccatacccctaccccgtaccgtcgaagcggaagcccgcgcccaacccgctgttcctcaccctctcgatcctgtcggggttcccgaccgcgttcttcctactgctcttcgtgtccggtggcacctcggtcttcgtcatgatcgggttcctctggtccgcga

SEQ ID NO: 24578 - DNA, 85 bp, Unknown
  Description of Unknown: LeftRegion for integrase A146 sequence
gaactgtccaaaaagttcgcacaaggtcacgtcacctccaccaacataaaagccacctgaaaacttacgtttttcaggtggcttt

SEQ ID NO: 24579 - DNA, 260 bp, Unknown
  Description of Unknown: LeftRegion for integrase A147 sequence
ccatccgcgcgaggaccggtcttcgcacgggggcacaccagtaccgccttctggcacaccaggccctcgccgcctaccagcggggactgtccccgcgctgaccccaacgccaaaggcccccagctcatcatcgagccgggggccttttcgcgtacccgccaccgtgactagcaggataggtcttgtcagatgtactccatatgacctatcctttcaatatggatcaagacctcgccaagcctacccgccgcccacgcgcc

SEQ ID NO: 24580 - DNA, 260 bp, Unknown
  Description of Unknown: LeftRegion for integrase A148 sequence
aacaaaaaccgcgtatatgacccaaatgaggtggttttacgggtccatttggttgaatgaaaaacacgtttaaacggctctgttgagccattttttatacttgttcgcgcattaaaccaatcatgtcattggtgtcaatgcaacaacattgttttatagggaaagtgagcggtgggccgaatgacggttcatcgctctttctttttatcatcgtatacccccgaccgtaaataaaaagaccacccacaggtggcctttca

SEQ ID NO: 24581 - DNA, 260 bp, Unknown
  Description of Unknown: LeftRegion for integrase A149 sequence
gctcgtacaagatggatggcaccaagcacgtctacaagtgccagcgccactgcggcggaggccgcggcaagaccgagaccaccgatccgtggtgatctaacctcgcataccaagaaaccccctacccggcccgcgaaggctaggtagggggcttttcttgtttcagtgggtatggccgtgaagacctgtgtcttcgtggtttgtctggtcaaccactgcggtctcagtggtgtacggtacaaaccatgagggctctcgtc

SEQ ID NO: 24582 - DNA, 260 bp, Unknown
  Description of Unknown: LeftRegion for integrase A150 sequence
ggcggcgaagagttcctggcctcgacggtactggcgaaagccggtatagcgtcacagtgacgaatcgaccttataccacagcaaccccttgaaacgcaaaaaagccccccaaccagggatttctccttggaaggggggtttctttgtctagtaggcgtagaaccacgcctgtccgcgagcgcctgcgctgcccgctgtggtcgagatggtcgtcccgcaaccggcaccgccgggggcgtttcctgctcccgtgagtgcgg

SEQ ID NO: 24583 - DNA, 260 bp, Unknown
  Description of Unknown: LeftRegion for integrase A151 sequence
ccgttcacaaaaacggcaaagaccacaaggtctacaagtgcgttcggcactgcggcggaggccgcggcaagaccgagaccaccgacccgtggtgatctaaccccgcataccaagaaaccccctacccggcccgcgaaggctaggtagggggcttttcttgtttcagtgggtatggccgtgatgacctgtgtcttcgtggtttgtctggtcaaccaccgcggtctcagtggtgtacggtacaaaccatgcgagctctcgtc

SEQ ID NO: 24584 - DNA, 60 bp, Unknown
  Description of Unknown: LeftRegion for integrase A152 sequence
gaaagttcgtctgggatgcgtctggtccgagtggcgagaatcgaactcacggcctcttga

SEQ ID NO: 24585 - DNA, 260 bp, Unknown
  Description of Unknown: LeftRegion for integrase A153 sequence
ggcggaggccgcggcaagaccgagaccaccgatccgtggtgatctaaccccgcataccaaaaaaccccctacccggcccgcgaaggctaggtagggggctttttcgcgttcaggggacctgatcgctcagcgacccatctccgatgggatcgcgtttgtgtttcagtgggtatggccgtgaagacctgtgtcttcgtggtttgtctggtcaaccactgcggtctcagtggtgtacggtacaaaccatgagggctctcgtc

SEQ ID NO: 24586 - DNA, 260 bp, Unknown
  Description of Unknown: LeftRegion for integrase A154 sequence
tataactatatttttgcagaagaactaacaagaaaactcttagataagggatttattacagaggaagaatacgagaaaatcatgagaaaaaaccgtcataaatttaagccttttttatcgaagatattgccataaatcacttgatatatacagcgtttagagtgatatatgtaataccgaaaaaagaagggggtgagacaatgaaacggataacaaaaattgagccggcgaaaaaaacatcaaagaaaaaattgagagtt

SEQ ID NO: 24587 - DNA, 260 bp, Unknown
  Description of Unknown: LeftRegion for integrase A155 sequence
tcaagacacctatacgggacgattaatattacaaaaaacatatcgtgtagcacataaaggaagatctgttatgaatcaaggtgagcatacaaagtatatcgttgaacaagcccatgagccgattatctcaaaagaacaatttgaagaagtccagcaagtaaaagccacaagaagtaatcattatcagaaaggagcaaagcatggcgaaaaagattgtcaccatagaagcagttaagcctgtttgtcatcaagtagatttt

SEQ ID NO: 24588 - DNA, 260 bp, Unknown
  Description of Unknown: LeftRegion for integrase A156 sequence
gaaataatagttgatcgaacagacgaaaatgaagcaaaaataaaagtaaattttctctaaggggataggactttaaagagacttttggaaaaggaacttaattataataatactttatttagtctatctctaggtggaactgtacttaattaagtcgaaatataatcaagtaccaaaagttgtcctatccccgttataacaaagaatacaagtatttttctaaattgattgaaattagatttttaaataatttgagtatg

SEQ ID NO: 24589 - DNA, 60 bp, Unknown
  Description of Unknown: LeftRegion for integrase A157 sequence
tcaaaagttgatgttaccgctgataatatagatatcatatttaaattccaactcgcttaa

SEQ ID NO: 24590 - DNA, 89 bp, Unknown
  Description of Unknown: LeftRegion for integrase A158 sequence
tcaaaagttgatgttaccgctgataatatagatatcatatttaaattccaactcgcttaattgcgagtttttatttcgtttatctcaat

SEQ ID NO: 24591 - DNA, 260 bp, Unknown
  Description of Unknown: LeftRegion for integrase A159 sequence
ccccggaacatcgaagtcgttgtgccacaggaccgcgtagcggtcgacctggctatctgataggcggtatgccagggtgtgtgccatgtcaaatcaggtgccatacccctaccccgtacctccgaagcgcaaggccgcgccgaacccgctgttcctcgtcctcgcgatcctgtcggcgctgccgaccgcgttcttcggactcgcgttcctcatgtccccgacgatgctctgggtgatggcgaccggctggtgcggtatgt

SEQ ID NO: 24592 - DNA, 260 bp, Unknown
  Description of Unknown: LeftRegion for integrase A160 sequence
tgcaggacaagagatggcaagggtgttgaggcttgtctaggacgtaccgttacagaagaacaactctttcaagcctttggtgagagcataaatatagaagacattcaccatatttcttttaatagcgtgaccaatgaagctaaggtgacctatagaaatggaaaagaaaaacacgtcatcattcagaaaggacggtagacatgaaaaaagttatcacgatagaaccagctaaacaagtcacccatatggttgacctgccc

SEQ ID NO: 24593 - skipped

SEQ ID NO: 24594 - DNA, 260 bp, Unknown
  Description of Unknown: LeftRegion for integrase A162 sequence
aaaccccctagttctaatcattaccccatgaataaaataacagaagtaaaaattgtatttcaaatcgccaatttttaaaattgcggcctaaactcggcccaatttttaaatttttcctaaggaaaaatcgaatttgtttaaaggaaatatcttcgatatacttattattaaatgtgtaccatttgcaaaggggtgtggttatggaattaacgccaattgaattcaaaaaagacacggaaaaaatcatcccatacagtgag

SEQ ID NO: 24595 - DNA, 260 bp, Unknown
  Description of Unknown: LeftRegion for integrase A163 sequence
tcgttaagtttttttattgaaagtggtttgcctacttatagagacagatatgagatgcaagctgacaaatttgctgctgaattgcttatcccagatggctattcaaaatgtgaaattgctaatatgacaatagaacaattaagttgttattttggcgtaaatgaacgtcttattaaatataagtttgggtggtggtaataatgaatcgtgtatgtatttatcttaggaagtcccgagcagacgaagaaatagaaaaagag

SEQ ID NO: 24596 - DNA, 260 bp, Unknown
  Description of Unknown: LeftRegion for integrase A164 sequence
agggtgcccgaggagctgactcgccgcctcggactacccgaccccgttccgtcacagtgacgctttgaacgcaaaaaagccccctcccaaggacactgaggtccctgagagggggtttctttgtcagccgacccgcaccatggagaaccaggtgttggccgcgttcgcgtcaccgaggatgttgacgttgccaccggtcttcagtccgggctggaccgtcgcgcctgccgcgaggtagtactgcacaccgtcgccgccgt

SEQ ID NO: 24597 - DNA, 260 bp, Unknown
  Description of Unknown: LeftRegion for integrase A165 sequence
ccccggaacatcgaggtcgtcgtgccccaggaccgcgtggcggttgacctggctatttgacatcgcctatgccagggtgtgtgtcatgtcaaatccggtgccatacccctaccccgtaccgtcgaagcggaagcccgcgcccaacccgctgttcctcaccctctcgatcctgtcggggttcccgaccgcgttcttcctgctgctcttcgtgaccggtggcacctcgatcctcgtcatgatcgggttcctctggtcagcca

SEQ ID NO: 24598 - DNA, 260 bp, Unknown
  Description of Unknown: LeftRegion for integrase A166 sequence
ccccggaacatcgaggtcgtcgtgccccaggaccgcgtggcggttgacctggctatttgacatcgcctatgccagggtgtgtgtcatgtcaaatccggtgccatacccctaccccgtaccgtcgaagcggaagcccgcgcccaacccgctgttcctcaccctctcgattctgtcggggttcccgaccgcgttcttcctactgctcttcgtgaccggtggcacctcggtcttcgtcatgatcgggttcctctggtcagcca

SEQ ID NO: 24599 - DNA, 260 bp, Unknown
  Description of Unknown: LeftRegion for integrase A167 sequence
ccccggaacatcgaggtcgtcgtgccccaggaccgcgtggcggttgacctggctatttgacatcgcctatgccagggtgtgtgacatgtcaaatccggtgccatacccctaccccgtaccgtcgaagcggaagcccgcgccgaaccctctgttcctcgtcctcgcgatcctgtcggccgtgccgactgcgttcttcgtgctcgcgttcctcttgtcaccgacgatgctttgggtgctggcagccgggtggtgcggaatgt

SEQ ID NO: 24600 - DNA, 260 bp, Unknown
  Description of Unknown: LeftRegion for integrase A168 sequence
gccctccacttcgacatccgggtcccgcacgaactgacacagagactcatcgccccatgagaaacacagaaggaaggagaaccatgttcaaactcgctatctctctcgcggctgcagcagccctgctggccgggtgcggccagagcgcgcccaccgcagcgccagccgccgcccaggagaaggacgcgaagcggggggccgtcgtcttcgagatcggaggggactactcctacgccacctacgacgacaacttcgagaac

SEQ ID NO: 24601 - DNA, 260 bp, Unknown; identical to SEQ ID NO: 24599
  Description of Unknown: LeftRegion for integrase A169 sequence

SEQ ID NO: 24602 - DNA, 260 bp, Unknown
  Description of Unknown: LeftRegion for integrase A170 sequence
aaccccgaataccaagaaaccccctacccggcccgcgaaggctaggtagggggctttttcgcgttcaggggacctgatcgctcagcgacccatctccgatgggatcgcgtttgttttcagtgggcgtggccgtgatgacctgtgtcttcgtggtttgtccggtcaaccaccgcggtctcagtggtgtacggtacaaacccatgagagctctcgtcgtgatccgcttgtcccgcgtcaccgatgctacgacctcaccggag

SEQ ID NO: 24603 - DNA, 260 bp, Unknown
  Description of Unknown: LeftRegion for integrase A171 sequence
ccactgcggcggcggccgcggcaagaccgagaccaccgacccgtggtgatctaaccccgcataccaagaaaccccctacccggcccgcgaaggctaggtagggggctttttgtgtttcagtgggtgtgaccgtgatgacctgtgtcttcgtggtttgtctggtcaaccaccgcggtctcagtggtgtacggtacaaacccatgagagccctggtagtgatccgactgtcccgcgtcaccgatgctacgacctcgccggag

SEQ ID NO: 24604 - DNA, 260 bp, Unknown
  Description of Unknown: LeftRegion for integrase A172 sequence
gaggcccgctgcggcggaggccgcgcccacaaagaggtcaccgaaacctactgacctcgcataccaagaaaccccctacctagccttcgcgggccgggtagggggcttttcttgtttcagtgggtatggccgtgatgacctgtgtcttcgtggtttgtctggtcaaccaccgcggtctcagtggtgtacggtacaaacccatgagagccctggtagtgatccgcctgtcccgcgtcaccgatgctacgacctcaccggag

SEQ ID NO: 24605 - DNA, 260 bp, Unknown
  Description of Unknown: LeftRegion for integrase A173 sequence
gaggtccgctgcggcggaggccgcgcccacaaagaggtcaccgaaacctactgacctcgcataccaagaaaccccctacctagccttcgcgggccgggtagggggcttttcttgtttcagtgggtatggccgtgatgacctgtgtcttcgtggtttgtctggtcaaccaccgcggtctcagtggtgtacggtacaaacccatgagagtcctggtagtgatccgactgtcccgcgttaccgatgctacgacttcaccggag

SEQ ID NO: 24606 - DNA, 260 bp, Unknown
  Description of Unknown: LeftRegion for integrase A174 sequence
gaggtccgctgcggcggaggccgcgcccacaaagaggtcaccgaaacctactgacctcgcataccaagaaaccccctacctagccttcgcgggccgggtagggggctttttgcgtttcagtgggtgtggccgtgatgacctgtgtcttcgtggtttgtctggtcaaccaccgcggtctcagtggtgtacggtacaaacccatgagagccctggtagtgatccgactgtcccgtgtcaccgatgctacgacttcacccgag

SEQ ID NO: 24607 - DNA, 260 bp, Unknown
  Description of Unknown: LeftRegion for integrase A175 sequence
ccactgcggcggaggccgcggcaagaccgagaccaccgatccgtggtgatctaaccccgcataccaagaaaccccctacccggcccgcgaaggctaggtagggggctttttgtgtttcagtgggtatggccgtgatgacctgtgtcttcgtggtttgtctggtcaaccaccgcggtctcagtggtgtacggtacaaacccatgagagccctggtagtcatccgcctgtcccgcgtcaccgatgctacgacttcgccggag

SEQ ID NO: 24608 - DNA, 260 bp, Unknown
  Description of Unknown: LeftRegion for integrase A176 sequence
ccccggaacatcgaggtcgtcgtgccccaggaccgcgtggcggttgacctggctatttgacatcgcctatgccagggtgtgtgtcatgtcaaatccggtgccatacccctaccccgtaccgtcgaagcggaagcccgcgcccaacccgctgttcctcaccctctcgatcctgtcgggattcccgaccgcgttcttcctactgctcttcgtgaccggtggcacctcgatcttcgtcatgatcgggttcctctggtcagcca

SEQ ID NO: 24609 - DNA, 260 bp, Unknown
  Description of Unknown: LeftRegion for integrase A177 sequence
ccactgcggcggcggccgcggcaagaccgagaccaccgatccctggtgatctaacctcgcgcaccaagaaaccccctacccggcccgcgaaggctaggtagggggctttttgtgtttcagtgggtatggccgtgatgacctgtgtcttcgtggtttgtctggtcaaccaccgcggtctcagtggtgtacggtacaaacccatgagagccctggtagtcatccgactgtcccgcgtcaccgatgctacgacctcaccggag

SEQ ID NO: 24610 - DNA, 260 bp, Unknown
  Description of Unknown: LeftRegion for integrase A178 sequence
accccgcataccaagaaaccccctacccggcccgcgaaggctaggtagggggctttctcgcgttcaggggacctgatcgctcagcgacccatctccgatgggatcgcgtttgtgtttcagtgggcgtggccgtgatgacctgtgtcttcgtggtttgtctggtcaaccaccgcggtctcagtggtgtacggtacaaacccatgagggctctcgtcgtgatccgcctgtcccgtgtcaccgatactacgacttcacccgag

SEQ ID NO: 24611 - DNA, 260 bp, Unknown; identical to SEQ ID NO: 24577
  Description of Unknown: LeftRegion for integrase A179 sequence

SEQ ID NO: 24612 - DNA, 260 bp, Unknown
  Description of Unknown: LeftRegion for integrase A180 sequence
cactgcggcggaggccgcggcaagaccgagaccaccgatccgtggtgatctaacccccgcataccaagaaaccccctacctagccttcgcgggccgggtagggggctttttgcgtttcagtgggtatggccgtgatgacctgtgtcttcgtggtttgtctggtcaaccaccgcggtctcagtggtgtacggtacaaacccatgagagccctggtagtcatccgcctgtcccgcgtcaccgatgctacgacctccccggag

SEQ ID NO: 24613 - DNA, 260 bp, Unknown
  Description of Unknown: LeftRegion for integrase A181 sequence
ccccggaacatcgaggtcgtcgtgccccaggaccgcgtggcggttgacctggctatttgacatcgcctatgccagggtgtgtgtcatgtcaaatccggtgccatacccctaccccgtaccgtcgaagcggaagccagcgcccaacccgctgttcctcaccctctcgatcctgtcggggttcccgaccgcgttcttcctactgctcttcgtgaccggtggcacctcgatcttcgtcatgatcgggttcctctggtcagcca

SEQ ID NO: 24614 - DNA, 260 bp, Unknown
  Description of Unknown: LeftRegion for integrase A182 sequence
acctcgcataccaagaaaccccctacccggcccgcgaaggctaggtagggggcttttcttgtttcagggggtatggccgtgaagacctgtgtcttcgtggtttgtctggtcaaccaccgcggtctcagtggtgtacggtacaaaccaggcccggggcgaagctccggccgtaagcgtcaatcgtccgaaggagatctagcgtgagagcgctggtggtgatccgtctatcccgtgtgaccgatgctacgacctccccggag

SEQ ID NO: 24615 - DNA, 260 bp, Unknown
  Description of Unknown: LeftRegion for integrase A183 sequence
actaaaactgaaaagggaaaagattatgaaattaaactttttcctaaacttcgtaaataagtctaactggcttatttacttggtttaatccaactacatacaacatactagatatatttcattacacacaataagttgtatgtaaattatttagtttcttcctatttatatataaaaaagcatagttaaaaactatgcttttaatcaacttattcaaaaaagtttatttttccttcattctcatagcctgttgttgctat

SEQ ID NO: 24616 - DNA, 96 bp, Unknown
  Description of Unknown: LeftRegion for integrase A184 sequence
actaagaataaacgtggagatacctttggaatagatatatttcctaaacttaagccctagactgataacttgtccagggtatttcattgccttctt

SEQ ID NO: 24617 - DNA, 92 bp, Unknown
  Description of Unknown: LeftRegion for integrase A185 sequence
actaaggataaacgtggagaaacttttggaatagatatatttccaaaacttaaaccctagactgataacttgtccagggtaattcattgcct

SEQ ID NO: 24618 - DNA, 96 bp, Unknown
  Description of Unknown: LeftRegion for integrase A186 sequence
actaagaataaacgtggagaaacctttggaatagatatatttcctaaacttaaaccctagactgataacttgtctagggtatttcattgccttctt

SEQ ID NO: 24619 - DNA, 260 bp, Unknown
  Description of Unknown: LeftRegion for integrase A187 sequence
gccctgcgcttcgacatccgagtgccggcagaactgacccagcgcctgggagcgtcctgaaacgcaaaaaagcccccctccgaagaggggggcctttgcctagtcgaccgtgtagccgagctgttccagggcgtcctcgtgggacgtccccggagggaatttgtgtaggggagtgaggtcggtagcgagaccttcctcgttgcaggcgaatacgaccgtgggccgcacgacgtgcttgacggcctgtcggccttcgccca

SEQ ID NO: 24620 - DNA, 260 bp, Unknown
  Description of Unknown: LeftRegion for integrase A188 sequence
gccctgcacttcgacttccgggtccccgaggaactgacccagcggctcggagtctcctgaaacgcaaaaaagccccctcccaaggccgtagccctgagagggggtttctttgtctagccgactctcaccatcgagaaccaggagttggacgcattcgcgtcaccgaggatgttcacgtcaccgtcggtcttgagaccgggctgcaccgtcgcgccagcggagaggtagtactgcacaccgtcaccgccgtaggcgatgtc

SEQ ID NO: 24621 - DNA, 260 bp, Unknown
  Description of Unknown: LeftRegion for integrase A189 sequence
gccctccacttcgacatccgggtcccgcacgaactgacacagagactcatcgccccatgagaaacacagaaggaaggagaaccatgttcaaactcgctatctctctcgcggctgcagcagccctgctggccgggtgcggccagagcgcgcccactgcagcgccagccgccgcccaggagaaagaggcgaagcgggggaccgtcgtattcgagatcggaggggactactcctacgccacctacgacgacaacttcgagaac

SEQ ID NO: 24622 - DNA, 260 bp, Unknown
  Description of Unknown: LeftRegion for integrase A190 sequence
ggagcactcgagttcaatctcagagttcccgaggatgcacacgcccgcatggcctcttaaacacgaatagccccctcccggttaggggagggggaatcgtgactagatcaaggtcaggttgagtgcggacgagtccacgtttcgagcggacgtacggttggtgccagtgacgtacgcctggacttcgatcacgtcgccttcgtagaacctggatggtccggtctccagagtcacagaccagccgctggttgtgaatgtgc

SEQ ID NO: 24623 - DNA, 260 bp, Unknown
  Description of Unknown: LeftRegion for integrase A191 sequence
ggtgctctccagttcaatctccgagtgccagccgatgcacaagagcgcctagcctcttaaacgacgaaagccccctcccggttaagggagggggaatcgtgtcagaccagggtcagattgagcgcggacgaatccacgtttcgagcggacgtgcggttggtaccggtggtgtaagcctgaacctcgaccacgtcaccttcgtagaacctgtacggcccactatccagggtcactgcccatccacctgtagtgaacgagcc

SEQ ID NO: 24624 - DNA, 260 bp, Unknown
  Description of Unknown: LeftRegion for integrase A192 sequence
ggagcactcgagttccatctcagagtccccgaggatgcacacgaccgcatggcctcttaaacacgaaaagccccctcccggttaggggagggggaatcgtggctagaccaaagccaggctgagcgaggacgagtccacgtttcgagcggacgtacggttggtgccagtggtgtacgcctggacctcgaccacgtcaccgtcgtagaacctgtacgggccggtctccagagtgaccgaccagccgttgttggagaacgtac

SEQ ID NO: 24625 - DNA, 260 bp, Unknown; identical to SEQ ID NO: 24624
  Description of Unknown: LeftRegion for integrase A193 sequence

SEQ ID NO: 24626 - DNA, 260 bp, Unknown
  Description of Unknown: LeftRegion for integrase A194 sequence
gccctgcacttcgacttccgggtccccgaggaactgacccagcggctcggagtcgcctgaaacgcaaaaaagcccccctcccggagcccgaaggccctgagaggggggtttctttgtcagccgactctcaccatcgagaaccaggtgttggccgcgttggcgtcaccgacgatgttcacgtcgccatcggtcttcagaccgggttggaccgtcgtacctgccgccaggtagtactgcacgccgtcgccgccgtacacgag

SEQ ID NO: 24627 - DNA, 260 bp, Unknown; identical to SEQ ID NO: 24624
  Description of Unknown: LeftRegion for integrase A195 sequence

SEQ ID NO: 24628 - DNA, 260 bp, Unknown; identical to SEQ ID NO: 24600
  Description of Unknown: LeftRegion for integrase A196 sequence

SEQ ID NO: 24629 - DNA, 260 bp, Unknown
  Description of Unknown: LeftRegion for integrase A197 sequence
gccctgcacttcgacttccgggtccccgaggaactgacccagcggctcggagtctcctgaaacgcaaaaaagccccctcccaaggccgtagccctgagagggggtttctttgtctagccgactctcaccatcgagaaccaggagttggacgcattcgcgtcaccgaggatgttcacgtcgccgtcggtcttgagaccgggctgcaccgtcgcgccagcggagaggtagtactgcacaccgtcaccgccgtaggcgatgtc

SEQ ID NO: 24630 - DNA, 260 bp, Unknown
  Description of Unknown: LeftRegion for integrase A198 sequence
tgcggcggcggtcgccacgccaaagaggtcaccgaaacctactgacctcgcatactaagaaaccccctacccggcccgcgaaggctaggtagggggctttttgcgtttcagtgggtgtggccgtgatgacctgtgtcttcgtggtttgtctggtcaaccaccgcggtctcagtggtgtacggtacaaacccatgcgcgctttggtagtgatccgcttgtcccgtgtgaccgatgctacgacttcacccgagcgtcagctg

SEQ ID NO: 24631 - DNA, 260 bp, Unknown
  Description of Unknown: LeftRegion for integrase A199 sequence
ggtgtcatcgtcgcgaactggatcgagccacacgacatcgagaagcgcctggcgtcctgaccgcttctatgccaggctcctggcttccagcatgttcacagggataggagacctgatgatgaatgtgaacgtcccaccgcccgtgccgttcgtgccgccgcagcggagggcggcgcccaaccctctgttcctcgtcctcgcgatcctctcagcgataccgactgcgttcttcgtgttcgcactcgtcgccgcgccgacga

SEQ ID NO: 24632 - DNA, 260 bp, Unknown
  Description of Unknown: LeftRegion for integrase A200 sequence
ctgaagtcgagcaagcccatgaacttcgctctacacgtcccgcagaaggaggcaggatgacgaccccagccccaggttggtacccagaccccgcaggtacaaaccagccgaggtactgggacggaaagaagtgggtgggtgaaccgaccactgtgccggtgaagacgaaccacgcgctgcatctcctgctgacgatcctcaccttctggatgttcggcggctggctgtgggtctggattctcgtcgcgatcgccaaccac

SEQ ID NO: 24633 - DNA, 260 bp, Unknown
  Description of Unknown: LeftRegion for integrase A201 sequence
cactgcggcggaggccgcggcaagaccgagaccaccgatccgtggtgatctaaaccccgcataccaagaaaccccctacccggcccgcgaaggctaggtagggggcttttcttgtttcagtgggtatggccgtgatgacctgtgtcttcgtggtttgtctggtcaaccaccgcggtctcagtggtgtacggtacaaacccatgagagccctggtagtgatccgcctgtcccgcgtcaccgatgctacgacctcacccgag

SEQ ID NO: 24634 - DNA, 260 bp, Unknown
  Description of Unknown: LeftRegion for integrase A202 sequence
ccactgcggcggcggccgcggcaaggtcgagaccaccgatccgtggtgatctaaccccgcataccaagaaaccccctacctagccttcgcgggccgggtagggggctttttgtgtttcagtgggtgtggccgtgatgacctgtgtcttcgtggtttgtctggtcaaccaccgcggtctcagtggtgtacggtacaaacccatgagagccctggtagtcatccgcctgtcccgcgtcaccgatgctacgacttcaccggag

SEQ ID NO: 24635 - DNA, 260 bp, Unknown
  Description of Unknown: LeftRegion for integrase A203 sequence
cactgcggcggaggtcgcggaaagaccgagaccaccgatccgtggtgatctaaccccacataccaagaaacccccctacccggcccgcgaaggctaggtagggggctttttgtgtttcagtgggtgtggccgagatgacctgtgtcttcgtggtttgtctggtcaaccaccgcggtctcagtggtgtacggtacaaacccatgagagccctggtagtcatccgcctgtcccgcgttaccgatgctacgacttcgccggag

SEQ ID NO: 24636 - DNA, 260 bp, Unknown
  Description of Unknown: LeftRegion for integrase A204 sequence
ccactgcggtggaggccgcggcaagaccgagaccaccgatccgtggtgatctaaccccgcataccaagaaaccccctacccggcccgcgaaggctaggtagggggctttttgtgtttcagtgggtatggccgtgatgacctgtgtcttcgtggtttgtctggtcaaccaccgcggtctcagtggtgtacggtacaaacccatgagagccctggtagtcatccgcctgtcccgcgtcaccgatgctacgacttcaccggag

SEQ ID NO: 24637 - DNA, 260 bp, Unknown
  Description of Unknown: LeftRegion for integrase A205 sequence
gaggtccgctgcggcggaggccgcgcccacaaagaggtcaccgaaacctactgacctcgcataccaagaaaccccctacccggcccgcgaaggctaggtagggggctttttgtgtttcagtgggcgtggccgtgatgacctgtgtcttcgtggtttgtctggtcaaccaccgcggtctcagtggtgtacggtacaaacccatgagggctctcgtcgtgatccgcctgtcccgtgtcaccgatgctacgacctcaccggag

SEQ ID NO: 24638 - DNA, 260 bp, Unknown
  Description of Unknown: LeftRegion for integrase A206 sequence
ccactgcggcggaggccgcggaaagaccgagaccaccgatccgtggtgatctaaccccgcataccaagaaaccccctacccggcccgcgaaggctaggtagggggcttttctcgtttcagtgggtgtggccgtgatgacctgtgtcttcgtggtttgtctggtcaaccaccgcggtctcagtggtgtacggtacaaacccatgcgcgctttggtagtgatccgcttgtcccgtgtcaccgatgctacgacttcacccgag

SEQ ID NO: 24639 - DNA, 260 bp, Unknown
  Description of Unknown: LeftRegion for integrase A207 sequence
ccgctgcggcggaggccgcggcaagaccgagaccaccgatccgtggtgatctaaccccgcataccaagaaaccccctacctagccttcgcgggccgggtagggggctttttgtgtttcagtgggtatggccgtgatgacctgtgtcttcgtggtttgtctggtcaaccaccgcggtctcagtggtgtacggtacaaacccatgagagccctcgtcgtgatccgactgtcccgcgtcaccgatgctacgacctcaccggag

SEQ ID NO: 24640 - DNA, 260 bp, Unknown
  Description of Unknown: LeftRegion for integrase A208 sequence
acctcgcataccaagaaaccccctacccggcccgcgaaggctaggtagggggctttttcgcgttcaggggacctgatcgctcagcgacccatctccgatgggatcgcgtttgcgtttcagtgggtgtggccgtgatgacctgtgtcttcgtggtttgtctggtcaaccaccgcggtctcagtggtgtacggtacaaacccatgagagccctggtagtgatccgactgtcccgcgtcaccgatgctacgacttcaccggag

SEQ ID NO: 24641 - DNA, 260 bp, Unknown
  Description of Unknown: LeftRegion for integrase A209 sequence
cactgcggcggaggccgcggcaagaccgagaccaccgatccgtggtgatctaaccacgcataccaagaaaccccctacctagccttcgcgggccgggtagggggcttttcttgttttcagtgggtatggccgtgatgacctgtgtcttcgtggtttgtctggtcaaccaccgcggtctcagtggtgtacggtacaaacccatgagagccctggtagtgatccgactgtcccgcgtcaccgatgctacgacttcaccggag

SEQ ID NO: 24642 - DNA, 260 bp, Unknown
  Description of Unknown: LeftRegion for integrase A210 sequence
gaggcccgctgcggcggaggccgcgcccacaaagaggtcaccgaaacctactgacctcgcataccaagaaaccccctacctagccttcgcgggccgggtagggggcttttcttgtttcagtgggtatggccgtgatgacctgtgtcttcgtggtttgtctggtcaaccaccgcggtctcagtggtgtacggtacaaacccatgagagccctggtagtgatccgactgtcccgcgtcaccgatgctacgacttcaccggag

SEQ ID NO: 24643 - DNA, 260 bp, Unknown
  Description of Unknown: LeftRegion for integrase A211 sequence
ccactgcggcggaggccgcggcaagaccgagaccaccgacccgtggtgatctaacctcgcacaccaagaaaccccctacccggcccgcgaaggctaggtagggggctttttgtgtttcagtgggtgtggccgtgatgacctgtgtcttcgtggtttgtctggtcaaccaccgcggtctcagtggtgtacggtacaaacccatgagagccctggtagtcatccgcctgtcccgcgtcaccgatgctacgacttcaccggag

SEQ ID NO: 24644 - DNA, 260 bp, Unknown
  Description of Unknown: LeftRegion for integrase A212 sequence
gcactgcggcggaggccgcggcaagaccgagaccaccgacccgtggtgatctaaccccgcataccaagaaaccccctacccggcccgcgaaggctaggtagggggcttttcttgtttcagtgggtatggccgtgatgacctgtgtcttcgtggtttgtctggtcaaccaccgcggtctcagtggtgtacggtacaaacccatgagagccctggtagtcatccggctgtcccgcgtcaccgatgctacgacctcaccggag

SEQ ID NO: 24645 - DNA, 260 bp, Unknown
  Description of Unknown: LeftRegion for integrase A213 sequence
ccactgcggcggaggccgcggcaagaccgagaccaccgatccgtggtgatctaaccccgcataccaagaaaccccctacctagccttcgcgggccgggtagggggctttttgcgtttcagtgggtgtgaccgtgatgacctgtgtcttcgtggtttgtctggtcaaccaccgcggtctcagtggtgtacggtacaaacccatgagagctctcgtcgtgatccgattgtcccgcgtcaccgatgctacgacttcaccggag

SEQ ID NO: 24646 - DNA, 260 bp, Unknown
  Description of Unknown: LeftRegion for integrase A214 sequence
gcactgcggcggaggccgcggcaagaccgagaccgccgatccgtggtgatctaaccccgcataccaagaaaccccctacccggcccgcgaaggctaggtagggggcttttcttgtttcagtgggtatggccgtgatgacctgtgtcttcgtggtttgtctggtcaaccaccgcggtctcagtggtgtacggtacaaacccatgagagccctggtggtcatccgactgtcccgcgtcaccgatgctacgacttcacccgag

SEQ ID NO: 24647 - DNA, 260 bp, Unknown
  Description of Unknown: LeftRegion for integrase A215 sequence
ccactgcggcggaggccgcggcaagaccgagaccaccgatccgtggtgatctaaccccgcataccaagaaaccccctacccggcccgcgaaggctaggtagggggctttttgtgtttcagtgggtgtggccgtgatgacctgtgtcttcgtggtttgtctggtcaaccaccgcggtttcagtggtgtacggtacaaacccatgagagccctggtagtcatccgactgtcccgcgtcaccgatgctacgacctcaccggag

SEQ ID NO: 24648 - DNA, 260 bp, Unknown
  Description of Unknown: LeftRegion for integrase A216 sequence
gccactgcggcggaggccgcggcaagaccgagaccaccgacccgtggtgatctaaccccgcataccaagaaaccccctacccggcccgcgaaggctaggtagggggcttttcttgtttcagtgggtatggccgtggtgaccaggttcttcgtggtttgtctggtcaaccaccgcggtctcagtggtgtacggtacaaaccatgcgagccctggtagtgatccgcctgtcccgtgtcaccgatgctacgacttcgcccgag

SEQ ID NO: 24649 - DNA, 260 bp, Unknown
  Description of Unknown: LeftRegion for integrase A217 sequence
gcactgcggcggaggccgcggcaagaccgagaccaccgatccgtggtgatctaaccccgcataccaagaaaccccctacccggcccgcgaaggctaggtagggggctttttgtgtttcagtgggtgtgtccgtgatgacctgtgtcttcgtggtttgtctggtcaaccaccgcggtctcagtggtgtacggtacaaacccatgagagccctggtagtcatccgactgtcccgcgtcaccgatgctacgacctcaccggag

SEQ ID NO: 24650 - DNA, 260 bp, Unknown
  Description of Unknown: LeftRegion for integrase A218 sequence
aaccccgcataccaagaaaccccctacctagccttcgcgggccgggtagggggctttttcgcgttcagggggcctgatcgctcagcgacccatctccgatgggatcgcgtttgttttcagtgggtgtggccgtgatgacctgtgtcttcgtggtttgtctggtcaaccaccgcggtctcagtggtgtacggtacaaacccatgcgcgctttggtagtgatccgcttgtcccgtgtgaccgatgctacgacttcacccgag

SEQ ID NO: 24651 - DNA, 260 bp, Unknown
  Description of Unknown: LeftRegion for integrase A219 sequence
cactgcggcggaggccgcggcaagaccgagaccaccgatccgtggtgatctaaccccgcataccaagaaaccccctacctagccttcgcgggccgggtagggggcttttcttgttttcagtgggtatggccgtgatgacctgtgtcttcgtggtttgtctggtcaaccaccgcggtctcagtggtgtacggtacaaacccatgagagccctggtagtgatccgactgtcccgcgtcaccgatgctacgacttcaccggag

SEQ ID NO: 24652 - DNA, 260 bp, Unknown
  Description of Unknown: LeftRegion for integrase A220 sequence
gaggtccgctgcggcggaggccgcgcccacaaagaggtcaccgaaacctactgacctcgcataccaagaaaccccctacccggcccgagaaggctaggtagggggctttttgtgtttcagtgggtatggccgtgatgacctgtgtcttcgtggtttgtctggtcaaccaccgcggtctcagtggtgtacggtacaaacccatgagagccctggtagtgatccgactgtcccgcgtcaccgatgctacgacttcaccggag

SEQ ID NO: 24653 - DNA, 260 bp, Unknown
  Description of Unknown: LeftRegion for integrase A221 sequence
ctgaagtcgagcaagcccatgaacttcgctctacacgtcccgcagaaggaggcaggatgacgaacccagccccaggttggtacccggaccccgcaggtacaaaccagccgaggtactgggacggaaagaagtgggtgggtgaaccgaccactgtgccggtgaagacgaaccacgcgctgcatctcctgctgacgatcctcaccttctggatgttcggcggctggctgtgggtctggattctcgtcgcaatcgccaaccac

SEQ ID NO: 24654 - DNA, 260 bp, Unknown
  Description of Unknown: LeftRegion for integrase A222 sequence
gccactgcggcggaggccgcggcaagaccgagaccaccgatccgtggtgatctaaccccgcataccaagaaaccccctacctagccttcgcgggccgggtagggggcttttcttgtttcagtgggtatggccgtgatgacctgtgtcttcgtggtttgtctggtcaaccaccgcggtctcagtggtgtacggtacaaaccatgcgagccctggtagtgatccgcctgtcccgtgtcaccgatgctacgacttcacccgag

SEQ ID NO: 24655 - DNA, 260 bp, Unknown
  Description of Unknown: LeftRegion for integrase A223 sequence
cgctgcggcggaggccgcggcaagaccgagaccaccgacccgtggtgatctaaccccgcataccaagaaacccccctacccggcccgcgaaggctaggtagggggcttttcttgtttcagtgggtgtggccgtgatgacctgtgtcttcgtggtttgtctggtcaaccaccgcggtctcagtggtgtacggtacaaacccatgagagccctggtagtgatccgactgtcccgcgtcaccgatgctacgacttcaccggag

SEQ ID NO: 24656 - DNA, 260 bp, Unknown
  Description of Unknown: LeftRegion for integrase A224 sequence
tcactgcggcggcggccgcggcaagaccgagaccaccgatccgtggtgatctaacctcgcgcaccaagaaaccccctacccggcccgcgaaggctaggtagggggctttttgtgtttcagtgggtatggccgtgatgacctgtgtcttcgtggtttgtctggtcaaccaccgcggtctcagtggtgtacggtacaaacccatgagagccctggtagtcatccgactgtcccgcgtcaccgatgctacgacctcaccggag

SEQ ID NO: 24657 - DNA, 260 bp, Unknown
  Description of Unknown: LeftRegion for integrase A225 sequence
taaccccgcacaccaagaaaccccctacccggcccgcgaaggctaggtagggggctttttcgcgttcaggggacctgatcgctcagcgacccatctccgatgggatcgcgtttgttttcagtgggtatggccgtgatgacctgtgtcttcgtggtttgtctggtcaaccaccgcggtctcagtggtgtacggtacaaaccatgcgagctctcgtcgtgatccgcttgtcccgtgtcaccgatgctacgacttcaccggag

SEQ ID NO: 24658 - DNA, 260 bp, Unknown
  Description of Unknown: LeftRegion for integrase A226 sequence
ccgctgcggcggaggccgcggcaagaccgagaccaccgatccgtggtgatctaaccccgcataccaagaaaccccctacccggcccgcgaaggctaggtagggggctttttgtgtttcagtgggtgtgtccgtgatgacctgtgtcttcgtggtttgtctggtcaaccaccgcggtctcagtggtgtacggtacaaacccatgagagccctggtagtgatccgactgtcccgcgtcaccgatgctacgacctcacccgag

SEQ ID NO: 24659 - DNA, 260 bp, Unknown
  Description of Unknown: LeftRegion for integrase A227 sequence
tcactgcggcggaggccgcggcaagaccgagaccaccgatccgtggtgatctaaccccgcataccaagaaaccccctacccggcccgcgaaggccgggtagggggcttttcttgtttcagtgggtatggccgtgatgacccgtgtcttcgtggtttgtctggtcaaccaccgcggtctcagtggtgtacggtacaaacccatgagagctctggtagtcatccgactgtcccgcgtcaccgatgctacgacttcaccggag

SEQ ID NO: 24660 - DNA, 260 bp, Unknown
  Description of Unknown: LeftRegion for integrase A228 sequence
agcggtgtccgcggagtcgggcccacccccatatctccctcagcatggagcacaacgtactccaccgccccctccggggaacccgttttgggctccgcggagggggtgttctgcgtttagtgggtgtggccgtgatgacctgtgtcttcgtggtttgtctggtcaaccaccgcggtctcagtggtgtacggtacaaacccatgagagccctggtagtgatccgactgtcccgcgtcaccgatgctacgacttcaccggag

SEQ ID NO: 24661 - DNA, 260 bp, Unknown
  Description of Unknown: LeftRegion for integrase A229 sequence
gtcactgcggcggaggccgcggcaagaccgagaccaccgatccgtggtgatctaacctcgcataccaagaaaccccctacccggcccgcgaaggctaggtagggggctttttgtgtttcagtgggtatggtcgtgatgacctgtgtcttcgtggtttgtctggtcaaccaccgcggtctcagtggtgtacggtacaaaccatgcgagctctcgtcgtgatccgcttgtcccgtgtcaccgatgctacgacttcacccgag

SEQ ID NO: 24662 - DNA, 260 bp, Unknown
  Description of Unknown: LeftRegion for integrase A230 sequence
gaggtccgctgcggcggcggtcgccacgccaaagaggtcaccgaaacctactgacctcgcataccaagaaaccccctacctagccttcgcgggccgggtagggggcttttcttgtttcagtgggtatggccgtgatgacctgtgtcttcgtggtttgtctggtcaaccaccgcggtctcagtggtgtacggtacaaacccatgagagccctggtagtcatccgcttgtcccgtgtcaccgatgctacgacctcaccggag

SEQ ID NO: 24663 - DNA, 260 bp, Unknown
  Description of Unknown: LeftRegion for integrase A231 sequence
ccactgcggcggaggccgcggcaagaccgagacctccgatccgtggcgatctaaccccgcataccaagaaaccccctacccggcccgcgaaggctaggtagggggcttttcttgtttcagtgggtatggccgtgatgacctgtgtcttcgtggtttgtccggtcaaccaccgcggtctcagtggtgtacggtacaaacccatgagagccctggtagtcatccgcctgtcccgcgtcaccgatgctacgacctcgccggag

SEQ ID NO: 24664 - DNA, 260 bp, Unknown
  Description of Unknown: LeftRegion for integrase A232 sequence
ccactgcggcggaggccgcggcaagaccgagaccaccgatccgtggtgatctaaccccgcataccaagaaaccccctacccggcccgcgaaggctaggtagggggctttttgtgtttcagtgggtatggccgtgatggcctgtgtcttcgtggtttgtctggtcaaccaccgcggtctcagtggtgtacggtacaaacccatgagagccctggtagtcatccgcctgtcccgtgtcaccgatgctacgacctcaccggag

SEQ ID NO: 24665 - DNA, 260 bp, Unknown
  Description of Unknown: LeftRegion for integrase A233 sequence
gcactgcggcggaggccgcggcaagaccgagaccaccgatccgtggtgatctaaccccgcataccaagaaaccccctacccggcccgcgaaggctaggtagggggctttttgtgtttcagtgggtatggccgtgatgacctgtgtcttcgtggtttgtctggtcaaccaccgcggtctcagtggtgtacggtacaaacccatgagagccctggtagtcatccgcctgtcccgcgtcaccgatgctacgacttcaccggag

SEQ ID NO: 24666 - DNA, 260 bp, Unknown; identical to SEQ ID NO: 24653
  Description of Unknown: LeftRegion for integrase A234 sequence

SEQ ID NO: 24667 - DNA, 260 bp, Unknown; identical to SEQ ID NO: 24633
  Description of Unknown: LeftRegion for integrase A235 sequence

SEQ ID NO: 24668 - DNA, 260 bp, Unknown; identical to SEQ ID NO: 24600
  Description of Unknown: LeftRegion for integrase A236 sequence

SEQ ID NO: 24669 - DNA, 260 bp, Unknown
  Description of Unknown: LeftRegion for integrase A237 sequence
cccgcataccaagaaaccccctacccggcccgcgaaggctaggtagggggctttttcgcgttcagggggtctgatcgctcagcgacccatctccgatgggatcgcgtttgtgctcttcagtgggtgtggccgtgatgacctgtgtcttcgtggtttgtccggtcaaccaccgcggtctcagtggtgtacggtacaaacccatgagagccctggtagtcatccgcctgtcccgcgtcaccgatgctacgacttcaccggag

SEQ ID NO: 24670 - DNA, 260 bp, Unknown
  Description of Unknown: LeftRegion for integrase A238 sequence
agcggtgtccgcggagtcgggcccacccccatatctccctcagcatggagcacaacgtactccaccgcccccctccggggaacccgttttgggctccgcggagggggtgttctgcgtttagtgggtatggccgtgatgacctgtgtcttcgtggtttgtctggtcaaccaccgcggtctcagtggtgtacggtacaaaccatgcgagccctggtagtgatccgactgtcccgcgtcaccgatgctacgacttcaccggag

SEQ ID NO: 24671 - DNA, 260 bp, Unknown; identical to SEQ ID NO: 24621
  Description of Unknown: LeftRegion for integrase A239 sequence

SEQ ID NO: 24672 - DNA, 260 bp, Unknown
  Description of Unknown: LeftRegion for integrase A240 sequence
tggaatggtgagggcggccgcagccctcgacttcgcaatcccccattgatcaatggtacaaaacagccccctcccgggaatccgtttggactcctgagagggggcgttttgcgtttctagtggacgtgcccgtggtggtcgtcggcttcttggcttggccgatcaacaactgccgtctcagtggtgtacggtacaaacccatgagagccttggtagtcatccgactgtcccgcgtcaccgatgctacgacttcacccgag

SEQ ID NO: 24673 - DNA, 260 bp, Unknown
  Description of Unknown: LeftRegion for integrase A241 sequence
gcactgcggcggaggccgcggcaagaccgagaccgccgatccgtggtgatctaaccccgcataccaagaaaccccctacccggcccgcgaaggctaggtagggggctttttgtgtttcagtgggtatggtcgtgatgacctgtgtcttcgtggtttgtctggtcaaccaccgcggtctcagtggtgtacggtacaaacccatgagagccctggtagtcatccgcctgtcccgcgtcaccgatgctacgacttcgccggag

SEQ ID NO: 24674 - DNA, 260 bp, Unknown; identical to SEQ ID NO: 24665
  Description of Unknown: LeftRegion for integrase A242 sequence

SEQ ID NO: 24675 - DNA, 260 bp, Unknown
  Description of Unknown: LeftRegion for integrase A243 sequence
cactgcggcggaggccgcggcaagaccgagaccaccgatccgtggtgatctaacccccacataccaagaaaccccctacccggcccgcgaaggctaggtagggggctttttgtgtttcagtgggtgtggccgtgatgacctgtgtcttcgtggtttgtctggtcaaccaccgcggtctcagtggtgtacggtacaaacccatgagagccctggtagtcatccgcctgtcccgcgtcaccgatgctacgacttcgccggag

SEQ ID NO: 24676 - DNA, 260 bp, Unknown
  Description of Unknown: LeftRegion for integrase A244 sequence
gccactgcggcggaggccgcggcaagaccgagaccaccgatccgtggtgatctaacctcgcataccaagaaaccccctacccggcccgcgaaggctaggtagggggcttttcttgtttcagtgggtatggccgtggtgaccaggttcttcgtggtttgtctggtcaaccaccgcggtctcagtggtgtacggtacaaaccatgcgagccctggtagtgatccgcctgtcccgtgtcaccgatgctacgacttcgcccgag

SEQ ID NO: 24677 - DNA, 260 bp, Unknown
  Description of Unknown: LeftRegion for integrase A245 sequence
cactgcggcggaggccgcggcaagaccgagaccaccgatccgtggtgatctaaccccgcataccaagaaacccccctacccggcccgcgaaggctaggtagggggcttttcttgtttcagtgggtatggccgtgatgacctgtgtcttcgtggtttgtctggtcaaccaccgcggtctcagtggtgtacggtacaaacccatgagagccctggtagtgatccgcctgtcccgcgtcaccgatgctacgacctcaccggag

SEQ ID NO: 24678 - DNA, 260 bp, Unknown
  Description of Unknown: LeftRegion for integrase A246 sequence
ccactgcggcggaggccgcggcaagaccgagaccaccgatccgtggtgatctaacctctcataccaagaaaccccctacccggcccgcgaaggctaggtagggggctttttgtgtttcagtgggtatggccgtgatgacctgtgtcttcgtggtttgtctggtcaaccaccgcggtctcagtggtgtacggtacaaacccatgagagccctggtagtgatccgcctgtcccgcgtcaccgatgctacgacctcaccggag

SEQ ID NO: 24679 - DNA, 260 bp, Unknown
  Description of Unknown: LeftRegion for integrase A247 sequence
gaggcccgctgcggcggaggccgtgcccacaaagaggtcaccgaaacctactgacctcgcataccaagaaaccccctacctagccttcgcgggccgggtagggggcttttcttgtttcagtgggtatggccgtgatgacctgtgtcttcgtggtttgtctggtcaaccaccgcggtctcagtggtgtacggtacaaacccatgagagccctggtagtcatccgactgtcccgcgtcaccgatgctacgacctcaccggag

SEQ ID NO: 24680 - DNA, 260 bp, Unknown
  Description of Unknown: LeftRegion for integrase A248 sequence
tcactgcggcggaggccgcggcaagaccgagaccaccgatccgtggtgatctaaccccgcataccaagaaaccccctacccggcccgcgaaggctaggtagggggctttttgcgtttcagtgggtatggccgtgatgacctgtgtcttcgtggtttgtctggtcaaccaccgcggtctcagtggtgtacggtacaaacccatgcgcgctttggtagtgatccgcctgtcccgcgtcaccgatgctacgacttcacccgag

SEQ ID NO: 24681 - DNA, 260 bp, Unknown; identical to SEQ ID NO: 24679
  Description of Unknown: LeftRegion for integrase A249 sequence

SEQ ID NO: 24682 - DNA, 260 bp, Unknown
  Description of Unknown: LeftRegion for integrase A250 sequence
ccactgcggcggcggccgcggcaagaccgagaccaccgatccgtggtgatctaacctcgcataccaagaaaccccctacccggcccgcgaaggctaggtagggggttttttgtgtttcagtgggtatggccgtgaagacctgtgtcttcgtggtttgtctggtcaaccaccgcggtctcagtggtgtacggtacaaacccatgagagccctggtagtcatccgcctgtcccgcgtcaccgatgctacgacttcaccggag

SEQ ID NO: 24683 - DNA, 260 bp, Unknown
  Description of Unknown: LeftRegion for integrase A251 sequence
ctgaagtcgagcaagcccatgaacttcgctctacacgtcccgcagaaggaggcaggatgacgaccccagctccaggttggtacccggaccccgcaggtacaaaccagccgaggtactgggacggaaagaagtgggtgggtgaaccgaccactgtgccagtgaagacgaaccacgcgctgcatctcctcctgacgatcctcaccttctggatgttcggcggttggctgtgggtctggattctcgtcgcaatcgccaaccac

SEQ ID NO: 24684 - DNA, 260 bp, Unknown
  Description of Unknown: LeftRegion for integrase A252 sequence
gcactgcggcggaggccgcggcaagaccgagaccaccgatccgtggtgatctaacctcgcataccaagaaaccccctacccggcccgcgaaggctaggtagggggcttttcttgtttcagtgggtgtgaccgtgatgacctgtgtcttcgtggtttgtctggtcaaccaccgcggtctcagtggtgtacggtacaaacccatgagagccctggtagtgatccgactgtcccgcgtcaccgatgctacgacttcaccggag

SEQ ID NO: 24685 - DNA, 260 bp, Unknown
  Description of Unknown: LeftRegion for integrase A253 sequence
ctgaagtcgagcaagcccatgaacttcgctctacacgtcccgcagaaggaggcaggatgacgactccagcgccaggttggtacccggaccccgcaggtacaaaccagccgaggtactgggacggaaagaagtgggtgggcgagccgaccactgtgcccgtgaagacgaaccacgctctgcatctcctgctgacgatcctcaccttctggatgttcggcggctggctgtgggtctggattctcgtcgcaatcgccaaccac

SEQ ID NO: 24686 - DNA, 260 bp, Unknown
  Description of Unknown: LeftRegion for integrase A254 sequence
gccactgcggcggcggccgcggcaagaccgagaccaccgacccgtggtgatctaacccgcataccaagaaaccccctacccggcccgcgaaggctaggtagggggctttttgtgtttcagtgggtgtgtccgtgatgacctgtgtcttcgtggtttgtctggtcaaccaccgcggtctccgtggtgtacggtacaaacccatgagagccctggtagtgatccgcctgtcccgcgtcaccgatgctacgacttcaccggag

SEQ ID NO: 24687 - DNA, 260 bp, Unknown
  Description of Unknown: LeftRegion for integrase A255 sequence
acctcgcataccaagaaaccccctacctagccttcgcgggccgggtagggggctttttcgcgttcagggggcctgatcgctcagcgacccatctccgatgggatcgcgtttgcgtttcagtgggtatggccgtgatgacctgtgtcttcgtggtttgtctggtcaaccaccgcggtctcagtggtgtacggtacaaacccatgagagccctggtagtgatccgcctgtcccgcgtcaccgatgctacgacttcaccggag

SEQ ID NO: 24688 - DNA, 260 bp, Unknown
  Description of Unknown: LeftRegion for integrase A256 sequence
cccccgcataccaagaaaccccctacccggcccgcgaaggctaggtagggggctttttcgcgttcagggggtctgatcgctcagcgacccatctccgatgggatcgcgtttgtgcttcagtgggtatggccgtgatgacctgtgtcttcgtggtttgtctggtcaaccaccgcggtctcagtggtgtacggtacaaacccatgagagccctggtagtgatccgcctgtcccgcgtcaccgatgctacgacttcaccggag

SEQ ID NO: 24689 - DNA, 260 bp, Unknown
  Description of Unknown: LeftRegion for integrase A257 sequence
gaggtccgatgcggcggaggccgcgcccacaaagaggtcaccgaaacctactgacctcgcataccaagaaaccccctacctagccttcgcgggccgggtagggggctttttgtgtttcagtgggtgtggccgtgatgacctgtgtcttcgtggtttgtctggtcaaccaccgcggtctcagtggtgtacggtacaaacccatgagagccctggtagtgatccgactgtcccgcgtcaccgatgctacgacctcaccggag

SEQ ID NO: 24690 - DNA, 260 bp, Unknown
  Description of Unknown: LeftRegion for integrase A258 sequence
ttgaagtcgagcaagcccatgaacttcgctctacacgtcccgcagaaggaggcaggatgacgaccccagctccaggttggtacccggaccccgcaggtacaaaccagccgaggtactgggacggaaagaagtgggtgggtgaaccgaccactgtgccggtgaagacgaaccacgcgctgcatctcctgctgacgatcctcaccttctggatgttcggaggctggctgtgggtctggattctcgtcgcaatcgccaaccac

SEQ ID NO: 24691 - DNA, 260 bp, Unknown; identical to SEQ ID NO: 24350
  Description of Unknown: LeftRegion for integrase A259 sequence

SEQ ID NO: 24692 - DNA, 260 bp, Unknown
  Description of Unknown: LeftRegion for integrase A260 sequence
cactgcggcggaggccgcggcaagaccgagaccaccgatccgtggtgatctaaccccgcataccaagaaaccccctacccggcccgcgaaggctaggtagggggctttttgtgttttcagtgggtgtggccgtgatgacctgtgtcttcgtggtttgtctggtcaaccaccgcggtctcagtggtgtacggtacaaacccatgagagccctggtagtgatccgcttgtcccgcgtcaccgatgctacgacttcaccggag

SEQ ID NO: 24693 - DNA, 260 bp, Unknown
  Description of Unknown: LeftRegion for integrase A261 sequence
ccactgcggcggaggccgcggcaagaccgagaccaccgatccgtggtgatctaaccccgcataccaagaaaccccctacccggcccgcgaaggctaggtagggggctttttgtgtttcagtgagtatgaccgtgatgacctgtgtcttcgtggtttgtctggtcaaccaccgcggtttcagtggtgtacggtacaaacccatgagagccctggtagtcatccgcttgtcccgcgtcaccgatgctacgacttcaccggag

SEQ ID NO: 24694 - DNA, 260 bp, Unknown
  Description of Unknown: LeftRegion for integrase A262 sequence
gaggcccgctgcggcggaggtcgcgcccacaaagaggtcaccgaaacctactgacctcgcataccaagaaaccccctacctagccttcgcgggccgggtagggggctttttgcgtttcagtgggtgtggccgtgatgacctgtgtcttcgtggtttgtctggtcaaccaccgcggtctcagtggtgtacggtacaaacccatgagagccctggtagtcatccgcctgtcccgcgtcaccgatgctacgacctcacccgag

SEQ ID NO: 24695 - DNA, 260 bp, Unknown
  Description of Unknown: LeftRegion for integrase A263 sequence
ctgaagtcgagcaagcccatgaacttcgctctacacgtcccgcagaaggaggcaggatgacgaacccagccccaggttggtacccggaccccgcaggtacaaaccagccgaggtactgggacggaaagaagtgggtgggagaaccgaccactgtgccggtgaagacgaaccacgcgctgcatctcctactgacgatcctcaccttctggatgttcggcggctggctgtgggtctggattctcgtcgcaatcgccaaccac

SEQ ID NO: 24696 - DNA, 260 bp, Unknown; identical to SEQ ID NO: 24662
  Description of Unknown: LeftRegion for integrase A264 sequence

SEQ ID NO: 24697 - DNA, 260 bp, Unknown
  Description of Unknown: LeftRegion for integrase A265 sequence
aaccccgcataccaagaaaccccctacccggcccgcgaaggctaggtagggggctttttcgcgttcaggggcctgatcgctcagcgacccatctccgatgggatcgcgtttgtgtttcagtgggtgtggccgtgatgacctgtgtcttcgtggtttgtctggtcaaccaccgcggtctccgtggtgtacggtacaaacccatgagagccctggtagtcatccgcctgtcccgcgtcaccgatgctacgacttcaccggag

SEQ ID NO: 24698 - DNA, 260 bp, Unknown
  Description of Unknown: LeftRegion for integrase A266 sequence
cgcataccaagaaagaaaccccctacccggcccgcgaaggctaggtagggggctttttcgcgttcaggggacctgatcgctcagcgacccatctccgatgggatcgcgtttgtgtttcagtgggtatggccgtgatgacctgtgtcttcgtggtttgtctggtcaaccaccgcggtctcagtggtgtacggtacaaacccatgagagccctggtagtcatccgactgtcccgcgtcaccgatgctacgacttcaccggag

SEQ ID NO: 24699 - DNA, 260 bp, Unknown
  Description of Unknown: LeftRegion for integrase A267 sequence
acctcgcacaccaagaaaccccctacccggcccgcgaaggctaggtagggggctttttcgcgttcaggggacctgatcgctcagcgacccatctccgatgggatcgcgtttgtgtttcagtgggtatggccgtgatgacctgtgtcttcgtggtttgtctggtcaaccaccgcggtctcagtggtgtacggtacaaacccatgagagccctggtagtgatccgcctgtcccgcgtcaccgatgctacgacttcgccggag

SEQ ID NO: 24700 - DNA, 260 bp, Unknown
  Description of Unknown: LeftRegion for integrase A268 sequence
ggcactgcggcggaggccgcggcaagaccgagaccaccgacccgtggtgatctaaccccgcataccaagaaaccccctacccggcccgcgaaggctaggtagggggcttttcttgtttcagtgggtatggccgtgatgacctgtgtcttcgtggtttgtctggtcaaccaccgcggtctcagtggtgtacggtacaaaccatgcgagctctcgtcgtgatccgcttgtcccgtgtcaccgatgctacgacctcaccggag

SEQ ID NO: 24701 - DNA, 260 bp, Unknown
  Description of Unknown: LeftRegion for integrase A269 sequence
gcactgcggcggaggccgcggcaagaccgagaccaccgatccgtggtgatctaaccccgcataccaagaaaccccctacccggcccgcgaaggctaggtagggggctttttgtgtttcagtgggtgtggccgtgatgacctgtgtcttcgtggtttgtctggtcaaccaccgcggtctcagtggtgtacggtacaaacccatgagagccctggtagtgatccgactgtcccgcgttaccgatgctacgacctcaccggag

SEQ ID NO: 24702 - DNA, 260 bp, Unknown
  Description of Unknown: LeftRegion for integrase A270 sequence
ggggcaatcacgttccacttccagataccagaagacctccacgagcgcctagcctcttaaacgacgaaagccccctcccggttaggggagggggaatcgtgtctagatcaatgtcaggttgagcgcggacgagtccacgtttcgagcggacgtacggttggtgccagtggtgtacgcctggacctcgaccacgtcgccttcgtagaacctgtacggtccggtttccagggtcacagcccaaccaccggttgtgaatgtgc

SEQ ID NO: 24703 - DNA, 260 bp, Unknown
  Description of Unknown: LeftRegion for integrase A271 sequence
gctacgtcggcgggttcggatcactgggccagcatcttcgtgccgttctgatcaccccgaataccaagaaaccccctacccggcccgcgaaggctaaggtagggggctttttgtgtttcagtgggtatggccgtggtgaccaggttcttcgtggtttgtccggtcaaccactgcggtctcagtggtgtacggtacaaaccatgcgagctctcgtcgtgatccgcttgtcccgtgtcaccgatgctacgacctcaccggag

SEQ ID NO: 24704 - DNA, 260 bp, Unknown
  Description of Unknown: LeftRegion for integrase A272 sequence
gcggtgtccgcggagtcgggcccacccccatatctccctcagcatggagcacaacgtactccaccgccccctccggggaacccgttttgggctccgcggagggggtgttctgcgtttcagtgggtatggccgtgatgacctgtgtcttcgtggtttgtccggtcaaccactgcggtctcagtggtgtacggtacaaacccatgagagccctggtagtcatccgactgtcccgcgtcaccgatgctacgacctcaccggag

SEQ ID NO: 24705 - DNA, 260 bp, Unknown
  Description of Unknown: LeftRegion for integrase A273 sequence
gctttttcgcgttcagggggtcctgatcgctcagcgacccatctccgatgggatcgcgttttcagtgggtatggccgtgatgacctgtgtcttcgtggtttgtctggtcaaccaccgcggtctcagtggtgtacggtacaaacccaaggcctggagcgaagctccggccgtaagcgtcgatcgtccgaaggagatctagcgtgagagctcttgtcgtgatccgcctgtcccgtgtcaccgatgctacgacctccccggag

SEQ ID NO: 24706 - DNA, 260 bp, Unknown; identical to SEQ ID NO: 24700
  Description of Unknown: LeftRegion for integrase A274 sequence

SEQ ID NO: 24707 - DNA, 260 bp, Unknown; identical to SEQ ID NO: 24700
  Description of Unknown: LeftRegion for integrase A275 sequence

SEQ ID NO: 24708 - DNA, 260 bp, Unknown
  Description of Unknown: LeftRegion for integrase A276 sequence
ggtgctctccagaccgagatcaagttcccaggtgacgtagaggaacgcctggcctcttaaacgacgaaaaccccctcccggttaagggagggggaatcgtgtcaaaccaggttaacgctcagcgaggacgagtccacgtttcgagccgacgtacggttggtgccagtggtgtaagcctggacctccaccacatcgccgtcatagaaccggtacgggccggtctccagagtgaccgaccagccgttgttggagaacgagcc

SEQ ID NO: 24709 - DNA, 260 bp, Unknown
  Description of Unknown: LeftRegion for integrase A277 sequence
ggggtgctccactccaactggatcgagcccaccgacatcgaggaacgcctactcgcctgaaacgcaaaaaagcccccctcccggagcccgaaggccctgagaggggggtttctttgtcagccgactcgcaccatggagaaccacgagtccgacgtgtcagcaccaccgacgatgttgacatcgcctgagttatacaggcccggtcgaaccgtcgcgcccgcaggcaggtagtacatcacgccgtcaccgccgacagagtc

SEQ ID NO: 24710 - DNA, 260 bp, Unknown
  Description of Unknown: LeftRegion for integrase A278 sequence
ggcgtcatcgtcgcgaactggatcgagccgcacgacatcgagaagcgcctggcttcctgacggtcgctatgccaggctgctgactcacagcatccatacagggataggagacctgatgcatgtgaacgtcccgcctgcccggaagccagcgcccaacccgctgttcctcaccctcgcgatcctgtcggggttcccgaccgcgttcttcctcatcctcttcgtgtccggtggcacctcggtcttcgtcatgatcgggttcc

SEQ ID NO: 24711 - DNA, 260 bp, Unknown
  Description of Unknown: LeftRegion for integrase A279 sequence
ggtgctctccagaccgagatcaagttcccaggtgacgtagaggaacgcctagcctcttaaacgacgaaaaccccctcccggttaagggagggggaatcgtgtcaaaccaggttaacgctcagcgaggacgagtccacgtttcgagccgacgtacggttggtgccagtggtgtaagcctggacctccaccacatcgccgtcatagaaccggtacgggccggtctccagagtgaccgaccagccgttgttggagaacgagcc

SEQ ID NO: 24712 - DNA, 260 bp, Unknown
  Description of Unknown: LeftRegion for integrase A280 sequence
ggtgtcatcgttgcgaactggatcgagccacacgacatcgagaagcgcctggcctcttgaccgttcgtgtgccaggctcctcggtgccatgcaccactcagggataggagacctgatgtacgcgaatgtcccaccgcccgtgccgttccagcctcagcggaaggcggcaccgaacccgctgttcctcgtcctcgcgatcctgtcgtccctgccgactgcattcttcgtactctgcttcatcttgtccccctcgatgctgt

SEQ ID NO: 24713 - DNA, 260 bp, Unknown
  Description of Unknown: LeftRegion for integrase A281 sequence
ggtgctctccagaccgagatcaagttcccaggtgacgtagaggaacgcctagcctcttaaacgacgaaagccccctcccggttaagggagggggaatcgtgtcagaccaggttcaggttgagcgcggacgagtccacgtttcgagcggacgtacggttggtgccagtggtgtacgcctggacctcgatcacgtcaccgtcgtagaacctgtacggcccggtatccagggtcacagcccagccgttgttggagaacgagcc

SEQ ID NO: 24714 - DNA, 260 bp, Unknown
  Description of Unknown: LeftRegion for integrase A282 sequence
ggtgtcatcgtcgcgaactggatcgagccacacgacatcgagaagcgcctggcctcttgaccgttcgtgtgccaggctcctcggtgccatgcaccattcagggataggagacctgatgcacgcgaatgtcccaccgcccgtaccgttccagccgccgcagcgcaaggcggcaccgaatccgctgttcctcgtcctcgcgatcctgtccgcaatcccgaccgcattcttcgtgttcgcgctcatcgccgcgccgacgatgc

SEQ ID NO: 24715 - DNA, 260 bp, Unknown
  Description of Unknown: LeftRegion for integrase A283 sequence
ggtgctctccagaccgagatcaagttcccaggtgacgtagaggaacgcctagcctcttaaacgacgaaaaccccctcccggttaagggagggggaatcgtgtcaaaccaggttaacgctcagcgaggacgagtccacgtttcgagcagacgtacggttggtgccagtggtgtaagcctggacctccaccacatcgccgtcatagaaccggtacgggccggtctccagagtgaccgaccagccgttgttggagaacgagcc

SEQ ID NO: 24716 - DNA, 260 bp, Unknown
  Description of Unknown: LeftRegion for integrase A284 sequence
ggcgcactccagaccgagatcaagttcccaggggatgtagaggaacgcctagcctcgtaaacgacgaaagccccctcccggttaagggagggggaatcgtgtctagaccaggttcaggttgagcgcggacgagtccacgtttcgagcggacgtacggttggtgccagtggtgtaagcctggacctcgatcacgtcaccgtcgtagaacctgtacggcccggtatccagggtcactgaccagccgttgttggaaaacgagc

SEQ ID NO: 24717 - DNA, 260 bp, Unknown; identical to SEQ ID NO: 24711
  Description of Unknown: LeftRegion for integrase A285 sequence

SEQ ID NO: 24718 - DNA, 260 bp, Unknown
  Description of Unknown: LeftRegion for integrase A286 sequence
ggcgtcatcgtcgcgaactggatcgagccgcacgacatcgagaagcgcctggcttcctgacggtcgctatgccaggctgctgactcacagcatccatacagggataggagacctgatgcatgtgaacgtcccgcctgcccggaagccagcgcccaacccgctgttcctcaccctctcgatcctgtcgggattcccgaccgcgttcttcctgctgctcttcgtgaccggtggcacctcgatcttcgtcatgatcgggttcc

SEQ ID NO: 24719 - DNA, 260 bp, Unknown; identical to SEQ ID NO: 24713
  Description of Unknown: LeftRegion for integrase A287 sequence

SEQ ID NO: 24720 - DNA, 260 bp, Unknown
  Description of Unknown: LeftRegion for integrase A288 sequence
ggtgctctccagaccgagatcaagttcccaggtgacgtagaggaacgcctagcctcttaaacgacgaaaaccccctcccggttaagggagggggaatcgtgtcaaaccaggttaacgctcagcgaggacgagtccacgtttcgagcagacgtacggttggtgccagtggtgtaagcctggacctccaccacgtcaccgtcgtagaacctgtacgggccggtctccagagtgaccgaccagccgttgttggagaacgtacc

SEQ ID NO: 24721 - DNA, 260 bp, Unknown
  Description of Unknown: LeftRegion for integrase A289 sequence
ggcgcactccagaccgagatcaagttcccaggggatgtagaggaacgcctagcctcgtaaacgacgaaagccccctcccggttaggggagggggaatcgtgtctagatcaaggtcaggttgagcgcggacgagtccacgtttcgagcggacgtacggttggtgccagtggtgtacgcctggacctcgatcacgtcgccttcgtagaacctgtacggcccggtatccagggtcacagcccagccgttgttggagaacgagc

SEQ ID NO: 24722 - DNA, 260 bp, Unknown; identical to SEQ ID NO: 24710
  Description of Unknown: LeftRegion for integrase A290 sequence

SEQ ID NO: 24723 - DNA, 260 bp, Unknown
  Description of Unknown: LeftRegion for integrase A291 sequence
ggtgtgctggagtttcacctgaaggtccccgaggacgtgagagaacgcctctccgcttaaacgcaaaaaagccccctcccaagacatttcgtcctgagagggggtttcttcttagatcacgtcatatccgacctgcctcagagcttcatcgtgaggcgtgccggacagcagcgtatagagccggtccatgctcgtcgcaacgccgttctcgtcgcactccacgacgacggtaggcgaaacaaccaccgcgtgttgaccga

SEQ ID NO: 24724 - DNA, 260 bp, Unknown
  Description of Unknown: LeftRegion for integrase A292 sequence
ggtgtgctggagttccacctgaaggtccccgaggacgtgagagaacgcctctccgcttaaacgcaaaaaagccccctcccaagacatttcgtcctgagagggggtttcttcttagatcacgtcatatccgacctgcctcagagcttcatcgtgaggcgtgccggacagcagcgtatagagccggtccatgctcgtcgcaacgccgttctcgtcgcactccacgacgacggtaggcgaaacaaccaccgcgtgttgaccga

SEQ ID NO: 24725 - DNA, 260 bp, Unknown
  Description of Unknown: LeftRegion for integrase A293 sequence
ggtgtgctggagttccacctgaaggtccccgaggacgtgagagaacgcctctccgcgtaaacgcaaaaaagccccctcccaagacatttcgtcctgagagggggtttcttcttagatcacgtcatatccgacctgcctcagagcttcatcgtgaggcgtgccggacagcagcgtatagagccggtccatgctcgtcgcaacgccgttctcgtcgcactccacgacgacggtaggcgaaacaaccaccgcgtgttggccga

SEQ ID NO: 24726 - DNA, 260 bp, Unknown; identical to SEQ ID NO: 24724
  Description of Unknown: LeftRegion for integrase A294 sequence

SEQ ID NO: 24727 - DNA, 260 bp, Unknown; identical to SEQ ID NO: 24724
  Description of Unknown: LeftRegion for integrase A295 sequence

SEQ ID NO: 24728 - DNA, 260 bp, Unknown
  Description of Unknown: LeftRegion for integrase A296 sequence
ggtgtgctggagttccacctgaaggtccccgaggacgtgagagaacgcctctccgcgtaaacgcaaaaaagccccctcccaagacatttcgtcctgagagggggtttcttcttagatcacgtcatatccgacctgcctcagagcttcatcgtgaggcgtgccggacagcagcgtatagagccggtccatgctcgtcgcagcgccgttctcgtcgcactccacgacgacggtaggcgaaacaaccaccgcgtgttgaccga

SEQ ID NO: 24729 - DNA, 260 bp, Unknown; identical to SEQ ID NO: 24724
  Description of Unknown: LeftRegion for integrase A297 sequence

SEQ ID NO: 24730 - DNA, 260 bp, Unknown
  Description of Unknown: LeftRegion for integrase A298 sequence
ggtgtgctggagttccacctgaaggtccccgaggacgtgagagaacgcctctccgcttaaacgcaaaaaagccccctcccaagacatttcgtcatgagagggggtttcttcttagatcacgtcatatccgacctgcctcagagcttcatcgtgaggcgtgccggacagcagcgtatagagccggtccatgctcgtcgcaacgccgttctcgtcgcactccacgacgacggtaggcgaaacaaccaccgcgtgttggccga

SEQ ID NO: 24731 - DNA, 260 bp, Unknown
  Description of Unknown: LeftRegion for integrase A299 sequence
ggtgtgctggagttccacctgaaggtccccgaggacgtacgagaacgtctctccgcttaaacgcaaaaaggccccctcccaagacatttcgtcctgagagggggtttcttcttagatcacgtcatatccgacctgcctcagagcttcatcgtgaggcgtaccggacagcagcgtatagagccggtccatgctcgtcgcaacgccgttctcgtcgcactccacgacgacggtaggcgaaacaaccaccgcgtgttgaccga

SEQ ID NO: 24732 - DNA, 260 bp, Unknown
  Description of Unknown: LeftRegion for integrase A300 sequence
gagttaaagtcgagcaagccggtgatgagcttcgccatgttcgagtcctccacctcttaaacgcaaaaaagcccccctccaaggacattgagtcccgagaggggggtttctttgttatgcgagagagcggttgatcatgattgcggcgaaccacgtcttcgagccactggcatctccgatgagagtcccagcgttggtcgacccgagggctcccgcagcggtcagatcgcaagcggggcggatcttgtcaccggccacgc

SEQ ID NO: 24733 - DNA, 260 bp, Unknown
  Description of Unknown: LeftRegion for integrase A301 sequence
ccgcggcaaggtcgagaccaccgatccgtggtgatctaacctcgcataccaagaaaccccctacccggcccgcgaaggctaggtagggggctttttgtgtttcagtgggtatggccgtgatgacctgtgtcttcgtggtttgtccggtcaaccaccgcggtctcagtggtgtacggtacaaacccatgagagccctggtagtgatccgactgtcccgcgtcaccgatgctacgacctcaccggagcgtcagctggagtct

SEQ ID NO: 24734 - DNA, 260 bp, Unknown
  Description of Unknown: LeftRegion for integrase A302 sequence
gccgcggcaagaccgagaccaccgatccgtggtgatctaaccccgcataccaagaaaccccctacctagccttcgcgggccgggtagggggcttttcttgtttcagtgggtatggccgtgatgacctgtgtcttcgtggtttgtctggtcaaccaccgcggtctcagtggtgtacggtacaaaccatgcgagccctggtagtgatccgcctgtcccgtgtcaccgatgctacgacttcacccgagcgtcagctggagtct

SEQ ID NO: 24735 - DNA, 260 bp, Unknown; identical to SEQ ID NO: 24661
  Description of Unknown: LeftRegion for integrase A303 sequence

SEQ ID NO: 24736 - DNA, 260 bp, Unknown
  Description of Unknown: LeftRegion for integrase A304 sequence
cccagctcatcatcgagccgggggccttttgcgtacccgctacgcgccgaggagcgccgtctggagcgtatcgaggccgacgccgccgaggtccagggccgccttgtgaaaggccttctccgagaacgccgcgccctcccgggccgccatctcatcatgtattttttgccagatacgttgaccgaccttacgatagaaacatgaccacacgagccgccatctaccttcgtatctctgaggacaagacgggcgaggagaag

SEQ ID NO: 24737 - DNA, 260 bp, Unknown
  Description of Unknown: LeftRegion for integrase A305 sequence
ggtgccctccagttcaatctccgagtgccagccgatgcacaagagcgcctagcctcctaaacgacgaaagccccctcccggttaagggagggggaatcgtgtcagaccagggtcaggttgagcgcggacgaatccacgtttcgagcggacgtgcggttggtaccggtggtgtaagcctggacctcgaccacgtcaccttcgtagaacctgtacggcccactatccagggtcactgcccatccacctgtagtgaacgagcc

SEQ ID NO: 24738 - DNA, 260 bp, Unknown
  Description of Unknown: LeftRegion for integrase A306 sequence
ccgcggcaagaccgagaccaccgatccgtggtgatctaaccccgcataccaagaaaccccctacccggcccgcgaaggctaggtagggggctttttgtgtttcagtggatatgaccgtgatgacctgtgtcttcgtggtttgtctggtcaaccaccgcggtctcagtggtgtacggtacaaacccatgagagccctggtagtgatccgcctgtcccgcgtcaccgatgctacgacttcgccggagcgtcagctggagtct

SEQ ID NO: 24739 - DNA, 260 bp, Unknown
  Description of Unknown: LeftRegion for integrase A307 sequence
ccgcggcaagaccgagaccaccgatccgtggtgatctaaccccgcataccaagaaaccccctacccggcccgcgaaggctaggtagggggctttttgtgtttcagtgggtgtggccgtgatgacctgtgtcttcgtggtttgtctggtcaaccaccgcggtctcagtggtgtacggtacaaacccatgagagccctggtagtgatccgactgtcccgcgttaccgatgctacgacctcaccggagcgtcagctggagtct

SEQ ID NO: 24740 - DNA, 260 bp, Unknown
  Description of Unknown: LeftRegion for integrase A308 sequence
ggggtcttacacttcgacctacgaataccggaagacatcttagaaaggatggcggggtgagcgctccagggtggtatccagatcctgctgggtcagggggccagaggtactgggacggccaacggtgggcaccgcaagctgttcacgcccagcaggtggtaacagggccgaaccacgttctgcacctgatccttaccatcctgacgttctggttcttcggtggctggatctgggtgtggctcgtcgtggcgctgtccaac

SEQ ID NO: 24741 - DNA, 260 bp, Unknown
  Description of Unknown: LeftRegion for integrase A309 sequence
ggggtcttacacttcgacctacgaataccggaagacatcttagaaaggatgagcgcgtgacagcgcctatcgccacgcctggttggtacccagacccttcgggctctggaggagaacggtactgggacggacaagcctggacggtgactcgaccggccccgcaaccgaagagaatcacggtcaactacgggttcgcgctgctcgcggtgttctcgctgctcggaacgttgtttttcggcttacctctggtaagcaacgga

SEQ ID NO: 24742 - DNA, 260 bp, Unknown
  Description of Unknown: LeftRegion for integrase A310 sequence
ggggtcttacacttcgacctacgaataccggaagacatcttagaaaggatgagcgcgtgacagcgcctatcgccacgcctggttggtacccagacccttcgggctctggaggagaacggtactgggacggacaagcctggacggtgactcgaccggccccgcaaccgaagagaatcacggtcaactacgggttcgcgctgctcgcggtgttctcgctgctcggaacgttgtttttcggcataccgctggtaagcaacgga

SEQ ID NO: 24743 - DNA, 260 bp, Unknown; identical to SEQ ID NO: 24742
  Description of Unknown: LeftRegion for integrase A311 sequence

SEQ ID NO: 24744 - DNA, 260 bp, Unknown
  Description of Unknown: LeftRegion for integrase A312 sequence
ggggtcttacacttcgacctacgaataccggaagacatcttagaaaggatggcggggtgagcgctccagggtggtatccagatcctgctgggtcagggggccagaggtactgggacggccaacggtgggcaccgcaagctgttcacgcccagcaggtggtaacagggccgaaccacgttctgcacctgatccttaccatcctgacgttctggttcttcggtggctagatctgggtgtggctcgtcgtggcgctgtccaac

SEQ ID NO: 24745 - DNA, 260 bp, Unknown; identical to SEQ ID NO: 24742
  Description of Unknown: LeftRegion for integrase A313 sequence

SEQ ID NO: 24746 - DNA, 260 bp, Unknown; identical to SEQ ID NO: 24742
  Description of Unknown: LeftRegion for integrase A314 sequence

SEQ ID NO: 24747 - DNA, 260 bp, Unknown
  Description of Unknown: LeftRegion for integrase A315 sequence
ggtgccgtcacgttccacttccacatcccggaagacctccacgagcgcatagcgtcctgatacacgaaaagccccctcccgcaatgggagggggtctttctgtgtttagaggtctccagcttcgatccagtcgatgccaggggacgaatactggatctggaagatctggtcgttggactcgatacagaagccccagcttcgtcgggtctcaccaacggggacgatccccgtggagtcggtccaggagatgaacgacgagc

SEQ ID NO: 24748 - DNA, 260 bp, Unknown; identical to SEQ ID NO: 24572
  Description of Unknown: LeftRegion for integrase A316 sequence

SEQ ID NO: 24749 - DNA, 260 bp, Unknown
  Description of Unknown: LeftRegion for integrase A317 sequence
ggcgtcatcgtcgcgaactggatcgagccacacgacatcgagaagcgcctggcttcctgacggtcgctatgccaggctgctgactcacagcatccatacagggataggagacctgatgcatgtgaacgtcccgccgcccggattcgtcccgcccgcacggaaacccagccccaatccgctgttcctcaccctctcgattctgtcggggttcccggccgcactgttcctgatcctctttgtgtccggtgcgacctcgatcc

SEQ ID NO: 24750 - DNA, 260 bp, Unknown
  Description of Unknown: LeftRegion for integrase A318 sequence
ggtgtcatcgttgcgaactggatcgagccacacgacatcgagaagcgcctggcgtcctgaccacttctatgccaggctgctcgctcacagcatccatacagggataggagacctgatgcatgtgaacgtcccgccgcccggattcgtcccgcccgcacggaaacccagccccaatccgctgttcctcaccctctcgatcctgtcggggttcccggccgcgctgttcctgatcctcttcgtctccggtgcgacctcggtcc

SEQ ID NO: 24751 - DNA, 260 bp, Unknown; identical to SEQ ID NO: 24702
  Description of Unknown: LeftRegion for integrase A319 sequence

SEQ ID NO: 24752 - DNA, 260 bp, Unknown
  Description of Unknown: LeftRegion for integrase A320 sequence
aaaatgttaaagggggcgaatttaaatactttgaatggtatcgcaattcaaattggcgatgctttttacatcgtttacgatgagaaattgagtgatggcgagaagaaaaaaattattgatcatttacaaaacaaaatcaaatcaaacaaatttgattatatacttaccgacaatgatatcattgaaagtgaggaaagaaaatgcaaagtgaattagaagagcgaaagaaagcatttgtatatgttagagtatctacttat

SEQ ID NO: 24753 - DNA, 260 bp, Unknown
  Description of Unknown: LeftRegion for integrase A321 sequence
tttttatagagggggttcttttttgtttttgtttttactagatgttgttgtgtattgtttaccccctcctaaatttttgagatttatatatttttattttgacgactgtagaaagtcgtctttttacattggtaatagattgccagtatatccggagggctatatactgtagtcataagaatttagtaagaggatgaggtgtgtacgaattgaaatatgctgtatatgtacgtgtatcaacggatagagacgaacaagtt

SEQ ID NO: 24754 - DNA, 260 bp, Unknown
  Description of Unknown: LeftRegion for integrase A322 sequence
gaacagattatcgtttataaagataagtatattgaagtaaaattcaaacagtttgaataatacgtgtttttactaatccatttaatgcggggtggggctaccaatcaatataagtatttttacttatagaacgaactgctctgatagatccagagcagttcttttttatttacaatatctttatcatttcttcacttttagctatatcatccggactaacaaattcaagattttgttttatatcaactccagcatcgtga

SEQ ID NO: 24755 - DNA, 260 bp, Unknown
  Description of Unknown: LeftRegion for integrase A323 sequence
ggggcgttgacgttcgatctcgttgtccccgaggatctccgggaacgaatcaccctgtaacgcaaaaaaggcccccctcctgggatcaccaggagaggggccaattgctcattcgactgtgtagccgagttcggccagggcatcctcgtgggatgtccctggcgctgccttgtgtacaggggtcaggctggtagcgattccttcgtcgttgcactcgaagatgaccgtgggtcgtacgacgtgcttgagggcctgtcggc

SEQ ID NO: 24756 - DNA, 260 bp, Unknown
  Description of Unknown: LeftRegion for integrase A324 sequence
ggggcattgtcgttcgatctcgttgtgccagaggatcttctggcacgaatgtccgtgtaacgcaaaaaagccccctcccggggatcacccaggagggggccattgctcattcgactgtgtagccgaggacggcgagggcatcctcgtgggatgtccctgccgggaatcggttgatcggagtgaggctggtagcgataccctcctcgttgcactcgaagacgaccgtgggtcgcacgatctccttcagcgcctgcctgccg

SEQ ID NO: 24757 - DNA, 260 bp, Unknown
  Description of Unknown: LeftRegion for integrase A325 sequence
ttatgcggggcggcgatattaaggtcaatactgcccttgaactcgctcgtgagcggttcggcggcagtcttcgctcattatatcgttggtggaagctgatcgaacaccaagatcgcgccgattggttggctgctgttgctccgtccttttcggctgatgaaagccgttcaccttgcgatgacgcggcttgggattttctcatgtcagactatttgcgctcggagaagccgagcttctccgcctgctatcggcgcatggtg

SEQ ID NO: 24758 - DNA, 260 bp, Unknown
  Description of Unknown: LeftRegion for integrase A326 sequence
ggagcgttctacttcgatctcgttgtcccagaggatctccgggagcgaatgtccctctaacgcaaaaaagccccctcccggggatcacccaggagggggccattgcttactcgacggtgtagccgagaacggcgagggcatcctcgtgggatgtccctgccgggaatctgttgatcggggtcaagctggtagcgataccctcttcgttgcaggcgaagacgaccgtgggtcgaacgacctccttcagcgcctgcctgccg

SEQ ID NO: 24759 - DNA, 260 bp, Unknown
  Description of Unknown: LeftRegion for integrase A327 sequence
gccaagctgccgcttggccacaacatcgacatctactggcataagcccagcgatgactgagatccggttgacctgagtgtcagtcaagggtgggctgtcagcgttctcgcgacgtatggcagcccactcttcttctgtcagaccgagactggccatcagatctcctccatcttcaggttcggccagcagtaatgcacgaaccccatctcgtcctggaccacgacctcgccgtcgtcgctgaagctcagcagcgtgccggt

SEQ ID NO: 24760 - DNA, 260 bp, Unknown
  Description of Unknown: LeftRegion for integrase A328 sequence
gccaagctgccgcttggccacaacatcgacatctactggcataagcccagcgatgactgagatccggttgacctgagcgtcagtcaagggtgggctgtcagcgttctcgcgacgtatggcagcccactcttcttctgtcagaccgagactggccatcagatctcctccatcttcaggttcggccagcagtaatgcacgaaccccatctcgtcctggaccacgacctcgccgacgaacggggcctcagtgatcgccatcgt

SEQ ID NO: 24761 - DNA, 89 bp, Unknown
  Description of Unknown: LeftRegion for integrase A329 sequence
tcaaaggttgatgttactgctgataatgtagatatcatatttaaattccaactcgcttaattgcgagtttttatttcgtttatttcaat

SEQ ID NO: 24762 - DNA, 260 bp, Unknown
  Description of Unknown: LeftRegion for integrase A330 sequence
gatcttgtggaaaaggtggagtgtgactgtggagagataaatgtgattctgaaaatctaacgaccatttctgccagtatttttaaagattgtggggacattttagttatgaactggaatgtcccaccattttacaccactttaggcgaagcgtatcgactagatacaaagaagatgagcatcgctaggttttgtagctggtgtgataggtacaccagctaaattagacaaaacataatgaattggggcagacacactctc

SEQ ID NO: 24763 - DNA, 260 bp, Unknown
  Description of Unknown: LeftRegion for integrase A331 sequence
ctgtcttcgcagaaaaagcaaataaaattagaagtacttttgaaggttatttttatagaattgttgaaagtaaatttgtaatggagagaaggaaagaatgtcgaggattattgttcgattggttaaatgaataatataaaattgcccacagggaaaaatatatatataatttaattatcatattcttagtaaataagtgggtgaaaattttgaaatacgctgtttatgtacgagtttcaacggatagagatgagcaagtt

SEQ ID NO: 24764 - DNA, 260 bp, Unknown
  Description of Unknown: LeftRegion for integrase A332 sequence
gtcttcgcagaaaaagcaaataaaattagaagtacttttgaaggttatttttatagaattgttgaaagtaaatttgtaatggagagaaggaaagaatgtcgaggattattgttcgattggttaaatgaataatataaaattgcccacagggaaaaatatatatatataatttaattatcatattcttagtaaataagtgggtgaaaattttgaaatacgctgtttatgtacgagtttcaacggatagagatgagcaagtt

SEQ ID NO: 24765 - DNA, 260 bp, Unknown
  Description of Unknown: LeftRegion for integrase A333 sequence
gccaaactgcccctcggtcacgccatcaagatccactggcatgatcccagcaacgactgagatccggttcacctgacggtcactgaggggtgggctggcggcgacttcgcgtcgtactgccgcccactcctcttccgtcccaccgaggctcactggatctccaccgtttcgaggttcggccagcagtagtgcgggatcccgctgtcgtcctgcaccacgacctcaccgtcaacggtgaagctgagcagcttgcccaccgc

SEQ ID NO: 24766 - DNA, 260 bp, Unknown
  Description of Unknown: LeftRegion for integrase A334 sequence
gccaaattgcccctgggtcacgccatcaagatccactggcatgatcccagcaatgactgagatccggttgatctgacggtcattgaggggtgggctggcggcgacctcgcgtcgtactgccgcccactcctcttccgtcccgccgaggctcatgggatggccaccgtttcgaggttcggccagcagtagtgcgggatcccgccgtcatcctgcacaacgacctcgccgtcagtggtgaagctgagcagcttgcccaccgc

SEQ ID NO: 24767 - DNA, 260 bp, Unknown
  Description of Unknown: LeftRegion for integrase A335 sequence
gccaaactgcccctcggtcacgccatcaagatccactggcatgatcccagcaacgactgagatccggttcacctgacggtcactgaggggtgggctggcggcgacctcgcgtcgtactgccgcccactcctcttccgtcccaccgaggctcactggatttccaccgtctcgaggttcggccagcagtagtgcgggatcccactgtcgtcctgcaccacgacctcaccgtcaacggtgaagctgagcagctttcccaccgc

SEQ ID NO: 24768 - DNA, 260 bp, Unknown
  Description of Unknown: LeftRegion for integrase A336 sequence
gaaaagatagaagttgcaagtgacggatatatcaagattatagataaagatatattatgacatgtataatccatacttgtatggaaaggttcggcttcccgtggggctaccatgcgtaatccatacttgtatggaaaacggcagtgctgaagttattaatcggcactgcctttattttaaattacaatatctttatcatttcttcacttttagctatatcatccggactaacaaattcaagattttgttttatatcaact

SEQ ID NO: 24769 - DNA, 260 bp, Unknown
  Description of Unknown: LeftRegion for integrase A337 sequence
ctgtcatcttgcctgttcaccgccctgtctggctaacggagttccttcaaactccgcgcatccgaagtttgacacaagtacgtactccagcgctagtctctccccactggaacgagggggttgaggtgctgtcacgcgacctgccactagcagggtactgccggatctcagacgcagacctagcagacatcagaagagccttgaggaacggagacatcaccccagaggaagccgcggaactggagaggaagggggtcctc

SEQ ID NO: 24770 - DNA, 260 bp, Unknown
  Description of Unknown: LeftRegion for integrase A338 sequence
ctatttttgcagaaaaagcaaataaaattaaaaatacttttgaaggttatttttatagaattgttgaaagtaaatttgtagtcgagagaaggaaagaatgtcgaggattattgtttgattggttaaatgaataacataaaattgcccacagggaaaaatttatatataatttaattatcatattcttagtaaataagtgggtggaaattttgaagtacgctgtttatgtacgagtttcaacggatagggatgagcaagtt

SEQ ID NO: 24771 - DNA, 60 bp, Unknown
  Description of Unknown: LeftRegion for integrase A339 sequence
acgttaataaagaaagttgatgtcacaaaagaggatatcaaaattatttttgatttttag

SEQ ID NO: 24772 - DNA, 60 bp, Unknown
  Description of Unknown: LeftRegion for integrase A340 sequence
gtttttgtaaaatcaggatatattaaaatagagtggaaaattcctttcaaaaaagcgtga

SEQ ID NO: 24773 - DNA, 60 bp, Unknown
  Description of Unknown: LeftRegion for integrase A341 sequence
gtttttgtaaaatcaggatatattaaaatagagtggaaaattcctttcaaaaaaatgtga

SEQ ID NO: 24774 - DNA, 60 bp, Unknown
  Description of Unknown: LeftRegion for integrase A342 sequence
gtttttgtcaaatccgggcatatcaaaattgagtggaaaatacctttcaaaaaagcgtga

SEQ ID NO: 24775 - DNA, 60 bp, Unknown
  Description of Unknown: LeftRegion for integrase A343 sequence
acgttaataaaaaaagttgatgtcacaaaagaggatatcaaaattatttttgatttttag

SEQ ID NO: 24776 - DNA, 60 bp, Unknown
  Description of Unknown: LeftRegion for integrase A344 sequence
accttaatcaacaaggtacaggtcacggatgaggacattgctatcaagtggaagatataa

SEQ ID NO: 24777 - DNA, 260 bp, Unknown
  Description of Unknown: LeftRegion for integrase A345 sequence
gcatttgttcgtaaggtttctgttacatcagacaatatagaaatatcttggaacttttagcgtacaaaacaaacatatttactatacgctatttcaatgaagtatatttaatatatttaaataggaagaaaaaaagacccaaccagaaattaatctgattgggtcttttagcatacttgtgctggttgagggcaaatagatatgcttgctattttatgatgcttcaccaacaccttgacgattataataaataattttct

SEQ ID NO: 24778 - DNA, 60 bp, Unknown
  Description of Unknown: LeftRegion for integrase A346 sequence
tcattgatagataagattttagtcaagaaaggttttattaaaatcctatggaaaatttag

SEQ ID NO: 24779 - DNA, 260 bp, Unknown
  Description of Unknown: LeftRegion for integrase A347 sequence
acacttatcgaaagaataaaaccaactgtttccaaaatggaaataattgcaaacaaaaaaagccccacgctctcaaaactttggcgagtctgagcgtgaggcatgtgacaggaaaagattttcatggagataacctctcatgatgtcttttcttgtacccattttatcattttttaggaaattttgaaagaggtactactatgataacaacaaataaagtagctatatatgtcagggtatcgacgacaaaccaggttgag

SEQ ID NO: 24780 - DNA, 260 bp, Unknown; identical to SEQ ID NO: 23749
  Description of Unknown: LeftRegion for integrase A348 sequence

SEQ ID NO: 24781 - DNA, 260 bp, Unknown; identical to SEQ ID NO: 23749
  Description of Unknown: LeftRegion for integrase A349 sequence

SEQ ID NO: 24782 - DNA, 260 bp, Unknown
  Description of Unknown: LeftRegion for integrase A350 sequence
taatacggctacttttctttttatctagcaactgtttccattttggaaacaactcaaaaaagccccacgctcagaagtttgcagaccgagagcgtgaggctagcaattacaagaaaaacttttcaaaagatattaccttttgagatgttttcttgtacccattttatcattttttaggaaattttgaaagaggtactactatgataacaacaaataaagtagctatatatgtcagggtatcgacgacaaaccaggttgag

SEQ ID NO: 24783 - DNA, 260 bp, Unknown; identical to SEQ ID NO: 23752
  Description of Unknown: LeftRegion for integrase A351 sequence

SEQ ID NO: 24784 - DNA, 260 bp, Unknown
  Description of Unknown: LeftRegion for integrase A352 sequence
taatacggctacttttctttttatctagcaactgtttccattttggaaacaactcaaaaaagccccacgctcagaagtttgcagaccgagagcgtgaggctagcaattacaagaaaaacttttcaaaagatattaccttttgagatgttttcttgtacccattttatcattttttaggaaattttgaaagaggtactactatgatagcaacaaataaagtagctatatatgtcagggtgtccactacctcacaagttgag

SEQ ID NO: 24785 - DNA, 260 bp, Unknown
  Description of Unknown: LeftRegion for integrase A353 sequence
caccatcctcgttcacgccactcttcgaggtgggggcgttcggtgcccaacgtggtgtcgtcgccgtgcccgggatagacgaccgtgcggtcgtcgaagcgatcaaacaccttcgtttcaaggtcgttcatcagcgagttgaactgatcagggtgtgttgtccggccaggaccgcccgggaataccgtaggctctcagctgtgaatacctcggggggcgatcgggtagcgctgtacgcacgcatttcgcaggacacaagc

SEQ ID NO: 24786 - DNA, 260 bp, Unknown
  Description of Unknown: LeftRegion for integrase A354 sequence
caccagccgcgttggcgccattcgtcgaggctcggacgctcggcacccagagtggtgtcgtcgccgtgcccgggatagacgaccgtgcggtcgtcgaagcgatcaaacaccttcgcttcaaggtcgttcatcagcgagttgaactgatcagggtgtgttgtccggccaggaccgcccgggaataccgtaggctctcagccgtgaatacctcggggggcgatcgggtagcgctgtacgcacgcatttcgcaggacacaagc

SEQ ID NO: 24787 - DNA, 260 bp, Unknown; identical to SEQ ID NO: 24376
  Description of Unknown: LeftRegion for integrase A355 sequence

SEQ ID NO: 24788 - DNA, 260 bp, Unknown
  Description of Unknown: LeftRegion for integrase A356 sequence
ggggtcttacacttcgacctacgaataccggacgacatcttagaaaggatggcggggtgagtgctccagggtggtatcccgaccctgctgggtcagggggtcagaggtattgggacggccaacggtgggcaccgcaggctgttcacgcccagcaagtggtgacaggaccgaaccacgtgctgcacctgatcctcaccatcctgacgttctggttcttcggtggttggatctgggtgtggctgatcgtggcgctgtccaac

SEQ ID NO: 24789 - DNA, 60 bp, Unknown
  Description of Unknown: LeftRegion for integrase A357 sequence
aggcttataaacaaggttaaggtgacagctgaggacattgttatcaattggaaaatataa

SEQ ID NO: 24790 - DNA, 60 bp, Unknown; identical to SEQ ID NO: 24789
  Description of Unknown: LeftRegion for integrase A358 sequence

SEQ ID NO: 24791 - DNA, 60 bp, Unknown
  Description of Unknown: LeftRegion for integrase A359 sequence
gggcttataaacaaggttcaggtaacagctgaggacattgttatcaattggaaaatataa

SEQ ID NO: 24792 - DNA, 260 bp, Unknown
  Description of Unknown: LeftRegion for integrase A360 sequence
cagaaaaagcaaataaaattaaaaatacttttgaaggttatttttatagaattgttgaaagtaaatttgtagtcgagagaaggaaagaatgtcgaggattattgtttgattggttaaatgaataacataaaattgcccacagggaaaaatttatatataatttaattatcatattcttagtaaataagtgggtgaaaattttgaagtacgctgtttatgtacgagtttcaacggatagggatgagcaagtttcatctgtt

SEQ ID NO: 24793 - DNA, 260 bp, Unknown
  Description of Unknown: LeftRegion for integrase A361 sequence
ggggtcttacacttcgacctacgaataccggacgacatcttagaaaggatgagcgcgtgacagcgcctatcgccacgcctggttggtacccagacccttcgggctctggaggagaacggtactgggacggacaaacctggacggtgactcgaccggctccgcaaccgaagagaatcacggtcaactacgggttcgcgctgctcgcggtgttctcgctgctcggaacgttgtttttcggaataccgctggtaagcaacgga

SEQ ID NO: 24794 - DNA, 260 bp, Unknown
  Description of Unknown: LeftRegion for integrase A362 sequence
acacttaccgaaagagtaaaaacaactgtttctaaaatagatatagttgcaaacaaaaaaagccccacgctcagaagtttggcgaccgagagcatgaggctagtacttacaagaaaaacttttcaaaagatattaccttttgagatgttttcttgtacccattttatcattttttaggaaattttgaaagaggtactactatgataacaacaaataaagtagctatatatgtcagggtgtccactacctcacaagttgag

SEQ ID NO: 24795 - DNA, 260 bp, Unknown
  Description of Unknown: LeftRegion for integrase A363 sequence
gccaacgtggccttaattcttcaacaacacttatcgaaagaataaaaccaactgtttccaaaatggaaataattgcaaacaaaaaaagccccacgctctcaaaactttggcgagtctgagcgtgaggcaacagtatagtaaaaggcattaaatggcccgttttactatacccattttatcaaaaagggggtataaaagcaatgaaaacaacgaataaggtggcaatatatgtcagagtgtctaccacttcccaggtagag

SEQ ID NO: 24796 - DNA, 260 bp, Unknown
  Description of Unknown: LeftRegion for integrase A364 sequence
taatacggctacttttctttttatctagcaactgtttccattttggaaacaactcaaaaaagccccacgctcagaagtttgcagaccgagagcgtgaggctagcaattacaagaaaaacttttcaaaagatattaccttttgagatgttttcttgtacccattttatcattttttaggaaattttgaaagaggtactactatgatagcaacaaataaagtagctatatatgtcagggtttcgacgacaaaccaggttgag

SEQ ID NO: 24797 - DNA, 260 bp, Unknown
  Description of Unknown: LeftRegion for integrase A365 sequence
caccagccgcgttggcgccactcgtcgaggctcggacgttcagtgcccagagtggtgtcgtcgccgtgcccgggatagacgaccgtgcggtcgtcgaagcgatcaaacaccttcgcttcaaggtcgttcatcagcgagttgaactgatcagggtgtgttgtccggccaggaccgcccgggaataccgtaggctctcagccgtgaatacctccgggggcgatcgggtagcgctgtacgcacgcatttcgcaggacacaagc

SEQ ID NO: 24798 - DNA, 60 bp, Unknown
  Description of Unknown: LeftRegion for integrase A366 sequence
ggcttaattaacaaggttcaggttacagctgacaaggttattattaagtggaaaatataa

SEQ ID NO: 24799 - DNA, 60 bp, Unknown; identical to SEQ ID NO: 24778
  Description of Unknown: LeftRegion for integrase A367 sequence

SEQ ID NO: 24800 - DNA, 60 bp, Unknown
  Description of Unknown: LeftRegion for integrase A368 sequence
gggcttataaacaaggtgcaggtaacagctgaggacattgttatcaagtggaaaatatag

SEQ ID NO: 24801 - DNA, 60 bp, Unknown; identical to SEQ ID NO: 24798
  Description of Unknown: LeftRegion for integrase A369 sequence

SEQ ID NO: 24802 - DNA, 260 bp, Unknown
  Description of Unknown: LeftRegion for integrase A370 sequence
accaggccaaatagatggagaaaacggaaagtgtggattgagcgtgtggaattcttgtaattctacacattcttttttattacgtttggattaccggaagtatcaatacgacttgtgtaggctttcgtctattattcaatattccgcgctttgtttattattcctgctaaaagaaaaaggcggatcactccgccttcttttcttctttcattgttttcaaacggcgctttcccacatctcttctagcgcttcctcaacaa

SEQ ID NO: 24803 - DNA, 260 bp, Unknown
  Description of Unknown: LeftRegion for integrase A371 sequence
cggaaaaagcaaataaaattaaaaatacttttgaaggttatttttatagaattgttgaaagtaaatttgtagtcgagagaaggaaagaatgtcgaggattattgtttgattggttaaatgaataatataaaattgcccacagggaaaaatatatatataatttaattatcatattcttagtaaataagtgggtggaaattttgaagtacgctgtttatgtacgagtttcaacggatagagatgagcaagtttcatctgtt

SEQ ID NO: 24804 - DNA, 260 bp, Unknown
  Description of Unknown: LeftRegion for integrase A372 sequence
tgacggcaatgctctagctagccaaaaacttgacggaacaatgaaagtcaaggttaaataagacaataaaaaaagccctataatctccctcgccaaagtttgattatagagctagcaccacagaaagagaaatgtaaactggaaacagccttacatgttcttttctgtacccattttatcaaaaacgaggtacaaatacaatgacaatgcataaagttgctatctatgtccgagtatctaccacgtcgcaggctgacgag

SEQ ID NO: 24805 - skipped

SEQ ID NO: 24806 - DNA, 260 bp, Unknown
  Description of Unknown: LeftRegion for integrase A374 sequence
agcttaattaatagaatctatgtcaaagaaaatgaaattcagattgaatggaaaaactgataattttagttaatagcatttcaagcaatgtatctaaatatcttagtttaaataagaagaaatctctttaataacatcatcaaatatctcaatacttaccacctcatgaggctgtatcttctcgccatctaatacaaaatcaaatatctttccattctttctaacaacattcacggtgtcctcaaaccaccccttagctt

SEQ ID NO: 24807 - DNA, 260 bp, Unknown
  Description of Unknown: LeftRegion for integrase A375 sequence
agacattccaagaggagattcgatagcaacaaaagattatgtgaattcaaaaattaacgaagttagactttggcttattcttacaatgattggtataggtgtttcgttgattaaactttttatcatgtaatattataagcccatctaagggcttttcttataaacctaaaaccgaacatacattctgaaaggagaaaaaaatgaaagcagcactatatattcgtgtaagtacgcaagaacaggctatcgaagggtattct

SEQ ID NO: 24808 - DNA, 260 bp, Unknown; identical to SEQ ID NO: 24725
  Description of Unknown: LeftRegion for integrase A376 sequence

SEQ ID NO: 24809 - DNA, 60 bp, Unknown
  Description of Unknown: LeftRegion for integrase A377 sequence
aacctaatagataaagtgtttgttaaacctgggaatatcgagatcaagtggagaatttga

SEQ ID NO: 24810 - DNA, 60 bp, Unknown
  Description of Unknown: LeftRegion for integrase A378 sequence
aacctgatagataaggtatttgttaaacctggcatcattgatataaattggaggatttaa

SEQ ID NO: 24811 - DNA, 260 bp, Unknown
  Description of Unknown: LeftRegion for integrase A379 sequence
cgctatgatcaaaccggaaagacagtaaccattgatagaatcaactttaaaaaagattagtacttctataacctacgaaccttcattagttatgtaagtactaattaataacaaacttcatgcctgccttagtgcaggcctcttttcatctaccacaacattcacatctcgatccactatgattagtatctttaccacataaaccgcagaaagcaatataccatcttctaaatttcattaataacaaaccccttccacat

SEQ ID NO: 24812 - DNA, 260 bp, Unknown
  Description of Unknown: LeftRegion for integrase A380 sequence
gtattcggaaggtacccccaattgcccgttgttgaaataaccaactataaacttaaataattttttattatatgggttacttatcgtatcaatggctcctcatgcatatgataagtaatctattatttaaaatgtttctgtttaatctctttatctattcttttatccacatattttaaaaactcccatatcaccctagtattgtatccttttctctttaactcatccaggtattccaataaaactagtttttctatcac

SEQ ID NO: 24813 - DNA, 60 bp, Unknown
  Description of Unknown: LeftRegion for integrase A381 sequence
gcgcttattaacaaagttcaagtgactgctgacagtatcaaaattttatggaaaatttaa

SEQ ID NO: 24814 - DNA, 60 bp, Unknown
  Description of Unknown: LeftRegion for integrase A382 sequence
agcttaattgacaaggtttttgtaacaaaagaggacatggaaattttatttaaaaaatag

SEQ ID NO: 24815 - DNA, 60 bp, Unknown
  Description of Unknown: LeftRegion for integrase A383 sequence
atgatagttgatagggttgaattgacaaaagacaagtacattatccattacaatttttaa

SEQ ID NO: 24816 - DNA, 260 bp, Unknown
  Description of Unknown: LeftRegion for integrase A384 sequence
ggctcactgaagttcgacttccgggtccccgaggacatcgagaagagactctccgcgtgaacgcaaaaaagccccctcccaaggccgtagccctgagagggggtttctttgtctagccgactctcaccatcgagaaccaggagttggacgcattcgcgtcaccgaggatgttcacgtcaccgtcggtcttgagaccgggctgcaccgtcgcgccagcggagaggtagtactgcaccccgtcaccgccgtaggcgatgtcc

SEQ ID NO: 24817 - DNA, 260 bp, Unknown
  Description of Unknown: LeftRegion for integrase A385 sequence
gtcggcctggacgcctgggagttcacccccgtccacctggaccagatctgcgacttgatcttgtccgccggacggcgtacataatttgctagcactcgccaaatgtgagtgccagcacactttctacctgcggtttcatctgtccatataccgggtacaaagatagtcacgaattggctacactcaggggtatgggagagatggaagccaccaccaaagccgctgtgtatctgcggcagtccatcgacaggactggcgag

SEQ ID NO: 24818 - DNA, 60 bp, Unknown
  Description of Unknown: LeftRegion for integrase A386 sequence
attgtggtatcaagggttgaagtaactaagaatggcattgatatttttttcaatttttaa

SEQ ID NO: 24819 - DNA, 60 bp, Unknown
  Description of Unknown: LeftRegion for integrase A387 sequence
ctgcttgttcaacgtgttaaagttgatagagataatatagacattcattggactttttaa

SEQ ID NO: 24820 - DNA, 260 bp, Unknown
  Description of Unknown: LeftRegion for integrase A388 sequence
ctacatgacctcgaagctcgtcgacacggggcggggcgagcagtgggtgtacggatacatctgcgggaagccgagcatcgacaggcggacctccgcctgtgaagatcacctggaaccccggtattcgccgttccccaccctctcgcggcgtgtaccctgaagctgtaacagtcgaacgagcggtacagcttgggggtaccatgcatttcatgcaaaaccgcgggtcagggccggatgccgagtgcgacatctacgtccgc

SEQ ID NO: 24821 - DNA, 260 bp, Unknown
  Description of Unknown: LeftRegion for integrase A389 sequence
aacagcgggggagcgtgggagtttgagtttcgtatccccgatgcggtgaagtcgctctaaacgcaaaaagcccccctcgggaccgaagtcccaaggggggtttctcttactcctcttccgggtcgaccggggtttccggtacccagtcgcgcagagtccagtcgtccaccgtcccaccggagtgggtgttgaacacatccacctgactgcgctcgatacggacgccgccgtactggtactcgcggccgtgcttcaccgtc

SEQ ID NO: 24822 - DNA, 260 bp, Unknown
  Description of Unknown: LeftRegion for integrase A390 sequence
caccgagagatcggcctcttcggcgagccgttcctgcgtccatccctcgcggcgccgatggttgcggacgttctcctggagcgacatggaatcacctcgcaaccagcgtactgtgaacggcgaatcccgtgcggcgcttggcctggagcatgtaccctgaagctgtaacagccgaacgagcggtacaccttgggggtaccatgtccttcatgcaaaatcgcgggtcagggcaggtcgcagagtgcgacatctacgtccgc

SEQ ID NO: 24823 - DNA, 260 bp, Unknown
  Description of Unknown: LeftRegion for integrase A391 sequence
gggcgagagctcggcctcctcggcgagcctctcttgggtccaccccgcccggcgccgatggctgcggacgttctcttggagcgacatcgaatcacctcccaaccagcgtactctgatgggggaatcccgtgcgcggactgggatcgagcatgtaccctcaagctgtaacactcgaaccagcggtacagcttgggggtaccatgcgaggcatgaacaaccgtgggtcagggtctgaagcagaggccgatctctatctccgc

SEQ ID NO: 24824 - DNA, 260 bp, Unknown
  Description of Unknown: LeftRegion for integrase A392 sequence
catattgagtttgagaagaaagacaataaagccaggattttagacattcatttttattagggtttatataaagtataagcacgaaaactttacacaaatacgaaaaaatcttcaggcccactaatgttagacggcgctaaaaataaatggtttcacaaaaatgttcgttttcaaaaaaatcatttgaaacaaaccaaaaaaagccctcttactcggggcttgaatatagttaaaataaaaagccctgtcagggggctttt

SEQ ID NO: 24825 - DNA, 260 bp, Unknown
  Description of Unknown: LeftRegion for integrase A393 sequence
gatgaatataaacgtggtacaggtgcatctagaaaaataattattgtatctgctaaataactaaatgtcttttataggcagaggtacacctacacctataaaagacattcgttttaaacagcattacctatctgttttaacacatttagaattaatggtgatatttgaattaatacatatcccaatccagcattttgaattgtggaccatgctttttcactattccctaacatgaagaagaaacatccaccgacaattat

SEQ ID NO: 24826 - DNA, 260 bp, Unknown
  Description of Unknown: LeftRegion for integrase A394 sequence
gtcagcctcttcggcgagccgttcctgcgtccatcccttgcgtcgccgatggctgcggacgttctcttggagcgacatcgaatcacctcccaaccagcgtactgtgaacggggaatcccgtgcggcgcttggcctggagcgtgtaccctcaagctgtatcagtcgaacgagcggtacaccttgggggtaccatgcgaagcatgaatcatcgcgggtccgggccagatgccgagaccgacatctacgtgcgcatcagccag

SEQ ID NO: 24827 - DNA, 260 bp, Unknown
  Description of Unknown: LeftRegion for integrase A395 sequence
atcggcctcttcggcgagccgttcctgcgtccatccctcgcggcgccgatggtttcggacgttctcttggagcgacatggaatcacctcccaaccagcgtactgtgaacggggaatcccgtgtgtggactggcctcgggcatgtaccctcaagctgtaacagccgaacgagcggtacaccttgggggtaccatgtccttcatgcaaaatcgcgggtcagggcaagtcgccgagtgcgacatctacgtccgcatcagccag

SEQ ID NO: 24828 - DNA, 260 bp, Unknown
  Description of Unknown: LeftRegion for integrase A396 sequence
atcggcctcttcggcgagccgttcctgcgtccatccctcgcggcgccgatggttgcggacgttctcctggagcgacatggaatcacctcgcaaccagcgtactgtgaacggcgaatcccgtgcggcgcttggcctggagcatgtaccctgaagctgtaacagccgaacgagcggtacaccttgggggtaccatgccattcatgcaaaatcgcgggtcagggcaggtcgcagagtgcgacatctacgtccgcatcagccag

SEQ ID NO: 24829 - DNA, 260 bp, Unknown; identical to SEQ ID NO: 24390
  Description of Unknown: LeftRegion for integrase A397 sequence

SEQ ID NO: 24830 - DNA, 60 bp, Unknown
  Description of Unknown: LeftRegion for integrase A398 sequence
tctgtgataaaagagatagttgtcacgaaagatgatatgacgataacgctagacttttaa

SEQ ID NO: 24831 - DNA, 260 bp, Unknown
  Description of Unknown: LeftRegion for integrase A399 sequence
ctacgtcgacgagagcggcaaggtccgccgctcgtaaccccctcctccctcaaggcccccgtgctcacctccgagcatgggggcctttttgcgccctcatcagggcaatcgggaatatccgcccgatataaccgccccctgcatggctagtaacgcccgggctattgtgctgacgatggtctgaccgttactatcagcctatgagcccagacaagcccctccgcgccgtcggctacgtccgcctctccaaggccaccgac

SEQ ID NO: 24832 - DNA, 260 bp, Unknown
  Description of Unknown: LeftRegion for integrase A400 sequence
tgggtaccgtgaagatggcggcggctcacctacagcgccgatcaggctgcaacagggactcgtctcggtggcacccgagaagccctgcgggtgggccgtcgtcctcctgaccaggcacttctctgtagacccattatgcgccatgcgcccacaagatgtagactcactctacgaagttgagcagctacggagggagcgcagtgggcaagcgggcggtcatctacacgcgagtgtcgcgagacgacacgggcgagggtcag

SEQ ID NO: 24833 - DNA, 260 bp, Unknown
  Description of Unknown: LeftRegion for integrase A401 sequence
tgctcctggctccagccggagcgcctacgatggcttcggacgttctcttgcagcgacgacatcgaatcacctcctggtcagggtatgccctccggggaaacgatgaagcccccgcgcgaagcgggggcgagggttcggagaatgttccccaaagcgataccacttgaagcagtggtactgcttgtgggtacactcctcgggtgatgaatcgaggggggcccaccatacgggccgacatctacgtccgaatcagcctggac

SEQ ID NO: 24834 - DNA, 260 bp, Unknown
  Description of Unknown: LeftRegion for integrase A402 sequence
aagcctatgcccggctatcaggcccgcgccgtcctcgcccgcaagcaggaggccgacgtcgacaacctctgggactaccgcctcgtcgaagtcccaacgaaccccgccaactaagcaaaagccccccggatctccgaggggcttttcttatgtcctctttgggcactcatgcgccctcatgagtgcctaaagggtatatggtgatccccatgaaaatcatcggctatgtgcgcctctcccgagcctcccgcgaggagtcg

SEQ ID NO: 24835 - DNA, 260 bp, Unknown
  Description of Unknown: LeftRegion for integrase A403 sequence
tgcgaggctggctccggctacaaggtccggatcacccgccagtggctcgacgagtacggcgcccccaagtgcccctgccacgacgaggtgatggtcgaggcgtaaggcgccaaacgtaaggccctcggagagatccgggggcctttcctatgtcctctttagacactcatgcgccctcgtgagtgcctaaaggggatatgatgggcgccatgagaatcctcggctacgtccgcctctccagagcctcccgcgaggagtcc

SEQ ID NO: 24836 - DNA, 60 bp, Unknown
  Description of Unknown: LeftRegion for integrase A404 sequence
aagcttgttaaatacattgtcgtcgatgaagaaagaattgatatatttttgaatttttaa

SEQ ID NO: 24837 - DNA, 60 bp, Unknown
  Description of Unknown: LeftRegion for integrase A405 sequence
aaggttgtcaaagagattctggtaaaaaccggcagcatagatttaatgctagatatatag

SEQ ID NO: 24838 - DNA, 60 bp, Unknown
  Description of Unknown: LeftRegion for integrase A406 sequence
acattaattaaacgtgtagaagttaaacgtgatgaaatcaacgttatttttaaattgtaa

SEQ ID NO: 24839 - DNA, 60 bp, Unknown; identical to SEQ ID NO: 24838
  Description of Unknown: LeftRegion for integrase A407 sequence

SEQ ID NO: 24840 - DNA, 260 bp, Unknown
  Description of Unknown: LeftRegion for integrase A408 sequence
cagcgtactgttggatcattacccgaaattgcattcactaggacgaaagttctatcttaatagttgatgggtaacaccaatatagggtgccctatcatgttgttacccatcacatataaacagcgctgttatgcggtttgtagaatcactctaaatcccggcgcgtaaaaactccacatgttacccctttttcctctgcatacttcattagttttctttgacgaaattctgagttagtataaaagatcaacatagtgtct

SEQ ID NO: 24841 - DNA, 260 bp, Unknown
  Description of Unknown: LeftRegion for integrase A409 sequence
cccttggagagacggccgattgggcatagggatcggtcgcggggcgccttactgatgtgaacgctaccacgggcgcctgtcgatcactcggcaggcgccttttgtcgtatacggtatattttcgcaggtcagagcgttggaatttacatgatcgattatgaacatagaaacacttccgtgttcgataaccctcatgtaatttgggtggcgtgcgcgccatcatttacaaccgtgtcagcagcgaccccactggtagaggc

SEQ ID NO: 24842 - DNA, 60 bp, Unknown
  Description of Unknown: LeftRegion for integrase A410 sequence
caattgatagatagagtcgaggttactatggataacatcgatattatttttaagttttaa

SEQ ID NO: 24843 - DNA, 60 bp, Unknown; identical to SEQ ID NO: 24842
  Description of Unknown: LeftRegion for integrase A411 sequence

SEQ ID NO: 24844 - DNA, 60 bp, Unknown; identical to SEQ ID NO: 24842
  Description of Unknown: LeftRegion for integrase A412 sequence

SEQ ID NO: 24845 - DNA, 60 bp, Unknown; identical to SEQ ID NO: 24842
  Description of Unknown: LeftRegion for integrase A413 sequence

SEQ ID NO: 24846 - DNA, 260 bp, Unknown
  Description of Unknown: LeftRegion for integrase A414 sequence
cttgctgactcatgccccgacgcttgcgtacgtcgcggagctgcttaccaatgtcggcactcatgagtcaagactacggcgcgtaagctggtgagcacatggaaaagcccccgcttcctggcgggggcgagggtccgaggcatgttccccaaagcgataccacttgaagcagtggtactgcttgtgggtacactctgcgggtgatgaatcgaggggggcccactgtacgggccgacatctacgtccgaatcagcctggac

SEQ ID NO: 24847 - DNA, 260 bp, Unknown
  Description of Unknown: LeftRegion for integrase A415 sequence
gagcagaagcgcgagctgacgctcggtgccctgcgccacgcgcggcggaagcggcgagagcagtccacgtaggtacgacagagccccctgctcctgacctggagagggggctctgttgcgctctgacctgcgggttcgtgctcaggagttgcctgctgggccattcagtacggacctactgattggtgtagcatgcacccatgacgatcagtggagggaccgacgaggccctgttctacttccgcatctcgctcgatgcg

SEQ ID NO: 24848 - DNA, 260 bp, Unknown
  Description of Unknown: LeftRegion for integrase A416 sequence
gggttaccgtcgagatggcggcggctcgtcgcagcgccgatcaggttgcaacagggacttgttctcggtggcacccgagaagccctgtaggcgggccgtcgtccgtctgaccaggcaacacgctgtagatccatcgtgcgccatgcgcccacaaggtgtagcctcactctacgaggtcgaccacctacggagggagagcagtgagcaagcgagcggtcatctacacccgagtgtcccgcgacgacacaggcgaggggcag

SEQ ID NO: 24849 - DNA, 260 bp, Unknown
  Description of Unknown: LeftRegion for integrase A417 sequence
gggttaccgtcgagatggcggcggctcgtcgcagcgccgatcaggttgcaacagggacttgttctcggtggcacccgagaagccctgtaggcgggccgtcgtccgtctgaccaggcaacacgctgtagacccatcgtgcgccatgcgcccacaaggtgtagcctcactctacgaggtcgaccacctacggagggagagcagtgagcaagcgagcggtcatctacacccgagtgtcccgcgatgacacgggcgagggacag

SEQ ID NO: 24850 - DNA, 260 bp, Unknown
  Description of Unknown: LeftRegion for integrase A418 sequence
gcggaggagtacaaggaccacccagactacgcgacccggtgggaggccccgtgagccccacgacgctgccagcccagcggcggggccgtcctgggtgcatccggctgtacctccgtctatcgcgcgccacggaggagtccacgtccatcgttcggcaggaatcggccggacgggatgaggcgggccgacggtggcccggcgtgcccatcgtcgtgtacgtggatgagggcgtgtccggtggcgcggagctggacaagcgg

SEQ ID NO: 24851 - DNA, 260 bp, Unknown
  Description of Unknown: LeftRegion for integrase A419 sequence
cagcggtgccgtcgtcgccgctgctgcagctggtggtgaggagagcgatcgcggctgccgtgcagagggccgggaggtagcgtgtcatgtttccgcagcgtattcgacgtgcgccttggggaccgggctacgcgcgtgatccgtggtggagcaagtgcgacacatctcccatttttgcggttacgccgctcattgtcggaatgggatcgtactgtcagttcatgcgagcgatcatctactgccgcgtctcatccgatccg

SEQ ID NO: 24852 - DNA, 260 bp, Unknown
  Description of Unknown: LeftRegion for integrase A420 sequence
cgcccagatcctggtcgacggggagcgcgtcgggcaggcgtcggtcctgaccccgggcatggagtacgcggaccgcctgaagatcaagggctggcactagccgccccgccctggaccccctggccgcccggctgggggtcctgttgcttcaactcccctttagctactcacgcgcccccgtgagtggctaatatgtacatatgcgagttatcggttacgtccggctatcccgggcatcacgagaagaatcgacgtcggtc

SEQ ID NO: 24853 - DNA, 60 bp, Unknown
  Description of Unknown: LeftRegion for integrase A421 sequence
atgcttatatacaaagtagatgtcacgaaagaagacatcaatattatttttgatttttag

SEQ ID NO: 24854 - DNA, 260 bp, Unknown
  Description of Unknown: LeftRegion for integrase A422 sequence
tgtcatgggcctgagcctggacgacccgagcttgacgagctcgcagcgtgagcgccgacgcctggtccagaaggccatcgctcgacgccgcgtgatccactgatccgcctctgacctgcgacttctctgtgtacctgttgtgcgccatgcgcccacatgtggcacgatgggtacacaccccgtcactgagaggagccacgttgagcaagcgcgccgtcatctacacccgcgtgagtcgagacgacacaggagagggtcga

SEQ ID NO: 24855 - DNA, 260 bp, Unknown
  Description of Unknown: LeftRegion for integrase A423 sequence
ctaaagtagctaaagaaaatggctatacaggtattcctaacggtgatgttggaggagtccctactcccgacgaatattattctaatgatcaattagatccagatacaggattacctatggaagatgcagatccacatgatgttgaataatttttagggtagtctatctacccttattattttttacttttttaaggagtgatgtattatgaacgtagctatttacgttcgtgtcaggtgagttcctatgagcaagcaacg

SEQ ID NO: 24856 - DNA, 260 bp, Unknown
  Description of Unknown: LeftRegion for integrase A424 sequence
ggaacggctgattaggcttagggatcggccgcggggcgccttactggattaaggctaccacaggtgcccgtcgatgatccggcgggcacctttcgtcatatacggtgcattaacgcaggtcaggcagcacgattgcacatgtggggtaagcgacatggaaacatttctgtgttccataaccgtcatgtagtttgggtttcgtgcgcgcgatcatctacaaccgtgtcagcagcgatcccactggtagggggcgttccgtc

SEQ ID NO: 24857 - DNA, 260 bp, Unknown
  Description of Unknown: LeftRegion for integrase A425 sequence
agacggccgattgggcatagggatcggtcgcggggcgccttactgatgtgaacgctaccacgggcgcctgtcgatcactcggcaggcgccttttgttgtatacggtatattttcgcaggtcagagcgttggaatttacatgatcggttatgaacatagaaacacttccgtgttcgataaccctcatgtaatttgggtggcgtgcgcgccatcatttacaaccgtgtcagcagcgaccccactggtagaggccgttccgtc

SEQ ID NO: 24858 - DNA, 260 bp, Unknown
  Description of Unknown: LeftRegion for integrase A426 sequence
agacggccgattgggcatagggatcggtcgcggggcgccttactgatgtgaacgctaccacgggcgcctgtcgatcactcggcaggcgcctttcgtcgtatacggtatattttcgcaggtcagagccttgggatttacatgatcggttatgaacatagaaacatttccgtgttcgataaccctcatgtaatttgggtggcgtgcgcgccatcatttacaaccgtgtcagcagcgaccccactggtagaggccgttctgtc

SEQ ID NO: 24859 - DNA, 260 bp, Unknown
  Description of Unknown: LeftRegion for integrase A427 sequence
agacggccgattgggcatagggatcggtcgcggggcgccttactgatgtgaacgctaccacgggcgcctgtcgatcactcggcaggcgccttttgtcctatgcggtatattttcgcaggtcagagccttgggatttacatgatcggttatgaacatagaaacacttccgtgttcgataaccctcatgtaatttgggtggcgtgcgcgccatcatttacaaccgtgtcagcagcgaccccactggtagaggccgttctgtc

SEQ ID NO: 24860 - DNA, 260 bp, Unknown
  Description of Unknown: LeftRegion for integrase A428 sequence
agacggccgattgggcatagggatcggtcgcggggcgccttactgatgtgaacgctaccacgggcgcctgtcgatcactcggcaggcgccttttgtcgtatacggtatattttcgcaggtcagagccttggaatttacatgatcggttatgaacatagaaacacttccgtgttcgataaccctcatgtaatttgggtggcgtgcgcgccatcatttacaaccgtgtcagcagcgaccccactggtagaggccgttctgtc

SEQ ID NO: 24861 - DNA, 260 bp, Unknown
  Description of Unknown: LeftRegion for integrase A429 sequence
tgcgcggccggcgcgccggccagctgcgcggcggtggtgatcccgccggccgaaagtttcagcatgcgcgcaggttaacctaccagtgtggtcctgccgccggttgcggtcgagacgctgtgagcagtctgaatgtacatgacgaccaaacaccgaagaaacatttccgtgttcgataaccctcatgtaatttgggtggcgtgcgcgccatcatttacaaccgtgtcagcagcgaccccactggtagaggccgttctgtc

SEQ ID NO: 24862 - DNA, 260 bp, Unknown
  Description of Unknown: LeftRegion for integrase A430 sequence
gggacggctgattaggcttagggatcggccgcggggcgccttacggttgtgaaggctaccacaggtgcccgtcgatgattcggcgggcacctttttcgtatacggtgcattaacgcaggtcagacggcacgatcgtacatgtggggtaagcggcatggaaacatttccgtgtttgataacggtcatgtagtttggggtgtgtgcgcgcgatcatctacaaccgtgtcagcagtgatccgactggtagggggcgttccgtc

SEQ ID NO: 24863 - DNA, 260 bp, Unknown
  Description of Unknown: LeftRegion for integrase A431 sequence
tcgtcgccagcgcagctggtggtgaagagcgcgagcgcagctgccgtgcagaggacggggaggtaacgtgtcatgtttccgcagcgtattcgacgtgcgcctcgcggacagggctacgcgcgtgatccgcggatgtagaaagtgcgacacatctcccattcttgcggttaaaccgctaattgtcggaatgggactgtactgtgcggcgcatgcgagcgatcatctactgccgcgtctcatccgatccgcacgcccgcggc

SEQ ID NO: 24864 - DNA, 260 bp, Unknown
  Description of Unknown: LeftRegion for integrase A432 sequence
gcattaataaataaagtagagctaacgaacgaagatatgaaaatagagtggaacatatagccccactctacctattcacctattcaattaaagttagtgcacaaacaacttctacatgcctagtttttcattgttcaacagtattctctaatagaaagaacctgttattttattttaacatagattacaaagaagccccttatctatatagaagctggggctttttgtaatttgattgtatttttctaaaaatgaaacta

SEQ ID NO: 24865 - DNA, 233 bp, Unknown
  Description of Unknown: LeftRegion for integrase A433 sequence
agcatccagttcgagaaacaggacgggactgttcaaatattggacgtaaacttttattgagtacctttacgaaggcttaggtgtagatctcggtggtcgccgtatcattaaaaaaaaaaaaaaagaagacaaagtgcgggtccgaacacacaaaaaattacaaaaagtacacaaacgtgagtactaataacacaacagacacatgagacctaagaacagtcaagaaaaggacg

SEQ ID NO: 24866 - DNA, 260 bp, Unknown
  Description of Unknown: LeftRegion for integrase A434 sequence
tatgtcgaagtcagccccgggcggccccgagcgaaagtcgtcgtccggccccgatggtgagactcggcactagtcactagcatgactgtgctctagtctcaccatcggctgatagaccagaatcacgcggcgccagcgaggaaagcagccaccgtgtggttcgcatgccggtcgtggttatgcctggcacggtcgtatcgtgcggtgatcctcgggtccgagtggcgggcagccacctggacgtcgcgcagcggaacgcc

SEQ ID NO: 24867 - DNA, 260 bp, Unknown
  Description of Unknown: LeftRegion for integrase A435 sequence
cagaagttggcaaggggtttggggatgttcgttatcaatccgttatcgggttggtcgtgccagccccttgatcaacaggcctttgggcaggtcaggccgtacttccggcgtcgggaggccttgtgtccatttcgggcagattctggggaaagtgaccgtgaatctcggtaccaacttctggcgctcgtacgctggtcggcatgagtagccgttatgagggccgccgggcggtcatctacacccgagtgtcgaaggaccgc

SEQ ID NO: 24868 - DNA, 260 bp, Unknown
  Description of Unknown: LeftRegion for integrase A436 sequence
gagtttgttgaacgtatagaactatttgatgatgaggtaattattaaatataaattttaggtacatagtgttatttacactaataaacaaaatcatatacctaaaatattacatttatacaaacctatagacaatacgaacatgcattcggtataattgtattactaggaggccgatattatgaaaactaattatgtaggagtagttgaaaagattagaatgttaagtatgtacccaaaaatgctagttcgattctcatt

SEQ ID NO: 24869 - DNA, 260 bp, Unknown
  Description of Unknown: LeftRegion for integrase A437 sequence
gtaatatacagagaaaaagggaagttcaagaagattacactggactatactttaaaatgaccccaacctgtgcaagagttaacttcgcgcatgcaaacttaacttttatacaggttagggacgatgtattatttccaacgataataatctaaacaaattaaaacatcaaggcggatcactccgccttcttttcttcttttctacgcttcccacatttcttcgagtgcctcctcaacaaacagatatggataaaaaaagag

SEQ ID NO: 24870 - DNA, 82 bp, Unknown
  Description of Unknown: LeftRegion for integrase A438 sequence
ttaaataaagaaggtaatattaatacagttaaaatcaatgaaatacatttcaaatattaatgagtgttatgtaactagaaag

SEQ ID NO: 24871 - DNA, 260 bp, Unknown
  Description of Unknown: LeftRegion for integrase A439 sequence
gctgcagctcgtggtgaggagcgcgagcgcagctgccgtgcagagggctgggaggtagcgtgtcatatttccgcagcgtattcgacgtgcgcctcgcggacaccgctacgcgcgcgatccgcggcgaagctaatgcgacacatctcccattctcgccgttacaccgctcattgtcggaatgggactgtactgtgcggcgcatgcgagcgatcatctactgccgcgtctcatccgatccgcacgcccgcggcaagtccgtc

SEQ ID NO: 24872 - DNA, 260 bp, Unknown
  Description of Unknown: LeftRegion for integrase A440 sequence
cgctgccgcacccggcaacgaggacgatcgcggctgccgtgcagagggctgggaggtagcgtgtcatgtttccgcagcgtattcgacgtgcgcctcggagacagggctacgcgcgtgatccgtggtggagccagtgcgacacatatcccattcttgcggttacgccgctcattgtcggaatgggatcgtactgtcagtgcatgcgagcgatcatctactgccgcgtctcatccgatccgcacgcccgcggcaagtccgtc

SEQ ID NO: 24873 - DNA, 260 bp, Unknown
  Description of Unknown: LeftRegion for integrase A441 sequence
agcagcggccccgatgacggccgcgacgagtttctgtttcacggcgctgagagtaccgggcggcggcccgcacgaggtgctaatcggctggtcggggcgtgaaacggtgccgcggtaacctatgccacaaagtgatgcaaggctgggcatgggtcaattaatggcctaagttggagggcgtgaaaaaatcgccccgtgtcgtggtctacctgcggcaatccgaagatcgggccgacgacggcctcggcgtcgatcgccag

SEQ ID NO: 24874 - DNA, 260 bp, Unknown
  Description of Unknown: LeftRegion for integrase A442 sequence
gctgcagctcgtggtgaggagcgtgagcgcagcggccgtgcagaggacggggaggtagcgtgtcatgtttccgcagcgtattcgacgtgcgcctcgcggacagagctacgcgcgcgatccgcggcgaagctagtgcaatacatctcccattctcgccgttacaccgctcattgtcggaatgggactgtactgtgcggcgcatgcgagcgatcatctactgccgcgtctcatccgatccgcacgcccgcggcaagtccgtg

SEQ ID NO: 24875 - DNA, 260 bp, Unknown
  Description of Unknown: LeftRegion for integrase A443 sequence
tgctgcagctggtggtgaggagcgcgagcgcagctgccgtgcagagggctgggaggtagcgtgtcatgtttgcgcagcgtattcgacgtacgcctcccggacagggctacgagcctgattcgcggtgaagcagttcgacacatctcccattcttgcggttaaaccgctcattgtcggaatgggactgtactgtgcggcgcatgcgagcgatcatctactgccgcgtctcatctgatccgcacgcgcgcggcaagtccgtc

SEQ ID NO: 24876 - DNA, 260 bp, Unknown
  Description of Unknown: LeftRegion for integrase A444 sequence
tattccgaccagattcatatgacaatcgtttctttgattacacagttccttatgaagatgctacgaatataaaaatacacggtaaagtagtaatgtacgtagctacattaaactaatacctagatcaattaaatctttagcgctaggaatttaatggacagcccgtacagctgtcctctttttaaaaggagagataaatagtgactgttggaatttatataagagtaagcactgaggaacaagtgcgagatggtttctct

SEQ ID NO: 24877 - DNA, 260 bp, Unknown
  Description of Unknown: LeftRegion for integrase A445 sequence
aatatacaactcaaaaaaataaatgaaaaaaatattgttgtaaacataacattttattagtatttatgttatgtttacacatataaagttctcatatatacaaaaaacaacaaaacaaaagagcacagcgtgtataagtagtgttggtagcactcttataccgtccacctgattgagccaggtaaacacttgctatactctcatgagtcattgtacatcatgcagggtctattaagcaacgtttacttaattggtgacgt

SEQ ID NO: 24878 - DNA, 260 bp, Unknown
  Description of Unknown: LeftRegion for integrase A446 sequence
ctgcagctggtggcgaggagcgcgagcacggcggccgtgcagaggactgggcggtagcgtgtcatgtttccgcagcgtattcgacgtgcgcgttccggacagggctacgcgcctgatccgcggtgaagcaaagtgcgacacatctcccattcttgcggttaaaccgctcattgtcggaatgggactgtactgtccggcgcatgcgagcgatcatctactgccgcgtctcatctgatccgcacgcccgcggcaagtccgtc

SEQ ID NO: 24879 - DNA, 260 bp, Unknown
  Description of Unknown: LeftRegion for integrase A447 sequence
atctacgtcgacgtcacctggcccaacggcttcaccatttccgggctcggaaccggcgagggcgacgcgttgaagttcatcgagctggtgaaccggctcgcccagcgctgacgtggtctcctgacgtgcgggctgagacgcatctcccattcttgctgttaaaccgctaactgtcggaatgggactgtactgtccggcgcatgcgagcgatcatctactgccgcgtctcatccgacccgcacgcgcgcggtaagtccgtc

SEQ ID NO: 24880 - DNA, 260 bp, Unknown
  Description of Unknown: LeftRegion for integrase A448 sequence
gctgcagctcgtggtgaggagcgtgagcgcagcggccgtgcagaggacggggaggtagcgtgtcatgtttccgcagcgtattcgacgtgcgcctcgcggacagcgctacgcgcgcgatccgcggcgaagctagtgcaatacatctcccattcgcgccgttacaccgctcattgtcggaatgggactgtactgtgcggcgcatgcgagcgatcatctactgccgcgtctcatccgatccgcacgcccgcggcaagtccgtg

SEQ ID NO: 24881 - DNA, 260 bp, Unknown
  Description of Unknown: LeftRegion for integrase A449 sequence
gaacatctacgtcgacgtcacttggcccaacggcttcaccatttccgggctcgggaccggcgagggcgacgcgttgaagttcgtcgagctcgtgaacaggctcgcccagctctgataagcgctcggcggcggctgcgacacatctcccattcttgcggtttatccgctaattgtctgaatgggactgtactgtccggcgcatgcgagcgatcatctactgccgcgtctcatccgatccccacgcccgcggcaaatccgtc

SEQ ID NO: 24882 - DNA, 260 bp, Unknown
  Description of Unknown: LeftRegion for integrase A450 sequence
taaatttacggggttattaaagtgtcagcattgtggttcgactttaaagagacaagtttcttacaagaaaaaaattgtttggtgctgttccaaatacataaaagaaggcaaagtaacttgtcaggggatgcgagtgccagaagtagatatttcaaattgggagataacctcacctgttacagtaatagaaagggatagaaatggggaaaagtattacagttataccggccaagaaagtgcagaccagtgttcttcatcag

SEQ ID NO: 24883 - DNA, 260 bp, Unknown
  Description of Unknown: LeftRegion for integrase A451 sequence
taaatttacggggttattaaagtgtcagcattgtggttcgactttaaagcgacaagtttcttacaagaaaaaaattgtttggtgctgttccaaatacattaaagagggaaaagcagcttgtcaagggatgcgtgtgccagaagtagatatctcaaattggacagtaacctcgccagtaaaagtgatagaaagggatagagatggggaaaagtattacagttattccggccaagaaagtgcagaacatcgttcaacatcag

SEQ ID NO: 24884 - DNA, 260 bp, Unknown
  Description of Unknown: LeftRegion for integrase A452 sequence
tggcgtgatgggtgagacgtcgcagaacatctacgtcgacatcacttggccgaacggttacaccatgtccgggctggggaccggcgaaggcgacgccctgaagttcgtcgagctggtcaaccggctcgccgctcgcgacacataaaccttttcgacagtaataccgccaattgtcggatagggatagtacggttcgccccatgcgggcgatcatctactgccgagtctcgtcagatcccaacgcgcggggaaagtctgtg

SEQ ID NO: 24885 - DNA, 260 bp, Unknown
  Description of Unknown: LeftRegion for integrase A453 sequence
tcgaacaggtcgaccgagaagtcgtcgccgccgtcgctgcccgcccagtagagcgcgattcggtaggcggacggcattcgtcgtcccggccgaagtggaagcacgtccacgaattccctccttcgatctgaccagagatatatatcccttttcgacggtatgacctaaaactgtcagatagcgattgtagggtttagcacatgcgagcgatcatctactgccgcgtttcgtccgatccgaagatgcgcgaacgaagcgtg

SEQ ID NO: 24886 - DNA, 260 bp, Unknown
  Description of Unknown: LeftRegion for integrase A454 sequence
taaatttacggggttattaaagtgtcagcattgtggttcgactctaaagagacaagtttcttacaagaaaaaaattgtttggtgctgttccaaatacattaaggaaggaaaagcagcttgtcaagggatgcgtgtgccagaagtagatatctcaaattggacagtaacctcgccagtaaaagtgatagaaagggatagagatggggaaaagtattacagttattccggccaagaaagtgcagaccagcgttcaacatcag

SEQ ID NO: 24887 - DNA, 260 bp, Unknown
  Description of Unknown: LeftRegion for integrase A455 sequence
aaaggaattaaagggaagcgccagaactcattgaagattacgggtatagagttttattaattggaagttcggaataactatgcagatacctgatacacacttccaacaaaaataaccacactcctaaattaataggtggtgtggttttgttgattgtaggggtataaaaataaccgcattattaaagatacggttactctgttatctgtaaatataatagtagtttaaaaattagtcgttattgttagttctttttttat

SEQ ID NO: 24888 - DNA, 260 bp, Unknown
  Description of Unknown: LeftRegion for integrase A456 sequence
aaaggaattaaagggaagcgccagaactcattgaagattacgggtatagagttttattaattggaagttcggaataactatgcagatacctgatacacacttccaacaaaaacaaccacactcctaaattaataggtggtgtggttttgttgtattaaaaaaccgaatttaatatatctatgttttatttaacatgaatcgccttgttatttaaaaaatacacctattataataccgataatacttacaacagtaggtgc

SEQ ID NO: 24889 - DNA, 260 bp, Unknown
  Description of Unknown: LeftRegion for integrase A457 sequence
agaggaattaaagggaagcgccagaactcattgaggattacaggtatagagttttattaattggaagttcggaataactatcctgatacctgatacacacttccaataaaaattaaccacactcctaaattaataggtggtgtggttttgttggttgtgtggggataaaaataaccgcatcagttaagatgcggttatctagcaagggccacgtatttataaatacgtttagaatctcttcggcaactttgctatagaca

SEQ ID NO: 24890 - DNA, 89 bp, Unknown
  Description of Unknown: LeftRegion for integrase A458 sequence
aagaacgacaataaaaagaaacgacgttcccttaaaataaaggatatcgagttctattaatattttatggaagtatgcacaattaatca

SEQ ID NO: 24891 - DNA, 89 bp, Unknown
  Description of Unknown: LeftRegion for integrase A459 sequence
aagaatgataacaaaaagaaacgtcgttcccttaaaataaaggatatcgagttctactgatattttatggaagtatgcacaattaatca

SEQ ID NO: 24892 - DNA, 260 bp, Unknown
  Description of Unknown: LeftRegion for integrase A460 sequence
accattacagtagagatacaagggaacgacgttgttatcactgatcacaccctcctttaagtgttttgcctaaaggagcatttacacttgaaagtgctatgttaggcaaaaaaagagcgccctataatggacgctctcgcttatttgaatgatccccaataatctacacgttttccgtttgcactctcaccagttgccatataaccatatgttccgtttgctcgtggttgtctgatccaaacatgaccgtctaactcaat

SEQ ID NO: 24893 - DNA, 260 bp, Unknown
  Description of Unknown: LeftRegion for integrase A461 sequence
ataaatgtggtaaagtctgggaacaaaaaatttaaaaagaaaaccgcccggtgcttccaacaccgaacggcttcatataaaattataccgacatgtgccgatacatacttcttacaaaatcattgtatcatcctggcactaaactgtaaactggtatagtgttatttttatactcatttttagaaagaaggtttaatacaatgaaaaaagtcaagcgcacagccctttatattagagtctctactactgagcaggcccaa

SEQ ID NO: 24894 - DNA, 260 bp, Unknown
  Description of Unknown: LeftRegion for integrase A462 sequence
ttgatcggcgagttcgcgcccaggagcatcggcgccgagctgctggaggtcgaggcatgaaggacgggacgctcgagaccttcgtgccgctgaccctgcggcggcgcggcgtgcgccggctggttcagcaccaggccgaggaccgggacgcgcacgacagcacgctcatcgaagggatggcgcgggccttccactggcaacggctgctggacagcggcgcgatgcccagcggctcggccatcgcgcgtgccgaagggctg

SEQ ID NO: 24895 - DNA, 68 bp, Unknown
  Description of Unknown: LeftRegion for integrase A463 sequence
cacgttaaaagagggaaaactaagcattctatcaaaataaaaaacattgatttttattaacttctttt

SEQ ID NO: 24896 - DNA, 260 bp, Unknown
  Description of Unknown: LeftRegion for integrase A464 sequence
gattatgtaaaacttaaaaacaggcattctatcaaaataaatgatatagaattttattaacttatgtacggaagtatagacactcgattaatatttaatgtgtatacttccgtaaaaataaccacgctcataaagaacgtggtagcaaaatttataaaggagtaaaaaaagattaaattgtatgtaatttaattgtagcacagaccgtgtaaccaatgtagtgttaaactatgttttttaatatcaatctaacatctaca

SEQ ID NO: 24897 - DNA, 260 bp, Unknown
  Description of Unknown: LeftRegion for integrase A465 sequence
gagtatgtaaagcttaaaaacaggcattctattaaaataaacgatatagaattttattaacgtatgtacggaagtatagacactcgattaatatttaatgtgtatacttccgtattttttatagaacccgtctgattctacgggtttagattatccgtgtcgaaatcgaggcgtttaaaataaaaaaccaccacactcaaaagaatgtggtagcaaaaattataaaggagtaaaaaagattaaattgtatgtaatttaat

SEQ ID NO: 24898 - DNA, 260 bp, Unknown
  Description of Unknown: LeftRegion for integrase A466 sequence
gattatgtaaaacttaaaaacaggcattctatcaaaataaatgatatagaattttattaacttatgtacggaagtatagacactcgattaatatttaatgtgtatacttccgtaaaaataaccacgctcataaagaacgtggtagcaaaatttataaaggagtaaaaaaaagattaaattgtatgtaatttaattgtagcacagaccgtgtaaccaatgtagtgttaaactatgttttttaatatcaatctaacatctac

SEQ ID NO: 24899 - DNA, 260 bp, Unknown
  Description of Unknown: LeftRegion for integrase A467 sequence
aggaacaaatagaatgggcagaagaaaatggtaagttagaagacaactaataaaattgtctactaacgatttaaatgacgaagcattgatagtgtataaattacttcttattaattaataatatctaggttggttatagtttaatattttttggggtagcacgactacccttattatttttttaccttttttagggagtgatgaattatgaacgtagctatttacgttcgtgtcaggtcagtacattagaacaaaaagaa

SEQ ID NO: 24900 - DNA, 260 bp, Unknown
  Description of Unknown: LeftRegion for integrase A468 sequence
gattatgtaaaacttaaaaacaggcattctatcaaaataaatgatatagaattttattaacttatgtacggaagtatagacactcgattaatatttaatgtgtatacttccgtaaaaataaccacgctcataaagaacgtggtagcaaaatttataaaggagtaaaaaagattaaattgtatgtaatttaattgtagcacagaccgtgtaaccaatgtagtgttaaactatgtttttttaatatcaatctaacatctaca

SEQ ID NO: 24901 - DNA, 260 bp, Unknown; identical to SEQ ID NO: 24899
  Description of Unknown: LeftRegion for integrase A469 sequence

SEQ ID NO: 24902 - DNA, 260 bp, Unknown
  Description of Unknown: LeftRegion for integrase A470 sequence
ttcaggaacaaatagaatgggcagaagaaaatggtaagttagaagacaactaataagatcgtctactaacgatttaaatgacgaaacattgatagtgtataaattacttcttattaattaataatatctaggatggttataatttaatatttttagggtagcatgcctacccttattatttttttactttttagggagtgatgaattatgaacgtagctatttacgttcgtgtcaggtcagtacattagaacaaaaagaa

SEQ ID NO: 24903 - DNA, 260 bp, Unknown
  Description of Unknown: LeftRegion for integrase A471 sequence
tagacgaccgtgcggtcgtcgaagcgatcaaacaccttcgtttcaaggtcgttcatcagcgagttgaactgatcagggtgtgttgtccggccaggaccgcccgggaataccgtaggctctcagctgtgaatacctcggggggcgatcgggtagcgctgtacgcacgcatttcgcaggacacaagcggtaaagctgtcggggtggccgaccagttggaaacggcacgcaagttctccgcagaccgcggctacgacgtcgtc

SEQ ID NO: 24904 - DNA, 60 bp, Unknown
  Description of Unknown: LeftRegion for integrase A472 sequence
ataaaaaatattgtggtttatccagatggaaatttgaaaataaattttttaggatattaa

SEQ ID NO: 24905 - DNA, 260 bp, Unknown
  Description of Unknown: LeftRegion for integrase A473 sequence
tttatcgttagtaaaggttaagttaacctttaaaattgttagtgggtagtatccactttttttagttttatggttttaatctccttaaggagattaaaactaaaattttgactattttcaaaatatttttatatttttactgtaaatatagatttttaaaaattgattttaatttttattattttacattaaataaagatatgtctggaagtcacaatattaaattgacgttagaacaacgtcaaaaactagtccgaatg

SEQ ID NO: 24906 - DNA, 260 bp, Unknown
  Description of Unknown: LeftRegion for integrase A474 sequence
agaggtgtattcgataccattacagtagagaatacaagggaacgacgtttgtatcactgatcacaccctcctttaagtgttttgcctaaaggagcatttacacttgaagttgcctcatctagcataagaatttgcggatttcgaagtaacgctcgggcaatggcaattcgctgtctttgtccaccagaaagcttcacaccgcgttctccaacttctgttgcataaccgtttggtaagtcatgaataaatgcatcaacata

SEQ ID NO: 24907 - DNA, 260 bp, Unknown
  Description of Unknown: LeftRegion for integrase A475 sequence
atacaagaaattcacattgatcatgacgtggttgatataatttggagatggcgtttttgacgttatctttttatgtattcatttccggctattcaagtagctagtcttgaataccgaaaaaattcgagacaaaacaaaagagcacagcctgtatataaagtgcgaccaacactctatataccgtccacctgattacgccaggtaaacacttgctatactctcatgaattattttacatcatgtagggtttattcagcaac

SEQ ID NO: 24908 - DNA, 260 bp, Unknown
  Description of Unknown: LeftRegion for integrase A476 sequence
tctataatagattatatagaaatagataataacaaaaacatcactattaattttatataattatttggactaacatatagtatccacttggctattattagttagtccaaataaataaaatacttataacaattgaaatacgcgatatacactgaacctcccatgactaaagtcacagggttcctgtttcatagaatttcgcataatcaaatgttagttcacaatactattctaacttaccttgacctttaaatactctg

SEQ ID NO: 24909 - DNA, 260 bp, Unknown
  Description of Unknown: LeftRegion for integrase A477 sequence
aaatcactaataaacaaaatttatattgatggtgaacaagttactattgaatggctctagtagcttgtttatttagattgtttagttcctcgttttctctcgttggaagaagaagaaacgagaaactaaaattataaataaaaagtaacctatttttctgtagattgctttttatcatttatatagaagaaagccgctttttattagattataattgatgttttttgatttatatttcacttcttgtgcaaataacgata

SEQ ID NO: 24910 - DNA, 260 bp, Unknown
  Description of Unknown: LeftRegion for integrase A478 sequence
aaatcactaattaataaaatttatatcgacggtgaacaagttactattgaatggctctagtagcttgtttatttagtttatttagtacctcgttttctctcgttggaagaagaagaaacgagatacaaaaaaagaacatcctctcaaaaggatgtctttattttacttttatatagaagaaacagtatttctgtgactaattattaacaatagattgatgttgtaaatactcgtcatagatagtctttaaatctatttca

SEQ ID NO: 24911 - DNA, 219 bp, Unknown
  Description of Unknown: LeftRegion for integrase A479 sequence
aacttcatagaaaagatttacattaatcaaaataacgtcaaaattatttggcgtttttaagtaattattttatgtattcatttccggctattcatacagcccaaataaaaaatgattctttttgcttaatagcctctataactccttgcgccgccaaattctggccagtagacaacgtcccgttccactgtaacaaatttgaattcttttctctctttc

SEQ ID NO: 24912 - DNA, 260 bp, Unknown
  Description of Unknown: LeftRegion for integrase A480 sequence
ccaaaaaggccgacgcctttaaaaagacggcgaccgatgctgcacagattgatcagctagactatgagcatcaaaccgctatcgtgaggatgctcatcgatcacatcaacgtaagtaatactggtttagatatttactggcaaatctaatggtcgctttaaaaggcggcttttttcttgcccaaaataaaaagatttagagagtgccatttcaaccacaatctctaaatcttttctaatcttacagatcgtccagtaaga

SEQ ID NO: 24913 - DNA, 260 bp, Unknown
  Description of Unknown: LeftRegion for integrase A481 sequence
tttaaaggtatacactaatccatcgcaaccattaatttttgaaagtaacattggaactaaagataaggataaaataaccatttggattaaatctttaaagcaaatggaagaagactacgaggaacaagaacaagaataaattaaattttatagtggtcaattttttaacaattttttttgttaaaaaatacattaaataaatggaaacaaaaccaagacttacagttgaacaacgtacgaatgttgttaaaaaataccaa

SEQ ID NO: 24914 - DNA, 260 bp, Unknown
  Description of Unknown: LeftRegion for integrase A482 sequence
gggtgtcacccacgtatccaagaagtggtggtattgtacctaaagccgcgctaattttatttttaagactatccaaggtatcacccgaggataatgttacatctcttccgttaatcgtaaacatttattaaatatctaataaagggaacctttcgatttgtttccagttgtaaaaaaatttattttttagtagtaaataaatggaaattacaactggaaataaatcgagactaactaaagaagagcgtcaagcagttttt

SEQ ID NO: 24915 - DNA, 260 bp, Unknown
  Description of Unknown: LeftRegion for integrase A483 sequence
aacagtatcctctagctttacaacaattagtatttttaggaacaactattttaggtatagtaaataattttcaatccattttttgatgaattgaaattatggttttttaatccattaaatggattaaaaaataacttgagttagaatgatttgaaattgaatttacaagtaaaatttttttattatttccaagtcaataaatggaaactgttaaaccaagattaactttatgtgaccgaacagaagttattaaattatat

SEQ ID NO: 24916 - DNA, 260 bp, Unknown; identical to SEQ ID NO: 24715
  Description of Unknown: LeftRegion for integrase A484 sequence

SEQ ID NO: 24917 - DNA, 260 bp, Unknown
  Description of Unknown: LeftRegion for integrase A485 sequence
caaagtttagggataaatataatcacaaaatttgatttaataaaaactttggccgaaattgatactaaaaaaatagaaatagattatagtgattacagcgaaagcgaataatttttagctttttttaatgtttatttaaacattaaaaaaaattaatacgtattaattttttttaattaaaataatttacagtataataaatgatacgcccacgtttaactaaagaacaacgcaatgaaattgttaatttatacacaagt

SEQ ID NO: 24918 - DNA, 260 bp, Unknown
  Description of Unknown: LeftRegion for integrase A486 sequence
aagggcaccgctcgcaccgtgaccttcgctctcgacggccacacctacgagatcgagctgaacgagcgcaacgaggcccggctgcacaaggcgctggcccccttcgtgaaggcgggccggaaggccaagccgacgcgccgacgtagagcgaagtaggacaacgcgcccacgttgttcgatcttggtctacactccccggcatgaagcgagcagtgatctacacccgcgtgagccgggacgacacaggtgagggccagtcc

SEQ ID NO: 24919 - DNA, 260 bp, Unknown
  Description of Unknown: LeftRegion for integrase A487 sequence
taaaccataattctcaccttattaatcagaaagaagaaaaagaggaagagttagaaacgtgtactttttgtgagggataaaaatttaatttttaaagtctaattttaatcactaattgtgattaaaattaaaaattgtgaataaatatgtataaaaatttttttaatattttagtttattttttaaagtaaataaaagtaatgcaaggaagttataaaaataagctaacgtcagaacaacgcaacactatagttcaaatg

SEQ ID NO: 24920 - DNA, 260 bp, Unknown
  Description of Unknown: LeftRegion for integrase A488 sequence
aagggcaccgctcgcaccgtgaccttcgctctcgacggccacgcctacgagatcgagctgaacgagcgcaacgaggcccggctgcacaaggcgctggcccccttcgtgaaggcgggccggaaggccaagccgacgcgccgacgtagagcgaagtaggacaacgcgcccacgttgttcgatcttggtctacactccccggcatgaagcgagcagtgatctacacccgcgtgagccgggacgacacaggtgagggccagtcc

SEQ ID NO: 24921 - DNA, 260 bp, Unknown; identical to SEQ ID NO: 24918
  Description of Unknown: LeftRegion for integrase A489 sequence

SEQ ID NO: 24922 - DNA, 260 bp, Unknown; identical to SEQ ID NO: 24918
  Description of Unknown: LeftRegion for integrase A490 sequence

SEQ ID NO: 24923 - DNA, 260 bp, Unknown
  Description of Unknown: LeftRegion for integrase A491 sequence
cgcaccgtgaccttcgctctcgacggccacacctacgagatcgagctgaacgagcgcaacgaggcccggctgcacaaggcgctggcccccttcgtgaaggcgggccgcaaggcgaagccgacacgccgacgtagagcgaagtaggacaacgcgcccacgttgttcgatcttggtctacactccccggcatgaagcgagcagtgatctacacccgcgtgagccgggacgacacaggtgagggccagtccaaccagcgccag

SEQ ID NO: 24924 - DNA, 260 bp, Unknown
  Description of Unknown: LeftRegion for integrase A492 sequence
cgcaccgtgaccttcgctctcgacggccacacctacgagatcgagctgaacgagcgcaacgaggcccggctgcacaaggcgctggcccccttcgtgaaggcgggccggaaggccaagccgacgcgccgacgtagagcgaagtaggacaacgcgcccacgttgttcgatcttggtctacactccccggcatgaagcgagcagtgatctacacccgcgtgagccgggacgacacaggtgagggccagtccaaccagcgccag

SEQ ID NO: 24925 - DNA, 260 bp, Unknown; identical to SEQ ID NO: 24924
  Description of Unknown: LeftRegion for integrase A493 sequence

SEQ ID NO: 24926 - DNA, 260 bp, Unknown
  Description of Unknown: LeftRegion for integrase A494 sequence
aatgtgaacctacaaaaccacagtggttcattggatctgaaaagattaccacaacaaaagaaccagaagttactgaaaacgagtgtacattctgcgaaggttaaaaaccattatttttctttaaagtttttaaaactttaaagaaaatgtatacaaataattttctaatttttctttaattttccaagtaataaataagtatgcaaggaaattataaaaacaagttgacacaacaacaacgtaaaaatatagttcaaatg

SEQ ID NO: 24927 - DNA, 260 bp, Unknown
  Description of Unknown: LeftRegion for integrase A495 sequence
tcctactggttttgaagaattttctttaatgtgtatgaacaaccctgaatactctggtaaaaattatgattgtcttatggattatattttaccacaatccgaaaaacttatttttaggtctaaagaataaatctttgagattttttaatcttttaattccaatcggaattaaaagaaaatttatttttccaagtaaataaatggaaactaaaaatgttaaacatagactaacacttgaagaatacacttctgtttatgat

SEQ ID NO: 24928 - DNA, 260 bp, Unknown
  Description of Unknown: LeftRegion for integrase A496 sequence
acaaagtttaatacacttttaaaggtatacactaatccatctcaaccattaatttttgaaagtaacattgggactaaagataaggataaaataaccatttggattaaatctttaaaacagatggaagaagactacgaagaacaagatcaagaataaattaaattttatagttttaaactataaaattttatagttaataaatggaacccaaacaaagacttttacctaatcaaaaattagatattatcaaaatgtatcaa

SEQ ID NO: 24929 - DNA, 260 bp, Unknown
  Description of Unknown: LeftRegion for integrase A497 sequence
actactttaattgaagatataaatggcaccattactacaacttattcttgtattagaggaataagaggattgggtggatttggctcaactggaataaattaaatttttaatttttttaaaaaattaaaaattaaagttcaagtgaactttgctaaaattattattaagtcaattgatttttattttttttaagtaaataaatggaactttcaaacaaatttaaattgacacccgctcaaagagaagatatagttaaaaaa

SEQ ID NO: 24930 - DNA, 260 bp, Unknown
  Description of Unknown: LeftRegion for integrase A498 sequence
acccaagaagaactcattgaagaaatgaaggtcatcaacgaccaaaagtatgaaatttaaatttatcaattattttaatgcttaactaagcattaaaattaagaaaatactcgagttgtgctcagagtattttataccttaaccctttctgtcccgtgggacagaaaggtaacctttgaaccgagaaattgaaatatttgaataaatttatcttaaaataaagatggatacttctatatattatggtccaagagacgatt

SEQ ID NO: 24931 - DNA, 260 bp, Unknown
  Description of Unknown: LeftRegion for integrase A499 sequence
acagaaaaagagttaatagatgaaatgaaggttattaatgatagtaaacgcaatttataatttattaatagttcaaaatttattaaatttaatttattactacaggtctaaaaaaattctaaccgttgataaagttaaccataattctcacttgtttgttaacacaaaattagaagaaaaagagccagaagtgtgtactttttgtgaaggttaatttttaaacatatttttttaatcccttttaggattaaaaaaaccca

SEQ ID NO: 24932 - DNA, 156 bp, Unknown
  Description of Unknown: LeftRegion for integrase A500 sequence
tattctcgttggatgataaagcagatttcattaagatggccattaagtctatcgacatagaatatgtaaagcttaaaaacagacattccattaaaataaatgatatagaattttattaacttatgtacggaagtatagacactcgattaatattta

SEQ ID NO: 24933 - DNA, 260 bp, Unknown
  Description of Unknown: LeftRegion for integrase A501 sequence
actactttaattgaagatataaatggcaccattactacaacttattcttgtattagaggaataagaggattgggtggatttggctcaactggaataaattaaatttttaattttttaaaaaaaattaaaaattaaagttcacttgaactttactaaaattattattaagtcaattgatttttatttttttaagtaaataaatggaactttcaaacaaatttaaattgacacccgctcaaagagaagatatagttaaaaaa

SEQ ID NO: 24934 - DNA, 260 bp, Unknown
  Description of Unknown: LeftRegion for integrase A502 sequence
aagttagatttttatttttatgcttaaaataagcataaaaataactagtgggtactagttattttttacttttttaaaggttaattaaccttaaaataaaaaatttgctctttaaatttgtttaatttttaaacattgttaataaacaatgttaatataaaaattgaaattttttatttatttgacagtaaataaagaaaatgtctggaagtcataatattaaattaacgtttgaccaacgtcaaactatagccaaatta

SEQ ID NO: 24935 - DNA, 260 bp, Unknown
  Description of Unknown: LeftRegion for integrase A503 sequence
agtcaaaattttatttttatgcttaaaataagcataaaaataactagtgggtactagttattttttacttttttaaaggtgaattcaccttaaaataaaaaatttgctctttaaatttgtttaatttttaaatattgtttattaaaaatgtcaatataaaaattgaaatttttttatttattttacagtaaataaagaaaatgtctggaagtcataatattaaattaacttttgatcaacgtcaaactatagccaaatta

SEQ ID NO: 24936 - DNA, 260 bp, Unknown
  Description of Unknown: LeftRegion for integrase A504 sequence
cataaaagaaggaaaagcaacttgtcaagggatgcgagtgccagaagtagatatttcaaattgggagataacctcacctgttacagtaatagaaagggatagaaatggggaaaagtattacagttataccggccaagaaagtgcagaccagtgttcttcatcaggacaggaagaaaatcaaagtagccgcatattgccgagtgtccaccgaccaagaagagcagctatcaagttatgaaaaccaagttaattattaccga

SEQ ID NO: 24937 - DNA, 260 bp, Unknown
  Description of Unknown: LeftRegion for integrase A505 sequence
cattaaggaaggaaaagcagcttgtcaagggatgcgtgtgccagaagtagatatctcaaattggacagtaacctcgccagtaaaagtgatagaaagggatagagatggggaaaagtattacagttattccagccaagaaagtgcagaccagtattcttcatcaggacaggaagaaaatcaaagtagccgcatattgtcgagtgtccaccgaccaagaagaacagctatcaagttatgaaaaccaagttaattattaccga

SEQ ID NO: 24938 - DNA, 260 bp, Unknown
  Description of Unknown: LeftRegion for integrase A506 sequence
atttcagaagatgggcagataacagttcgatttcatgagggaaccgaggtagacttgtaagtgactgtgaccgaaaggttgcagttttttgcgttgtttcgtggtataatgaaattgttctaataattacattattaatgatagttaaatagagttataaataagaaaggaatattgcaaatgataagcaattcaaaaacattgtttcaaaaaacaaaatacaatgattatgataatatagatatgttgctatcacaatt

SEQ ID NO: 24939 - DNA, 260 bp, Unknown
  Description of Unknown: LeftRegion for integrase A507 sequence
gatatgagtaattataactagtgaagatggtgatttgagtgaagtatgcagtttatgttcgggtatctacagacagggacgaacaagtctcatctgtagaaaatcaaattgatgtatgtcgatattggttagagcagcatgggtatgattgggatgaaaactcaatatattttgatgatggtattacaggaacggttttattggaacgacatgcaatgcagcttatactagagaaagcgaaaaaacgtgaattacagatg

SEQ ID NO: 24940 - DNA, 260 bp, Unknown
  Description of Unknown: LeftRegion for integrase A508 sequence
tataaaagagggaaaagtagcctgtcagggaatgcgagttccagaagtagatatttcaaattgggagataaactcaccagttacagtaatagaaagggatagaaatggggaaaagtattacagttattccggccaagaaagtgcagaccagcgtttttcatcaggtcaggaagaaaatcaaggtagccgcatattgtcgagtgtccaccgaccaagaagaacagctatcaagttatgaaaaccaagttaattattaccga

SEQ ID NO: 24941 - DNA, 260 bp, Unknown
  Description of Unknown: LeftRegion for integrase A509 sequence
cataaaagagggaaaagcagcttgtaaggggatgcgtgtgccagaagtagatatctcaaattggacagtaacctcgccagtaacagtaatagaaagggatagagatggggaaaagtattacagttattccagccaagaaagtgcagaccagtattcttcatcaggacaggaagaaaatcaaggtagccgcatattgtcgagtgtccacagaccaagaagaacagctatcaagttatgaaaaccaagttaattattaccga

SEQ ID NO: 24942 - DNA, 260 bp, Unknown
  Description of Unknown: LeftRegion for integrase A510 sequence
cataaaagagggaaaagtagcttgtcaggggatgcgagtgccagaagtagatatttcaaattgggtgattacctcaccggttacagtaatagaaagggatggaaatgaggaaaagtattacagttattccggccaagaaagtgaagaccagcgttcttcatcaggtcaggaagaaaatcaaggtagccgcatattgtcgagtgtccaccgaccaagaagaacagctatcaagttatgaaaaccaagttaattattaccga

SEQ ID NO: 24943 - DNA, 260 bp, Unknown
  Description of Unknown: LeftRegion for integrase A511 sequence
cataaaagaaggcaaagtaacttgtcaggggatgcgagtgccagaagtagatatttcaaattgggagataacctcacctgttacagtaatagaaagggatagaaatggggaaaagtattacagttataccggccaagaaagtgcagaccagtgttcttcatcaggacaggaagaaaatcaaagtagccgcatattgccgagtgtccaccgaccaagaagagcagctatcaagttatgaaaaccaagttaattattaccga

SEQ ID NO: 24944 - DNA, 260 bp, Unknown; identical to SEQ ID NO: 24942
  Description of Unknown: LeftRegion for integrase A512 sequence

SEQ ID NO: 24945 - DNA, 260 bp, Unknown
  Description of Unknown: LeftRegion for integrase A513 sequence
gaagatgatgatgaagacagaaaaggaccatgggaaatttttgcggttgatagagatcgttttaaccgtagaatactcaatgttgagtctcaaattggttggtgtttccaacctaaacatagagaaaatatttttaatcaacgattaaaagtgtattaattttttaattttttttgaaaattaaaaaatacagtaaataaatgatacgcccacgattgaataaagaacagcgaaacgaagttattgaaaagtatactcaa

SEQ ID NO: 24946 - DNA, 260 bp, Unknown
  Description of Unknown: LeftRegion for integrase A514 sequence
aaaagaataacaataaaccaagaagcgcttgatgaaattattcaaattaataaggatattgaagagcagcttttttctaaaatagaagatgtggatatcgtgagatatactaggctttgtttattgaacaaattgagatagtgtaaagaaatgatttaaagttagatttttttttatttacgtttttgtataaataaagaatgactttgtatcctatacataaattgacacttgatgagcgtcaaaatattattgacttg

SEQ ID NO: 24947 - DNA, 260 bp, Unknown
  Description of Unknown: LeftRegion for integrase A515 sequence
aaagttaaatttttatttttatgcttattttaagcataaaaataactagtgggtactagttattttttacttttttaaggttaattaaccttaaaataaaaaatttgctctttaaatttgtttaaaaattaaacattgtttattaaaaatgttaatataaaaattgaaattttttatttattttacagtaaataaataaaatgtctggaagtcataatattaaattaacgttggaccaacgtcaaactatagccaaatta

SEQ ID NO: 24948 - DNA, 260 bp, Unknown
  Description of Unknown: LeftRegion for integrase A516 sequence
agggtccgaggaatgttccccaaagcgataccacttgaagcagtggtactgcttgtgggtacactctgcgggtgatgaatcgaggggggcccactgtacgggccgacatctacgtccgaatcagcctggaccgcacgggggaagagctcggggtcgagcgccaggaggagtcgtgccgcgagctctgcaagagcctcggcatggaggtggggcaggtgtgggtcgacaacgacctgagcgccaccaagaagaacgtcgtc

SEQ ID NO: 24949 - DNA, 260 bp, Unknown
  Description of Unknown: LeftRegion for integrase A517 sequence
tatagttttacttcgtacgaaggttacattaaccttaataattattagtggggagcatccacttttttaagttttatggttaaaaaaaccataaaacttaaaaattaagttttttaaaatattaaccaggtaagatatataaattaacgttaataaaaaaaatgaaaaatttttctttatttaacagtaaataaagaaatatgtctggaagtcataatataaagttaacacttactcaacgtcaaactattgctcgcttg

SEQ ID NO: 24950 - DNA, 260 bp, Unknown
  Description of Unknown: LeftRegion for integrase A518 sequence
catccgagaagggaaagcttcctgcattggcatgcgcgtgccagacagtgcagtccaggattggagtatcgatgaacccacagtggtaaaggaggagaacatcagtggcaaaaaacattacagttattcctgccaagaaaactatacaagtcgagcagaatcaacacattcagaaaatccggatggcggcctactgccgagtgtccaccgaccaagacgaacagctatcaagctatgagaaccaggtccgttactaccag

SEQ ID NO: 24951 - DNA, 260 bp, Unknown
  Description of Unknown: LeftRegion for integrase A519 sequence
catcaaagaaggcaaggcttcctgccaaggcatgcgtgtgccagagaaagccattgaagagtggaaacttaagacccctgtaacagtgatagaaaggaccgaatatgggcaaaaacattacagttattccagccaagaaaatgcagctgatggtcacccatcagcaagtcaccaaaatcagagtggccgcctattgtcgggtgtccaccgaccaagacgaacagctatcaagctatgagaaccaagtcaattactaccgt

SEQ ID NO: 24952 - DNA, 260 bp, Unknown
  Description of Unknown: LeftRegion for integrase A520 sequence
tccggctgacccgcgtcaccgatgctacgacttcaccggagcgccagctggaggcttgccagcagctctgcgcccagcgcggctgggacgtcgtcggggtagcggaggatctggacgtctccggagcggtcgatccgttcgaccggaagcgccgcccgaacctggcccggtggctagcgttcgaggagcaaccgttcgatgtgatcgtggcgtaccgggtagaccggttgacccgatcgatccggcatctgcagcagctg

SEQ ID NO: 24953 - DNA, 260 bp, Unknown
  Description of Unknown: LeftRegion for integrase A521 sequence
cctttcaaggtcccaattgaccaagggggctttgccccctgggacattgggtcttaaagggttaatactcactgaaccttttggcaggtagtgattggacgagttacgggacgacagatgtagacccgtactgtcactcttattattaaagtgtattaattttttaatttttttggaaaattaaaaaatacagtaaataaatgttacgaccacgattaaataaagaacaacgtaatgaagtcattaatttatatactcaa

SEQ ID NO: 24954 - DNA, 260 bp, Unknown
  Description of Unknown: LeftRegion for integrase A522 sequence
tgtcccgcgtcaccgatgctacgacctcaccggagcgtcagctggagtcttgccagcagctctgcgcccagcgcgggtgggacgtcgtcggggtagcggaggatctggacgtctccggagcggtcgatccgttcgaccggaagcgccgcccgaacctggcccggtggctagcgttcgaggagcaaccgttcgatgtgatcgtggcgtaccgggtagaccggctgacccgatcgatccggcatctgcagcagctggtccac

SEQ ID NO: 24955 - DNA, 260 bp, Unknown
  Description of Unknown: LeftRegion for integrase A523 sequence
gttgtcgccgactttgatgatgcgacgcgtgtgtatgccgctgggtgggtctctgacgatgtcgaagttgccgttccacgcctctacgctgggcaacgtggctttgccataactagttagagctgaataagaaatcatttattagttgcagaagccccacaaatttataatatttacactttacatttttaaattaataaatgaaacgtgtcaacaaattaaataaacaagataaagagtcgattttcgacctttacttg

SEQ ID NO: 24956 - DNA, 113 bp, Unknown
  Description of Unknown: LeftRegion for integrase A524 sequence
ttaattaaaaaaatagacgtatggaacgataataaaattaagatccactggaatatttaattttttaggcgctttacgccttttttcgtatattaggtatttccaattgaaac

SEQ ID NO: 24957 - DNA, 260 bp, Unknown
  Description of Unknown: LeftRegion for integrase A525 sequence
accgaagaggagttgatagaagaaatgaaggtaatcaacgagagtaaacgcgaaatttaaattttttaaacttgttaagtttaaaaaattacttattttaatttagtaaaattattcatcctcatcttcatcaaatggattagtcgaccttggtcttgatggtctgggtaaaggagaaggagaaggtaattctctacttcccggttttttagatgtaaaagcaaccacagatcctagtattccaactacaagtaaagctc

SEQ ID NO: 24958 - DNA, 260 bp, Unknown
  Description of Unknown: LeftRegion for integrase A526 sequence
tattgggagagatgatgaacctagttgacgcagttgttacaaaagttctgagtgaaccttacccactctttaataagtattgggtagatgttgagtataattgttacgggcaggtgtccgagactaatattaggtgttcaacggaagaaactgctaaagcaattaaagttgggtatacatttcaagtttaaggagaataaatgaattttaaatattacaacgaaattatagacaaaattgtagctctaaaacaacaaggc

SEQ ID NO: 24959 - DNA, 260 bp, Unknown
  Description of Unknown: LeftRegion for integrase A527 sequence
ataaaggagaacaaatgaacatagttgatgcagtcgttacaaaagttctaagcgaaccatatctactctttaataagtattgggtagatgttgagtataattgttacggacaggtatctgaaaccaatattgtgtgttcaaccgaagaaactgctaaagcaattaaagttgggtatacatttcaagtttaaggagaataaatgaattttaaatattacaacgaaattatagacaaaattgtagctctaaaacaacaaggc

SEQ ID NO: 24960 - DNA, 260 bp, Unknown
  Description of Unknown: LeftRegion for integrase A528 sequence
gaagaagaaaagttaatagaagaaatgaaggttattaatgacgctaaaaaaaatatttaaatatttttaatccctttaagggattaaaaataaaagtagtttataagcttaatatttatatttgccgtatttatcaaatttagctggagcacccatactttctctaaattttttttcttgctctaatttaagcttttggttttgtattttttcatctgcaaagacaaccatgctttctatagaatcgcaatatgaactag

SEQ ID NO: 24961 - DNA, 260 bp, Unknown
  Description of Unknown: LeftRegion for integrase A529 sequence
catcaggctttatttttttgctttttttttcaataagtgcggaaaaattactcccaaacctacctagtaaggtaggaggaatatttgtattccatgaactttggcataaatttatcaggtcgaattagtttgtctgataacttgacttattttccctttagagtgatatatagtgtgccattacataggaaggagagtaaatgtccgtaaaaaagattagagtcaataaacaaaaacacaagcagaggatctgtgcctac

SEQ ID NO: 24962 - DNA, 260 bp, Unknown
  Description of Unknown: LeftRegion for integrase A530 sequence
acatcaggctttatttttttgcttttttttcaaaaagtgcggaaaaattactcccaaacctacctagtaaggtaggaggaatatttgtataccatgaactatggcataaatttatcatgtcgaattagtttgtctgataacttgactaattttccctttagagtgatatatagtgtgccattacataggaaggagagtaaatgtccgtaaaaaagattagagtcaataaacaaaaaaacaagcagaggatctgtgcctac

SEQ ID NO: 24963 - DNA, 260 bp, Unknown
  Description of Unknown: LeftRegion for integrase A531 sequence
caaggtagccgcatattgtcgagtgtccaccgaccaagaagaacagctatcaagttatgaaaaccaagttaattattacagagagtttatctccaaacacgaggactatgagttagttgacatctatgcggatgagggcatctcagcaaccaatacaaaaaaacgtgatgcatttaaccgcttgatacaagattgtagggctggtaaggtggataggattttggtcaagtcaatcagtcgatttgccagaaacacccttg

SEQ ID NO: 24964 - DNA, 260 bp, Unknown
  Description of Unknown: LeftRegion for integrase A532 sequence
caggctttattttttttttggcctttttttcaataagtgcggaaaaattactcccaaacctacctagtaaggtaggaggaatatttgtattccatgaactatggcataaatttatcaggtcgaattagtttgtctgataacttgactaattttccctttagagtgatatatagtgtgccattacataggaaggagagtaaatgtccgtaaaaaagattagagtcaataatcaaaaacacaagcagaggatctgtgcctac

SEQ ID NO: 24965 - DNA, 260 bp, Unknown
  Description of Unknown: LeftRegion for integrase A533 sequence
acatcaggctttatttttttgcctttttttcaataagtgcggaaaaattactcccaaacctacctagtaaggtaggaggaatatttgtattccatgaactgtggcataaatgtatcaggtcgaattagttggtctgataacttgactaatatcctttttagagtgatatatagtgtgccattacataggaaggagagtaaatgtccgtaaagaagattagagtcaatagacaaaaacataggaagagagtctgtgcctac

SEQ ID NO: 24966 - DNA, 260 bp, Unknown
  Description of Unknown: LeftRegion for integrase A534 sequence
tcaggctttattttttttgtctttttttttcaataagtgcggaaaaattactccaaaacctacctagtaaggtaggaggaatatttgtattccatgaactgtggcataaatttatcaggtcgaaatagttggtctgataacttgactaatattccctttagagtgatatatagtgtgccattacataggaaggagagtaaatgtccgtaaagaagattagagtcaatagacaaaaacataggaagagggtctgtgcctac

SEQ ID NO: 24967 - DNA, 260 bp, Unknown
  Description of Unknown: LeftRegion for integrase A535 sequence
catcaggctttattttttttgcatttttttcaataagtgcggaaaaattactcccaaacctacctagtaaggtaggaggaatatttgtattccataaattatggcataaatttatcaggtcgaattagttggtctgataacttgactaattttccctttagagtgatatatagtgtgccattacataggaaggagagtaaatgtccgtaaagaagattagagtcaatagacaaaaacataggaagagggtctgtgcctac

SEQ ID NO: 24968 - DNA, 260 bp, Unknown
  Description of Unknown: LeftRegion for integrase A536 sequence
acatcaggctttatttttttgactttttttcaaaaagtgcggaaaaatcgctcccaaacctacctagtaaggtaggaggaatatttgtattccatgaactatggcataaatttatcaggtcgaattagtttgtctgataacttgactaattttccctttagagtgatatatagtgtgccattacataggaaggagagtaaatgtccgtaaaaaagattagagtcaataaacaaaaacacaagcagaggatctgtgcctac

SEQ ID NO: 24969 - DNA, 260 bp, Unknown
  Description of Unknown: LeftRegion for integrase A537 sequence
tagtgtagttaggagaatagcatactagtatctcagcgtggtgatatcaccacgctttttctttttgctttttttcaataactgcggaaaatttgtttccaaatttacttagtaatatggagggagtagttttgctgaaagcttgacttatcttccctttagagtgatatatagtgtaccaaaaatagaaaggaaactaaatggcagtaaggttaattaaagcaaaacaagatcataaaaaacaacgcatatgtgcctat

SEQ ID NO: 24970 - DNA, 260 bp, Unknown
  Description of Unknown: LeftRegion for integrase A538 sequence
catcaggctttattttttttgcatttttttcaataagtgcggaaaaattactcccaaacctacctagtaaggtaggaggaatatttgtattccataaactatggcataaatttatcaggtcgaattagttggtctgataacttgactaattttccctttagagtgatatatagtgtgccattacataggaaggagagtaaatgtccgtaaaaaagattagagtcaatagacaaaaacataggaagaaggtatgtgcctac

SEQ ID NO: 24971 - DNA, 260 bp, Unknown
  Description of Unknown: LeftRegion for integrase A539 sequence
agtgtagttaggagactagcatactagaatctcagcgtggtgatatcaccacgctttttctttttgcttttttttcaataactgcggaaaatttgtttccaaatttactaagtaatatggagggagtagttttgctgaaagcttgacttatcttccctttagagtgatatatagtgtaccaaaaatagaaaggaaactgaatggcagtaaggttaattaaggcaaaaagtgaacagaaaaagcaacgtgtctgtgcctac

SEQ ID NO: 24972 - DNA, 260 bp, Unknown; identical to SEQ ID NO: 24961
  Description of Unknown: LeftRegion for integrase A540 sequence

SEQ ID NO: 24973 - DNA, 260 bp, Unknown
  Description of Unknown: LeftRegion for integrase A541 sequence
aagatgagatgacttaccaactgaccatgatacaggccgatagactcctaaaatctaggattattagtgaggaagttcatcagcaatttaaggaaaagatgcttgaaaaatatcaaccatttattagtagattatcgacctaaagacttgataaatgaggcctttagagtgatatatagtagcgaaaggagtgtatcaaattgagaatagttagacgaattcaaccgatgatgacaccgcaaaaacctaagttgcgtgta

SEQ ID NO: 24974 - DNA, 260 bp, Unknown
  Description of Unknown: LeftRegion for integrase A542 sequence
aagatgagatgacttaccaactgaccatgatacaggctgatagactcctaaaatctaggattattagtgaggaagttcatcagcaatttaaggaaaaaatgcttgaaaaatatcaaccatttattagtagattatcgacctaaagacttgataaatgaggcctttagagtgatatatagtagcgaaaggagtgtatcaaattgagaacagttagactaattcaaccaaggatgacaccgcaaaaacctaagttgcgtgta

SEQ ID NO: 24975 - DNA, 260 bp, Unknown; identical to SEQ ID NO: 24973
  Description of Unknown: LeftRegion for integrase A543 sequence

SEQ ID NO: 24976 - DNA, 260 bp, Unknown
  Description of Unknown: LeftRegion for integrase A544 sequence
agggtaactccagtaaaaggaaggaaatatcttatagaaattagagagggtcgatattagtgaagaaagtaattactattcaggctacaccaagtattattaggtcaagttcagatgatttctctttgaagaagcgtagggttgcaggctatgccagggtatcaactgaccatgaggatcaagcaacaagctatgagtcgcagatgcggtactactctgaatacattaatgggagggatgattgggaatttgttaaaatg

SEQ ID NO: 24977 - DNA, 260 bp, Unknown
  Description of Unknown: LeftRegion for integrase A545 sequence
ataatgagatgacctaccaactaacaatgatacaagcaaaggtacttctaaataatggagcaatcacaattaaggaatttgaactttttaggcaattgatgcttgaaaaatatcaaccgtttataagtcaattatcgacctaataactggatatttttttctttttgagtgatatatagtagcgaaaggagtgtattaatttgagaacagttagaagaatacaacccataaaatcgccctgcaagccaagatttaaggtt

SEQ ID NO: 24978 - DNA, 260 bp, Unknown
  Description of Unknown: LeftRegion for integrase A546 sequence
ataatgagatgacctaccaactaacaatgatacaagcagaggtacttctaaataatggagcaatcactattgaggaatttgaactttttaggcaattgatgcttgaaaaatatcaaccgtttataagtcaattatcgacctaataactggatatttttttctttttgagtgatatatagtagcgaaaggagtgtattaatttgagaacagttagaagaatacaacccataaaatcgccctgcaagccaagatttaaggtt

SEQ ID NO: 24979 - DNA, 260 bp, Unknown; identical to SEQ ID NO: 24248
  Description of Unknown: LeftRegion for integrase A547 sequence

SEQ ID NO: 24980 - DNA, 260 bp, Unknown
  Description of Unknown: LeftRegion for integrase A548 sequence
cggaaggccaagccgacgcgccgacgtagagcgaagtaggacaacgcgcccacgttgttcgatcttggtctacactccccggcatgaagcgagcagtgatctacacccgcgtgagccgggacgacacaggtgagggccagtccaaccagcgccaggagcgcgagtgccgacgcctcacggactacaagcggctggacgtggtggccgtcgagcaggacatctcggtgtccgccttctcgggcaaggagcgccccgcctgg

SEQ ID NO: 24981 - DNA, 260 bp, Unknown
  Description of Unknown: LeftRegion for integrase A549 sequence
cattctctacatcccaccagaatttctttcgaatgatatatttgctgcaacactatttctttcgctcttcatgctattactaatcgttgtacttctcatatggacctctccagccctcgattagggttttggcacatacagactaagtagtaaggtttattaccccccgtgccaaaactggtagggtggagggatgcgggatgcccaggccctctatccagaatgtcctcgatttaaggcgggatgaggtccttgagctc

SEQ ID NO: 24982 - DNA, 260 bp, Unknown
  Description of Unknown: LeftRegion for integrase A550 sequence
agaatgagctgacttaccaattatccctaaagcaagctcataaactctggcagcaacagctgattacacaagaagaatacgagcaatttcagcaaataatccttcaaaaataccagccctttattagccaattagtgggctaaatactggataaatagcggatttagagtgaatatgtaatcggaaaggagttgtattaattgaagacagttactaaaatacaacagagggtttctccctttcaatcaaaaaagaaagta

SEQ ID NO: 24983 - DNA, 260 bp, Unknown
  Description of Unknown: LeftRegion for integrase A551 sequence
aatctcaaggtttgctcgtaataccttggacactttaaaatacgttcggatgttgaaagaaaagaatgtcgcggtttactttgaagatgagaaaatcaatacattgacaatggatggtgagttgctcctagtcgtcttgagttctgtagcgcaacaagaggttgagaatatttccgcaaacgttaaaaaaaggattaaagatgagaatgagtcgaggggagcttatcggatttaatggttgtcttggttatgattaccat

SEQ ID NO: 24984 - DNA, 260 bp, Unknown
  Description of Unknown: LeftRegion for integrase A552 sequence
caacaagaacttacctaccaactgactatggcacaggcaaagaagctcctgtcccagggtctgatttctgaagccatcttccaagaatttaaggcaaaaatgctccaaaaatatgagccatttatgagccaattagtggcctaaagacttgataaagaagggctttagagtgatatatagtagcgaaaggagatgtatcaatgaaacaaatcaaaacgatacaagcccaaaaggtaactaccatcaaaaggttaaaggtg

SEQ ID NO: 24985 - DNA, 260 bp, Unknown
  Description of Unknown: LeftRegion for integrase A553 sequence
caacaagaaataatctatcagcttaccatggcacaggcgagtcggctcctggcagttgggatgatatctgaagctaattttcaagaatttaaggtaaaaatgctcgaaaaatatgaaccatttatgagtcaattagtggcctaaagacttgataaataagggatttagagtgatatatagtagcgaaaggagatgtatcaatgaaacgaattaaaacgatacaagcccaaaagttaaccgccatcaaaaagttaaaagta

SEQ ID NO: 24986 - DNA, 260 bp, Unknown
  Description of Unknown: LeftRegion for integrase A554 sequence
caacaagaacttacctaccaactgactatggcacaggccaagcagctcctgtctcaaggtctgatttctgaagccgtcttccaagaatttaaggcaaaaatgctcgaaaaatatgagccatttctgagccaattagttgcctaaaaacttgataaataagggctttagagtgatatatagttgcgaaaggagatgtatcaatgaaacaaatcaaaacgatacaagcccaaaaggtaactaccatcaaaaggttaaaggtg

SEQ ID NO: 24987 - DNA, 260 bp, Unknown
  Description of Unknown: LeftRegion for integrase A555 sequence
cgagttagacgaattctcaagatacataggcttaacgctatgtaaagaagacaaagaagcaattctaaaatacaacagttttcgtaaagctttagcaatcagaaaaaaattaaaattcaattcatttgaaaacgactcttcaagcaattaattaaactaagaataaaatctaatgagagaatacttttaaaatcaatatcatgtccaagttccattcaatatttgacttaaatacagtctggattctagattatgaaaat

SEQ ID NO: 24988 - DNA, 260 bp, Unknown
  Description of Unknown: LeftRegion for integrase A556 sequence
caagctgaccaagaccatgtcttagttagactagaagtaaaacccaagacggttagagaagcgttcctgaacgcctataagcgagcgggaggcattcctgtagagtgggacaatcgtctcgctgtttaaaccagcatcctgcttgctgaagagcaagcaggattattgttgtttgttaaatattcattaaaggatttattatgtccatagatacactaggaatcgacgatgaaatcgttttgaccacaatagcaaacatt

SEQ ID NO: 24989 - DNA, 260 bp, Unknown
  Description of Unknown: LeftRegion for integrase A557 sequence
attagagaagacgatatccgtctgggtaaaataaaggaaactgaattatgtaccctgtagataaagaatccagaattcgtttaatggaagatctggacaaatggataaatgaacactacctagaaaaagtcacggtcaaagacttaagtcatcaactaggtgtgtttatcccggatgtctaccgtttgtttgctgaacaacgtaataccaccccgggtgagtatcttcgacgtaaacgcttagttaaagccaaagctttg

SEQ ID NO: 24990 - DNA, 260 bp, Unknown
  Description of Unknown: LeftRegion for integrase A558 sequence
atcagagaagatgacatacgtttaggtaagatagaggtaacagaaccatgtaccctgtagataaagaatccagaactcgattaatggatgatctggacaaatggataagtgaacattacttggaaaaagtcaccgttaaagacttaagtcaccaactgggagtcttcatcccagatgtataccgtttgtttgctgaacaacgcagtacaactcctggcgaataccttcgacgtaaacgcttagttaaagccaagtctcta

SEQ ID NO: 24991 - DNA, 260 bp, Unknown
  Description of Unknown: LeftRegion for integrase A559 sequence
gacctagaaactaacacatattacatagactctagatgggcggaatcattctttcgtaccagtttggcataaaattcaaaatctatttataagtataaatggcctgatttttggttaggtcattttttatcttctaatttagaaaaacgtagttaatatatataattattatgtagatttctagaaaggaggtaaaaccaatggtaagacggaattctaaaattacccgtcaacagaagaaaattcgagatgcatttgta

SEQ ID NO: 24992 - DNA, 260 bp, Unknown
  Description of Unknown: LeftRegion for integrase A560 sequence
gacctagaaacgaatacatattacatagattctagatgggcggaatcattctgtcgtaccagtttggcataaaatttaaaatttatttacaagtataaatggtctgatttttagttaggtcattttttaccttctaatttagaaaaacgtggttaatatatataattattatgtagatttctagaaaggaggtaaaaccaatggtaagacggaattctaaaattactcgtcaacagaagaaaattcgagatgcatttata

SEQ ID NO: 24993 - DNA, 260 bp, Unknown; identical to SEQ ID NO: 24976
  Description of Unknown: LeftRegion for integrase A561 sequence

SEQ ID NO: 24994 - DNA, 260 bp, Unknown
  Description of Unknown: LeftRegion for integrase A562 sequence
gtaatctaccaatgcaatgataaatacaagtctagtggtaaaaagtcaatagaaagttgagaaaattctagttgttttttagaaaacagggtgcactaaaaacacctagtgaaaatcgctttttttcaccagtttatccaaggacttgtgcagatcattatctatcttccataagcctccttggtggcgcatagagttggcgattgcgtagtagcgcatccaccagacgcacaaattttctagcggttaagacgatggct

SEQ ID NO: 24995 - DNA, 260 bp, Unknown
  Description of Unknown: LeftRegion for integrase A563 sequence
ggaataggtagacgcgctgctggtgttaataaacacccatagaaacggcagtcagggcggcgcaagacatactgcgcggcggttgcaaacgtcaatcgtgttgaaagtgcacgactaatggttgtggggtgcaaatccccacccgcatctcgataggtcaccctaagttacagatacatattcgaaaggggtgacacaagttggaaacaaataaacaaaatgagatacgcaatgcttatgagcatagcgcacaagtccag

SEQ ID NO: 24996 - DNA, 60 bp, Unknown
  Description of Unknown: LeftRegion for integrase A564 sequence
aatatgttattgatgttctttataaacttcaacacgataaagaatatcttaaaaaaataa

SEQ ID NO: 24997 - DNA, 260 bp, Unknown
  Description of Unknown: LeftRegion for integrase A565 sequence
gccctgcccgtccacctcaaccacgcaccacccgccctcttttcttactgtcgccatatctctccccttttgaggcaatatatatttggtataggtctatgcgtaagcctcaatacgtgctaaaacgtaccaaatgacgcagataaaacatatttctgcgtatttagggcagataacgccaaacatggagcaaattacgcatggatatggacgcacaggtacaccgggcaacctaccccaagatcgcctaccgcctaatg

SEQ ID NO: 24998 - DNA, 260 bp, Unknown
  Description of Unknown: LeftRegion for integrase A566 sequence
aattacactaataatcagtgtaattttattactttaaaaaaacctgccaaaactacataaaaacctcataaaaaaatttcataaaaattgaataaattatgttctaaatacttcattatattttcccacctatattatagtttcacaactattaaattctcgtcctatttgcgatagaaaatcgaaaaaattaattcaagatggatcttcaaaaaatttgtgatcgaatttcccaagaattcgaaacagatattgtaatg

SEQ ID NO: 24999 - DNA, 260 bp, Unknown
  Description of Unknown: LeftRegion for integrase A567 sequence
gccgcttactgtcgagtgtctacagaccaagacgaacagctatcaagttatgagaatcaggttaattattaccgtgaatacatcttaaaacacgaagattatgagttagtagatatctatgcggatgagggaatctcagcaactaatacaaaaaacgtgatgcttttaaccgactaatacaagattgtagagatggtaaggtggatagaattttagttaaatctattagtagatttgccagaaatacattggactgcatc

SEQ ID NO: 25000 - DNA, 260 bp, Unknown
  Description of Unknown: LeftRegion for integrase A568 sequence
gttaaatgggaatcattgttagataaatttaatagaacatattaaaagacgtaatttacgtctttttttatttgtgtttaacttttaaaccatttagattaaaatatacataaataattaaaaaaatgatttacaaatttcgtattgtataatataataaatatataaggtccaataaggaaccaagaggaggaagaaggatggcagcaataactagaagaagatgggaaaaagaagaagatgagtcattagtaaactta

SEQ ID NO: 25001 - DNA, 260 bp, Unknown
  Description of Unknown: LeftRegion for integrase A569 sequence
ggtcacggaactctttggcaatttcttcttccgcagcttcaacacgcacgatacgtagcaccagaacaggttgttcgcttgtcagaatgcttaatcgcagcgtgaattccctgttgtcacgaacggtgcaatagtgatccacacccaacgcctgaaatcagatccagggggtaatctgctctcctgattcaggagagcttatggtcacttttgagacagttatggaaattaaaatcctgcacaagcagggaatgagtagc

SEQ ID NO: 25002 - DNA, 260 bp, Unknown
  Description of Unknown: LeftRegion for integrase A570 sequence
ctatgttattctatgtttatctaacgggctcgcgttcgcccagacattatcatatttaattatagattgtcactaaattttatttgatacaaatctatgttattctatgataatacaacgggtcggagttgatataatgaaaaaattgaaaaaatgttaaattgatacaaaatgtaatttataatacaatcaatacaacaatgaaaacagctattatatattgcagacaaagtaataaaaaaaacagtagacatggtatg

SEQ ID NO: 25003 - DNA, 60 bp, Unknown
  Description of Unknown: LeftRegion for integrase A571 sequence
gaactacagagcaagtcaagcgaatttctaagcatgagagccttgttagaaaagagctag

SEQ ID NO: 25004 - DNA, 260 bp, Unknown
  Description of Unknown: LeftRegion for integrase A572 sequence
tgtttaaattggaagtttccttatgaagttttatgtgatgaactgttgcacttaaattgacaaatcaacatacatttaaatttcatgagacaataaacgttgatttaatgcgttttttgtcttttttgttttccttatttttttctgttttacaacaaagtggtatcaaaaatggtatcatttgtagttattttagcttcacatataaaaattaaccacactcctaaattaataggtggtgtggttttttggttgtgtga

SEQ ID NO: 25005 - DNA, 260 bp, Unknown
  Description of Unknown: LeftRegion for integrase A573 sequence
tgtttaaattggaagtttccttatgaagttttatgtgatgaactgttgcacttaaattgacaaatcaacggattaaaaaccttgtctcctacactaatgctcattttcctgttcctcctcatatttatagacaacttgacctgccataatccctactgcttcatcaagttcaacaccttctttaactgaatgttgaatagcatttgtcattccctcaagtatttcatcaaacgcttgcgctttcttataaacgtcctcaa

SEQ ID NO: 25006 - DNA, 260 bp, Unknown
  Description of Unknown: LeftRegion for integrase A574 sequence
cgcagtcaaaatctttggaacgcaccaaaaacttttgacgagttcaaaaacttttgaccgcaccggtaagttttacctgtctcaaaaagtttttggtggcggcgaaataattcgcaacacactgttacaatattttcgttggtacaaatatttttccatgctatagtacgcgcacaccaacggaaataggcgtacgaatcatgagcggtatatacaagataagcttcaacggcaacaacaagcgcgactgctacataggg

SEQ ID NO: 25007 - DNA, 260 bp, Unknown
  Description of Unknown: LeftRegion for integrase A575 sequence
ggagtaagccttattagttgagagaaaataaggttgagtaggaacatatctatagatgagagttgacactagggaatggataacaagaaaaaatgcacccacttgcacccagctaaaaatttgataattgcaaaatagcctaattaacattataatataactaaaaaataagtatactaaaatattggtggagaatatctatgaatgaaagaaaagatatagttgaaaatgtaacggtaattcaaaagcagagagctata

SEQ ID NO: 25008 - DNA, 260 bp, Unknown
  Description of Unknown: LeftRegion for integrase A576 sequence
gccgaattaacttatcaagtaactatgttgtatgttaaagcgttattaagcaggggtctactaagcatagagcagtgccgtgattttcaagagcaaatgcaaacactgtattcgccactttttagcaaatatatggacgaaacacttgataaataaatggtttagagtgatatatagtgatacaaaaaggaggatacattgtgaaaacagtcaaaaaaatacaacagataagaccagtgaaaaataaaaaattacgtgtc

SEQ ID NO: 25009 - DNA, 260 bp, Unknown
  Description of Unknown: LeftRegion for integrase A577 sequence
tcgtgaatctcataaaatttggttttgtgtttctcctgctaaatttagcggcgaggatggtgtccgactcgttttccgataaaattgcgatcgccgcattatcgggtctcgcgttaaaaacagtttcactcatttcgccaaaaatagtttcttggtaaatgacgcccagcgtagtcgggtggtaaaataacttaaacaatatgatttatagaatatcaatggtgtcttgcacattgctacacaattacaaattcgtcgta

SEQ ID NO: 25010 - DNA, 260 bp, Unknown
  Description of Unknown: LeftRegion for integrase A578 sequence
tgatgaacatcctaaaaattaaaccatgtccattctgtggtagtctgccgagtatacgatatagcttcgatacattattaattgaatgtactaataaaaagtgtaaattacaaccgtctacatggtcacacgttgattccgatagtgcagaaaaacttataaaaatttggaataaaagaaaagataaggaggaagattaaatgactaaagaagtatggggagaaatagaaggttaccctaatcacaaaataagtagttta

SEQ ID NO: 25011 - DNA, 260 bp, Unknown
  Description of Unknown: LeftRegion for integrase A579 sequence
tcctaataattattcggacaactaaaatgatcgagcaccgaaagaatgccactcataaaaaatttgaatcttcgttctcaaagtggagccgccgtttctttaaacactttttatcttccccttggttctctaataacaagaaccaaagttcttttgatgatatcattttccccgccctactcttcttttcaggagcttcaatggttctttgggaagaagccgtaaatgaaaaagatccgagtaataaattaagactgatt

SEQ ID NO: 25012 - DNA, 260 bp, Unknown
  Description of Unknown: LeftRegion for integrase A580 sequence
attttacccaaacgatatagaaagctatattgcttataaagcaccattcatagagaaaatttacgctgaaataggactatgaaaaatctaagtttatcgaacttagcaaactataagtttctaagagataaaacctataaaacttgtacggatattgtagggtaggaaaagaaatcttcctctatactaaaataaaccgaatgaaaagggggatcgaagtgaatattatcaagtcgtttaacaatacgattgattatctt

SEQ ID NO: 25013 - DNA, 260 bp, Unknown
  Description of Unknown: LeftRegion for integrase A581 sequence
atgagcttatctatcaagttacgatgatacaagtgacaaaactattaaatgatggcgtaattacgaagaaagaatatgaaaaatttcaacaagaactgatcgaaatgtatcaaccgattttaagtaaatatatggacgaaacacttgataaataaagcgtttagagtgatatatagtagtacaaaaggaggaacatacaaatgaaacaaataagaaaaatcattcaaataagactaccagaacaaaagaagttaaaagtt

SEQ ID NO: 25014 - DNA, 60 bp, Unknown
  Description of Unknown: LeftRegion for integrase A582 sequence
ctcttacctaaccttacctgtgtatccaaactggatacatcttgtatacattttgtataa

SEQ ID NO: 25015 - DNA, 260 bp, Unknown
  Description of Unknown: LeftRegion for integrase A583 sequence
ctgggtgtcgacccagcgacgctgcgtcgggtgccgtcggagcacacggtctacaactggaagcgcccgtaccgcggccgcacgtacctcgaggaactcgcggtgtggcttcgggcgcaggctgagcgggaagccgcacgctgacctccgaaacgtgggttacagttggaactgttacaccacgacggagagacgagtagatgagcctgcgtgcatacggctggacgaacgacggcaagatcgtcgagtcagaagccgac

SEQ ID NO: 25016 - DNA, 260 bp, Unknown
  Description of Unknown: LeftRegion for integrase A584 sequence
ctgggtgtcgacccagcgacgctgcgccgggtgccgtcggagcacacggtctacaactggaagcgcccgtaccgcggccgcacctacctcgaggaactcgcggtgtggcttcgggcacaggctgagcgggaagccacacgctgacctccgaaacgtgggttacagttggaactgttacaccacgacggagagacgagtagatgagcctgcgtgcatacggctggacgaacgacggcaagatcgtcgagtcagaagccgac

SEQ ID NO: 25017 - DNA, 260 bp, Unknown
  Description of Unknown: LeftRegion for integrase A585 sequence
ctgggtgtcgacccagcgacgctgcggcgggtgccgtcggagcacacggtctatgggtggaagcgcccgtaccggggtcgcacgtacctcgaggaactcgcagtgtggttgcgggcgcaggctgagcgggaagccacacgctgacctccgaaacgtgggttacagttggaactgttacaccacgacggagagacgagtagatgagcctgcgtgcatacggctggacgaacgacggcaagatcgtcgagtcagaagccgac

SEQ ID NO: 25018 - DNA, 260 bp, Unknown
  Description of Unknown: LeftRegion for integrase A586 sequence
tggaactgttacaccacgacggagaggacaccgatgggcgtcgacctatccaggcaggccgcggtacagctccgcgacgcagtgcggaaccccgggccggtgcccagctatcaccatcagatgatggacaagctgagccgagaatggccggtcctacacacagcactgatgcaggtagtcgccgagatcgaggcagacctgtgagtcttcgcgcatacggctggacgaacgacggcaagatcgtcgagtcagaagctgac

SEQ ID NO: 25019 - DNA, 260 bp, Unknown
  Description of Unknown: LeftRegion for integrase A587 sequence
ctgggtgtcgacccagcgacgctgcgccgggtgccgtcggagcacacggtctacaactggaagcgcccgtaccgcggccgcacgtacctcgaggaactcgcggtgtggcttcgggcgcaggctgagcgggaagccgcacgctgacctccgaaacgtgggttacagttggaactgttacaccacgacggagagacgagtagatgagcctgcgtgcatacggctggacgaacgacggcaagatcgtcgagtccgaggccgac

SEQ ID NO: 25020 - DNA, 260 bp, Unknown
  Description of Unknown: LeftRegion for integrase A588 sequence
ctgggtgttgacccggcgacgctgcggcgggtgccgtcggagcacacggtctacaactggaagcgtccgtaccggggtcgcacgtacctcgaggaactggcggtgtggcttcggatgcaggctgagcgggaagccacacgctgacctccgaaacgtgggttacagttggaactgttacaccacgacggagagacgagtagatgagcctgcgcgcatacggctggaccaacgacggcaagatcgtggactccgaagccgac

SEQ ID NO: 25021 - DNA, 260 bp, Unknown
  Description of Unknown: LeftRegion for integrase A589 sequence
ctgggtgtcgacccagcgacgctgcgccgggtgccgtcggagcacacggtctacaactggaagcgcccgtaccgcggccgcacctacctcgaggaactcgcggtgtggcttcgggcgcaggctgagcgggaagccacacgctgacctccgaaacgtgggttacagttggaactgttacaccacgacggagagacgagtagatgagcctgcgtgcatacggctggacgaacgacggcaagatcgtcgagtcagaagccgac

SEQ ID NO: 25022 - DNA, 260 bp, Unknown
  Description of Unknown: LeftRegion for integrase A590 sequence
aatacagatatcacaacaacacgcccattcaaacgacgccattcaattagcagcacataataaaaaattgaaaaatatacataatatataataataacaatataataacaacaatgacagcactatcaaacaacaaaatcttaatctccattgaaggaaacattggcgtaggcaagtcaacatttgctagcatgatcaagggacacatagataactctgaaataatatgtgaaccaatagatatttggaagaatatgaaa

SEQ ID NO: 25023 - DNA, 60 bp, Unknown
  Description of Unknown: LeftRegion for integrase A591 sequence
atggaggcatctaaaaaaatcctagacctttccaatcaaaatatatgttatcaggaataa

SEQ ID NO: 25024 - DNA, 260 bp, Unknown
  Description of Unknown: LeftRegion for integrase A592 sequence
ctcgaaaaactgccagagtccgccgcatttctggttgttagggaagacgcagcggcatgaacgaatcatgtatacaaatcatgtaaacgaatcatgtaaacgaatcatgtaaacgattcatgtaaacgatttatgtatacgattcatttacacgcattgtgcatatgacaaacgaataaactgctgcacaatgcagaataagggagagaaaaatggtagacgaaatggatacaaaaaatgaaaatggggttcacctgaat

SEQ ID NO: 25025 - DNA, 260 bp, Unknown
  Description of Unknown: LeftRegion for integrase A593 sequence
ggttcgtgatgaaactccacacggtgaatgtggtaccgataaagaggaaggcttctttcgttgggacaataaaaactggttagtaacctaccgtcctgattggaatcgttatgataaacaatactactatatcgataactgcggaaataacacaacagcagtagaaatttcataaaaactcgaatttaattattgacaaactgatcctcttgggcgatactctctacatcaaagagaaacatcatccaaggggattttta

SEQ ID NO: 25026 - DNA, 260 bp, Unknown
  Description of Unknown: LeftRegion for integrase A594 sequence
aagtgggatattttctgcggggaagacggatatgggtggtcagaggccaaaaagatctgccagaccgaatgctccgagaagatgcgaaacaaatgcttggagaggtgcctggcgtttgaggagcatgagcctgttcgcctgggcgtgtggggcgggttgaccgcgcatgaacgtaacaagatctacggccgaaagtcttcatgagtcagtgcgctgcatctccgaattgttccaagactccatcgaagtttaagcggggc

SEQ ID NO: 25027 - DNA, 260 bp, Unknown
  Description of Unknown: LeftRegion for integrase A595 sequence
tcggacatcttctgcgatgaaaacgagaacggcgggaagggcgccgcggaggccaagaagatctgctggtcccaatgcaaccgccgagagaagtgcctcgaggaggcgttgaggttcgaggagcatgagccggtgcgcctcggggtgtggggcggcctcagcgccaatgaacgaaacaagatctacggccgaaagtcttcatgagtcagtgcgctgcatctccgaattgttccaagactccatcgaagtttaagcggggc

SEQ ID NO: 25028 - DNA, 260 bp, Unknown
  Description of Unknown: LeftRegion for integrase A596 sequence
aagtgggatattttctgcggggaagacggatatgggtggtcagaggccaagaagatctgccagaccgaatgctccgagaagatgcgaaacaaatgcttggagagatgcctggcgtttgaggagcatgagcccgttcgcctgggtgtgtggggcgggctgaccgcgcatgaacgaaacaagatctacggccgaaagtcttcatgagtcagtgcgctgcatctccgaattgttccaagactccatcgaagtttaagcggggc

SEQ ID NO: 25029 - DNA, 260 bp, Unknown
  Description of Unknown: LeftRegion for integrase A597 sequence
tcggacatcttctgcgatgaaaacgagaacggcggaaagggcgccgcggaggccaagaagatctgctggtctcaatgcactcgccgagagaagtgcctcgaggaggcgttaaggttcgaggaacacgagccggtgcgcctcggggtgtggggcggtctcagcgccaatgaacgaaacaagatctacggccgaaagtcttcatgagtcagtgcgctgcatctccgaattgttccaagactccatcgaagtttaagcggggc

SEQ ID NO: 25030 - DNA, 260 bp, Unknown
  Description of Unknown: LeftRegion for integrase A598 sequence
tcggacatcttctgcgatgaaaacgagaacggcggaaagggcgccgcggaggccaagaagatctgctggtctcaatgcgcccgccgagagaagtgcctcgaagaagcgttgaggtttgaggagcacgagccggtgcgcctcggggtgtggggcggcctcagcgccaatgagcgaaacaagatctacggccgaaagtcttcatgagtcagtgcgctgcatctccgaattgttccaagactccatcgaagtttaagcggggc

SEQ ID NO: 25031 - DNA, 260 bp, Unknown
  Description of Unknown: LeftRegion for integrase A599 sequence
tcggacatcttctgcgatgaaaacgagaacggcgggaagggcgccgcggaggccaagaagatctgctggtctcaatgcactcgccgagagaagtgcctcgaggaggcgttgaggttcgaggagcatgagccggtgcgcctcggggtgtggggcggcctcagcgccaatgaacgaaacaagatctacggccgaaagtcttcatgagtcagtgcgctgcatctccgaattgttccaagactccatcgaagtttaagcggggc

SEQ ID NO: 25032 - DNA, 260 bp, Unknown; identical to SEQ ID NO: 25028
  Description of Unknown: LeftRegion for integrase A600 sequence

SEQ ID NO: 25033 - DNA, 260 bp, Unknown
  Description of Unknown: LeftRegion for integrase A601 sequence
tacgatctagcacaaaaaatgatacctgctacaaagagaagtcctaacatactcaaataaagatgagaaagacacaatcgaaattgcatcaggcctagaaaatgttgaatatgatgaaattctagcatttgaagcataacacacaaaaaccgccctcaattaagagagcggttttgtcctatctaaaggagctttacctcctaatgttgcaaaattttaaatgttggatttttgtatttgtctattgtatttgacgagta

SEQ ID NO: 25034 - DNA, 260 bp, Unknown
  Description of Unknown: LeftRegion for integrase A602 sequence
cattctctctgagagtttattattcccagagcagaaaggctttaactctgatcttgaacagagatcgccgaatgagttatcatcagcattcactagaagctgaattacaacttcatctggtgtattctttccgaaaattaaactcatttgttttctatagagagaattttgtttctaacatttttattctttagaaaagtatgacaactcaatctactcttactgtggcgagagcctacgtgcgcgtcagtacggaatct

SEQ ID NO: 25035 - DNA, 260 bp, Unknown
  Description of Unknown: LeftRegion for integrase A603 sequence
aaaatcaaagcagagaatgataaatttatgaaaagtgtaactcaaaagatgaacaactagttatcactcaaaagatacttatttttgagaaagcatagatctaaagattttttgttagtaataattattatcaccaacaaaatgacaacaaataaaaaaatttcacaaatgggtatatttttaagtagacgtgcagaagtattcaatgaggaaaaaaaatatttaatgaaccaacccaaaatgatagaatatttgtttaa

SEQ ID NO: 25036 - DNA, 260 bp, Unknown
  Description of Unknown: LeftRegion for integrase A604 sequence
acatcaggctttatttttttgcctttttttcaaaaagtgcggaaaaattactcccaaacctacctagtaaggtaggaggaatatttgtattccatgaactttggcataaatttatcaggtcgaattagtttgtctgataacttgacttattttccctttagagtgatatatagtgtgccattacataggaaggagagtaaatgtccgtaaaaaagattagagtcaataaacaaaaacacaagcagaggatctgtgcctac

SEQ ID NO: 25037 - DNA, 260 bp, Unknown
  Description of Unknown: LeftRegion for integrase A605 sequence
tgatttagaaatccctatcttttcaaaagatagaagttacattgatcaatatgtatatttaaataaataaatagaaattagaaattagaaaggggttgcattaatttgcaatctctttttaattaaaaacttaaataagataaatttattcaacttttattaataaaatatataattaaaaattatagaggtgatgttttatgaaaaataacaataaatggtcaatagaagaagaacagcaactagcaaatatagtttta

SEQ ID NO: 25038 - DNA, 260 bp, Unknown
  Description of Unknown: LeftRegion for integrase A606 sequence
catcaaagaaggcaaggcttcctgccaaggcatgcgtgtgcctgagaaagctattgaagattggagacttaagactcctgtaacagtgatagaaaggaacgaatatgggcaaaaacattacagttattccagccaagaaaatgcagttgacagtcacccatcagcaagtcaccaaaatcagagtggccgcctattgtcgagtgtccaccgaccaagacgaacagctatcaagctatgagaaccaagtcaattactaccgt

SEQ ID NO: 25039 - DNA, 260 bp, Unknown; identical to SEQ ID NO: 24229
  Description of Unknown: LeftRegion for integrase A607 sequence

SEQ ID NO: 25040 - DNA, 260 bp, Unknown
  Description of Unknown: LeftRegion for integrase A608 sequence
aaatcggacatcttctgcgatgaaaacgagaacggcgggaagggcgccgcggaggctaagaggatctgctggtcccaatgcaaccgccgagagaagtgcctcgaggaggcgttgaggttcgaggaacatgagccggtgcgcctgggggtgtggggcggcctcagcgccaatgaacggaacaagatctatggccggcgcgggtgacaaggggtaagtgtcggcggtccggctgctcgaatctgactcggtcaagtggcggc

SEQ ID NO: 25041 - DNA, 260 bp, Unknown
  Description of Unknown: LeftRegion for integrase A609 sequence
aaatcggacatcttctgcgatgaaaacgagaacggcgggaagggcgccgcggaggccaagaagatctgctggtctcaatgcgcccgccgagagaagtgcctcgaggaggcgttgaggttcgaggaacatgagccggtgcgcctcggggtgtggggcggcctcagcgccaatgaacgaaacaagatctatggtcggcgcgggtgacaaggggtaagtgtcggcggtccggctgctcgaatctgactcggtcaagtggcggc

SEQ ID NO: 25042 - DNA, 260 bp, Unknown
  Description of Unknown: LeftRegion for integrase A610 sequence
aagtgggatattttctgcggggaagacggatatgggtggtcagaggccaagaggatctgccagaccgaatgccccgagaagatgcgaaacaaatgcttggagagatgcctagcgtttgaggagcatgagcccgttcgcctgggtgtgtggggcggattaaccgcgcatgaacgcaacaagatctacggccgaaagagttcatgaagtacgggaagtgccggcggcctaattgccagaactccactaggtcaagggggtcg

SEQ ID NO: 25043 - DNA, 260 bp, Unknown
  Description of Unknown: LeftRegion for integrase A611 sequence
cccatcgccaccgcccgccgcgcggcaaacctcacccagcaccagctcgcgacccgcgtcggggtcagccgtggagccgtcgcccagtgggagatggagagcggcacacgccccgacatcgacaacgccaagatcctttgtgaggtgctcggcctgacgcttgagcagatcttcgccgaccagccgggcagggcagcctgatgcgcgccttcgcctacgtccgcgtcagcaccgaagagcaggccgacagcggccacagc

SEQ ID NO: 25044 - DNA, 260 bp, Unknown
  Description of Unknown: LeftRegion for integrase A612 sequence
aagtgggatattttctgcggggaagacggatatgggtggtcagaggccaaaaagatctgccagaccgaatgctccgagaagatgcgaaacaaatgcttggagagatgcctggcgtttgaggagcatgagcccgttcgcctgggtgtgtggggcggattaaccgcgcatgaacgcaacaagatctacggccgaaagagttcatgaagtacgggaagtgccggcggcctaattgccagaactccactaggtcaagggggtcg

SEQ ID NO: 25045 - DNA, 260 bp, Unknown
  Description of Unknown: LeftRegion for integrase A613 sequence
aaatgtgtcattatattaacttctattttattgcctatataatttatccatcaagattaatcttgtattttgatcgcaaattttaaataattaaatacaaaaaattgatatttattgatattcatgaaaaaccatatatataaacaaaatgaacaacataaacttctcgagatcctttaaattatctatttttcaaaacaatgaagcaagttaatcaagttttatcccaagtttttccgtatgtatttaataatatacct

SEQ ID NO: 25046 - DNA, 260 bp, Unknown
  Description of Unknown: LeftRegion for integrase A614 sequence
gagacgcctgcgaagtggcgtcagcccgctctccggggtcgcggtctgcatcacctgtgaccgtccgttgcaccacgaccggtatctggtgaagcggccctacggcgactacccctaccggtactaccggtgccgagaccgccacggcaagaacctgcccgccgagctggtcgagaccctcatggaagagtccttcctggcccgcgtgggcgactatccggtgcgggagagggtctgggtccagggggacacgaattggg

SEQ ID NO: 25047 - DNA, 260 bp, Unknown
  Description of Unknown: LeftRegion for integrase A615 sequence
aacgtaaggatgatccagattttgaatttaattctacttatatttgtacactagtggatcgtatgatgggagaatctggacagactgctgaagacctagatatcgaccccgaaattatttaaaaataaaaccttgacacaacttatcctctgaactaatatcttatcaaaaggtaaaaacgagttcagaggatttttattatgattaaaaaatacgtagtttattctagacaatcaaagaagtcaggaatgaaaggtcaa

SEQ ID NO: 25048 - DNA, 260 bp, Unknown
  Description of Unknown: LeftRegion for integrase A616 sequence
gttggttcggattatgaatacgacatcagaagatacttaatggctaattacggactgactcctgcggaaatccgtaaacataaaggtccactcactcgtcgtaacaaaaccaagcagtttgttcgttttgttaaaactaacgccgacttatgcattagagaagacgatatccgtctgggtaaaataaaggaaactgaattatgtaccctgtagataaagaatccagaattcgtttaatggaagatctggacaaatggata

SEQ ID NO: 25049 - DNA, 260 bp, Unknown
  Description of Unknown: LeftRegion for integrase A617 sequence
gaagtctacggggttaatatcgttgaactccgggaaactttgagaggcgcttgtgtctgataagaattccagagagttcaagaagctcaaaaatgcggctaagaaatattgtttggaacctaatgcttcggaattagttttaaagaaaacagggatctcacccactagagtcattaaactattccgtgatgcaggtgaagggagtttgtatgattacatcacccatttaaaaatgttagaagcgaagaaactcttagacg

SEQ ID NO: 25050 - DNA, 260 bp, Unknown
  Description of Unknown: LeftRegion for integrase A618 sequence
aattatgtattgagatcggtggattcgggtggggagaaaaaagaattaggtggtgtttaatcctcgggcttgtaagtatgtttcttgattacgtttcatacagaggcatccgctattgtgggttccgtcattgcaataataattatttaaaacgtagtcgctatttgggggaagtttcgtcgttttaaatgggacgggccattgagggctgcaacatgcaggtgagcatttattgttggtcaaagtataatcgcttatat

SEQ ID NO: 25051 - DNA, 260 bp, Unknown
  Description of Unknown: LeftRegion for integrase A619 sequence
taccaagagtacaagtatgacaaatacgaaaagggtctcctagacgataaacctaaacagaagtctctaatctctcaatggattaaagctaagaaagataaagtctgtccgatgatcgattgggaagaataaaatctattgacagcgtggaaaccttttgctagaatctccttatcaacttggtaaggagatttttatttatggctaagaagtatgtaacttataaacgtgtttcaactaagagacagggtgaatcggga

SEQ ID NO: 25052 - DNA, 260 bp, Unknown
  Description of Unknown: LeftRegion for integrase A620 sequence
ctatatttacaagagttacactctacttttgtagattaaatgtcaatttatttgtttgtttgtgataatattgaaaaacatcaattaaaacaatcaaaaaatgtgacataaatcaataattttatttttacacaacttcttgatttctgagcctggctatctctattcttattcaaagcctctttagaatggtggtggccatgtcagcagtttgttacttcatactcataaagaaacctataagctttcaatttcttaag

SEQ ID NO: 25053 - DNA, 260 bp, Unknown
  Description of Unknown: LeftRegion for integrase A621 sequence
ggagtgattagccaagggtctttggcaaaacttattaagaaatataacctaaacagttgacacaaagattaaataatattatcttgtacacagattaagaaataaggagaaaatcatgattaaatgtaaagaagacctgtacaataaatacatcccgatggaagaaggtggattacgtggtaaattcatcgaggtttgtaacaagtttggtattcacccagcgtttagttttagtattgacatgagtcagaaatattacg

SEQ ID NO: 25054 - DNA, 260 bp, Unknown
  Description of Unknown: LeftRegion for integrase A622 sequence
ggagataaggtaggatttgttgtaccgaggtacagaacccttaaagagggtactatattaaaactaggtaataagatggccaccataggatatcctgatagcaaaggaaaagaagttaaggttactagatactactcacaagtagttttcgtagggagtgccactaagtaatcaaataaaataatcaaaaattaataaagatggataataagaaatacgtagcatactacagggcgtcgacagaaagccaaagagatgga

SEQ ID NO: 25055 - DNA, 260 bp, Unknown
  Description of Unknown: LeftRegion for integrase A623 sequence
ttagaatatgttaattataactatttagaactaaatagtattaattagtataattaaaaattagacgacttaaaattataaatataggattaataataatttatagacctcctaaatttaatgtatctttttttttatattgttatgtatatatgactactaaacctagagcgttagcatacttaagggtatctactacaatgcaatcagaagaaggtatttctttagatactcaacttaaaaagattcaagattattgt

SEQ ID NO: 25056 - DNA, 260 bp, Unknown
  Description of Unknown: LeftRegion for integrase A624 sequence
aacatcgagcgtatcatcagtgtcgcaaccagtggcaatagaagttctttttgtatgtcgttccgttctcactttggtttaactccgacggaagcccgtcgttatcctgaacgtgttatgcgtttaaagggaacagaaggattaagaaaatatatcgaggtaggtgttaagaacatcacactaagttaaggtaataaaccatgaaagcagaatttagagataagctttttaaagatacgttaaaatggatagacaacaac

SEQ ID NO: 25057 - DNA, 260 bp, Unknown
  Description of Unknown: LeftRegion for integrase A625 sequence
tttaaacaacaattccgtacacatcctcaaacgtacgccaattcttttaagagtaagtagttatggatacccaagaaaccattttaaaaatcgaagccgcagtcaaagaactatttgcagaaagcaaagcctccgctaagatttacgcacggctcaatatgagtgggccaagcatgggacgtttcctagagaaacataaccacccatcggttaaggagatgttagtagaagctcgcatgggacacgctaaacaccttctt

SEQ ID NO: 25058 - DNA, 260 bp, Unknown
  Description of Unknown: LeftRegion for integrase A626 sequence
aatagttgttggtctgcttctactgtaaaacgtgcattagatagacttcaaacactttaacaaaggagatattatgagtgtttatttaaataaagtaagacgattcgtaaggaagcattacgatttttttccaatcatattctatgcagctgtaatcatgtttatgttatatgcatttatgattgtcggttgtgccttggacgatgcttgttacgaggttcacatgagatcaatagaggaggttccgtatgtctaccccc

SEQ ID NO: 25059 - DNA, 260 bp, Unknown
  Description of Unknown: LeftRegion for integrase A627 sequence
gaccagacctatacggactggcgtaaatctttacgcatgcgcatggcttcagacttaatccgagataacccgaagattgacgtaacacgtatccatggacaacttggcatctgttccttccaatacttcgtaactttatttaaacaacactaccgtacgcatcctcaatcgtacgcgaatgcattcaagagaaaatgaatatgactgaccacgaattagcactacaaatccaagactacgttaaagaaatctatatgaaa

SEQ ID NO: 25060 - DNA, 260 bp, Unknown
  Description of Unknown: LeftRegion for integrase A628 sequence
aaaataggtcaaaatccctaaaaaaacaacatagtttttgcctgaaagtactgaaaatgttatactatcagcatgtttaattaaaaaaagatttagtttaagtactgttttaagcacgataatgcctaaactagtataaaactacctagatatttagttctactctaaaaacattctaaaaacatgcttaaaaggaatatatgtcacagcttgacacaccaacagcacgccaaccagttctatatggctatgctcgagtt

SEQ ID NO: 25061 - DNA, 260 bp, Unknown
  Description of Unknown: LeftRegion for integrase A629 sequence
caggtaaaggtgtgattttgaaatgtaagtatgacgaagaagatattattgatatcgatagtgattctcatttaaccctgaaaaaggttatacctgttgaggtcattaaatctctcaatgaattaaataaacattgacacacaatctccattgaactattatctaatcaacaggtaacaagttcattggagatttttattatgtcacgcaatatttcttacaaacgtgtttcaactacacatcaatcttgtgatcgtcag

SEQ ID NO: 25062 - DNA, 260 bp, Unknown
  Description of Unknown: LeftRegion for integrase A630 sequence
agttggaaacagagtacagtacaaagagtgttagaaagacacaatattaatttattctaaggggtaatatatgcaaatacctgaaggttcaacacactattatgcagagggtagtaggtactacatggtacacgagaatatgtggtggttttatttaagtaagtgtaatgaatggcgaattagttctcatttaggagattggttcgaaaataatttaattgaaatttaaggagatactagtggctgatttaacttgcaca

SEQ ID NO: 25063 - DNA, 260 bp, Unknown
  Description of Unknown: LeftRegion for integrase A631 sequence
agttggaaacagagtacagtacaaagagtattagaaagacacaatattaatttattctaaggggtaatatatgcaaatacctgaaggttcaacacactattatgcagagggtagtaggtactacatggtacacgagaatatgtggtggttttatttaagtaagtgtaatgaatggcgaattagttctcatttaggagattggttcgaaaataatttaattgaaatttaaggagatactagtggctgatttaacttgcaca

SEQ ID NO: 25064 - DNA, 260 bp, Unknown
  Description of Unknown: LeftRegion for integrase A632 sequence
ttacggtaaatcctatcgtgaatggagaaaggatactaggatgaaattagctaaggagttactccacaaaaatccaagtgttaagatttcagacttagcgactaccgtaggttcttgtagtgcgacctatttacggaagcaataccaagaagtctatggagttaatattgttgagctccgggaaactttgagaggtgttcgtgtctgataagaaatcgaaagaactcaagaagctcaaaagtgccgccaagaaatattgt

SEQ ID NO: 25065 - DNA, 260 bp, Unknown
  Description of Unknown: LeftRegion for integrase A633 sequence
aagttcgagaaaaaatatggaatgggacctaaacgttatcaacaacacacccgtctttaaattaattcctaacccaaggtacattatatgtgagcggtacaagattaggtttagctagactagcgtgtccgaaaagaaaaggtgtatgccgcgagtccgacctaggaagttattccttcattacaaccgctcacaactattctggttcaggggggagtcctccttgtcaacatcgatgtcactaaagccatcccctgaac

SEQ ID NO: 25066 - DNA, 260 bp, Unknown
  Description of Unknown: LeftRegion for integrase A634 sequence
aagttcgagaataaatatgggatgggtccaaagcgattccgtcaactgtcaaggttgtaattaattcctaactcagtgtacattgtatgtgagcggtacaagattaggattagctagactagcgtgtccgaaaagaaaaggtgtataccgcgagtccgacctaggaagttattccttcattacaaccgctcacagcttactcatatcgtgttacgagtataaagcgccgatcgccacccccatggcgatcactattttca

SEQ ID NO: 25067 - DNA, 260 bp, Unknown
  Description of Unknown: LeftRegion for integrase A635 sequence
ggtaagtttaccccctcccaagcactgcgcgcactatcttacttaaacattacacgataaattacaggggaacttatttatggcggtaccaattatacctaaaactgaatgttacactacacctgcaaagaaaagctctagcttcggactggagatgaatgcatctacacttaaagctctttctcagaccctatatgactacaagattgaagcagttgttcgagagtacagtacaaacattactgacagccataacgatt

SEQ ID NO: 25068 - DNA, 260 bp, Unknown
  Description of Unknown: LeftRegion for integrase A636 sequence
aaaaaatattgggattctattatggttggaactgtatacagaaaacataataaaaaataattttttataaaaatcatacggtcgatagtttatgggaattttcaatgtatacgagaaataataataataaattcgtacggtcgatagttcatgggaattttcaatgtatacgagaaataataataataaatccgtacggtcgatagttcatgagaattttcaatgtatacgaaaaatatatttttaatatttcgtataca

SEQ ID NO: 25069 - DNA, 260 bp, Unknown
  Description of Unknown: LeftRegion for integrase A637 sequence
gccgccggggccggcgccaccgagctgttgagcgcctccctgtccgaattaaaattttaaagaatttttgttactaaatggagaccgaccctctgttgggaccggattccgagtcctctggcgcgtcgtcctcgctgccggtggtgcccggcatgtccgcggacccggattcggccgccgccgcgcgaagcgccacaccggtgttggcggcggcggcgcccgtcctgccggccacgatcgtccagacggagcccgtgccg

SEQ ID NO: 25070 - DNA, 260 bp, Unknown
  Description of Unknown: LeftRegion for integrase A638 sequence
tataactggctccaaaataagagagccagtgacaaaaagcaatcaatgatgaattcatgaaaagtgtcaccaaaaaataaacatctaagtatcatgcagatgtttattttaaggcctaaagaatttttgttagtaataattattattaacaacaaaaatgacaacaaataaaaaaattacacaaatgggaatttttttgaatagacgtgcggaagtatttaatgaggaaaaaaaatatttaatgaaccaacctaaaatga

SEQ ID NO: 25071 - DNA, 260 bp, Unknown
  Description of Unknown: LeftRegion for integrase A639 sequence
gccgccggggccggggccaccgagctgttgagcgcatctctgtccgaattaaaattttgaagaatttttgttactaaatggaaaccgaccctctgctgggaccggattccgaagcctccggcgcgccggccgcgctgccggtggtgcccggcatgccctcggacccggacctcgccaccgcgcggagcgcggcgccggtcgcggcgccggtcgcggcgccgccgcccattccgccggccgcgatcgttcagaccgagccc

SEQ ID NO: 25072 - DNA, 260 bp, Unknown
  Description of Unknown: LeftRegion for integrase A640 sequence
ttccatatcaactgacaaaattaatttccataatggaacaccatggtttcgcgtatcgacaacaaatcgtcgtgttcaaaggctgaacagctgttggtgacaaatgacatctattgtgtcgtttgtcatctatatgggtcatatcgacagaattattaatttaacaaacacaaaccataacatttcaacaatggaatgaaatgtcctcgaaaaatgtcaaagaaaccgcaaaattcgttgctcccggaagagctcgaaaa

SEQ ID NO: 25073 - DNA, 260 bp, Unknown
  Description of Unknown: LeftRegion for integrase A641 sequence
tgtgcaggtaacggtttcggtcaaaatgcacatatacgaactggggtagaatatgtaactaagcttgcaaagagaaagtttaaatagtgtacctaaaatttaggtaaaatcaaaaaattaatttattgacttacatccccgttcagctatacttggtctaaagataagaaattaactataactaacggggatttttatttatgcgtaatattgggtaccttcgtgtctcaacagataacggttcgcagaaaacagacaga

SEQ ID NO: 25074 - DNA, 260 bp, Unknown
  Description of Unknown: LeftRegion for integrase A642 sequence
atatttgtggcgaaaatgaatggtttaaggaaatatagaaaaaaagaagaaaaaaaatgaaaaataaaagagaatatcaaagaaagtaaagaatgtgtgttactagtagcatcccttataatcaaatggatttaatttatactctacaaatttgccttcattttcatcaaaaataaatttatcaataactgatttctttgtgaataaatatttaaaatgtgaatataatagcatatttattttttcgtcgtatttattag

SEQ ID NO: 25075 - DNA, 260 bp, Unknown
  Description of Unknown: LeftRegion for integrase A643 sequence
aaaaagttagagacaaaatttatgcaaaagcaattgaacaattattttaaaaccaagtgattccattggtatctcaatatcctaatttttctttatctacgtaataatcaacaaaaccattttcagctccttggatttgttttggtgtcatacataaacaaccagtgccaccagtattgtttgtgcaaacataatcggacgctaaatatttgtttttaccatctttgcatacaaaaggatcatatgttcctttaaatggt

SEQ ID NO: 25076 - DNA, 260 bp, Unknown
  Description of Unknown: LeftRegion for integrase A644 sequence
aaagatgaaggacaagggggtggttctgagatgcaggaaggtaaggatacttccgagtgaggaacagcgagaaatactcaagtcttgtttcggtatccatcgacacatctataacgagtgtgtcaaggccgagaaggacggggacatcgatggagctggggttagggagtgctacaagtggcgaaaggctttcactacaagagaggactactatggacaggggaagaattggaaagacgattgccccagccataccaaac

SEQ ID NO: 25077 - DNA, 260 bp, Unknown
  Description of Unknown: LeftRegion for integrase A645 sequence
gaaactttgtgttactttacattgaaaggttttcccgaatcagtgaataagttcatggttgatgaatggaattaccgtattgacatggaaatttagaacaaattgaaaaattaatttatacaaaacgtttgacacatatgaccctctttggtaatctttacacatcaagtagtagagaacaaccaaagaggattttatttatgagacatatcggatatcttcgcgtaagtaccatatcacaggtgaccgaccgacaactc

SEQ ID NO: 25078 - DNA, 260 bp, Unknown
  Description of Unknown: LeftRegion for integrase A646 sequence
ttctttgcataagatttcctattgtgaaactgatctttagttatactgcctgatgataacccttcgatgataaccataacctgttgtgtaagcactggttggaaggctagtaattccttgtaattcatagttgactcctaagtaattgtggtataatatacattatatcatgtaatgagtattgaaagggaaattaatttatgagacatatcggatatcttcgtgtcagcacgcaagaccaatcggtatcaagacaactc

SEQ ID NO: 25079 - DNA, 260 bp, Unknown
  Description of Unknown: LeftRegion for integrase A647 sequence
cctacaaccattgtgcaaagaatgtaactctttgaaaggaactgaaacgatagattatagggtagcagataaacacaaagctaggaaaagaaagttagagtgtagaagactgaggaataaaaacaattgacttacatccccgttcagttatacttggcctaaagataagagattaactataaccacggggaattttatttatgagacatatcggatatcttcgcgtcagtacgatctcgcaacaggttgatcgacaacta

SEQ ID NO: 25080 - DNA, 260 bp, Unknown
  Description of Unknown: LeftRegion for integrase A648 sequence
aagccatcacgcaagcgcactagcgcaaattcctcaagatcgcgaagcaatacccgatgaattcaacggcgtcgacctgttcggcgctgatgatttcggacttataggcgggattgtctgttagcaagtgcagctcgcccccgtgcatgcgctgcactcgccgcaatctgatgctatcccccatacgcaacacataaacgccgtcaacatcacgcggccgtcgatccacgagcaccacgtcgccattgttgattgttgtc

SEQ ID NO: 25081 - DNA, 260 bp, Unknown
  Description of Unknown: LeftRegion for integrase A649 sequence
ttgttttttttttaataaaattacactgactattagtttaattttattgaaaacctgcacaaaactacataaaaaaaacctaataaaaattgaataatttatgttctaaatacttcattatattttcccattaatattatagttttacaactattgaattctcatccgtttcgtaatagaaaatcaaaaaattaatccaaatggatcttcaaaaagcttgtgatcgaatttcccaagaatttgaaacagatattataatg

SEQ ID NO: 25082 - DNA, 260 bp, Unknown
  Description of Unknown: LeftRegion for integrase A650 sequence
atgtccaatcaatagcccacacaatgtagacaaggactatcttgggacatttgttgaatacacttacatagacaaaaacaagcgtaaacaacatgtcgaggaatactgcttaagagtagaatggctgtaaataataaataccttgacaagtgtttattcgttttgtaaagtgagaatacagcaatggtttaggagtggttatgaaaaagtttgttgtttacagtcgtctttctaaacagaaaaaaggtgaggcacaatat

SEQ ID NO: 25083 - DNA, 260 bp, Unknown
  Description of Unknown: LeftRegion for integrase A651 sequence
tagataacatattggaagaagaatacgggtttacgtctcgtcaggcattttatgagtatatcacagactaccatgcaaataaggtggttacgatcgcagatgctcgtaaaataaaagataaaaagagtgaataaaatgcttgactctaacatagggtatatgttacaatattaatagagttaagggaaggaggaaagatagtgttatgtcggggttgcagtaaagaaatagaacctgactataggtatggaaatactcac

SEQ ID NO: 25084 - DNA, 260 bp, Unknown
  Description of Unknown: LeftRegion for integrase A652 sequence
gtaatgttaaaaggtagattgtttaaaagttacaatttaaaaagctggagttttaaaccagattgttcagcagtatatccacaaatatacaatggatataattggagtagtgataacattaaagttaaaaaaaaaaacaaagcgacttgttttaaaatattcaatcatgcaattaacagaatgaaagtgaggattaaataatgaataaaagatatgtaggctacactagagttagtacagataagcaaggtaaggaaggt

SEQ ID NO: 25085 - DNA, 260 bp, Unknown
  Description of Unknown: LeftRegion for integrase A653 sequence
tcaagaaggctactataagaaggaggctgtctaatgaataaagatcaaaaagaattattaactgatgttattgataagggtattgcacatgaaaaatctaaatacccagattgggatgataacaaacatttaattaaagttgatattaagtttgtagataacaacttacatttacattttactagaaaggataaaaaataatgaaaagatatgtaggctacactagagttagtacagataagcaaggtaaggaaggttat

SEQ ID NO: 25086 - DNA, 260 bp, Unknown
  Description of Unknown: LeftRegion for integrase A654 sequence
gggagtttgttcgatgccaaagcggtacaacgtctttgtgcaaaattgaatattaaataaggaggaaacatggcagttcaatcttttgaggagactgttaaaaaacaattcctatcgaagcgagcgatggttgaatttttgcattttctcgaagtagatagggtacttattgagactacaccagatggtaactggcaagtctcgtatattgccaccaggcatatcgtagacagtacgaaagaagaaagttcggaagttac

SEQ ID NO: 25087 - DNA, 260 bp, Unknown
  Description of Unknown: LeftRegion for integrase A655 sequence
gggagtttgttcgatgccaaagcggtacaacgtctttgtgcaaaattgaatattaaataaggaggaaacatggtagttcaatcttttgaggagactgttaaaaaacaattcctatcgaagcgagcgatggttgaatttttgcattttctcgaagtagatagggtacttattgagactacaccagatggtaactggcaagtctcgtatattgccaccaggcatatcgtagacagtacgaaagaagaaagttcggaagttac

SEQ ID NO: 25088 - DNA, 260 bp, Unknown
  Description of Unknown: LeftRegion for integrase A656 sequence
gttaagagcttacaaagtggagataaaaccaactcaagaacaaagtataaaaattcataaaactattggagttagtagatttatttataatttttatatagctcataataaagcaatttatgaaaaagaaaataaatttataagtggtatgcaattttctaaatggttaaataatgaatatattcctaataatcaagataaaatttggattaaagaagtttcttcaaaagctaccaaacaatctataatgaatggagaaa

SEQ ID NO: 25089 - DNA, 260 bp, Unknown
  Description of Unknown: LeftRegion for integrase A657 sequence
atttatttcccagccaattgccaacaagagggatggaaaaatcatggtatctatcattgattatcatgtactacaaacattatgttaaaaaaatagacagtaatggagggatattacgaaataaaagataagcatccagactacctattaattttcaggaaagcagatttttgtgaaatgtatgcgaacgatgcagcaatcgcttccaaagttttgaacattgacatcagaaaacagacccacggacatggccaaacgct

SEQ ID NO: 25090 - DNA, 260 bp, Unknown
  Description of Unknown: LeftRegion for integrase A658 sequence
aacaagcatttaaaaagcttttaaaagccttgaatttaaaagaaagaaagctatacaccacacggcacacttttgcaagcttgatgctaagccagggcgaagaggccatgtgggttacaaacagaaactaaaatcctataataacctataaaatactataatttttgtatagttgttaagttttgtgttatactgcttgcatgaataaaagaatgctatcaatcggtcaagcgagtaagcttttgggtgtaactatccaa

SEQ ID NO: 25091 - DNA, 260 bp, Unknown
  Description of Unknown: LeftRegion for integrase A659 sequence
aagctttacgctttcgcaggagaagataaaggcatgctttatagcgggcttttgggcgtgattgacaattgtccggtagtggatgcaggagtttggaataaattgaatgtgggtaaaaaacagcaactaaaatcctataacaatccataaaacactataatttttgtataggttattaagttttgtgttatactgctcgcatgaataaaagaatgctatccatcggtcaagcgagtaagcttttgggtgtaactatccaa

SEQ ID NO: 25092 - DNA, 260 bp, Unknown
  Description of Unknown: LeftRegion for integrase A660 sequence
aaaacagttggacttgtatctgctatgtttggaatattatctgagaatgacaaggaggcaaaagtaaaataccaaaaaagattttacgagaaagttcctggtttacaatttccagatgattgggatcagttaagtgtagaagagaaagaaaaaagacttgatggtgtaaacaaaatagcactagaaaagagaggtaactaatgaataagattgtagctttagtaagagtaagtacagacaagcaagatgtaaacaatcaa

SEQ ID NO: 25093 - DNA, 260 bp, Unknown
  Description of Unknown: LeftRegion for integrase A661 sequence
attgcggtcgtcgagctgccagtcagctacgaggacgaggacgggcaggtctattacggcgccgacggcggtattcgcgtagacacgaccgcgcggggcaccgatttcccgctgatctacgtcgaccacacgccgtatgccccagaaacgctgcgccgcgacgccgccgagatgctcgccgccgcactggaggccgagaagtgatcacctacacctgcgactcgtgcaccgcgccgatcaccgggccggtacgtctcagc

SEQ ID NO: 25094 - DNA, 260 bp, Unknown
  Description of Unknown: LeftRegion for integrase A662 sequence
cctcagaatgcggaagataaagatgaaccccacgaaaacccagaaactgatgctgaataaatacgcagacgccgcgcgttttacttacaacgcgtgtgtgagttctgtcaacgacaagacccacacggcaaataagtttactttgcgcaatgcgttcgtcacagcaaagaacaatccgttcttcgaggacaagaagtggattctcgtcactccaaaggtgatcagacagcaggcggtattcgaggttgccaagaatttca

SEQ ID NO: 25095 - DNA, 260 bp, Unknown
  Description of Unknown: LeftRegion for integrase A663 sequence
acccgtaataaaattaggaaggacactgttttggagaattatcccctttattgtccaaaatgcagacaagaaagtttatcgaacttagcaaactataagtttctaagagataaaacctataaaacttgtacggatattgtagggtaggaaaagaaatcttcctctatactaaaataaaccgaatgaaaagggggatcgaagtgaatattatcaagtcgtttaacaatacgattgattatcttgaaacagttcttgatgat

SEQ ID NO: 25096 - DNA, 260 bp, Unknown
  Description of Unknown: LeftRegion for integrase A664 sequence
aagcttgataagactcaaccaattgtgaggtttaaaaccaaagaagctgctgaaaggtttgctcagaaaattcttaagtctgctgaaaagttaaatgtctagttaggggtttgtaactgttcggtaatttctacctataactagacaaacctaacggaacgtccatataattaactcagtcaagtaaaggagttaattatatggaaaaccacgaagtgatgatttcaataggagatactgctaaagaacttggtgtttcg

SEQ ID NO: 25097 - DNA, 260 bp, Unknown
  Description of Unknown: LeftRegion for integrase A665 sequence
tttgattttatttatgatttaataaccttgagttttaaattacaaaaatttaaactttagttttagttgttttaaaagctttaaactttagtttagattgtttatatgttatgatattatattctataccatctatgaaatattataagaatatataaatatctataattatattataagttttcttaaaaaggatttaaatgtatagtattggagaattttctagaattataggtgttactaggacaaccttaagaaat

SEQ ID NO: 25098 - DNA, 260 bp, Unknown
  Description of Unknown: LeftRegion for integrase A666 sequence
aacgtttgttaggaatacttttagaaaaatagagagtactgatatcaatggcccccaaggtcattgattggttattattgtacggtgaattgatctttactaaaaaaaatatcaggacccctggtttttcagtaaaaaaatgttcaacaaataaaaaataactgttattctaatttcacacattcaacaggttattcataatgagtatttctactaattttccaggaatcatcactagtctaagcaaggcacttcctggt

SEQ ID NO: 25099 - DNA, 260 bp, Unknown
  Description of Unknown: LeftRegion for integrase A667 sequence
caaataatgaatgtatttgttgcgaaaatgaatggacaacgaaaatacaaaaaaaagtaaatcgttaaaaattcattttatttatagtatttatcataccacctacataaaaatcgacattatatttttctaataatatatgttattctttttttttctatttattgtatgaatatattgatataaaacaaatattatttgctttataaataaatgttaaaaattgaaataaaaaaaacaaaatttatcagcaacaacat

SEQ ID NO: 25100 - DNA, 260 bp, Unknown
  Description of Unknown: LeftRegion for integrase A668 sequence
tgccgacaagcgatcgctccccaagttagccgagcttgctggtataagccacacatactggcgggaagtggaagcagagacagttaagaacctacaagaacacacacttgccggaattgagaaggcgttaggtgtaaactttggagtggggtttggtaatgattagaaatatttatccatacttactcataactacttaaatgctatgctatagtagttatatgagtaagttatctatatctgaagcagcaaagttaaaa

SEQ ID NO: 25101 - DNA, 260 bp, Unknown; identical to SEQ ID NO: 25100
  Description of Unknown: LeftRegion for integrase A669 sequence

SEQ ID NO: 25102 - DNA, 260 bp, Unknown; identical to SEQ ID NO: 25100
  Description of Unknown: LeftRegion for integrase A670 sequence

SEQ ID NO: 25103 - DNA, 260 bp, Unknown
  Description of Unknown: LeftRegion for integrase A671 sequence
tacaagtttttctttttctgaattattaattttctgctaaaagtgttcaattaaagacctgcttttgtgaacaatagatatttcaaaaagataaaaaatagaaactagatatttcaatgaaaaatattgtgtaattgttcattttattattgatgccttttcgtgaacatgttataatttaattataatattgtggaagggtgttgattatgaaagtcttaggttattgtagatgttcaacaaatgaagaaaagcaggac

SEQ ID NO: 25104 - DNA, 260 bp, Unknown
  Description of Unknown: LeftRegion for integrase A672 sequence
ttctatattgtcataatcattaaatcctttattattaatagattttaaattaaaccaaccatcagtattaatattttttcgttttttatttttaaaccaatgataattttttatattcattaatataaaaaattatatatatttaaataagtttataaaaattgttatttatatataaagatataaagaattataatttaatggacgaatatctaggtggtaaagaagctagtaaaatattgggtgtacatcaaagaaca

SEQ ID NO: 25105 - DNA, 260 bp, Unknown
  Description of Unknown: LeftRegion for integrase A673 sequence
cataaaaatagaaaaatcgtagaggagttaagagacgttgctactaggattcaagactgagttaaaactaaataatcaacaacgctcattattagcccaacacgcaggaaccgcacgtcatgcttggaattggggtttggctttaaccaagcaaattttagaccataatcaagctaaccctgatgaaaaaattaagtttcctacggctattgaccttcacaaatggttggtagcattggtaaaatcagagcatgattggt

SEQ ID NO: 25106 - DNA, 260 bp, Unknown
  Description of Unknown: LeftRegion for integrase A674 sequence
ggcggtccggaaccgagggcgtgctcctcaacgagcgcaccgcacccgtcgcgatcgtccagtacgacaacctgcccgaacccacctgggccgactggaaagacatcgcgtgaccagttccggggggtttccgtttcgcgctggcccgcgccggctgcgggaggcgccggagtattgcctcgcgcgcgcgggtgtgtctggtggcgatcttgattgggggtggggcggtgagtgagggtcagttgttggggtatgcgcgg

SEQ ID NO: 25107 - DNA, 260 bp, Unknown
  Description of Unknown: LeftRegion for integrase A675 sequence
agtaattacaggtaaccataaattatcagatagttttttaacatttttcttgtaccattgacatattaaagtgtcagtgatatctgtatcttttgttgtatcagttgacgttgtatgaatatagtagtatataatcaagtctttaagtctatttataataaattatacttaaatataatagtatataatagtatatatcaatgaacgataaattaattcccagaagagaagtattagaaactttaaagatccattatcaa

SEQ ID NO: 25108 - DNA, 260 bp, Unknown
  Description of Unknown: LeftRegion for integrase A676 sequence
ttatatggtcaaaggtctaaaaaaactaagcgtttaattgaggaagtgaaaaaacaatgatagtagcaattaaaataaaattaaagccaactaaagaacaagagattttattttggaaatcggcaggagttgcaaggtggtcttataactattttttatcagaaagtgaaagacactaccaagagtatcttgaaggtaaacaagacaagaaaaccataaaagaaagcgaagtcagaaaatatattaataatgtattaaaa

SEQ ID NO: 25109 - DNA, 260 bp, Unknown
  Description of Unknown: LeftRegion for integrase A677 sequence
atgtcgccggaagggatttggcggcatgaaggttacgtgcagcgccgcgagaaggagaaatgagggtgttacaaaaacgaccgtttacgtaacacacttcagcgccacgcatctcggacctgttttgcgcggtttcgtgttacttttgctgttacttttcaatctgtaacttttgcccccttcattagctaacgtaacacatgcttgtcggttacgctcgcgtctccaccaaatcgcaaagtttgcagccccagattgac

SEQ ID NO: 25110 - DNA, 260 bp, Unknown
  Description of Unknown: LeftRegion for integrase A678 sequence
accacgtctcggacgtgactggggtcgaaaacatcctcgtccccgagcactcgatattcctggtcaacacacccgtgatctcactggatacgtggcaaggggagcgcctgcccccgcgccactgggctaccggcgacgtagcgtttctaccggccggatcagaaatcacatccaccccggatagaccctacggcagtgccatgatccgcgtgaacgacgaggcgttcaaaagggccacgagctgcgacctgcagtacgac

SEQ ID NO: 25111 - DNA, 260 bp, Unknown
  Description of Unknown: LeftRegion for integrase A679 sequence
taagcttgcataacttttttcgtaaacatattatattattattatgtttatgatgaaaaaaataatattataattatatttttgttcatattcatcattattgaaaattaatatttatgtataatcatgtataaaaagaatacaatgtgaaaaaattgcgcaaaaacatataaaaaaaaaagaatattgtaaattataacatgaaaaatattggaaactcttacaaaacgcgtaagaccgcttgtgaaatgcttgggata

SEQ ID NO: 25112 - DNA, 260 bp, Unknown
  Description of Unknown: LeftRegion for integrase A680 sequence
aaaagtattattatctactatttttgtaggataccatatttttttatttatttcttttattgtatcatcataccatggacacgtatctggattattctccatttataaatgtaattattagaattaacaaatctttaagtggttttataataatatataatgaaatataatataaacgaatggttacatatagtaatattatggataaatacatatcaagaaaagaagtattaagtgtactaaaaatacattatcatact

SEQ ID NO: 25113 - DNA, 260 bp, Unknown
  Description of Unknown: LeftRegion for integrase A681 sequence
atcttgtttacaacaaatgcatcaaaagaattctaaaaaatatgtttattggtaaagtatcaaattgtggtgtcgcaatataacatccagttggaaaacggttgatattgcgatatttcatgaatataatgattaataattatcagggtcgaaaaagtatataaaactatataaggatttgccttaattatatatatataatgaaatccaaagaggttttacaattattaggagtatctagagttactttatataaatac

SEQ ID NO: 25114 - DNA, 260 bp, Unknown
  Description of Unknown: LeftRegion for integrase A682 sequence
aatagagaatgagtttgatgcaataaaaactacaaaattcacaggcaaacaattcaattacgcccttttgcaagagtaatgacaatacttataagtacttttgattcatttaaaaaaattcactcgtattcataactgtacggtattgactacgatttgattatgtagtaaaatgaacatatagaaggtagtcataactaatggtcaaaagtaaggggtgtatttttatgatatttgggtattgtcgggtaagtagtaaa

SEQ ID NO: 25115 - DNA, 260 bp, Unknown
  Description of Unknown: LeftRegion for integrase A683 sequence
atatgatcactgctacaatttattgttgattggtaattattatttctttgatactgaacaatatcaaaccaagaatcagtctcaatactaatattattatcagataattttggtatccatttattttttttctttgtcattcattatttttcataaattgataaaactttatataaatatttatcaatattaaaaattaaatgagcaagtacataacaggaaaaaaagcaagtgaaatgctaaaagtacatcaacgtaca

SEQ ID NO: 25116 - DNA, 260 bp, Unknown
  Description of Unknown: LeftRegion for integrase A684 sequence
aatattcagccatgcgctatatgcgcggcaggcaccaatatttttggtgaaggtatcttttcctggaatatctgcaccgttctggtttttctgtaatgcgccagaagcctgatttaccgtttcctgtaaaccgaggttttagataatggttgtttccggcctgcatggcatgatttgcgcttttaaacgggagatccagagtgctgattggctatgtaagggtatcaacaaatgaccagaatacagacctgcaacgaaac

SEQ ID NO: 25117 - DNA, 260 bp, Unknown
  Description of Unknown: LeftRegion for integrase A685 sequence
gcggtcgtcgagctgccccagcctgacgggcccgacgacgacgggcaggtctacttcggtgcgtgccgtgacatccgcgtcgacaccaccgcaccgcacggacagttcccgcgcatctacgtcgaccacacgccgtatgccccagaaacgttgcgccgcgacgccgccgagatgctcgccgccgcactggaggccgagaagtgatcacctacacgtgcgactcatgcacggcgccgatcaccgggccggtacgtctcagc

SEQ ID NO: 25118 - DNA, 260 bp, Unknown
  Description of Unknown: LeftRegion for integrase A686 sequence
acctttgccagttccgggtattcttcagcagaaaaagccgccccgttgcatttcagccagcctgtcggcggagtggctgaaggccacggaacaggcacaccgacgggtaatgccgaaccttctcccaaaccaacgtttatgaaaatgcagagataacgggtaactggcatcatctccggtttttattcagggggatgctcatgcttattggctatgtacgcgtgtcaacaaatgaccagaacacggaattgcagcgtaac

SEQ ID NO: 25119 - DNA, 260 bp, Unknown
  Description of Unknown: LeftRegion for integrase A687 sequence
aaacgttatgacgtaggtcctaagcagtaccgccaactaaaattaatcaacgctatataactgaagtgtaatactatgtggtgagaataaatcgagcgtctgctcagatgtcgaatttgaacacctacaggtacttaccgcgaatcacggcagagatgcagatagccgtaagtctcaccacaaacttaccaacccccaattggttagttacagatcagtagatataaagcgcacgtccgttaatgaaaattgacggacac

SEQ ID NO: 25120 - DNA, 260 bp, Unknown
  Description of Unknown: LeftRegion for integrase A688 sequence
aaacgtgcaattaaacgccacgaagtaagcttacagacgagtctgctagatgccgcataattccgcccaacaacagggggcagggaatgggcgtagaagatcgcgattggtaccacgaccgtaaaaaacagaaaccaatcaatccagattggcagagagaatacaaccgatggtacggcaaaccgaacacgcccacgcccaagaagcccggcatgcactggacgctaacgctgatgtgctgggccacgttctttcttgcg

SEQ ID NO: 25121 - DNA, 260 bp, Unknown
  Description of Unknown: LeftRegion for integrase A689 sequence
aaacgtgcaattaagcgccaccaagaaagcgtgcaaccgagcttgctagacgccgcgtaacacgggagaggcatcatgggaattcacgatcgggattggtatcgcgacgcgatactcagacgcgaaacgagagaggcagcgcgagaaaaacgaacgctcaccgaacatcacgacagcccgccaaaaccgtccgctcactggaccgtgcgactcttgttctggatcgccatcttcctcatagcccacttagtcaacaaaca

SEQ ID NO: 25122 - DNA, 260 bp, Unknown
  Description of Unknown: LeftRegion for integrase A690 sequence
agacgtgcaattaagcgccaccaagagcgccagcagcccagcctactcgacgcagcataaccaccgctaaacgaacgccatgaagagcttcatcgcagtatcggcagcaaccgtatccatcgccgcgaacgcatataccgtcacgactacgacgacgaccacaacgcgctccgacgggactgtaaccacgcagacatcaaggaccgttccctacgatgccgcccgatgcgcgcgactaaccgtcgacctcagcatgctca

SEQ ID NO: 25123 - DNA, 260 bp, Unknown
  Description of Unknown: LeftRegion for integrase A691 sequence
tgtagcattagtaataccataaatgagtcccgaatcccagaactagataagattactaaaaataataaaatgtgggataagtggaattcaatttcgaatagtaataaggaggtacttaacagtaactgaatatctataaaaatttgacaaattctgtaaaatattatataatgttgctatattatatatgaggtgataaaatgaaaccagcagaattttcaaatagaataggcgtatcagagcaaactcttcgtaactgg

SEQ ID NO: 25124 - DNA, 260 bp, Unknown
  Description of Unknown: LeftRegion for integrase A692 sequence
aatattcagccatgcgctatatgcgcggcaggccccaatatttttggtgaaggtatcttttcccggaatatctgcgccgttctggtttttctgtaatgcgccagaagcctgatttaccgtttcctgtaaaccgaggttttagataatggccgtttctgacctgcatggcatgatttacgcttttggacgggagattcagcgtgctgattggctatgtaagggtatcaacaaatgaccagaatacagacctgcaacgaaac

SEQ ID NO: 25125 - DNA, 260 bp, Unknown
  Description of Unknown: LeftRegion for integrase A693 sequence
atgcatagttacattaatttattaatgcatttttttttatttttaatggtgggtcgattcagttggttttcggagaaggagaactgtgaactgacgccgtatcaaaagtatcctttttaatattttatgaaagatagtctcaaaagtattgttttcttacttttgattcattattatcaatttatcttaaggctattgagatgatagtgatggcaaaagtaggttacaggagagtgtccagtcgagatcagcatctggac

SEQ ID NO: 25126 - DNA, 260 bp, Unknown
  Description of Unknown: LeftRegion for integrase A694 sequence
gtattacaaataatgaatgtatttacagcaaaaatgaatggattaagaaaatataaataattataaaattttatatagttataaagttttataaagaaagaatttactagtagatgcccagtctaataatttatttatctagtaaatttagaaagatgtcaaagattattccaaaaaaattagccatttattatgggtacccaagttcagtgaatgccacatatactgttagtggtgcggctgctgttttttcagcatac

SEQ ID NO: 25127 - DNA, 260 bp, Unknown
  Description of Unknown: LeftRegion for integrase A695 sequence
ggaatgaggagtcacaaatacgaaaaggtgaagaagtgtgttgaagaacttaaggcttaataactttcaaccacaagaggaatacgtttacctaacgtactctctgaagaataataagaaggaggagacgaaaatactactggagaattacagagtcctattgcagaaagctctagactggttatgggagaggactaagatagagaggaaggaagtaaagaaaggtaagaaagtcctaacgaagattaagataaccctgc

SEQ ID NO: 25128 - DNA, 260 bp, Unknown
  Description of Unknown: LeftRegion for integrase A696 sequence
ggtatgaggagccataaatatgagaaggtgaagaagtgtgtcgaagagcttaaggcttaaatcattccaaccggaggaggaatacgtttacctaacgtactctctgaagaacgataagaaggtgaagagcaggatattactagagaactataaacacctactacagaaggctttagactggttatgggagaggactaagatagagaggaaggaggtcaagaagggcaagaaaattttcgctaaggttaaagtaaccttgc

SEQ ID NO: 25129 - DNA, 260 bp, Unknown
  Description of Unknown: LeftRegion for integrase A697 sequence
aatattcagccatgcgctatatgcgcgacaggccccaatatttttggtgaaggtatcttttcctggaatatctgcgccgttctggttttgctgtaatgcgccagaagcctgatttaccgtttcctgtaaaccgaggttttggataatggtcgattttggcacgcatggcatgattggcgcttttaaacaggagatccagagtgctgattggctatgtaagggtatcaacaaatgaccagaatacagacctgcaacgaaac

SEQ ID NO: 25130 - DNA, 260 bp, Unknown
  Description of Unknown: LeftRegion for integrase A698 sequence
gtaatggtagtcgatgttaccgcgccgatagttctcgcaaattgttttttgtccggaatatcgccgccattctgcgatttttgcagtgcacccgcagcgagatttatcgtttctcctaaaccaaggtttttgcgaattgcctccgtgtcgtctgaacgatattttttcccgcttttagcaacaatcgctggtgataaagtatgcaatatggttatgcgagagtgtcaacttttgaccaaaatttagaattacaactggag

SEQ ID NO: 25131 - DNA, 260 bp, Unknown
  Description of Unknown: LeftRegion for integrase A699 sequence
tcagttacatttactttgaataagaatggaataagaggtggaattatagatgagaactaatgaacataacttccataatatagaagaagaaatcaaacatgttgctgtatatttaagattatctaggggagaagatgaaagtgagttagataaccataaaactagattattaaatagatgtgaattaaataattggagctatgagttatataaagaaattggttcaggttcaactattgatgatcgtccagtaatgcaaa

SEQ ID NO: 25132 - DNA, 260 bp, Unknown
  Description of Unknown: LeftRegion for integrase A700 sequence
tcgcttaacttgtgtttgacaataattattcagaatgaaaacaaaaataaaaataagtgagatagattccattcgaaatcatttaaaactatattaacgactagtacgataaattttctcatggctgcttaataataattagatccaaagcttaatataaaaaacacccaccggaaaataatccagtgggtgttttcaatagagatgtttattcaatggacggatacctcattactagtacccaaagatgttataagcac

SEQ ID NO: 25133 - DNA, 260 bp, Unknown
  Description of Unknown: LeftRegion for integrase A701 sequence
aatgtatatgtagccaaaataaatggaaaaagaagtggtaaattaaaagcgaaaaagtaattacattaacaataaaatatatgaaaatacatacattttcatatattttaacgatccgtaataatttgttaagtatttttgacaatgtatattgattaatgtacattgtcaaatcatattacttttgttttcggttatcactaattgcgttcttgactttggaaatgatttcaataaccaatcgacaacatccactagca

SEQ ID NO: 25134 - DNA, 260 bp, Unknown
  Description of Unknown: LeftRegion for integrase A702 sequence
aatgtatatgtagcaaaaataaatggaaaaaaaagtggtaaattaaaagcgaaaaaatgattacattaataataaaatatatgaaaatacatacattttcatatattttaatgaaccgtattaattgatcgatcgagtagcttgtttgagaaagtcattaaaattccctatagtaattttcatctttgcaaacaaattgtcactgaattagaattttacaacataaattatcctcacaacttttttgaattcggtaacaa

SEQ ID NO: 25135 - DNA, 260 bp, Unknown
  Description of Unknown: LeftRegion for integrase A703 sequence
gtttatgattaacagctaaactaggtttccaaagtaaatcagaaaccttttcacattcgtcattccaaaacttaccatttgtagttttggccattacattattactaatattatgaaattatcttatatttaagtaactttttgactattatattaattgaacatatttaaagatatgtttcgaaaatatatttatcagaatgcctaaatatgttcgtcgtaaagaagtacttgaagtattaaaagttcattatcaaact

SEQ ID NO: 25136 - DNA, 260 bp, Unknown
  Description of Unknown: LeftRegion for integrase A704 sequence
gcaattaaaagacgaagatttcaactttaacttttaatcattaaacctacttggactttaattcaagtaggtttaattttctttaatttttgtaaataaaaatattaattttaaatataattttaatgtaattacttattaatttctgagaaagaaaattaacagtttatataaaggataaaaaggagtttttatttgcaatgagaaaaagatggaataaagaagaagataaagagttactatcatatattttaaaattc

SEQ ID NO: 25137 - DNA, 260 bp, Unknown
  Description of Unknown: LeftRegion for integrase A705 sequence
aatgtctatgtagcaaaaataaatggaaaaagaagtggtaaattaaaagcgaaaaaatgattatattaataataaaatatatgaaaatacatacattttcatatattttaatgaaccgtaatatcagcaccttgacttaccaagtatttaaccatttcaagatgcccattttcacaagcttttctaacagctatgttatcacgttctttaatattagctcctaaaattattagatatttgactatttcgattagtccata

SEQ ID NO: 25138 - DNA, 260 bp, Unknown
  Description of Unknown: LeftRegion for integrase A706 sequence
ggtttatgattaatgattaaattaggtttccaaaataaatcagaaatcttttcacattcatcattccaaaatttaccatttgtagttttagccattacattattattaattttatgaaattatcatatatttaagtaacttttgactattgcattaattgaacatatttaaagatatgtttataaaatatctttatcagaatgcctaaatatgttcgtcgtaaagaagtactcgaagtattaaaagtccattatcaaact

SEQ ID NO: 25139 - DNA, 260 bp, Unknown
  Description of Unknown: LeftRegion for integrase A707 sequence
cttcttgacaaaaacctttttcttagttttacttccagtaataatcctctttttagcgggaacttttggtttgacatttttaactgcctctttcatgattattttatgattatttatgaataatatttctttatattaattttgataaatacatataaaatgatattaactaaaatatcaatattaataaaataataacaatgagtaaatacatgggcgggaaagaagctagttctgttcttggtgttcatcaaagaacg

SEQ ID NO: 25140 - DNA, 260 bp, Unknown
  Description of Unknown: LeftRegion for integrase A708 sequence
cttcttgacaaaaacctttttcttagttttacttccagtaataatcctctttttagcgggaacttttggtttgacatttttaactgcctctttcatgattattttatgattatttatgaataatatttctttatattaattttgataaatacatataaaatgatattaactaaaatatcaatattaataaaataataacaatgagtaaatatatgggtggtaaagaagccagttctgttcttggtgttcatcaaagaaca

SEQ ID NO: 25141 - DNA, 260 bp, Unknown
  Description of Unknown: LeftRegion for integrase A709 sequence
gacaaaaacctttttcttagttttactaccagtaacaatccgctttttagcgggaacttttggtttgacagttttaactgcctctttcatgattattttatgattatttatgaataatatttctttatattaattttgataaatacatataaaatgatattaactaaaatatcaatatcaatattaataaaataataacaatgagtaaatacatgggcgggaaagaagctagttctgttcttggtgttcatcaaagaacg

SEQ ID NO: 25142 - DNA, 260 bp, Unknown
  Description of Unknown: LeftRegion for integrase A710 sequence
aactataaaattcacaggcaaacaattcaattacgcccttttacaagagtaatgacaatatttataagtacttttgattcatttaaaaaaattcactcgtattcataactgtacggtattgactacgatttaattatgtagtaaaatgaacatatagaaagtagtcataactaatggtcaaaagtaaggggtgtatttttatgatatttgggtattgtcgggtaagtagtaaagtacaaattgataataatagtttagaa

SEQ ID NO: 25143 - DNA, 260 bp, Unknown
  Description of Unknown: LeftRegion for integrase A711 sequence
tatttggattatcacatttaaaatatttttttttgttttgttttaaattaattgttttggaaggaatccataatgatttggataatttggtacattcattattccaaaacattacatattataaattgtatttataaacatatctttaaatactttttaataatattttatataaaaattatttataagtatgtataataatgacaaaatatgtaagaagaaaagaagtattggatgttttaaaagtacattatcaaaca

SEQ ID NO: 25144 - DNA, 260 bp, Unknown
  Description of Unknown: LeftRegion for integrase A712 sequence
ggttgcatcgcgcatgtcaatctaggctataccctaacttgatgtcaggcagggccgcgccgcttcgtcagaatagagtctgctttcccattttttgacacatgcccgcgaaggttatagatttcagcctgacagaaatgggctttgaggcacaacggaacagaaagtgcacttaagccgccttcaaccaaggagacatcgtgcaggggcaccgcatcggctacgtccgggtcagcagctttgaccagaacccggaacgc

SEQ ID NO: 25145 - DNA, 260 bp, Unknown
  Description of Unknown: LeftRegion for integrase A713 sequence
gctcgtgaattcggaatcagtcgcgaaaccctgtatcaatacttgagaacggatcagtaaatatgccacgtcgttccatcctgtccgccgccgagcgggaaagcctgctggcgttgccggactccaaggacgacctgatccgacattacacattcaacgataccgacctctcgatcatccgacagcggcgcgggccagccaatcggctgggcttcgcggtgcagctctgttacctgcgctttcccggcgtcatcctgggc

SEQ ID NO: 25146 - DNA, 260 bp, Unknown
  Description of Unknown: LeftRegion for integrase A714 sequence
tttcacaaaccccattcagaaacgaatgcaccccgccaaggatggagaggagcattattgtgaaatcacacataactatttccttaatagtgaattaaatatcattgggaaacggtatgtactttgtgatttccacacatactggtttttgttaattaaaatccgcagcttgctataaataacgatagtgagcagaaaatatgctaataggctatgtacgcgtatcaacaaatgaacaaaacactgctttacaacgaaac

SEQ ID NO: 25147 - DNA, 260 bp, Unknown
  Description of Unknown: LeftRegion for integrase A715 sequence
tataagctccacgcctaactccagtaagaaataaataggttccactaataatggacattaaaaaaatcaaaatctgcataagctcctcccggatctaacaaaaatcaagcaggaacctattcagattgttatttctgtgcataacgctttgttctttaaaattcgcagactcataagaacaacgcattagagtaaaaatcatgctgatcggctatgtacgcgtatcaacaaatgaacaaaacactgctttgcaacgaaat

SEQ ID NO: 25148 - DNA, 260 bp, Unknown
  Description of Unknown: LeftRegion for integrase A716 sequence
aattatcttttttatctctaattattggtattttgtttctttaatgttgtaaaaataaagtacgctttaaatttacgtttgcgttttaaaataaaattgtaaaaatagaattataaaattaattattttacaaaatgtaaataaaattattgattttaattttacaattagttataatatagtcaaggagtgattatattatgaatatagcttatgtaagagttagtacagtagaacaaaatgaagaaagacaattagaa

SEQ ID NO: 25149 - DNA, 260 bp, Unknown
  Description of Unknown: LeftRegion for integrase A717 sequence
gctaaaagaaaaacagaaaaaatcattaaagaaataacggaggaaaaagaagatgagtaggattataggaacttacctatatccgtcatatgctaatagaggaaaaatagaaaagataaatagcgttctaatagagtatagaaaaaccgctaaacaaatagcaaaattacaatggaaacatttctttaaaggtggtgagtttagcaagtatttgaacgttagggaagtgaaatcaaggctatcaaaaagatatatacaaa

SEQ ID NO: 25150 - DNA, 260 bp, Unknown
  Description of Unknown: LeftRegion for integrase A718 sequence
ttcatgtacttgtgtgactccgtatttaatgtccaccggcataccgagggctgtcagctgctgccggatttatgtccgtttatatccatttgtatccgtttgtgtcatttatttatatcgtcacaaagaatacaaaatcacgaggtgcgttaaaatcccagaaataaaatatcctcttgtgttatgaagtaacgtatgggatgttcgcaacccttagagacgccaagaaacattatcagtgcaaccataagaccatctgg

SEQ ID NO: 25151 - DNA, 260 bp, Unknown
  Description of Unknown: LeftRegion for integrase A719 sequence
atgcgcccgtctctaactccgagaaggaatacgccggttccacttagtagggatgttatgactactacagccagattttcataatctgcaaacatacccctccagaaataacatctaatgcgccactaacttagtcagtttgttatttccttacaggacatcttctagaatctccccccttaacatacaaggggggacatatgcttattggatacattcgcgtatcaactaatgaccaaaacaccgctttacaacgaaac

SEQ ID NO: 25152 - DNA, 260 bp, Unknown
  Description of Unknown: LeftRegion for integrase A720 sequence
atttatggcgtgggagtgtcgacgatttaccgatatttccctgcctcaaaaaagtcatgatgatggcttaaaatcttcacaatatcatcatgatatcgtctctatttatatgatttgtatgagggtggtatatccatcttattgtgaatatagctattaactaattgatatttatataataagcaatgaatttaaaatccctcggccgcaaggctgtgcgggttcaagtcccgctctgggcaccatataagaattcattg

SEQ ID NO: 25153 - DNA, 260 bp, Unknown
  Description of Unknown: LeftRegion for integrase A721 sequence
ttacaagtaatgaatgtctttgtagcaaaaatgaatggtatgagaaaatataaaaattaaaattatttataatttatataattaattttaatataaaaagtgtcaaaaaatatcaagaaattgatctactagttcctgcccttcataatcctccttttttcaattttttttttataaaaaattgaaaagttaattaataaacaagtttattttattatttccatattattcacggaggaccattttcccatatctttttt

SEQ ID NO: 25154 - DNA, 260 bp, Unknown
  Description of Unknown: LeftRegion for integrase A722 sequence
tttcagtctgctcagtggtcagaaagtcaacgggcatatcggcctccctgcctgacgggcatttagtaacatttttccaaccgtacgaaatgttataaattatcggacatcgtaaaactgttacattaatatgtctattaaatcgtaaatttgtaataatagacatgagttgtccgatattcgatttaaggtacatttttatgcgactttttggttacgctcgggtctcaaccagtcagcagtctcttgatcttcaggtc

SEQ ID NO: 25155 - DNA, 260 bp, Unknown
  Description of Unknown: LeftRegion for integrase A723 sequence
ctttttgatgttagcatttccactctttacaagaaattccctgtaaatcagtcgcgttgaaagtggcgatattgtaccagcactgacacatcgtgaaatacgtgcgccgcacgcctggcaaccagaacataaggtatccctgtcaaccggagagactgccttatggctcaggattaccaccacggggtgcgcgttgttgaaatcaacgagggcacccgacctattaccacggtgagcactgccatcgtgggcatggtctg

SEQ ID NO: 25156 - DNA, 260 bp, Unknown
  Description of Unknown: LeftRegion for integrase A724 sequence
ttaaaaaaactaccattttatagatatttgatgtaaaaataaagcatggtgtaaatttacattgtaaaatatctattttgatgtaaaaataaaattaaaaacgtaattaatttacaaaaagaaggataagtctttgactctaattttacatttatgctataatattatttatagagtaaacataggtggagggatcaaagatggtagtaggttatatgagagtttcaacagcagaacaaaatgaagatagacaattagtt

SEQ ID NO: 25157 - DNA, 260 bp, Unknown
  Description of Unknown: LeftRegion for integrase A725 sequence
tctatcatgcatttattttctacaaaagaatattctaggagaaaaaacaaaaaaatataattgaggcgaaaaaattaaaaaaaatttaattgcggcgaaaaaattaaaaaaaatataattgcggcgaaaaaattaaaaaaaatataattgcgtttaaaaactatataaagatatataaataatatttatattatggatgattctgaaatatcaattgaagatactgttaaaaagaaaacattttcaatacaattgaacaa

SEQ ID NO: 25158 - DNA, 260 bp, Unknown
  Description of Unknown: LeftRegion for integrase A726 sequence
tctattatgcatttattttctacaaaagaatattctaggagaaaaaacaaaaaaatataattgcggcgaaaaaattataaaaaatataatcgcgttcaaaaactatataaagatatataaataatatttatattatggatgattcagaaatatcaattgaagatactgttaaaaagaaaacattttcaatacaattgaacaaaaaatcatatattaataatatttttaaacatctatcatcgatcactaagaatattttt

SEQ ID NO: 25159 - DNA, 260 bp, Unknown
  Description of Unknown: LeftRegion for integrase A727 sequence
tccgacagcatcggcggaaatggccccaacatctgacgcccataaagtgatatcaccggtcagtggtttactgttaacccgccgtgtcgccgggacggcattttttgccagatttatcgtttcgcctaaaccgagatttatgaaaatgcagaaaacggtcgtaaatggcatgatcccagccttttgcgagggggcctgttgtgcaaattggctatgtacgggtgtcaacaaatgaccagaacaccgatttacagcgaaac

SEQ ID NO: 25160 - DNA, 260 bp, Unknown
  Description of Unknown: LeftRegion for integrase A728 sequence
atgtgtcatcaaacgctgcctgctcgctatccgttgtattcaaataattcagatcgttaaggaaaatgttgtctcacaccccccagtgcgtctcgatccagaaaattacatacacgactaaattaccaacatgctggctgcaatttggtctgatttagacaaactgaaactagaagaagaagaatgcaaagaaaacgtaaagccagtacaacaaaacagcttggtgaagaatttttgcgtcgaatgctgcggggtcaagg

SEQ ID NO: 25161 - DNA, 260 bp, Unknown
  Description of Unknown: LeftRegion for integrase A729 sequence
ggtcgttaaccgttccggccggaccgttaaccagctcgtcagcgcgcttgacgttatccaggaaaatttcaggcgaagttgttcccaaaggcgggttaagttcggccatgttttttgctccaaaaagaggcttcgcccaaacgagggtttgagcgaatggccgcagctttttacaatcagctatttcaacgggttacaacatgctgattggctatgcacgggtctctacaggggatcaaaacctcgatttacagaaaaac

SEQ ID NO: 25162 - DNA, 260 bp, Unknown
  Description of Unknown: LeftRegion for integrase A730 sequence
tctcatttgcatcagtgacggctgatgcgttcaaataggtggaaccaataccaaaagcccctacctgaattacgttccccgctaaagaacctacgtccctgatagcactacttcccaaaccgacattttatagattgctcttgagtagcctggccgataacttcacctgatttttttgcagaattaactgggtgaaaaatatgcaaattggctatgtaagggtgtcaacaaatgaccaaaatacagatctccagcgccaa

SEQ ID NO: 25163 - DNA, 260 bp, Unknown
  Description of Unknown: LeftRegion for integrase A731 sequence
cagccggacttcgccgataagacgacaaacgaaagcgagaaccggtactggatcctgcgtaacatggggagggttctgaggagttatcttgcgatgcgctataggtttgccccatccctcccaaaccaaccttttttataaccatcaaaaatctggtgatgcttcgccgtttctcctgttttcataacaggagaaatcccatgatttacggttatgcccgagtatcaacaaaccaccaggacactgaattgcaactaacg

SEQ ID NO: 25164 - DNA, 260 bp, Unknown
  Description of Unknown: LeftRegion for integrase A732 sequence
ctcgaccatattgcaggattttaccgttgggtaatttcatccatccatcaccactggcaaaaaaagccatatccggtatctgattttcccctgttcccacatcccgttttgccgcttctcccaaaccaacctttcaaatatttttctgaatcaggtgatatttcgcctcttctcctgtttttacaacaggagaagcactcatgatttacggttatgcccgagtatcaacaaaccaccaggacactgaattgcaactaacg

SEQ ID NO: 25165 - DNA, 260 bp, Unknown
  Description of Unknown: LeftRegion for integrase A733 sequence
ggacttcccggcctcgtgtcgttcgttgtggagacgatagaaaccctcgccgaaccgccgacccagaacgaactggcaaagcgtgaagtagagacagcggccaaggttgccgcaatcaacgaggccacccagcgcctcagagcagcccaagcacgggcacaggcagagcagatcgccaacaacagaagagtgagagagatatgattttcggatacgcaagagtgagcaccaatgaccaagatcatcagctccagctggac

SEQ ID NO: 25166 - DNA, 260 bp, Unknown
  Description of Unknown: LeftRegion for integrase A734 sequence
cgctggatagcaaaccagaaggttgcccagcaagaggccatgggtaggtggaatgccaaagagcaggccatcaaggacgcaacagcagcaaacgccgcccgctgggaagagcccaagccggaaccggtaacacatcaatcacccgcccgcatgggcatgacagcaatcaccaccaaccccaagaacaggaaacgccttagatgatattcggatacgcaagagtgagcaccgccgaccagaatcaccagcttcaactggac

SEQ ID NO: 25167 - DNA, 260 bp, Unknown
  Description of Unknown: LeftRegion for integrase A735 sequence
aagctcctgttccgggctccggttgtggtggttgcttgggcgatagagcgccacgggtatgcagctgaagagcgggaatatgcacccattcgagcacggcgaaacaaggcggcggatgccgccctgagagccgccattaaccgggctaacgcattcatcgaacaatacgacgccgagaaggcaaagagagaggtagagcaatgatttttggatacgcccgagtcagcaccgctgaacaagataacgccatgcagatgacc

SEQ ID NO: 25168 - DNA, 260 bp, Unknown
  Description of Unknown: LeftRegion for integrase A736 sequence
gggtttcccggcctcgtgtcgttcgtggtggagacgatagccaccctctcggagccaccgacccagcaccagctggcagagagggccaagcaaagggccaatcaggccatcgcaatcaccgaggccacccagcgcctcaaggccgcccaagcgcggacactggccgagcaggccgccaacaacagaagggttagagagatatgattttcggatacgcaagagtaagcactaatgaccaagatcatcagctccagcttgat

SEQ ID NO: 25169 - DNA, 260 bp, Unknown
  Description of Unknown: LeftRegion for integrase A737 sequence
ggattacccggccttgtatcgttcgtggttgagacgactgccacccttgcggagccaccaaccaagcgggagctggcggcaagagccaagcagaaggtcgagcaggccaccgcaatcaccgaggccacccagcgcctcaaagccgcccagtcacgggtgatggtcgagcaggccgccaacaacagaagagtgagggagatatgattttcggatatgcaagagtgagtaccgctgaccagaaccaccaacttcaactagat

SEQ ID NO: 25170 - DNA, 260 bp, Unknown
  Description of Unknown: LeftRegion for integrase A738 sequence
gtagcaacccaaatgggtgtcagccgcgctaccctttatcgcaatttggagaccgtataatgttcgacatcaacctgaccaaggccgccatcgtccaagtggaagaggctcaagccctcaactcccagttggcccgcctcatgtatgacgttgctgatggccgtggttacatgatcatgcagggagccacaaccgtgagtgtggttgcccgccagcaaggtgagaccagagttgtgaaggtctatcccgtctccttcctc

SEQ ID NO: 25171 - DNA, 260 bp, Unknown
  Description of Unknown: LeftRegion for integrase A739 sequence
atcacagtgattttagaaccacatttattatataatggaaatgaatctactggttcttatacgacgggtattgacaaaattgataaaataattgagcagagaattggtcaagattatactgctcaaaaaaatctattcaaaacaaacaccaattcttttttatataattgatataaacattcattataatactattattaatgtcgtatgtcaattctaaagaagcacaagccttcttcaaagtctcggatcaaactctc

SEQ ID NO: 25172 - DNA, 260 bp, Unknown
  Description of Unknown: LeftRegion for integrase A740 sequence
acagtcttcacagcaaaatatcacggaaaaagaaaatataatttgcacaaggaagattagaatatttccatgcgttgaacatataaatttctttaataaatgttttggagccacaagatatatttataataaaacacttgatgcaataaaaaaaatgtataaaaaaaattcaaaaattcttcgaacaaaagccaaaaaaggatgtattcacgttgtatcaaaaaataagtcaagtagtaaaactacaaaaaataaaagtc

SEQ ID NO: 25173 - DNA, 260 bp, Unknown
  Description of Unknown: LeftRegion for integrase A741 sequence
aggatgttaaatcaaattgaatacagtgtttgcctgatgatgttgaatcagttgttggaagcgaagcagatcacgaaaaaagaatatgacaaagttaaaattaccttaatgaaggagtatcaaatatcttctgaaatattaagtggataagtgaaaagagttcgggtagtatgtgtgctaagaaagaggtggtgagatatatggctaaagtagaaatcattaaagccaataaagaactgtcgaatcgcaataagaaaggt

SEQ ID NO: 25174 - DNA, 260 bp, Unknown
  Description of Unknown: LeftRegion for integrase A742 sequence
tcaattatcacagtcttcacagcaaaataccacggaaaaagaaaatataatttgcactagaaagattagaatatttccatgtacagaacatataaatttctttaataaatgttttggagccacaagatatatttataataaaacacttgatgcaataaaaaaaatgtataaaaagaattcaaaaattcttcgaacaaaagctaaaaaaggatgtattcatcaaatatctaaaaataaatcaggtagtaaaactactaaaa

SEQ ID NO: 25175 - DNA, 260 bp, Unknown
  Description of Unknown: LeftRegion for integrase A743 sequence
gttgaaactgttacattacctataaagaatcaagtagataatgaagagtgggttgattaaacattaatgccgttcgcacggcattttttgtatggtaaaatgtatattcgtattacatttggtgatactaattgtaacggaaggagcgtgcgacatgacagtcatcgcagaccaactaaaggtaggcgactatatatttattgatagtccacatgtacctgattttatgaatagaagatgggttgaaattgaaggattta

SEQ ID NO: 25176 - DNA, 260 bp, Unknown
  Description of Unknown: LeftRegion for integrase A744 sequence
ccggacgcgggcccgcccgcgcgcgaggcgatcccgcttgcaccgttatcgatctgtgacctactgtggggggcgtctccggcgtgcccggagaaccccagaccacaccccgcgagccgacaccgccgcggaaccccgacgccccgccggcccccacccggcggggcgtccgcatgtccccggcgaggaggtgaccgccgatggcacgccccatcacggacgccgaccgccgacaggtgcgcgagctgcacgccgcgggg

SEQ ID NO: 25177 - DNA, 260 bp, Unknown
  Description of Unknown: LeftRegion for integrase A745 sequence
gcgggcccgcccgtgcgcgcgaggcgatcacgcttgcgccgttatcgatccgtgacctaatgtgggggccgtccccggcgtgcccggagataacgagaccaccccccgcgccccgcgtccgacacccgcaggagcgccgacgccccgccgaccccacccggcggggcgttcgcatgtccccggcgaggaggtgaccgccgatggcacgccccatcacggacgccgaccgccgcaaggtgcgcgagctgcacgccgcgggg

SEQ ID NO: 25178 - DNA, 260 bp, Unknown
  Description of Unknown: LeftRegion for integrase A746 sequence
gcggacccgcccgtgcgcgcgaggcgatcacgcttgcgtcgttatcgatccgtgatctaatgtgggggccgtccccggcgtgcccggagataacgagaccaccccccgcgccccgcgtccgacacccgcaggagcgccgacgccccgccgaccccacccggcggggcgttcgcatgtccccggcgaggaggtgaccgccgatggcacgccccatcacggacgccgaccgccgacaggtgcgcgaactgcacgccgcgggg

SEQ ID NO: 25179 - DNA, 260 bp, Unknown
  Description of Unknown: LeftRegion for integrase A747 sequence
cgtaggcgcgcgcgccctcgaacggacttgcgccgttatcaatccgtgacctaatgttggggccgtctccggcgtgcccggaactccccagaccgcgcccccgcgagcgactaccgcacccgggggcgccgacaacccgaacgccccgtcggcccacccccggcggggcgttcgcatgctcggcgaggaggtgttcgccgatggctcgccccatcacggccgccgaccgccgcaaggtgcgcgagctgcacgccgccggc

SEQ ID NO: 25180 - DNA, 260 bp, Unknown
  Description of Unknown: LeftRegion for integrase A748 sequence
aaagctcacgtggcttgctttacccatctagtacaagttatctattatagaaaagtctaaataggtaagtttgagtaagttttatgtaacggctgagacaatagcggatcttggatcgatccaaatagacagaacagtagaagaaactgctgaaataaaggaattaaggcaacaaataagcaaattggtaggtttaggcgataatgatctaaacgaaataattcaaataaaacagacaaaattaaataacctgctgaacg

SEQ ID NO: 25181 - DNA, 260 bp, Unknown
  Description of Unknown: LeftRegion for integrase A749 sequence
ggtcgtagttggagactggcaccttcgatgtgaggtagattgtgcgatacaacagataatttacttcccatatgtgctctgcgaatgatgtaatgtctgacaataatccctaaagtttgataggatcaattttttagcgaaaaattgaatatggaatgttgtgtaggtcttagtaagtgagtggatttgaaaccacacacatggcgggaactgttgttgatccaaacgagaataaaatattgctacagtggcttgaagcg

SEQ ID NO: 25182 - DNA, 75 bp, Unknown
  Description of Unknown: LeftRegion for integrase A750 sequence
ttcatacccgttgacatggcagacgacatttgtgggcatgaaaccgccagtggcgaaccatgccaaaaccccgct

SEQ ID NO: 25183 - DNA, 260 bp, Unknown
  Description of Unknown: LeftRegion for integrase A751 sequence
ggcggggacaacgtcgactccctcgcgcagcagcggttcagcaccagcagccacgaggtaaccgccgtcgaggccaaggcgatcaacgccaccctcggcgcgacgttctgcaagaccgcctaacgcccgacctcgacggcccggccccgcaccagggcgccgggccgtcgccatgtccgccctcggcgaggaggtgagccgtggccgcccgacccatcaccgacacagaccgggagcaggtcaaggccctccacgccgag

SEQ ID NO: 25184 - DNA, 260 bp, Unknown; identical to SEQ ID NO: 25183
  Description of Unknown: LeftRegion for integrase A752 sequence

SEQ ID NO: 25185 - DNA, 260 bp, Unknown; identical to SEQ ID NO: 25183
  Description of Unknown: LeftRegion for integrase A753 sequence

SEQ ID NO: 25186 - DNA, 60 bp, Unknown
  Description of Unknown: LeftRegion for integrase A754 sequence
atggcgcgaaagagcttgtatgaaaaattggacatagaaacacggttgcccgaaattgaa

SEQ ID NO: 25187 - DNA, 260 bp, Unknown
  Description of Unknown: LeftRegion for integrase A755 sequence
acgcctgtgacaaccgggttgttacggacccgattgagcgattttcgaccattggcatgatttcgatataggcgagtttaatttatagtggcatgacgtagctcgtgggctttagcttgtcggcagcgagtttatacgtgcagtagtcctgagcttctcgttttgctgtcattacatcttcccatgtggggtagatgcggccggaacggatcttttcagcaaaatcgtagacgatcattcgatcgttcacatctttcttc

SEQ ID NO: 25188 - DNA, 260 bp, Unknown
  Description of Unknown: LeftRegion for integrase A756 sequence
aacattaaaaataaaaaatgtcatcgaaatattacagatgaattagataaagattattaaaaaggagaaattataatggcaaacgaaattaaagatttacaagtgtatttaggtggagacttattatcaacccctatggtagaatatcgaaacaaacaaagagacgaattagatggtattattggaattaaagcatactctccatcagacgataagtctatcaatgataaaacgactgcgatacaagaaggtctggcaga

SEQ ID NO: 25189 - DNA, 260 bp, Unknown
  Description of Unknown: LeftRegion for integrase A757 sequence
atatgatcactgctacaatttattgttgattggtaattattatttctttgatactgaacaatatcaaaccaagaatcagtctcaatactaatattattatcagataattttggtatccatttattttttttctttgtcattcattatttttcataaattgataaaactttatataaatatttatcaatattaaaaattaaatgagcaagtacataacaggaaaaaaagcaagtgaaatgctaaaagtacatcaacgaaca

SEQ ID NO: 25190 - DNA, 260 bp, Unknown
  Description of Unknown: LeftRegion for integrase A758 sequence
gcaggattttcccgttgggtaatttcatccatccatcaccactggcaaaagaggccatgtccggtatctgattttcccctgtccccacattccgttttgccgcttctcccaaaccaaggtatgcgagaagacccgtttatgaaaatgcagagataacgggtaactggcatcatctccggtttttattcagggggatgctcatgcttattggctatgtacgcgtgtcaacaaatgaccagaacacggatttgcaacgtaac

SEQ ID NO: 25191 - DNA, 260 bp, Unknown
  Description of Unknown: LeftRegion for integrase A759 sequence
ctaaacgtggacataggcactatggatatacgcacagactgggactcagattcaggatgggattgggagacaattccagatgaagtgatagtttgtaagaaatgtttagaacacctcattgaagcaaaaacaatgagtgagcagtaagccaaaggcttaacggacgtatctttttctttttgcgggtcgtattgctggtaatgactgatatttgtggcgtagagacaactaaaggtgagccatgtcagaatcctgttgag

SEQ ID NO: 25192 - DNA, 260 bp, Unknown
  Description of Unknown: LeftRegion for integrase A760 sequence
gttggcaatagtacgatttctagaattaaacataacgtttcgtggtcagctactaagtaaaaaaaagccccctatatttctagggggctactagtgttttctaacctgctactactatttcgactcgttatagagtgctactaacttatatcgagatatgcctagacgttctaatgcatattctaatagttcactatcttcataatcttcttttctacaatagtcacagctagaatcctgctcccatgtttcccccggag

SEQ ID NO: 25193 - DNA, 260 bp, Unknown
  Description of Unknown: LeftRegion for integrase A761 sequence
gttggcaatagtacgatttctagaattaaacataacgtttcgtggtcagctactaagtaaaaaaaaagccccctatatttctagggggctactagtgttttctaacctgctactactatttcgactcgttatagagtgctactaacttatatcgagatatgcctagacgttctaatgcatattctaatagttcactatcttcataatcttcttttctacaatagtcacagctagaatcttgctcccacgtttctcccgga

SEQ ID NO: 25194 - DNA, 260 bp, Unknown
  Description of Unknown: LeftRegion for integrase A762 sequence
ctcgaattgattgagagtaacggtggtgtgaccgagggtagtttcaccgaagaatatcagtgtcaaatctgcaatctcacaatgactattgcaggggaggcagatcaacctcctgatatgtggcagaagtatggcgcggcgtatgatggcgagtaagtaacggacgtatctttttctttttgcgggttgtattgctggtaatgactgatatttgtggcgtagagacaactaaaggtgagccatgtcagaatcctgttgag

SEQ ID NO: 25195 - DNA, 260 bp, Unknown
  Description of Unknown: LeftRegion for integrase A763 sequence
aatctcgaactgacagatagccgtggagcaaccgatgagggcagttttaccgaagaatatcagtgtgccaactgtaagttgacaatgactatcacagggaatgccgaagacccacctgagcaatggcagaggtacggtgcagcgtttaacggataactgacggacgtatccttttctttttccggttcgtattgctggtaatgactgatatttgtggtgtagagacaactaaaggggaaccgtgccagaatcctgctgag

SEQ ID NO: 25196 - DNA, 260 bp, Unknown
  Description of Unknown: LeftRegion for integrase A764 sequence
ataagtaaaagtacagtttctaaaataaaaaacaatattttatggaaaaacgttatataggaagaaactcgacttttttaattaaaaacgttgatttaacagtatttagttgcaatttaagtttttctttcatataatggatacataaattgatgaaagcaacaaaatataggagtgagtacctttagagtaccgatagatatgattgtcattgcgacaattgtatttgttggtactcttttttgttgtcttacagtttt

SEQ ID NO: 25197 - DNA, 260 bp, Unknown
  Description of Unknown: LeftRegion for integrase A765 sequence
cgcacaatattctgggcaacccgctagggttcaatgctggcaatgtccagaatgttaacctacaacatgttaacttaggcgctgttgatgcagaattgcagtttggtaacctaaaagttatcattacaaaagaaaactttgcaaaagttgcacgagagttaatgtaatacacttgacagtgacgtaaaaaggtggtaaacttgttagttccaaaagagaaaaaacttattcctaatgagcttcttccacctaagtatcaa

SEQ ID NO: 25198 - DNA, 260 bp, Unknown
  Description of Unknown: LeftRegion for integrase A766 sequence
agaggaaaagagtttagaaatatcctatattatatctaatatttaggatgttacgtttttcaacaataggacattatataaatttaaatagccttaatgatagaatttgcaaagaacaggatagttttattaataagtctgaaaaacactattaaaggacatttatacgaggaatttaagataatgtataaacataaaaaatgaagcaaaggagtgattgtttgaatgacaaagatgttgaaatagttaatgatagctat

SEQ ID NO: 25199 - DNA, 260 bp, Unknown
  Description of Unknown: LeftRegion for integrase A767 sequence
tcgacataattgtattagctcagatgtttcaagatatgataatattattgcgattattgggtcgatcattttattgatatgagaaataaaaattggtaggtgtgttgtgattttatttcaatttttatagcaaaaattgaatatggaatgatatattgatctcattactagaggaacttaacattcagcgctagcggatcatggggaggcgcacttttttcactgaacatcagaatcaaatattagctatgtggtttgat

SEQ ID NO: 25200 - DNA, 260 bp, Unknown
  Description of Unknown: LeftRegion for integrase A768 sequence
ctggaagaactcgtcgaccgccgagacaggcccggacttgtgacgggctacaccaccaacctcggcctgcaccgccaggagtctgcgccgagtgacttctccgccttcgttggggcgcgcgtcgtctctcggatgtgccgacaggggacctacctgcttcgcgactgcgggacgcgagacctgcggaaggaaggcacgccatgacgtgcaaccgtcagcccaaggtggtgcactaccgcggcaagtccggtgacacctcg

SEQ ID NO: 25201 - DNA, 260 bp, Unknown
  Description of Unknown: LeftRegion for integrase A769 sequence
ggcagtcattattaatacgatattcatctttattcaaaataggtattttagattattaaacatttggttttgttttaatcccccgggggaggtcaaatctggtgaggggctggcaggcgctcgtaacgttccgccagaatttttaaactcggggggctatacaaaatatacgaatttcaaggcaatcgatactaaatcggttgcctttttctatttcaggaagaaaggggagcgaaatgatggcgaagttagacgaatta

SEQ ID NO: 25202 - DNA, 260 bp, Unknown
  Description of Unknown: LeftRegion for integrase A770 sequence
taagggggtaactggagtgcaaatgtgtcgtagatgtggatttgatcaaatgagagaatcaaaattctgttccaagtgcggcgctatacatccagtacgtgacaaatattttgctgctaacaaagattttttaattgaattagcacttaaaacgagagataaagaatggtttgaacaattgaatagggggattgttactgatgttaaataaatttgaaaagaaagaagttagaacagtgattactggcttgttaacacat

SEQ ID NO: 25203 - DNA, 260 bp, Unknown
  Description of Unknown: LeftRegion for integrase A771 sequence
tgtggtctgccgcgaatcttatcaaggtagatgccgaggcaggtgttattcattgccaacgtaaataccatcgtgctggtcaaatcatagctgagtctatgacttgggcaggtaagtatttaaacatgcgttgccctatgtccggggaatttaagatcggaagttcatgggctgaaacgcactaacatgggaaaaggaaaatgcaagagtgggttcgcattacaagctatcctaactatgctgtgtcgaacgaaggtgag

SEQ ID NO: 25204 - DNA, 260 bp, Unknown
  Description of Unknown: LeftRegion for integrase A772 sequence
caccgacagcaagagcccgatctattcgggtacgaggatgctccaaagcggttgcactgaccgcccctacatcaagccccgcctagcggggctttttgcttaaagcccccggaaatacagcgcccttgctgctcgggcgaacctagccaggtccattcatctggcagattcgaacatgcttgagcacgccacctcttcagcggaattcgcccagcgcgtcattgacgagcgctgcgagaagacgcgccaacgaatgatcg

SEQ ID NO: 25205 - DNA, 260 bp, Unknown
  Description of Unknown: LeftRegion for integrase A773 sequence
tcgtccggggttcgggttcgaggacgtctgggagtggccgatgaaggacttcgaccaccacttcctggtcagcctgtgggcgatcgtgtggggcatccagcagtgggacacccgcgagcacaagacgcagctggattgggagcgcgaggaccacgcccgcacgcgggcggagctggccaacctgcggcggtaccacaaccatgtctgagctggaggagctgcgcgccgaggtcgaacgcctccgcgcacgcgccgacgag

SEQ ID NO: 25206 - DNA, 260 bp, Unknown
  Description of Unknown: LeftRegion for integrase A774 sequence
gatagactgtgtagattcggttacgaacttatcgaatggatcgttggaagatacggttgacgaatcgtcgttttggatgaaaagacgttcgaatccgaagaaaccgaactcgcaaacgatttattatccattaccacgtcttcagttgtaaacaattgggaaaaagacgttataaaaaatctaaaagtaagaatttatccaacaccaactcaacgtaagatttttaaagaatggtttgggacgacacgttacgtttacaa

SEQ ID NO: 25207 - DNA, 260 bp, Unknown
  Description of Unknown: LeftRegion for integrase A775 sequence
aaggatctttactacttcaaaaatactttcatgatggtgtaaacggtccaaaaagattaaatcaaggacaggttgaacaatactatatcgaagataatcatgaaggaattgtatctaaggaaatatgggagaaggttcaggtaaaaataaaaagccgttctcggatccaaggtacaaataaaacctataaattttccagaatgttaaaatgccaatattgtggttcaacattaaaaagacaagtttcttataagaaaaag

SEQ ID NO: 25208 - DNA, 260 bp, Unknown
  Description of Unknown: LeftRegion for integrase A776 sequence
ttaatctattaaatgaaaattcaagtaaagatgttgctaggattacagaagtactaactgataacaacaattacttttataagctaacaggtgaatacgataaggtatttaaagaaagtgagttaactttagtaaaagatattgacaagaatgattaagtgtagtatgatataagtatcaaaacaaaaggagttttttatatgtttatttcattaaataaagaagaagagaagattttaggtacagaaaataaaaaagaa

SEQ ID NO: 25209 - DNA, 260 bp, Unknown
  Description of Unknown: LeftRegion for integrase A777 sequence
ctagaaccgattctacagaacaaaacactggtactaaacgataggcatacgatactgctcgaccaaatggcgcaatatccattttctgaccacgatgactcattagacgcctgccagcttgctgttgataatatttcaagacctgttgcacgggttgtagcaaagcctgcgtatctataaaacgaaaggagcaatttggaatggcgaatcctagacgaatgaaagcactagaagcgaaattgacggcgcaacaacgtaaa

SEQ ID NO: 25210 - DNA, 260 bp, Unknown
  Description of Unknown: LeftRegion for integrase A778 sequence
gcattagtacctaacagcaactttatgaaaacatggtcgagttggtcaccaagcccataaaaacggcgctttttccttaaaaatcaaggtgaccgagaaaaacaccgcttgtctccctgtagtcacctatttctggtcaccgttcatcttttcggctacaatccctatattgacttttatttataattattgggggttacatggaattaccgcgcactgtgcaggaaatagctgacgttattggccgtgaacgtgcgcta

SEQ ID NO: 25211 - DNA, 260 bp, Unknown
  Description of Unknown: LeftRegion for integrase A779 sequence
gacacatcacctgcaaatgacaaccatcagcaccgactactaatgactacggggcaataactggcatgaatatttttgagaagtttctggataacattggatgggcaatcgctggtttaatgggtgcgttgattgctgttccttttcacgatgataagagcatcaaaggccgtctgtggtttgtttgtagcgggcttgcatgttcttactttcttactggctggacgtcatggttttacagcatcccgcagcaatacact

SEQ ID NO: 25212 - DNA, 260 bp, Unknown
  Description of Unknown: LeftRegion for integrase A780 sequence
aaaaatataatttttttataatgatacatcgcagattaaaaatataattataataaatattcaatataaccatataatttatctgcgatgtattattataattataggtgtatataggtttctgtaatgttccaatataatcagatttattttctcaaaaaatataatttttttataatgatacatcgtagataaattatatggtcatattgaatatttattataattatattattatcgttcccgaaatatccagatta

SEQ ID NO: 25213 - DNA, 260 bp, Unknown
  Description of Unknown: LeftRegion for integrase A781 sequence
aacgaaggaggtacgtaaggatgaacgacacgattacgaagtttactcgctgtggtgattgcgtattccacgacagtaccgaaaatatatgcgagttgttaggcgtcgtagccgagacaacagacggatgtactttcggagtgaccgatagtgacatcgaagatgaaataacgtaatgaaaacggaaaggagtggatagtatgccgaataaattcgatgacctgtccgagcaacagaaacgggcagccgaattattgctc

SEQ ID NO: 25214 - DNA, 260 bp, Unknown
  Description of Unknown: LeftRegion for integrase A782 sequence
acagacatgaaagcagatttgcgtcaaatgaatggtgacatcagacacattacagaaatagtcaatgatgtagaagatagacaaaaagaagatacaagagaaatatttgatgagattaaaatcatcgaagataaccttaacttaaatattaataaggcattgaacaatccactaaacaatatgtcagcaaaggtaaaataatgacaacagcagtagtaaacaaacaaggtaatcgtcctgctaaatacaaacaaagtatt

SEQ ID NO: 25215 - DNA, 260 bp, Unknown
  Description of Unknown: LeftRegion for integrase A783 sequence
cagctcagtattgcccgctccacggtttataaaattcttgaagacgaaagggcctcgtgatacgcctatttttataggttaatgtcatgataataatggtatcttagacgtcaggtggcacttttcggggaaatgtgcgcggaacccctatttgtttatttttctaaatacattcaaatatgtatccgctcatgagacaataaccctggtaaatgcttcaataatattgaaaaaggaagagtatgagtattcaacatttt

SEQ ID NO: 25216 - DNA, 260 bp, Unknown
  Description of Unknown: LeftRegion for integrase A784 sequence
aatgagagcgaagatttttctgatgaacccactaaagatgaggctagagaattttatttgagaaacttgattgcttttatgctggtagctgaagatgatgatataaaacgttcttgtgccaaagcattcttgacgttcccagaaaaaaacctggacattgctttgagtacagaactattgactagagaagatttagagaggtggtcaaaatagcaaaaggaaaatataaagaatggctaacaaatgagaagttagatatt

SEQ ID NO: 25217 - DNA, 260 bp, Unknown
  Description of Unknown: LeftRegion for integrase A785 sequence
tggccggattgctgacgttctggctctcctttcgttttcgcgctcgtctgttcgggtaaaggggcaccatgtacagaaaattcagtgatgaatgtttcgggccgtccacgctgattagtgcgataaaagtgattgcccttgtggttctgataaccatcagtgccgtggtgtatctttctgtctgttaaccgggggaaaatatgcagcatgatttatttgaacacgatccggcaattcgccagttaatcggacatattgat

SEQ ID NO: 25218 - DNA, 260 bp, Unknown
  Description of Unknown: LeftRegion for integrase A786 sequence
tggccggattgctgacgttctggctctcatttcgttttcgcgctcgtctgttcgggtaaaggggcaccatgtacagaaaattcagtgatgaatgtttcgggccgtccacgctgattaatgcgataaaagtgattgcccttgtggttctgataaccatcagtgccgtggtgtatctttctgtctgttaaccgggggaaaatatgcagcatgatttatttgaacacgatccggcaattcgccagttaatcggacatattgat

SEQ ID NO: 25219 - DNA, 260 bp, Unknown
  Description of Unknown: LeftRegion for integrase A787 sequence
cgcgtagtcgctaaaatgcgcaagatagaagttaagaaccgtcaaccgaatttattttaaggaattgaaaatgaaagccattgctttattactatcatcattattttgtatgcccgtgttggcaaaggacttaccaccagtaaatgaaatgctccatcgcttagatgttgctggttatagcaacgccgataaatgggaagatattgaaggtacaaaaaagcaagatttagaaactggaacattgtttgttagtcaatcga

SEQ ID NO: 25220 - DNA, 260 bp, Unknown
  Description of Unknown: LeftRegion for integrase A788 sequence
gaaaggctggcagtcagttgatatgccggaaattcttcaccactgtcaacgttataaggaaaaatattgtgtacagaaaattcagtgatgaatgtttcgggccgtccacgctgattaatgcgataaaagtgattgcccttgtggttctgataaccatcagtgccgtggtgtatctttttgtctgttaaccgggggaaaatatgcagcatgatttatttgaacacgatccggcaattcgccagttaatcgggcatattgat

SEQ ID NO: 25221 - DNA, 260 bp, Unknown
  Description of Unknown: LeftRegion for integrase A789 sequence
gattaccaaaaacttaagtggtggttacgaaagacaaaaagcactcgagcttattttaagctacacagcaaagaaaaacataataacagaatttgacgatgccttatttttaaggcatgttgaccatatcatagtttatagcagaacggaaattggctttgttatgaaatttggacctatttttaaagagaggatttaagatgaagcatacaccatatggatatattatcgtggacggtaaggcagtagtaaacgaaaaa

SEQ ID NO: 25222 - DNA, 260 bp, Unknown
  Description of Unknown: LeftRegion for integrase A790 sequence
tatcaaattccgcgagtgggattttgcgagcaaacgagataaaggacctcattgattacgtatcagcagataattttaatggtgactacacggaagagatatttgaagaatttgtagagaacatcattgtaaattccagggatgagctgacattcaatttgaaatgcggtctttccctgaaagaaaaggtggtgagataaatggcatatattccatatggatacaaaattcaagatggagtggttactgtcgatgaaaag

SEQ ID NO: 25223 - DNA, 260 bp, Unknown
  Description of Unknown: LeftRegion for integrase A791 sequence
agaatttctgagaaaaccgttggataaggaacttcttattgcggtagaagagagatataagtccaactcagttgaatatagtgcagaaattattacaaaagagatgtataaacgtgcagttgagaaagtagaaaaatgcaaagaataataattaaatgtggtaaagtataattaagataaaaacaggaggtaagttataaatggaaaaatgtacttatacaagaaaatataaaaatgaagatgaaaagggtggcacacca

SEQ ID NO: 25224 - DNA, 260 bp, Unknown
  Description of Unknown: LeftRegion for integrase A792 sequence
gtgaaaagcattaacggagatttaagtcatttagatgaggcacagaaacttcttagatttacatctaaaaaagaagttatcacagaatttaatgatgccttatttctagaatatgttgatacgattaaagttaataacagaaatgaaataactttcgctttaaaatgtgggctgaatttaacagaaaggttggtaaagatatgacacatacaccatatggataccgcatcgaaaatggaatagcggtagttgatgaagtt

SEQ ID NO: 25225 - DNA, 260 bp, Unknown
  Description of Unknown: LeftRegion for integrase A793 sequence
ttccagttctctaaagttgacatcgtgcggatgttcccgatcttcgtcaccattctcggcgtgggccttgcggaagtgatcgaggatgaaaaggctctgaaggccggagttaacgcgctgattgattgccttgaggattgcggcgacgctgagcagggattgcgcctggctttacgtgccatgcttgagggccgcaaataatgaacgtgtctatcagggccattcaggcgatcatggagaacgccattgaagatggtaag

SEQ ID NO: 25226 - DNA, 260 bp, Unknown
  Description of Unknown: LeftRegion for integrase A794 sequence
ttagaagttgatgtatctacaatatatagaaataaaaaagagataataaataaacttatgaaagtaatagtattttaatagtaatatacttgtaatgtactattttattacatctagtaatatgttattatgttatcatacggagtacccgaaagaggtactcttttttatttatgtaaaatgtaaaggaggtggttataatggctgatatattaacaactaaagaatcagatatgattacaatgcttatagaaggtgtt

SEQ ID NO: 25227 - DNA, 260 bp, Unknown
  Description of Unknown: LeftRegion for integrase A795 sequence
gtgggggagtttgagctattcacccgacccgcgcccgccgctggccttgctgatctggtgccgggtgaatttgataattggaaaaaccccgcatctgaagcgatgagcgcgattggctacgttggcaataagcaagatttcactatgggcgctaactggatgcgcgctgccgttctgcgaaacattaatggtggcaactaatgaacgtgtctatcagagccattcaggcgatcatggagaacgccattgaagagggtaag

SEQ ID NO: 25228 - DNA, 260 bp, Unknown
  Description of Unknown: LeftRegion for integrase A796 sequence
ttcccgttctctaaagttgacatcgttcggatgttcccgatctttgtcactattcgcggcgttggtcttgcggaagtgatcgaggatgatgcgtcattgaaagccggtgttaacgcgctggttgattgccttgaggattgcggagacgctgagcagggattgcgcctggctttacgcgccatgcttgagggccgaaaataatgaacgtgtctatcagggccattcaggcgatcatggagaacgcaattgaagatggtaag

SEQ ID NO: 25229 - DNA, 260 bp, Unknown
  Description of Unknown: LeftRegion for integrase A797 sequence
ccaatccacttcggatactggtgcgggtgtaactaccattgtgttgtgttttggcctcgcttttgcggggctttttttcgtgcacaggtagcgttatactgtaaccataggttccacaggcaccccgccgcctaactcctccctgccagccgatgtggggcaagtcttgcggggaatcggcacccattaaccaagtgtgaatgaccatggcgcgaccgacgaagtacgatcctaagttctgtgatgaagcacgcgagatg

SEQ ID NO: 25230 - DNA, 260 bp, Unknown
  Description of Unknown: LeftRegion for integrase A798 sequence
atgccaagaagcgggtgcttctgcaggaaaagacgaccgaccagatccgcttcatgtccgctggggacttcaagaaattgctctaaacccaaccatgacgtacatggactggcttgacaggctggcaaagcatatggttgactaggtgtacatggtgaggccctacccggggcctcaccggtcacccagtaggagccaccttgacgcacatagctagtgagaaacttgagcagattcaagacctgcttgacaaccagctt

SEQ ID NO: 25231 - DNA, 260 bp, Unknown
  Description of Unknown: LeftRegion for integrase A799 sequence
gatgccaagaagcgggtgcttctgcaggaaaagacgaccgaccagatccgcttcatgtccgctggggacttcaagaaattgctctaaacccaaccatgacgtacatgggctggcttgacaggctggcaaagcgtatggttgactaggtgtacatggtgaggccctacccgggcctcaccagtcacccagtaggagccaccttgacgcacatagctagtgagaaacttgagcagattcaagacctgcttgacaaccagctt

SEQ ID NO: 25232 - DNA, 260 bp, Unknown
  Description of Unknown: LeftRegion for integrase A800 sequence
tatcatggaggttgtatgagcaagaaaggcaagaaagctttacagcagatagcggaccagtcagtctatgactttcaagcaagtcagtctatgtggttctgtgagtgagcaatcaaccttatggcgtctaccatgccaattcatgaagtagcagagtatttgcgtcgtcaggtgaagattttagaggaatatgaatagttatggctggcggtcgtccaaccttatacagaccagaatattgtgagacagtcattgaactt

SEQ ID NO: 25233 - DNA, 260 bp, Unknown
  Description of Unknown: LeftRegion for integrase A801 sequence
tggccgaagtgatcactaaaagtggtggtcgcattccatcgaacaacgattgcacaggcccagctggttatgagctattagctgagcattatgcgagtaactactacaaaactggttaacgtgccccaccagtaaacactgccatatactacaaacacctcgccaagcggggtgtttttatattcatactatgtgaaggtatgccatgtggatgggaggcagtaatgagtgaagaaaaccaagacttgtttggttacaag

SEQ ID NO: 25234 - DNA, 260 bp, Unknown
  Description of Unknown: LeftRegion for integrase A802 sequence
ttgatggaaagaaatatttggtctttagcgtcattcataatcttgatggtaatgaatcgacagtaattgctgattttatggggtaacctgcttaacgtgccccaccagtaaacactgccatatactacaaacacctcgccaagcggggtgtttttgtatttatactatgtgaaggtatgccatgtggatgggaggcagtgatgagtgaagaaaaccaagacttgtttggttacaagaatgtaagcctagaagaagttgaa

SEQ ID NO: 25235 - DNA, 260 bp, Unknown
  Description of Unknown: LeftRegion for integrase A803 sequence
atagcaaaacacttggatatttctaggatgtctgtttaccgaatattaaagggggcttaaatgccaattgctatagtaagaaatccagaagatacaatctgttcattcaaagtaactattgtaaataagatagacaatcttatgacagaatgtaagactcataattattcagtgcaagatgtcatccaagaaataacagatgctctgccagataattattttgtttatgaaattgtaaaccttgaaactaattctaccta

SEQ ID NO: 25236 - DNA, 260 bp, Unknown
  Description of Unknown: LeftRegion for integrase A804 sequence
aagctggatttactggaaccattaccgatgcatcagaaggttataatggattccaagagtatgaagttacatgggacatttcaggatgtacctctgacatgttggtgaatgaaattgaaccaatgaaagagggacaagataatccacaaacacagaatgacatccataagaaacaatttggtgattaaaggagaagtgaaatggcagacacacttcataccgtaccaaccaagccgctcactaaagaggataggattgag

SEQ ID NO: 25237 - DNA, 260 bp, Unknown
  Description of Unknown: LeftRegion for integrase A805 sequence
tccacgctggcttggtgccacggagaatcgttgcaagttgtgcttgaaaccctgaaacagtggcacatccgctgtattcgtgaagccttttcccgtcacgggcttccgttgccggtcagtccgtccgggcgtgaactgcgcggctatgatgccatgacggcggcttatgcccatgccagaaagacacggaggatggcacaatgacggaagatttatttggtgatttgcaggatgacaccatcctggcacatcttgacaat

SEQ ID NO: 25238 - DNA, 260 bp, Unknown
  Description of Unknown: LeftRegion for integrase A806 sequence
tccacactggcgtggtgtcatggcgacacgctgctgacagtcctcgaaacactcaagcagtggcacatccgctgtattcgtgaagccttttcccgtcacgggcttccattgccggtcagtccgtccggtcgtgaactgcgcggctatgatgccatgacggcggcttatgcccatgccagaaagacacggaggatggcacaatgacggaagatttatttggtgatttgcaggatgacaccatcctggcacatcttgacaat

SEQ ID NO: 25239 - DNA, 260 bp, Unknown
  Description of Unknown: LeftRegion for integrase A807 sequence
cccgccgaaaaacagcagcacctgcgtgattctgtcctgccagagaccagcaaaccctgaagacatgcacccgcccgcctgagctgacactctgagcgcacccataacacggagtgcatcagatgtctgattatcatcacggtgtccgcgtcgtcgaaatcaacgacggcacgcgcaccatttccaccgtatccacggccattgtcggcatggtctgtaccgcagacgatgccgatgcggccgccttcccgctcaatgag

SEQ ID NO: 25240 - DNA, 260 bp, Unknown
  Description of Unknown: LeftRegion for integrase A808 sequence
attctaaatggtactgcttataatgacattgttcaaaaacacaatttaatagcaaaataaaaaaccgcttatagcggttttttattttttaatatttttctacataccaaccaaattctacatgggcctctaaatcactaagtactttaattctaacttctggagcgccatatccataactatcttcccacaaactagaaaatgaacgagctctatgcaatctatgaactctccctttagaaaaagtaccatttttcttt

SEQ ID NO: 25241 - DNA, 260 bp, Unknown
  Description of Unknown: LeftRegion for integrase A809 sequence
gtctcctgcgcggtggacgcctaccacgacgaaacctcagagaccgctgctgcggcctgactgtcaaccgaaagaggagtattacaccgatgagaaccagagtgaacgtaggccgggtgatcctgccgctccacggcaagggggctttggcatgagcggcctagacgatctgttcggcgtcgaggccgggatcggccacaactccaccgacagctaccgcatcaccgcctccgaactgcgccagttcatcgagcgcgtcg

SEQ ID NO: 25242 - DNA, 260 bp, Unknown
  Description of Unknown: LeftRegion for integrase A810 sequence
tccctccttgaaataaataccggcacaatccggcattttaccggcattcctgctttaaagagacggtgctatttaaatgtgctgatctctttaaggtgttagtgagtgccggattttttatactaatcagaattatactaatttaaattattatattgattgtttttattttaaatgaggagatgagagaggtgaggtgaatgaaaagaaaagagttgagaaaagttaataaaaaagggatttccaaaagacaacagaga

SEQ ID NO: 25243 - DNA, 260 bp, Unknown; identical to SEQ ID NO: 25242
  Description of Unknown: LeftRegion for integrase A811 sequence

SEQ ID NO: 25244 - DNA, 260 bp, Unknown
  Description of Unknown: LeftRegion for integrase A812 sequence
tttcatgttgtgattctcctctattcgtgtcgcttggttgacatgtaggtccatttggaccctacgtccagcatcttttctctttttgggtgaaattatttttacgctcaactttccccttttggttgacatgtgactcgagccaggagtacggatcggacaacccggcccggaatcgccggacctaagaggagagaaatatgtcgtcaaaacccaagcccggtttcatgcgcccgagggcgaaccgggaggagatggcc

SEQ ID NO: 25245 - DNA, 60 bp, Unknown
  Description of Unknown: LeftRegion for integrase A813 sequence
gtggctaaatcaaacgcaggaagaccgtcaaagtatgatgactcattccttggtatcaca

SEQ ID NO: 25246 - DNA, 260 bp, Unknown
  Description of Unknown: LeftRegion for integrase A814 sequence
aaaccgcacttttcaggtgtaggagaacgtagcactggagaagaacaggaaaataaaaccacatatcagcaaatggatcaagcaaaagaggatgcgattttatatatagatcgtatatatcgattggggcaaccagttgaaaacttagaaggctacgatatttggaaagcatggaaagaacaacaaataggagctaaatgatgagtacaaatgcagatatttttgatgaaaaagcacctgaaatcttagctgatttagct

SEQ ID NO: 25247 - DNA, 60 bp, Unknown
  Description of Unknown: LeftRegion for integrase A815 sequence
tgagtaaatcaaacgcaggaagaccgtcaaagtatgatgactcattccttggtgttacag

SEQ ID NO: 25248 - DNA, 260 bp, Unknown
  Description of Unknown: LeftRegion for integrase A816 sequence
cgcgaggagatcgccgcgcgccaacgcgacctgtttgcaagtccgacttccaccgattgagcccgagggggctaccttgacaggtaggtagccgcctctcagaattctctacagccgtcgaagcagtgccacaggatcggtccgcaagtgttgtcgtaaatcccgcgtccgccagtggacaacggtgttgcccccaccacaagggcggggacaaccgctacgcggttccaccgttgaccactgtctcctcgcgaaccttg

SEQ ID NO: 25249 - DNA, 260 bp, Unknown
  Description of Unknown: LeftRegion for integrase A817 sequence
cgcgaggagatcgccgctcgccaacgcgacctgttcgcgagccccacttctaccgattgagcccgaggaggctgccttgacaggtaggtaaccgcccctcagacttctccgcagccgtcgatgtaatgccgcagaatcggtccgcaggggtcgtcgtagatcccgcgtccgccagtggacaacggtgttgcccccaccacaagggcggggacaaccgctacgcggttccaccgttgaccactgtctcctcgcgagccttg

SEQ ID NO: 25250 - DNA, 260 bp, Unknown
  Description of Unknown: LeftRegion for integrase A818 sequence
caatccagcccattagtaaacgattttttaaggtattaccgttgcgatttttcataatatgccctctggttaatatactattataatacactctttgtgtacgtattacaacaaattaccatgtaacaagggcattacagtgtaattaatggtttaaatttatagagtaataaacaaacacaatagatagggtaaagatgatggctaaattaggtcgaccgactaaatattctgatgatgttggagagatagttcttgat

SEQ ID NO: 25251 - DNA, 60 bp, Unknown
  Description of Unknown: LeftRegion for integrase A819 sequence
ttgactaagcaaaagattggaagaccaactaaatacaaagatgaatattgcgacaaagct

SEQ ID NO: 25252 - DNA, 260 bp, Unknown
  Description of Unknown: LeftRegion for integrase A820 sequence
cgcaactacggggtcaacccggccaccatctcccgcatcgtcaaccgggtctactactgatgagcgaccgcgctcaggtggtagtgatcctgccccgcgacggagccctgccgatcgacgtgcagggcgtcaacactcggcgcttggcgatcgagcgcatgtcggagctgggcgaggtggacgagaacagcgtccgctacaaggccggtaccgaagaggccacggtctcgttcgggggtccgaactacgtcagcctgtgg

SEQ ID NO: 25253 - DNA, 260 bp, Unknown
  Description of Unknown: LeftRegion for integrase A821 sequence
acgatgcgcaagaagggtttgcttccggcttatgagccagagtcttacgagtatgtaggaaccagcgaaacgctcggggtggtgaggttcagatcactcagtcatgcgcacgaggaaggatttccatccagcatggtgagcaaggcggtaaacgggaaaatcagcagttacgcagggtacacgtgggagaaggtggcaaaatgaaaaagcatatcgagatgcgcttggcggatggcgcaacgcttgacgacatcaaggca

SEQ ID NO: 25254 - DNA, 260 bp, Unknown
  Description of Unknown: LeftRegion for integrase A822 sequence
cagtggctagacagccacgggattgaatcaccggcgttagaggagcacgagcgggattgagaacaagagtttccgtgcgaccaccactatccacatgaggaccgcgaaggcctgcttgagttgtccaaggaaacacggttgtccaccagatttactgaggttcatgttgtagccaccccaacatgcggtatagcgatgacaactgacagaggtgacggtgggagcgagcgggcacaatccccgagcgacgcataccgtga

SEQ ID NO: 25255 - DNA, 260 bp, Unknown
  Description of Unknown: LeftRegion for integrase A823 sequence
gagtgagtgattatgaaagagatatttgcaatatgcgtactaatactaactatatggtttatcaagaatgaaccactgcaagatgcgctgcttgtactgctgactaagtaaaatctgccctgcttatcgtggggctttttatttgttatactgtataaaactcaggcgagtaaattttatgttaatcaggagattgatatatgacagcaggtagacctacaaaatacaaagaagagttatgcaagaggagtgtagctttt

SEQ ID NO: 25256 - DNA, 60 bp, Unknown
  Description of Unknown: LeftRegion for integrase A824 sequence
tggctaaatcaaacgcaggaagaccgtcaaagtatgatgaatcattccttggtatcacag

SEQ ID NO: 25257 - DNA, 60 bp, Unknown; identical to SEQ ID NO: 25247
  Description of Unknown: LeftRegion for integrase A825 sequence

SEQ ID NO: 25258 - DNA, 260 bp, Unknown
  Description of Unknown: LeftRegion for integrase A826 sequence
acgatgcgcaagaagggtttgcttccggcttatgagccagagtcttacgagtatgtcggaaccagtgaaacgctcggggttgttaggttcagatcactcagtcatgcgcacgaggaaggatttccctccagcatggtcagcaaggcggtaaacggggctatcagcagttacgcagggtacacgtgggagaaggtggcgaaatgaaaaagaatatcgagatgcgcttgactgatggcgcaacgctaaacgacatcaaggct

SEQ ID NO: 25259 - DNA, 260 bp, Unknown
  Description of Unknown: LeftRegion for integrase A827 sequence
acgatgcgcaagaagggtttgcttccggcttatgagccagagtcttacgagtatgtcggaaccagtgaaacgctcggggttgttaggttcagatcactcagtcatgcgcacgaggaaggatttccctccagcatggtcagcaaggcggttaacggggcaatcagtagttacgcagggtacacgtgggggagggtggcgaaatgaaaaagcatatcgagatgcgcttggctgatggcgcaacgctaaacgacatcaaagcc

SEQ ID NO: 25260 - DNA, 184 bp, Unknown
  Description of Unknown: LeftRegion for integrase A828 sequence
caggatcgtaagttcgaacgtgaccagggcaaactggacctcggcgacggcctggcctgaccggccgccgccttttcatccttggaaactctttttcaaagcctatcccactaaatccctttcccttcctctatatcccacaattttctcgctttaccctcctggtttatctcactctctctca

SEQ ID NO: 25261 - DNA, 184 bp, Unknown
  Description of Unknown: LeftRegion for integrase A829 sequence
caggatcggaagttcgaacatgaccagggcaaactggacctcggcgacggcctggcctgaccggccgccgccttttcatccttggaaactctttttcaaagcctatcccactaaatccctttcccttcctctatatcccacaattttctcgctttaccctcctggtttatctcactctctctca

SEQ ID NO: 25262 - DNA, 260 bp, Unknown
  Description of Unknown: LeftRegion for integrase A830 sequence
acgatgcgcaagaagggtttgcttccggcttatgagccagagtcttacgagtatgtcggaaccagcgaaacgctcggggttgttaggttcagatcactcagtcatgcgcacgaggaaggatttccatccagcatggtgagcaaggcggttaacgggactatcagcagttacgcagggtacacgtgggagaaggtggcaaaatgaaaaagcatatcgagatgcgcttggctgatggcgcaacgctaaacgacatcaaggct

SEQ ID NO: 25263 - DNA, 260 bp, Unknown
  Description of Unknown: LeftRegion for integrase A831 sequence
attccagagggagccaagaaatctgatatcttcgtcatagaagaccatattaggtttaagaaatgactcatatacgattaattcaatttttcgaaaaaatgatcagcaaaaattgaatatggaatatcatatgggtctcattattgaagcaacgaagtatttggcgctgggttgttgattttgtgaacaaaccataaatcatggcgagtgttgacgatgaaaatagcgatgatgatactggccgtcaggctttcaataaa

SEQ ID NO: 25264 - DNA, 260 bp, Unknown
  Description of Unknown: LeftRegion for integrase A832 sequence
cctgattgggaatcgcaaaccgcggcaacagttgtctggctgtccaggcgtatccgtgtcggcgactcgctgggtgtgtgggactacctcaccaagcttcccgttgatcagcgcaccagattgttgatggccgcgctggctggaatcccagatgttgatgacccgttcgcgtggatcactgaggaagtggagcaggtcgcatgagcaacggaaaccggctcacccctgagcaggtgaagatgatcctgtcgatgacgcgt

SEQ ID NO: 25265 - DNA, 260 bp, Unknown
  Description of Unknown: LeftRegion for integrase A833 sequence
gaagtggaccccgaagtgttttttcccgagaagggtggaagcgcgaagccggctaaacggatctgcagccggtgcgaggttcgggtcgaatgcttggagttcgcgttggcgaaccgcgagaactacggggtgttcggggggttgtcggagcgggaacggcgtcctctgctcaaagcgatcgatggtgaggatcaggtggcatgagcaacgggaacaggctcaccccagagcaggtgcagacgattctgttgatgactcgt

SEQ ID NO: 25266 - DNA, 260 bp, Unknown
  Description of Unknown: LeftRegion for integrase A834 sequence
gatctggacgccattgaacgggccttcaagggcgcgttcgaggccgcgacggtcgcctgtccggaactgggcgagatgccgtcgcacgaatgccaggcatggcggaagaaggcgcgcaagttttccggtgccaacagcctgcgggtgcggatgtttcgggcctgctcccgctgtgcgctaaacaaaaagggagacgcctgatgcccgctccccatcccaagcgcgccgaggttctggcgctggcgcgcgccggcatgcgt

SEQ ID NO: 25267 - DNA, 260 bp, Unknown
  Description of Unknown: LeftRegion for integrase A835 sequence
gctgattgggaatcgcaaaccgccgcaaccgttgtgtggctgtccaggcgtatccgtgtcggcgactccatcggcgtgtgggactacctcaccaagcttcccgaggaccagcgcacccaactactcatggccgcgttggctggcatccctgatgtggaggatccgttcgcgtggatcactgaggaagtggagcaggtcgcatgagcaacggcaacaggctcacccctgagcaggtgaaaacggtgctggcgatgactcgt

SEQ ID NO: 25268 - DNA, 260 bp, Unknown
  Description of Unknown: LeftRegion for integrase A836 sequence
gaagtggaccccgaagtgtttttccccgagaagggtggaagcgcgaagccagctaaacggatctgcagccggtgcgaggttcgggtcgaatgcttggagttcgcgttggcgaaccgcgagaactacggggtgttcggggggttgtcggagcgggaacggcggcctctgctcaaagcgatcgatggtgaggatcaggtggcatgagcaacgggaacaggctcaccccagagcaggtgcagacgattctgttgatgactcgt

SEQ ID NO: 25269 - DNA, 260 bp, Unknown
  Description of Unknown: LeftRegion for integrase A837 sequence
gctgattgggaatcgcaaaccgccgcaacagttgtgtggctgtccaggcgtatccgtgtcggtgactccatcggcgtgtgggactacctcaccaagcttcccgaggaccagcgcacccaactactcatggccgcgttggctggcatccctgatgtggaggatccgttcgcgtggatcactgaggaagtggggcaggtcgcatgagcaacggcaacaggctcacccctgagcaggtgaaaacggtgctggcgatgactcgt

SEQ ID NO: 25270 - DNA, 260 bp, Unknown
  Description of Unknown: LeftRegion for integrase A838 sequence
gccgaagtggaccccgaagtgtttttccccgagaagggtcgaagcgcgaagccagccaaacggatctgcagccggtgcgaggttcgggtcgaatgcttggagttcgcgttggcgaaccgcgagaactacggggtgttcggggggttgtcggagaaggaacggcggcctctgctcaaagcgaatggtgaggatcaggtggcatgagcaacgggaacaggctcaccccagagcaggtgcagacgattctgttgatgactcgt

SEQ ID NO: 25271 - DNA, 260 bp, Unknown
  Description of Unknown: LeftRegion for integrase A839 sequence
tatttaagatgttacaaaaagagaaagggactaatagctaatattagtcctttttttatataaattggttattatgtaaaaaattgacaataatgtggatgagttttttaactattttgttaatttattatataatacatgtatacgcaaaggggtaaaaactacgaacgtagtataaattaatgtagggggagtttcgtttgtctaaaagatggacagcagaagaagataaattgttagcagtattaatgctaaaatat

SEQ ID NO: 25272 - DNA, 260 bp, Unknown
  Description of Unknown: LeftRegion for integrase A840 sequence
gccgaagtggaccccgaagtgtttttccccgagaagggtggcagcgcgaagccagccaaacggatctgcagccggtgcgaagtcgcggatgagtgcctggagtgggctctggcgaatcgcgagaactacggggtgttcggggggttgtcggagcgggaacggcggcctctgctcaaagcgaatggtgaggatcaggtggcatgagcaacgggaacaggctcaccccagagcaggtgcagacgattctgttgatgactcgt

SEQ ID NO: 25273 - DNA, 260 bp, Unknown
  Description of Unknown: LeftRegion for integrase A841 sequence
gctgattgggaatcgcaaaccgccgcaaccgttgtatggctgtccaggcgtatccgtgtcggcgactccatcggcgtgtgggactacctcaccaagcttcccgaggaccagcgcacccaactactcatggccgcgttggctggcatccctgatgtggaggatccgttcgcgtggatcactgaggaagtggagcaggtcgcatgagcaacggaaaccggcttaccaaggagcaggtgaagatgatcctgtcgatgactcgt

SEQ ID NO: 25274 - DNA, 260 bp, Unknown
  Description of Unknown: LeftRegion for integrase A842 sequence
cctgattgggaatcgcaaaccgcggcaacggttgtgtggctgtccaggcgtatccgtgtcggcgactcgctgggtgtgtgggattacctcaccaaacttccagttgatcagcgcaccaaattgttgatggccgcgctggctggcatcccagatgttgatgacccgttcgcgtggatcactgaggaagtggagcaggtcgcatgagcaacggcaacaggctcacccctgagcaggtgaaaacggtgctggcgatgactcgt

SEQ ID NO: 25275 - DNA, 260 bp, Unknown
  Description of Unknown: LeftRegion for integrase A843 sequence
gctgattgggaatcgcaaaccgccgcaaccgttgtgtggctgtccaggcgtatccgtgtcggcgactccatcggcgtgtgggactacctcaccaagcttcccgaggaccagcgcacccaactactcatggccgcgttggctggcatccctgatgtggaggatccgttcgcgtggatcactgaggaagtggagcaggtcgcatgagcaacggaaaccgacttaccaatgagcaggtgaagaggatcctgtcgatgactcgt

SEQ ID NO: 25276 - DNA, 260 bp, Unknown
  Description of Unknown: LeftRegion for integrase A844 sequence
gctgattgggaatcgcaaaccgccgcaaccgttgtgtggctgtccaggcgtatccgtgtcggcgactccatcggcgtgtgggactacctcaccaagcttcccgaggaccagcgcacccaactactcatggccgcgttggctggcatccctgatgtggaggatccgttcgcgtggatcactgaggaagtggagcaggtcgcatgagcaacggaaacaggctcacccctgagcaggtgaaaacggtgctggcgatgactcgt

SEQ ID NO: 25277 - DNA, 260 bp, Unknown
  Description of Unknown: LeftRegion for integrase A845 sequence
gctgattgggaatcgcaaaccgccgcaaccgttgtgtggctgtccaggcgtatccgtgtcggcgactccatcggcgtgtgggactacctcaccaagcttcccgaggaccagcgcacccaactactcatggccgcgttggctggcatccctgatgtggaggatccgttcgcgtggatcactgaggaagtggagcaggtcgcatgagcaacggaaaccgacttaccaatgagcaggtgaagatgatcctggcgatgactcgt

SEQ ID NO: 25278 - DNA, 260 bp, Unknown
  Description of Unknown: LeftRegion for integrase A846 sequence
gccgaagtggaccccgaagtgtttttccccgagaagggtaaaagcgcgaagccagccaaacggatctgcagccggtgcgaggttcgggtcgaatgcttggagttcgcgttggcgaaccgtgagcactatggggtgttcggggggttgtcggagaaggaacggcgtcctctgctcaaagcgaatggtgaggatcaggtggcatgagcaacgggaacaggctcaccccagagcaggtgcaaacgattctgttgatgactcgt

SEQ ID NO: 25279 - DNA, 260 bp, Unknown; identical to SEQ ID NO: 25275
  Description of Unknown: LeftRegion for integrase A847 sequence

SEQ ID NO: 25280 - DNA, 260 bp, Unknown
  Description of Unknown: LeftRegion for integrase A848 sequence
gccgaagtggaccccgaagtgtttttccccgagaagggtaaaagcgcgaagccagccaaacggatctgcagccggtgcgaggttcgggtcgaatgcttggagttcgcgttggcgaatcgcgagaactacggggtgttcggggggttgtcggagcgggaacggcggcctctgctcaaagcgaatggtgaggatcaggtggcatgagcaacgggaacaggctcaccccagagcaggtgcagacgattctgttgatgactcgt

SEQ ID NO: 25281 - DNA, 260 bp, Unknown; identical to SEQ ID NO: 25264
  Description of Unknown: LeftRegion for integrase A849 sequence

SEQ ID NO: 25282 - DNA, 260 bp, Unknown; identical to SEQ ID NO: 25268
  Description of Unknown: LeftRegion for integrase A850 sequence

SEQ ID NO: 25283 - DNA, 260 bp, Unknown
  Description of Unknown: LeftRegion for integrase A851 sequence
cgactggtgattgagacacagttcgcatccggatccatgctgcagcgcaagctccacatcggctacgcccgcgccggccgcctgctcgacgagctggaagcgcttagcatcgtcggccccgcacaaggcagcaaggcccgcgacgtgctcgtgaacgctgccgacgtccaggccgccgtcgaccgcatcggcggtgcggaatgagcgccaccagtacacagcagcgcgccaccatcgccgaccgccgcgcgctcgtcacc

SEQ ID NO: 25284 - DNA, 260 bp, Unknown
  Description of Unknown: LeftRegion for integrase A852 sequence
atccgcacccagttcctcgagaccgccgaagcacttccgtgtcctgacgggtggtcgtggacggtcgtcgactacgccgcgtatcaccgtgcgtgccaggacggcatcccgacgctgcacctcgagttcgggtgcgacgacgcggtcgagttcgtgtacctcgtcggccgccacgacctcgaacccgagtcggtgacgggatgacgaccaacgttcccatccaccgcgaggaagtcgcacgccgccgcgaggccatcgcc

SEQ ID NO: 25285 - DNA, 260 bp, Unknown
  Description of Unknown: LeftRegion for integrase A853 sequence
atccgcaccgacttcctcacccaggcagaggttctgccctgccctgagggctggtcgtggacggtcgtcgagtacgccgcgtatcaccgggcgtgccaggacggcatccccaccctgcacctcgagtacgggtgcgacgacgacgtcgagttcgtgtatctcgtcggccgccacgacctcgaacccgaggcggtgacgggatgacgaccaacgtccccaccgaccgcgaggaagtcgctcggcggcgcgaggccatcgcc

SEQ ID NO: 25286 - DNA, 260 bp, Unknown
  Description of Unknown: LeftRegion for integrase A854 sequence
atccgcaccaagttcctcgagtcggcggaagctctgccctgccctgagggctggtcgtggacggtcgtcgagtacgccgcgtatcaccgggcgtgccaggacggaatccccaccctgcacctcgagtacgggtgcgacgacgacgtcgaattcgtgtacctcgttggccgccacgacctcgaacccgaggcggtgacgggatgacgaccaacgtccccatccaccgtgaggaagtcgcacgccgccgcgaggccatcgcc

SEQ ID NO: 25287 - DNA, 260 bp, Unknown
  Description of Unknown: LeftRegion for integrase A855 sequence
atccgcaccgacttcctcacccaggcagaagcattgccttgccccgagggctggtcgtggacggtcgtcgagtaccccgcgtaccaccgggcgtgccaggacggaatccccacgctgcacctcgagtacgggtgcgacgacgacgtcgagttcgtgtacctcgttggccgccacgacctcgaacccgaggcggtgacgggatgacgaccaacgtccccaccgaccgcgaggaagtcgcacgacgccgcgaggccatcgcc

SEQ ID NO: 25288 - DNA, 260 bp, Unknown
  Description of Unknown: LeftRegion for integrase A856 sequence
ggacagtacgcccgacagctcgaccaactaaagcgcctagagctagggagaaccaaatgacaggaccgagccccgccgtccgccggcaagtaatcgcgcgcgacctcagccgctgccaatggtgtggcaggcacgtccggacggactcgggctggtactcgctgcagcaccgccgcgcccgcggcatgggaggcagcaaagacaaggcaaccaaccagccggcaaacctcatccttgtccacggcaccggaacgaccgag

SEQ ID NO: 25289 - DNA, 260 bp, Unknown
  Description of Unknown: LeftRegion for integrase A857 sequence
atccgcacccagttcctcgagaccgccgaagcactcccgtgtcctgacgggtggtcgtggacggtcgttgactacgccgcgtatcaccgtgcgtgccaggacggcatcccgacgctgcaccttgagttcgggtgcgacgacgcggtcgagttcgtgtacctcgtcggccgccacgacctcgaacccgaggcggtgacgggatgacgaccaacgttcccaccgaccgcgaggaagtcgctcggcggcgcgagaccatcgcc

SEQ ID NO: 25290 - DNA, 260 bp, Unknown
  Description of Unknown: LeftRegion for integrase A858 sequence
cagatccgcacccagttcctcgagaccgccgaagcgatgccgtgcccggacgggtggtcgtggacggtcgttgactacgccgcctaccaccgcgcgtgtcaggacggagtcccgacgctacacctcgagtacggctgcgacgacgccgtcgagttcgtgtacctcatcggccgccacgaccttgcgccggaggtgtcgtcgtgacaacgaacgtccccaccgatcgcgaggaagtcgcgcgccgccgcgagaccatcgcc

SEQ ID NO: 25291 - DNA, 260 bp, Unknown
  Description of Unknown: LeftRegion for integrase A859 sequence
atccgtaccaagttcctcgagtcggcggaagctcttccctgccctgagggctggtcgtggacggtcgtcgagtacgccgcctatcaccgggcgtgccaggacggcatccccaccctgcacctcgagtacgggtgcgacgacgacgtcgagttcgtctacctcgtcggccgccacgacctcgaacccgaggcggtgacgggatgacaaccaacgtccccatccaccgtgaggaagtcgcacgccgccgcgaggccatcgcc

SEQ ID NO: 25292 - DNA, 183 bp, Unknown
  Description of Unknown: LeftRegion for integrase A860 sequence
cgaaagcaccggagacaacgccgaaccgatcagttgggcctttttgacccggccgaatgagccgggtctttctttccccagtggcaaaacattttcattgccccatcccgctatagtccgatctgtcccagtacatcccactttatcgcgctcccccaccctggtatttctcactctctctca

SEQ ID NO: 25293 - DNA, 183 bp, Unknown
  Description of Unknown: LeftRegion for integrase A861 sequence
gtcaggaagcaccgcaggcagcgaaaggatcagatgacgctttttgacccggccgaatgagccgggtcttcgtttcacccctggcaacaccttttcattctctcgtcccgatattccccatcccctcccgctatatctcgatttttcgcgcacctccccctaggtatttctcaccctctctca

SEQ ID NO: 25294 - DNA, 260 bp, Unknown
  Description of Unknown: LeftRegion for integrase A862 sequence
aaacccaaaccacccgcactgtctgccgaggtgctggcggaagcggcccgcatgctcgccgatggggcgtcacagaacgaagtggcccgcaccctgggtgttgggcagtccaccatcagcgcccacttccgcggccagggctggacccgtgagcagtccatcgagtgggtttcgttcctccgccgctatcggggtgtcgcatgaccacctggaagaaactcaccccggagcagatcgaacggatcgtgtcgttgacgtgg

SEQ ID NO: 25295 - DNA, 153 bp, Unknown
  Description of Unknown: LeftRegion for integrase A863 sequence
caaaggtaaataaaaatgcacagatattgcatagctttgaatgatttagtgtctccatttttatttagtttattttagattggaggggattttttgaaacttaataaaaagcatcaaaaagcaatagaattactgtttgaaggttctttaaag

SEQ ID NO: 25296 - DNA, 260 bp, Unknown
  Description of Unknown: LeftRegion for integrase A864 sequence
aaaccgaaaccccccgccctgtctacggagatcctggaggaagcggcgcggatgctggccgatggtgcttcgcagaacgaggtggcccgcactttgggtgttgggcaggccacgatctcggcgcatttccgcggccagggctggactcgtgagcagtcgattgagtggatttcgttcatccgccgctacaggggtgtcgcatgaggcggggcgcgaaactcccggagtgggtggtggagcggatcgtggcgttgtcgtgg

SEQ ID NO: 25297 - DNA, 260 bp, Unknown
  Description of Unknown: LeftRegion for integrase A865 sequence
aaaccgaaaccccccgccctgtctacggagatcctggaggaagcggcgcggatgctggccgatggtgcttcgcagaacgaggtggcccgcactttgggtgttgggcaggccacgatctcggcgcatttccgcggccagggttggactcgtgagcagtcgattgagtggatttcgttcatccgccgctacaggggtgtcgcatgaggcggggcgcgaaactcccggagtgggtggtggagcggatcgtggcgttgtcgtgg

SEQ ID NO: 25298 - DNA, 260 bp, Unknown; identical to SEQ ID NO: 25297
  Description of Unknown: LeftRegion for integrase A866 sequence

SEQ ID NO: 25299 - DNA, 260 bp, Unknown
  Description of Unknown: LeftRegion for integrase A867 sequence
aaaccgaaaccccccgccctgtctacggagatcctggaggaagcggcgcggatgctggccgatggtgcttcgcagaacgaggtggcccgcaccttgggtgttgggcaggccacgatctcggcgcatttccgcggccagggttggactcgtgagcagtcgattgagtggatttcgttcatccgccgctacaggggtgtcgcatgaggcggggcgcgaaactcccggagtgggtggtggagcggatcgtggcgttgtcgtgg

SEQ ID NO: 25300 - DNA, 260 bp, Unknown
  Description of Unknown: LeftRegion for integrase A868 sequence
aaacccaaaccacccgcactgtctgccgaggtgctggcggaagcggcccgcatgctcgccgatggggcgtcgcaaaacgaagtggcccgcaccctgggtgttgggcagtccaccatcagcgcccacttccgcggccagggctggacccgtgagcagtccatcgagtgggtttcgttcctccgccgctatcggggtgtcgcatgaccacctggaagaaactcacccctgagcagatcgaacggatcgtgtcgttgacgtgg

SEQ ID NO: 25301 - DNA, 260 bp, Unknown
  Description of Unknown: LeftRegion for integrase A869 sequence
caaaatcgccgagcacgagacagtaaaaaaaatagattgagtaataaattgggaaaatgaatattattatttgtttgttataaaattataataaacaaataaataatattaaattaaatggagtgttatgattgtggtagaatgagtactaatattgtactacattataatatcaaatataaaatatatattgaatcagaaaattataataaaaacaaacaccaagattttaaacctatttgtgaaaaatgtgtaatcca

SEQ ID NO: 25302 - DNA, 260 bp, Unknown
  Description of Unknown: LeftRegion for integrase A870 sequence
caaaatcgccgagcacgagacagtaaaaaaaatagattgagtaataaattgggaaaatgaatattattatttgtttgttataaaattataataaacaagttaataatactaaattaaatggagtgttatgattgtggtagaatgagtactaatattgtactacattataatatcaaacataaaatatatattgaatcagaaaattataataaaaacaaacaccaagattttaaacctatttgtgaaaaatgtgtaatcca

SEQ ID NO: 25303 - DNA, 260 bp, Unknown
  Description of Unknown: LeftRegion for integrase A871 sequence
caaaatcgccgagcacgagatagtaaaaaaattagattgaataataaattggaaaaatgaatattactatttgtttgttataaaattataatgaacaaataaataatattaaattaaatggagtgttatgattgtggtattatgagtactaatattgtactacattataatatcaaacataaaatatatatcgaatcagaaaattataatattgataaacaccaagattttaaacctatttgtgaaaaatgtgtgatcca

SEQ ID NO: 25304 - DNA, 260 bp, Unknown
  Description of Unknown: LeftRegion for integrase A872 sequence
gaatgcttgcagtgcggtgaggtgttcgagccggtcacccgcagggcaaggttttgctcgcagaaatgcaagaagcgcgccgcgaatgcgttgcggtcacaaccgtccctgaagatctgcacgcagtgcggcggcgagtttatggggacgtatgcgcagacctgctcgaatgagtgccgacgggcgcagaggtggggcgcatgaccgggcgtgtgctcaccccgatcgaggtggagaaggtggcgtggtggacgcagctg

SEQ ID NO: 25305 - DNA, 260 bp, Unknown
  Description of Unknown: LeftRegion for integrase A873 sequence
gaatgcttgcagtgcggtgaggtgttcgagccggtcacccgcagggcaaggttttgctcgcagaaatgcaagaaacgcgccgcgaatgcgttgcggtcacaaccgtccctgaagatctgcacgcagtgcggcggcgagttcatgggcacgtatgcgaagacctgctcgaatgagtgccgccgggcgcagaggtggggcgcatgaccggccgtgtcctgacccccgttgaggtggagaaggtggcgtggctgacccgcatg

SEQ ID NO: 25306 - DNA, 260 bp, Unknown
  Description of Unknown: LeftRegion for integrase A874 sequence
gagtgcttgcagtgcggtgaggtgttcgagccggtcacccgcagggcaaggttttgctcgcagaaatgcaagaagcgcgccgcgaatgcgttgcggtcacaaccgtccctgaagatctgcacgcagtgcggcggcgagtttatggggacgtatgcgaagacctgctcgaatgagtgccgccgggcgcagaggtggggcgcatgaccggccgtgtcctgacccccgttgaggtggagaaggtggcgtggctgacccgcatg

SEQ ID NO: 25307 - DNA, 260 bp, Unknown
  Description of Unknown: LeftRegion for integrase A875 sequence
gaatgcttgcagtgcggtgaggtgttcgagccggtcacccgaagggcaaggttttgctcgcagaaatgcaagaaacgcgccgcgaatgcgttgcggtcacaaccgtccctgaagatctgcacgcagtgcggcggcgagttcatgggcacgtatgcgcagacctgctcgaatgagtgccgccgggcgcagaggtggggcgcatgaccggccgtgtcctgacccccgttgaggtggagaaggtggcgtggctgacccgcatg

SEQ ID NO: 25308 - DNA, 260 bp, Unknown
  Description of Unknown: LeftRegion for integrase A876 sequence
gaatgcttgcagtgcggtgaggtgttcgagccggtcacccgcagggcaaggttttgctcgcagaaatgcaagaagcgcgccgcgaatgcgttgcggtcacaaccgtccctgaagatctgcagccactgcggcggcgagtttatggggacgtatgcgaagacctgctcgaatgagtgccgccgggcgcagaggtggggcgcatgaccggccgcgtgttgactccggttgaggtggagaaggtggcgtggctgacccgcatg

SEQ ID NO: 25309 - DNA, 260 bp, Unknown
  Description of Unknown: LeftRegion for integrase A877 sequence
gaatgcttgcagtgcggtgaggtgttcgagccggtcacccgcagggcaaggttttgctcgcagaaatgcaagaaacgcgccgcgaatgcgttgcggtcacaaccgtccctgaagatctgcacgcagtgcggcggcgagtttatggggacgtatgcgcagacctgctcgaatgagtgccgccgggcgcagaggtggggcgcatgaccggccgtgtcctcacccccgttgaggtggagaaggtggcgtggctgacccgcatg

SEQ ID NO: 25310 - DNA, 260 bp, Unknown
  Description of Unknown: LeftRegion for integrase A878 sequence
tactactacggcccatacgacaccaaaggtgaagctgaattcatgcttgaaaggaattgaccatgcaatcaccaaactacgcaaggaacgcgcacaaggcagcgcaagcagaaaggcaacacgactaccctatggcggttgtgttttggcaaaaggcagcaaagagcgaatgcacagacaaacaacgccattgggctgagtgtcgctgtcagcactgcaatagatttgtggagatgtgggatgtttaatcaatacgacaa

SEQ ID NO: 25311 - DNA, 260 bp, Unknown
  Description of Unknown: LeftRegion for integrase A879 sequence
cgtaaacggaggccggaatataggaaggatgcgtttgttgaggatgatgatttatggtaactgatgtttttttataagaaaatacttaaagatttcatttatacatatatttataataaaatgaaatgttttaattgtgaaactattggttctattcatataaatgacaactatactttgtgttatgattgctttcattttagagatacaattatatctcattcaaatgtgatacatatatatctattgactgatgatga

SEQ ID NO: 25312 - DNA, 260 bp, Unknown
  Description of Unknown: LeftRegion for integrase A880 sequence
tatcaacaaatgaacaaaacactgctttacaacgaaacgctcttgaaagcgcaggatgtgagctaatttttgaggacaaggcgagcggcaaaaaggctgaacgccctgggttaaaaaaggttctccgtatgctttccagaggtgacaccctagtcgtatggaagttagatcgtcttgggcgcagcatgcgtcacttagttgtgctggtggaagagctgcgtgacagaggcattaacttccggagtctcactgactccatc

SEQ ID NO: 25313 - DNA, 260 bp, Unknown
  Description of Unknown: LeftRegion for integrase A881 sequence
gggagtggggagttatgagtgagtggacgctggtgaaagacaaattaccagaaaaatctgttagagtacgcttgcacatcgaggcaacagggtttactgacggcatgtatctagaaatgagtgatggttcaaaattcttcctgacgtcaatcggtacgtttcatgttgacgatgttaaacgctggagacctctttaaccattgaccataccgtcaaatacgtgtcatactgcatcatattttactactggattagagata

SEQ ID NO: 25314 - DNA, 260 bp, Unknown
  Description of Unknown: LeftRegion for integrase A882 sequence
gaagggcaagtcacaatttttgatatcggatgcgaaaacgacatggagaatacatcctaaaaaggtgaagaaaagctcagaagtagtacaggtattatattccataaatagacgatagaatatccttagtaaccaagttactaaggatatttttatttataagaaaaggaggattaatcatcatggaagcaattcaaagtatcgcgggtgaatttgctgtaacaatggcacttggggtcattactcttttggctgcatac

SEQ ID NO: 25315 - DNA, 260 bp, Unknown
  Description of Unknown: LeftRegion for integrase A883 sequence
gttctcgcagcgaagcaggcaggagagattgacggaagagagttcagagaagcttgcaacaaagacaacttgttgccaatcagacttgacccgaaaaaagaaatgctcaaggctcccagtgacgattctaaagatgatgagatcgaaacgcgcgaacggacgagcaaggtaaaaccaaaagacgctaaggaggcaaactcatgagtgatgtaatgtggcaacccggtgttacaatcgcagacctggaaaaaggcgcaatc

SEQ ID NO: 25316 - DNA, 260 bp, Unknown
  Description of Unknown: LeftRegion for integrase A884 sequence
cgagcgagccggaggagcaggagccggagttcccggcgtatcagttagaggggcttgaaacgctcgtggaggctgacgtcatcaactcccccgagttctggcggcagaagttcggcgagcaggtgacggtcggcgagttgttcggcatcttggggaagctcttcacgaaagcaagcgagtaaggacacggagggcgggacatggaagacctcgtaaaggagctgacgatcgacatggttcctgacggcgacaaccgcatc

SEQ ID NO: 25317 - DNA, 260 bp, Unknown
  Description of Unknown: LeftRegion for integrase A885 sequence
actgagcgagacatcctgcggtcggcggccaaatatttcgccggagagacgaattggtgaaccgcttccagttcgtcgcagaccactccgacacctacccggtgaagcggttgtgccaggtcatcgatatcgcccgctcgtcgtactacgcatggatcaacgccgccgagaaacgagccgcccgggccgcagccgacgctgaactcgccgacaagatccgcgccgtccacacggtggacaacacctacgggcggccccgg

SEQ ID NO: 25318 - DNA, 260 bp, Unknown
  Description of Unknown: LeftRegion for integrase A886 sequence
tggccatgcattggcatctcctataaatccttatactgaatattgtttggtggatattgaaggatggatattagaaccaggaattataaaagaaccttgtatgtatatgtgttgatattaaattatcataaaaaaaattgaataattaaattataaatattatcagtatcaaataatttatattattttatttgataataatggaaaatcttgatattttagaacttaatgccgctattacgttggtatctttgcgtcgt

SEQ ID NO: 25319 - DNA, 260 bp, Unknown
  Description of Unknown: LeftRegion for integrase A887 sequence
gtacacgccatccggtgttattgttttcgaaacaagataacgcttaaagtaagacgttgatggggtggcgctatggtcaaggactggacacccgaagaagacgcgatattgattaccctgtaccgaaacggtatcccgatgcaagagattgcggcacggcttgaccgaaccgaaggctctgttcaaggtcgaattaaccgcaatcgcaagcgctggaaactcatgtcgcgtcaccgctattgttgtttcgaagaacgtgt

SEQ ID NO: 25320 - DNA, 260 bp, Unknown
  Description of Unknown: LeftRegion for integrase A888 sequence
acgtggttccaaaataaacgtgctcatgataaacgtttcgaaagcatgaataaaaattgattataatatattaattaaattaacatattataaagattattaatcatattcataataaatggaatgttattattgtgaaactaataaaaataatatatgtttttattattgtctaaaaccaattatttatttagaaagtaaatattacaatccacagattcatgagaattataaaccaatatgtcaagattgcgttattg

SEQ ID NO: 25321 - DNA, 260 bp, Unknown
  Description of Unknown: LeftRegion for integrase A889 sequence
caaaatcgccgagcacgagacagtaaaaaaattagattgaataataaattggaaaaatgaatattactatttgtttgttataaaattataataaacaagttaataatactaaattaaatggagtgttatgattgtggtaacataagtactgatattgtactacattataatatcaaacataaaatatacattgaatcaaaaaattataatattgataaacaccaagattttaaacacatttgtgaaaaatgtgtaatcca

SEQ ID NO: 25322 - DNA, 260 bp, Unknown
  Description of Unknown: LeftRegion for integrase A890 sequence
ataaaatatcacaatacgaaggaatatttaaagtatatttaagtaaaccatcagaaaaaaaagattatgtggaatattgttttacagataatgaaggatatattttacaaccaggtattaaaagaaaatatcttgattaaaaaattgatattttaaagattagaatagttcatagtaattttaattcataataatccaatatggataaaaagattattattattgatcgcgagaactttgattcttttgaagagaccgca

SEQ ID NO: 25323 - DNA, 260 bp, Unknown
  Description of Unknown: LeftRegion for integrase A891 sequence
gaaatattaaaaaaggctaccgcgctcttgatgtcagactccctgaacagttctcgataatcgggaaactcagagcgcattatcctgtggtcacactctgccatgtgttcggggttcatcgcagcagctacagatactggaaaaaccgtcctgaaaaaccagacggcagacgggctgtattacgcagtcaggtacttgagctacatggcatcagccacggttcggccggagcaagaagcatcgccacaatggcaacccgg

SEQ ID NO: 25324 - DNA, 260 bp, Unknown
  Description of Unknown: LeftRegion for integrase A892 sequence
taatcaacaaatctggaagatacaacaacttgagaaagagcttggctgggaagataatccgaaacgaatgaaagcattcatgaaaaagtatgctggtgtcgatcggattgaatggcttacacctcaaaaggcttggcgtttgattgagtctcttaaaaagctgacagaaaaagagaatgaagcatagtaggaggtcaacaatggaaaaatggatgcacaaactgaaggtcgaggaccttccggaagtttatcaaaattta

SEQ ID NO: 25325 - DNA, 260 bp, Unknown
  Description of Unknown: LeftRegion for integrase A893 sequence
gtaaaacaaatatccatttggtttgccaacagacgcgcttatgatgctagaaaaaattgattataatttgtttatatttataaatgaattataatattgaattatcaatataattatggaatgttattattgcgaaaaaaataaagataatatatgtttttattattgtcttaaacctattttttacatcgaaagtaaaaattatgattcacaattacatgaacaatataaacctatatgtcaggattgcgtatttgaat

SEQ ID NO: 25326 - DNA, 260 bp, Unknown
  Description of Unknown: LeftRegion for integrase A894 sequence
gaaatggaacgtgaatttttaaaaaaggcagcagcgtactttgccaaagaaagtcagtaaggtacgcctatatgaaacaaaaaagatattcttttccaattaccttaatggctcgattacttcatgtttcagtttcatgtttttatgattggctcaagagaggcgtgagcaaaagaacgattcaacgaaatcaacagacgatattggtgaaaatagcccatgaggagacaaagcagagctatggttatattcgattaacc

SEQ ID NO: 25327 - DNA, 260 bp, Unknown
  Description of Unknown: LeftRegion for integrase A895 sequence
ttgaatctacagcggcgtacttcgcaaagctgtccgactgaggtacgcctttatccgtgacaacacccattgctggcctgtccgactgctttgtcgggtgctggatgtgcatccgagtggtttttacgcctggcttcagcagccggattcacggcggcatcatgctgacctgaggctgacggggctgataaagcagttctggctggagtcgggttgcgtttatggttatcgcaagatccacctcgacctgcgggataccg

SEQ ID NO: 25328 - DNA, 260 bp, Unknown
  Description of Unknown: LeftRegion for integrase A896 sequence
gccaggaagtgttacgcaacgatatctcaccaatctttcgcaccactattaatcaatgagttagaggtgattagtgacctgagacagagcattagcgcaaggtgattttttgtccgtaagcgtaaaccgatcgccgtatgtagccattagacaagaattggtaacttagacgcccatctgacacagacggacatctaagtatggaattacaggactggcgaaaagaacctcgtaaaaagtattcgaatgaattcaaactt

SEQ ID NO: 25329 - DNA, 260 bp, Unknown
  Description of Unknown: LeftRegion for integrase A897 sequence
acctacgaggtcaatccatccaccatctcccggacgatcggaagggtctaccactcgtgagcactcactacaccgtctcgaaccagcacgaagacctgttcgctcagaacaaggtccgattgaccatcgacgtcaagctcgagaccgcactcgcgctgatcaagcaggctgaggagctggacaagccgaagccgttcgacccgagcgtctactacaccgaccccgacaagatcggcctgcgcgaccccttccgtcgtccg

SEQ ID NO: 25330 - DNA, 260 bp, Unknown
  Description of Unknown: LeftRegion for integrase A898 sequence
gatcttgcaatgccgtaactaattccggatccatagacggaatcgtacttccctctgggtgtatctcggccagaagggttataagagtgctctcgctgatgatgggtattttctcttcaacgggttcctttcctttcttcagttttgtcaactgcatttgtgttttctccgcctctaaacgaatcttttcgtgatccataatgaccgacagaacgcggatgaaatggacccccgagcttcacgctatatttatcgacacc

SEQ ID NO: 25331 - DNA, 260 bp, Unknown
  Description of Unknown: LeftRegion for integrase A899 sequence
tttattccattgatagatcaatggttttaggttttttgcccatcttttgatatcaaacaaatacccttgggaacttgggtattttttatagcaatggtatcgatttgttgtgacgagagataaggtttgcctgaataggttacactaaactagacagaatttataaagtgttctacactaaagaaaataggagaaccgatatgtctaggaaaatacgtcgccacttcaccgatgattttaagcaacaaattgttgacctt

SEQ ID NO: 25332 - DNA, 260 bp, Unknown
  Description of Unknown: LeftRegion for integrase A900 sequence
gaaatgcaattagacattctaaagcaagcggcagtgattatggtacgaaaagggaaataatcactgctaacaaggataaatatagcatttcaaacatgtgtcgttggttgaagattcctcgctctagctattactacaaagctgttaagccagtacctgaagcagaacttggagaaaaaatcaaatctatcttcctccaaagtaagtctaggtacggagccaggaagataaaaaaatgtctggaagtactaggaatcaac

SEQ ID NO: 25333 - DNA, 260 bp, Unknown
  Description of Unknown: LeftRegion for integrase A901 sequence
agcgaccctacggtcctcgtgtgggtgatcttgatttcgtcggtgctggcggcggtgacggtgacggtgaactggtgcatgatgactccttgcctcgtggccttccgttctggctggccggtcccccaagcatataacagactgttaggagttgtcaacacctaacccggggttgctttcactaacagagtgttatagacttgcttcagcggggcagccagccgggccgccccctgaacccccgggaaggggtgagcatg

SEQ ID NO: 25334 - DNA, 260 bp, Unknown
  Description of Unknown: LeftRegion for integrase A902 sequence
aagttaaattatactttttgccttacaagtataattctactaaataaaattgtacttaaatatagattcaggtagggaacgagtggagaagttaggtcaatgggaaccaatgatatacgcaacgatataaaacctattgacaaaaagggaatctgagcatatcataaagaagtaaacctaataaatatacaataggtagtatgccaaatcaggaaaccttaaaccgcaaaaaagcgcggaaagcggaagtagctagactt

SEQ ID NO: 25335 - DNA, 260 bp, Unknown
  Description of Unknown: LeftRegion for integrase A903 sequence
caaaaagcccggatggcacctgacaccaggcgacaaacgtgctcaagcgcaagcggcgttcggggcgcttgtcgtcagtaagggtggaattttcactttcgcgcagagcgttgaggattacgtaacagcggtacagcgttgacaacagcgtcaagtatcatcatactgtcacgaatacacccatcgtaaggatttaagaaatgaacgacactcagacgtcagtactcaacgcagcgatgaagttatcgcgaatccacggt

SEQ ID NO: 25336 - DNA, 260 bp, Unknown
  Description of Unknown: LeftRegion for integrase A904 sequence
cgtcttaagatggaagtcgatattttaaagcaagcagcgctgatcatgggacgaaagtaaatgtcatgaagcgtaatcgtgacaaatactcggtatcagcaatgtgcgacgtcctacaaatctctagaagtacgtactattatgaagccaaagagcgtcagaatgaagaccatgtaacccatcatatcgttgaaatctttgagaaaaatcggaaagcatacggtacaagaaagattaaagcaaaacttcatgaacgtagt

SEQ ID NO: 25337 - DNA, 260 bp, Unknown
  Description of Unknown: LeftRegion for integrase A905 sequence
ctgcccagaatacgcaaaaatactttggtacgttgaacaaagagatttgtcttattgcacctgacggcacaaaacatgtaactaccaatttgtatcaattttgtaaacaacacggtttgaccccgtcacgtatgagtgatgtaaagaacggcaagtttaaacaacataaaggttggcaagtccaacaggagtaaagattaatgtcacgcgctattaatacgcatgaacctcgtacagctaagatggaagtttcattggtt

SEQ ID NO: 25338 - DNA, 260 bp, Unknown
  Description of Unknown: LeftRegion for integrase A906 sequence
cgtcttcaggaggaaaatgaaatcttaaaaaaggctatggccatatttgcgaaaaaatagaaacagacgagctcatcgatgtaattgtagatcttcaagaccaacatgctacacaaactctgtgtagtgtacttggtatacctaaaagcactttttatcaatcgtttaaaaaaacggaatctaatcgtgaatctgaaaacaagcaactaacaaaaagaatcaaagagatccatgaagaaagcaaaatgcgttatggtgcc

SEQ ID NO: 25339 - DNA, 260 bp, Unknown
  Description of Unknown: LeftRegion for integrase A907 sequence
tccttcgacgtgaaccgatcaaccatctcccggatcgtccggggcatctaccaccgataggaggcccgatgatcgagcaccggcatgaggtcgcgggtgacgaggttgtcatccgcgtcgtggagaccgaggacgaccttgagggcttccgggacttcatccgggctcatctgggcttcctcggcctggactcggagacgaccggactggacatctacagcgacgacttccgttgccgtactgtccagttcggcactccg

SEQ ID NO: 25340 - DNA, 260 bp, Unknown
  Description of Unknown: LeftRegion for integrase A908 sequence
tccttcgacgtgaaccgctcaaccatctcccggatcgtccggggcatctaccaccgataggaggcccgatgatcgagcaccggcatgaggtcgcgggtgaccaggttgtcatccgcgtcgtggagaccgaggacgaccttgagggcttccgggacttcatccgggctcatctgggcttcctcggcctggactcggagacgaccggactggacatctacagcgacgacttccgttgccgtactgtccagttcggcactccg

SEQ ID NO: 25341 - DNA, 260 bp, Unknown
  Description of Unknown: LeftRegion for integrase A909 sequence
tccttcgacgtgaaccgatcaaccatctcccggatcgtccggggggtttatcaccgataggagcatccatgatcgagcaccggcatgaggtcgcgggtgacgaggttgtcattcgcgtagtggagaccgaggacgacctggagggcttccgtgacttcatccgggctcatctgggcttcctcggactcgactcggagacgaccgggctggacatctacagcgacgacttccgttgccgtactgtccagttcggcactccg

SEQ ID NO: 25342 - DNA, 260 bp, Unknown
  Description of Unknown: LeftRegion for integrase A910 sequence
tccttcgacgttaaccgctcaaccatctcccggatcgtccgggggatctaccaccgataggagagggaattggacatccacatcatgaacgggctggcgagggtcatcgtctcgccacccgagcagccggtcctgatgtctgccgcgttcatggcgacctgggactcactggtcgagtccggtgagaccgagaccaccacggcagccgacttcttcaagaagttcgccgcgaccttcactgatctgctgaaccgctaagg

SEQ ID NO: 25343 - DNA, 260 bp, Unknown
  Description of Unknown: LeftRegion for integrase A911 sequence
tccttcgacgttaaccgctcaaccatctcccggatcgtccggggaatctaccaccgataggaggtccgatgatcgagcaccggcatgaggtcgcgggtgacgaggttgtcatccgcgtcgtggagacagaggacgacctggagggcttccgtgacttcatccgggctcatctaggcttcctcggtctggactcggagacgaccggactggacatctacagcgacgatttccgttgccgtactgtccagttcggcactccg

SEQ ID NO: 25344 - DNA, 260 bp, Unknown
  Description of Unknown: LeftRegion for integrase A912 sequence
tccttcgacgtgaaccgctcaaccatctcccggatcgtccggggcatctaccaccgataggagaccgatgatcgagcaccggcatgaagtcgcgggtgacgaggtagtcatccgcgtcgtggagaccgaggacgaccttgagggcttccgggacttcatccgggctcatctgggcttcctcggtttggactcggagacgaccggactggacatctacagcgacaacttccgttgccgcaccgtccagttcggcactccga

SEQ ID NO: 25345 - DNA, 260 bp, Unknown
  Description of Unknown: LeftRegion for integrase A913 sequence
gaagaggagaaccttatcttaaaaaaagcaagtgccatattcatgcaaaacttaaagtaagactcctcgcttgtctatcggttacgctttgaacacgccacaacaaccttgtgtcgtgttttacgtgtcaatcgctccacttactataaatttctaaaacataagccctcaaaaagagatttggataatcaaatttatagaaaacaaatacttgagatttataccaaagcaaacaaaagacttggtgcgaagtctatcaa

SEQ ID NO: 25346 - DNA, 260 bp, Unknown
  Description of Unknown: LeftRegion for integrase A914 sequence
cgtaatttttacgtcagaatacataaatgtattatatattaataatatatacaacatgttatataaatatatgcagagggctttggttgtcctctagcatattatttaaattagttatttgcttcgcaaatatgtctatcgactggagaaaatttttgtttttaactctttagttataaaaactctaccggggtgacaaaatgcgtgaaggaagactatcagttgtctacttgaaagaagaggagaaacagaagagaact

SEQ ID NO: 25347 - DNA, 260 bp, Unknown
  Description of Unknown: LeftRegion for integrase A915 sequence
aattggttttataacaaaaaacgcaatgaaaaaaaattgaaaaataatacattagaatagctcattatagttatatttatcattataatcaaagtgtttgattaaattgataacaatgtctatcacttacgacttccaaaacgggattcctactgtcgcccatcacaatctgggttcgaattttcttgctgtaagtaaacaacaagaactttcggcttatcccactcacaccataatcaacatctacatgaatcagacca

SEQ ID NO: 25348 - DNA, 260 bp, Unknown
  Description of Unknown: LeftRegion for integrase A916 sequence
aattggttttataacaaaaaacgcaatgaaaaaaaattgaaatataatacattagaatagctcattatagttatatttatcattataatcaaagtgtttgattaaattgataacaatgtctatcacttacgacttccaaaatggtcttctcactgtcgcccatcacaatctgggttcgaattttcttgctgtaagtaaacaacaagaactttcggcttatcccactcacaccataatcaacatctacatgaatcagacca

SEQ ID NO: 25349 - DNA, 260 bp, Unknown
  Description of Unknown: LeftRegion for integrase A917 sequence
aatcccgcaaccatctctcggatcgtccgagggatctaccacaccaaaggaggatcatgaacaaccttgagatcgcagagatcgtagagaaggcccacgacgagatggcggcacgaggccgcaccacgggcaacctgatcgacccagagacctgcgaggtctgcctgctcggcgctgtcggcgtggcaggtatcggtgaggaagagctcaagaagaccctctacgaagagttctactacggcggcaagttgcatccggtg

SEQ ID NO: 25350 - DNA, 260 bp, Unknown
  Description of Unknown: LeftRegion for integrase A918 sequence
aacccggcaactgtctctcggatcgtccgagggatctaccacgcaaaaggaggatcgtgaacagcaacgagatcgcagagatcgtagagaaggcccacgacgagatggtggcacgaggccgcaccacaggcaacctgatcgacccagagacctgcgaggtctgcctgctcggcgctgtcggcgtggcaggtatcggtgaggagaagctcaagaataccctctacgaagagttctactacggcggcaagttgcatccggtg

SEQ ID NO: 25351 - DNA, 260 bp, Unknown
  Description of Unknown: LeftRegion for integrase A919 sequence
aatcccgcaaccgtctctcggatcgtccgagggatctaccacaccaaaggaggatcatgaacaaccttgagatcgcagagatcgtagagaaggcccacgacgagatggcggcacgaggccgcaccacgggcatcctgatcgacccagagacctgcgaggtctgcctgctcggcgctgtcggcgtggcaggtatcggtgaggaggagctcaagaaggcccgctacgaagagttctactacggcggcaagttgcatccggtg

SEQ ID NO: 25352 - DNA, 260 bp, Unknown
  Description of Unknown: LeftRegion for integrase A920 sequence
aaccctgcaaccatctctcgactcgtccgagggatctaccacaacaaaggaggatcatgaacaaccaagagatctcagagatcatcgagaaagcccacgatgtcatggtggaacggggccgaaccacgggccagttgatcgacccagacacttgcaaggtctgcctgctcggcgctatcggagtggccggaatcggtgaggaagagctcaagaagacgcactacgacgagttctacgtaggcggcaagttgcgtccggta

SEQ ID NO: 25353 - DNA, 260 bp, Unknown
  Description of Unknown: LeftRegion for integrase A921 sequence
aaccctgcaaccatctctcgactcgtccgagggatctaccacaacaaaggaggatcatgaacaaccaagagatctcagagatcatcgagaaagcccacgatgtcatggtggaacggggccgaaccacgggccagttgatcgacccagacacttgcaaggtctgcctgctcggcgctatcggcgtggccggaatcggtgaggaagagctcaagaagacgcactacgacgagttctacgtaggcggcaagttgcgtccggtg

SEQ ID NO: 25354 - DNA, 260 bp, Unknown
  Description of Unknown: LeftRegion for integrase A922 sequence
aaccctgcaactatctctcgactcgtccgagggatctaccacaacaaaggaggatcatgaacaaccaagagatcgcagagatcatcgagaatgcccacgatgtcatggtggaacggggccgaaccactggcaagctgatcgacccagacacatgcaaggtctgcctgctcggcgctatcggcgtggccggaataggtgaggaagagctcaagaagacgcactacgacgagttctacgtaggaggcaagttgcgtccggta

SEQ ID NO: 25355 - DNA, 260 bp, Unknown
  Description of Unknown: LeftRegion for integrase A923 sequence
aaccctgcaactatctctcgactcgtccgagggatctaccacaacaaaggaggatcatgaacaaccaagagatcgcagagatcatcgagaatgcccacgatgtcatggtggaacggggccgaaccactggcaagctgatcgacccagacacatgcaaggtctgcctgctcggcgctatcggcgtggccggaatcggtgaggaagagctcaagaagacgcactacgacgagttccacgcaggcggcaagttgcgtccggtg

SEQ ID NO: 25356 - DNA, 260 bp, Unknown
  Description of Unknown: LeftRegion for integrase A924 sequence
aatcccgcaaccatctctcggatcgtccgagggatctaccacaccaaaggaggatcatgaacaaccttgagatcgcagagatcgtagagaaggcccacgacgagatggtggcacgaggccgcaccacaggcaacctgatcgacccagagacctgcgaggtctgcctgctcggcgctgtcggcgtggcaggtatcggtgaggagaagctcaagaagaccctctacgaagagttctactacggcggcaagttgcatccggtg

SEQ ID NO: 25357 - DNA, 260 bp, Unknown
  Description of Unknown: LeftRegion for integrase A925 sequence
acagtactcatgtagaaatcagtttacgtgataataacagtgtgaaacttcaaagtgtagtgatcaaaaatcctaagaatagaaaaaacccaacacgtgtaacattcaataatttacagatagcacagttgactagtttgtctcaagtcgttacaacgtatgtttaatttaaagatttttttatattatccattatataaatggaagtagattatgttacaacgaaagaagcttgtcgaattacaggtttcaaagctcca

SEQ ID NO: 25358 - DNA, 260 bp, Unknown
  Description of Unknown: LeftRegion for integrase A926 sequence
aacccggcaactgtctctcggatcgtccgagggatctaccacgcaaaaggaggatcgtgaacagcaacgagatcgcagagatcgtagagaaggcccacgacgagatggtggcacgaggccgcaccacaggcaacctgatcgacccagagacctgcgaggtctgcctgctcggcgctgtcggcgtggcaggtatcggtgaggagaagctcaagaagaccctctacgaagagttctactacggcggcaagttgcatccggtg

SEQ ID NO: 25359 - DNA, 260 bp, Unknown
  Description of Unknown: LeftRegion for integrase A927 sequence
gcgattatttatgacgtgggactgtcgacgctgtacagaaaatttcctgcgagatgctgaaaaggtgccgctgcttcgtcgtatgcaagaacgggggcggctgactggcgatcgttcgatagtgcgagtattgaatggttgccagtcgcggcggattctactggttaagaatgactaattaatgtgtttaatctgaaaccaggcatctgttcaacttttcgtgatcgcttttgttggcatcactattcaagcagtttgcc

SEQ ID NO: 25360 - DNA, 260 bp, Unknown
  Description of Unknown: LeftRegion for integrase A928 sequence
ttaatgttaagcaagcctgtgatgacttacttgtgccacctgcaggtataaggcgtgccatagttggacgtcaagccacctcgcacggttacagatgggctaaacaaactccgacatgcaaagctcaggttagaaaccgtttagacgaactgagggccaataaggagctctcagaacaatttgattatttggactagattatgaaaagcagagaatttaaatcaatcgtgtttggatgcgaacctcaatacgaaattgaa

SEQ ID NO: 25361 - DNA, 260 bp, Unknown
  Description of Unknown: LeftRegion for integrase A929 sequence
taatcttaaactacttagcttatcgtaaattagttaataatgttggtaattatgatgacgcaatcgaaatgtaccacaacaatattacccataattatttggatgtatactataaaagtagacaaaactttgtgtgttataatctattttaaaagacacaaaaacgaaaggacaacctatgtcaacatttaaacgctacgatgaagaatttaaacaatcccttgtcaacctttatcaaactggaaaaaactcagtctgaa

SEQ ID NO: 25362 - DNA, 260 bp, Unknown
  Description of Unknown: LeftRegion for integrase A930 sequence
ttggtatacagatattaagaatcgcttcagcaatggcgatgtaattacggtcgatgtggctaataccaaaacttatttcaatggcagtgaagatcgccctttgcatacattaggcaacctggatgtaagttgattcctgagacaacttttaagagagggtataatgaataaatcgtctctcaaaaggaaggaatttttacatgacaagtcgttacgacaaagaattcaaacaaaacattatcaacctatataagcaaggc

SEQ ID NO: 25363 - DNA, 260 bp, Unknown
  Description of Unknown: LeftRegion for integrase A931 sequence
gcgtacgacgtgaaccccgcaaccatctctcggatcgtccgagggatctaccacacctaaaggaggatcatgaacaaccttgagatcgcagagataatcgagaaggcccacgacgagatggtggcgcgaggccgcaccaagggcgatctgatcgacacagagacctgcaaggtctgcctgctcggcgctgtcggcgtggccggtatcggtgaggaagagctcaagagaacgcactacgacgagttccgcaacggcggcaa

SEQ ID NO: 25364 - DNA, 260 bp, Unknown
  Description of Unknown: LeftRegion for integrase A932 sequence
gcgtacgacgtgaaccccgcaaccatctctcggatcgtccgagggatctaccacacctaaaggaggatcatgaacaaccttgagatcgcagagatcatcgagaaggcccacgacgagatggtggcgagaggacgcaccacgggcaatctgatcaacccagagacctgcgaggtctgcctgctcggcgctgtcggcgtggccggtatcggtgaggaagagctcaagagaacgcactacgacgagttctactacggcggcaa

SEQ ID NO: 25365 - DNA, 260 bp, Unknown
  Description of Unknown: LeftRegion for integrase A933 sequence
gcgtacgacgtgaaccccgcaaccatctctcggatcgtccgagggatctaccacacctaaaggaggatcatgaacaaccttgagatcgcagagatcatcgagaaggcccacgacgagatggtggcgcgaggccgcaccacgggcgatctgatcgacaccgagacctgcaaggtctgcctgctcggcgctgtcggcgtggccggtatcggtgaggaagagctcaagagaacgctctacgacgagttccgcaacggcggcaa

SEQ ID NO: 25366 - DNA, 260 bp, Unknown
  Description of Unknown: LeftRegion for integrase A934 sequence
ttacaaaaacgtaatgcgcagcttgaagaggagaaccttgaatcggttacactaaactagacagaatttataaagtgttctacactaaagaaaacaggagaacagatatgtctagaaaaatacgtcgccacttcaccgatgattttaagcaacaaatcgttgacttgcacaatgcaggtagaaaacgcagtgaactgatcaaagaatatgatttaacgccctcaaccttcgataagtgggtcagacaagccaaactaacg

SEQ ID NO: 25367 - DNA, 260 bp, Unknown
  Description of Unknown: LeftRegion for integrase A935 sequence
ttgacaccaatccaaattaaaaattggttttataacaaaaaacgcaatgaaaaaaattgaaaaataatacattagaatagctcattatagttatatttatcattataatcaaagtgtttgattaaattgataacaatgtctatcacttacgacttccaaaacgggattcctactgtcacccatcacaatctgggttcgaattttcttgctgtaagtaaacaacaagaactttcggcttatcccactcacaccataatcaa

SEQ ID NO: 25368 - DNA, 260 bp, Unknown
  Description of Unknown: LeftRegion for integrase A936 sequence
aaaatgcttgggattagtcgctcggggttgggtggtattttgaagagggtgggcagatgaaatataaaataggtgaagctaatggaaaaaattaacaagtatctaatgtattatgcagtaatagtatcatgcactggcatcacggctatggtttttgttgttttgcaatacttaggaagggtgtgtaaatgaaattcaatttggataggacggattatattttatatccagaatcaatatacaagatcgaggttagactt

SEQ ID NO: 25369 - DNA, 260 bp, Unknown
  Description of Unknown: LeftRegion for integrase A937 sequence
aagaccgccccggcctgacccgtcttctggacaaggcccgcgagggcgacaccgtggttatctggcgctttgaccgtctggcccgctccaccgtcgatctgctgggcttggtcgatgacctccagaagcgcggcatccaccttcgctcccttcatgagggtatcgacacctctggggcaactggccggttcttcctcaccatgttcggtgctctgggtgagttcgagcggaacctgatgattgagcgtgtcaacgccggt

SEQ ID NO: 25370 - DNA, 260 bp, Unknown
  Description of Unknown: LeftRegion for integrase A938 sequence
aagaacgttgatataattcatccacagaattaaagctgctttattttcatcactgataattcccaacgttaattctgtgcgccagtccttaatagcattacctgcatcgttaagtaatttcgggtggtttcggccttagcctgacaatccaccgaaacgggtaaaatcttaccatccctgtatcaccaggagccatcaccatggcaatcatcagggcagtctgcagcgtccacttccgcgccggacttgccgctgcgagg

SEQ ID NO: 25371 - DNA, 260 bp, Unknown
  Description of Unknown: LeftRegion for integrase A939 sequence
gacaccctggtcgtatgggcgttagatcattttgcgggcagcagcgttacttggttgtgatgttggaaaatgaggtcttacagcgaattgatttcatctcacctcctttacatcaattcgccactatcgaaaaaaacatcgtgggttgagtgtggctattggggcacaatcaatctgtgttgccgaccgattcaattggtttgagcgttactttctatgcacgttcgtttggcggggtgttttttatacaaagttgacag

SEQ ID NO: 25372 - DNA, 260 bp, Unknown
  Description of Unknown: LeftRegion for integrase A940 sequence
gttccgtttgttgctgaccgccgtcagggttcgcataagaaggagtcgaacaatgactgacaagtgcgagacggtaggatgcgataacgacgctgagttttttgacgggctgcacaacaaaatatgctccgactgtatggatatggagattgcagaatccgaatgtgaagctgaagactttatgacgattgaggactaaccatgctatcaccaaactactcaaggaacgcgcacaaggcagcgcaagcagaaaggcaaca

SEQ ID NO: 25373 - DNA, 260 bp, Unknown
  Description of Unknown: LeftRegion for integrase A941 sequence
gttccgtttgttgctgatcgccgtcagggctcgcataagaaggagtcgaataatggctgaatggattggtgtgcacgagcaagctccacctctagacgctgcatttgacatatgggttgactatcaagatttgacaggaaggctttgcaattgcttttacaaccataataataataaatattggtactgggacgataagtgtaagaataaaattcaactttacgcttcatatgtaacacactggatgccactaccgcctc

SEQ ID NO: 25374 - DNA, 260 bp, Unknown
  Description of Unknown: LeftRegion for integrase A942 sequence
gtgccgtttgttgctgaccgccgtcaaggtgcgcataagaaggagtcgaataatggctgattggattagcgtgcacgagcagatgccacctgtagatgttgcttttgacttatgggtagattatcaagatatgacgggaagaatgtgcaactgcttctacagccctaaaaacaataaatattggtattgggacgaatcttgcaagaataagatccagttttacgcatcatacgcaacacactggatgccactgccgcctc

SEQ ID NO: 25375 - DNA, 260 bp, Unknown
  Description of Unknown: LeftRegion for integrase A943 sequence
gtgccgtttgttgctgaccgccgccaaggtgcgcataagaaggagtcgaataatggttaatcacaaattaagcgaatggtttggcttgagttactcatcattctgcgtaatgcctcgcgtgcttatggaggatatgccggacgagtggcaagaaaaaatggcagaactgctaaatcagtatgacgatgcattcgatcagtcaaaagttggtattgatggatgcagagttcaagcaactatggataacaagttggttaaga

SEQ ID NO: 25376 - DNA, 260 bp, Unknown
  Description of Unknown: LeftRegion for integrase A944 sequence
gttccgtttgttgctgaccgccgtcaaggtgcgcataagaaggagctgaataatggctgattggattggtgtgcacgagcaagctccacctctagacgctgcatttgacatatgggttgactatcaagatttgacaggaaggctttgcaattgcttttacaaccataagaataataaatattggtactgggacgataagtgtaagaataaaattcaactttacgcttcatatgtaacacactggatgccactaccgcctc

SEQ ID NO: 25377 - DNA, 260 bp, Unknown
  Description of Unknown: LeftRegion for integrase A945 sequence
gttccgtttgttgctgaccgccgccaaggtgcgcataagaaggagtctaataatggctaacttaaagcaccaagatatcattgatgagttttatcgactcgcaaagcttaagtttgaatggatggatgacgagatgatggagaagattgaagaagtcactggcattactccagaaaaactgaactctgacatagaaaccggagttagaaatggcatatctccaagtctgcaacttgttttaatgaagcagcttttacact

SEQ ID NO: 25378 - DNA, 260 bp, Unknown
  Description of Unknown: LeftRegion for integrase A946 sequence
acgctattaatataacataccatgatttgagattgataagatatcgggttttaaccttagtttaataaattggaagatttttgtatgaagatttgctaccgtattttcgtgccatagctatctgaaacgatagtttttacttggttagggggggcttaaaattacatttttgaataagtattttatacttcttatacgatatgtttttattgtattgcagggggacaggggagattggcgggcgaagaccaaagttatca

SEQ ID NO: 25379 - DNA, 260 bp, Unknown
  Description of Unknown: LeftRegion for integrase A947 sequence
atgacagctagacagactaacgtgccgttacactcagtgctaaatgctgaaggcgtactaaacaaccagcttgcagttggtatcgtgaagatggcgtatagcttaccagttatgcatagcgagaaaaataagctgattgtcacaaaccagttcggcagcaagatcatgatgatgtgccttgagaatgtggagatttaacaatgcaaacccaaaacaacgttcgcacaactaacatcgaagtagcaacaatcaaagacgca

SEQ ID NO: 25380 - DNA, 260 bp, Unknown
  Description of Unknown: LeftRegion for integrase A948 sequence
aagttaatggcttttgttgctgaccgccgtcaggggcatcataagaaggaaggtaagtgatggttaattggattggtgtggaagaaaaactaccagaagttaacgaacctgtactgtgcgttggtatgtgtggcgatggtgactttctagctcctgttgtcgcagcgcttcaggatgatggtaagtttattgttggttatagatttgatggagatagagctataggttttttcattgaaacatttgttactcactggatg

SEQ ID NO: 25381 - DNA, 260 bp, Unknown
  Description of Unknown: LeftRegion for integrase A949 sequence
gcctctgcggcttctagtgggatttgtacattcataagtattagtcctgagtttaatgctccccaccacaatggctaaaagggacaggacagcccgaggagcttgttaagtataaccacatcaaaataattaaacaaatgccttgattttattcaatgtgatgattaagattaattcaacttaaacaggaaaggataatcatgaaatttacagacacaaaaacaaccaccattgatgaagtgttaattaacactcgtggc

SEQ ID NO: 25382 - DNA, 260 bp, Unknown
  Description of Unknown: LeftRegion for integrase A950 sequence
ggaaagctagtaccatttgttgctgatcgccgtcagggtgcgcataagaaggctagttgaccatgcaatcaccaaactactcaaggaacgcgcacaaggcagcgcaagcagaaaggcaacacgactaccctatggcggttgtgttttggcaaaaggcagcaaagagcgaatgcagcgataaacaacgccattgggctgagtgtcgctgtcagcactgcaatagatttgtaggggattgggatgtttagcaaaaagagccg

SEQ ID NO: 25383 - DNA, 260 bp, Unknown
  Description of Unknown: LeftRegion for integrase A951 sequence
ggaaagcttgttgtttttgttgctgaccgccgtcaaggtgcgcataagaaggccaattgacatgcaatcaccaaactacgcaaggaacgcgcacaaggcagcgcaagcagaaaggcaacgcgactaccctatggcggttgtgttttggcaaaaggcagcgaagagtgaatgcacagacaaacaacgccattgggctgagtgtcgctgtcagcactgtaatagatttgtggagatgtgggatgtttaataaattatctgcg

SEQ ID NO: 25384 - DNA, 260 bp, Unknown
  Description of Unknown: LeftRegion for integrase A952 sequence
ggaaagcttgtaccgtttgttgctgaccgccgtcagggtgcgcataagaaggccagttgaccatgcaatcaccaaactactcaaggaacgcgcacaaggcagcgcaagcagaaaggcaacacgactaccctatggcggttgtgttttggcaaaaggcagcaaagagcgaatgcagcgataaacaacgccattgggctgagtgtcgatgtcagcactgtaatagatttgtggagatgtgggatgtttaaccaagcaagcaa

SEQ ID NO: 25385 - DNA, 260 bp, Unknown
  Description of Unknown: LeftRegion for integrase A953 sequence
ggaaagcttgttccgtttgtcgctgaccgccgtcagggttcgcataagaagggcaattgaccatgcaatcaccaaactacgcaaggaacgcacacaaggcagcgcaagcagaaagggcacacgactaccctatggcggttgtgttttggcaaaaggcagcacagagcgaatgcacagacaaacaacgccattgggctgagtgtcgctgtcagcattgtaatagatttgtggagatgtgggatgtttaatcaatacgacaa

SEQ ID NO: 25386 - DNA, 260 bp, Unknown
  Description of Unknown: LeftRegion for integrase A954 sequence
ggaaagttaatggcttttgtcgctgaccgccgtcaagggcatcataagaagggcaattgaccatgcaatcaccaaactactcaaggaacgcgcacaaggcagcgcaagcagaaaggcaacacgactaccctatggcggttgtgttttggcaaaaggcagcacagagcgaatgcacagacaaacaacgccattgggctgagtgccgctgtcagcactgtaatagatttgtggagatgtgggatgtttaattatttaaaagc

SEQ ID NO: 25387 - DNA, 260 bp, Unknown
  Description of Unknown: LeftRegion for integrase A955 sequence
ggcaaattagtcccgtttgttgctgaccgccgtcaaggtgcgcataagaaggccagttgaccatgcaatcaccaagctactcaaggaacgcgcacaaggcagcgcaagcagaaaggcaacacgactaccctatggctgttgtgttttggcaaaaggcagcaaagagcgaatgcagcgataaacaacgccattgggctgagtgtcgctgtcagcactgtaatagatttgcaggggattgggatgtttaatcaagcaagcaa

SEQ ID NO: 25388 - DNA, 260 bp, Unknown
  Description of Unknown: LeftRegion for integrase A956 sequence
aacccggcaactgtctctcggatcgtccgagggatctaccacgcaaaaggaggatcgtgaacagcaacgagatcgcagagatcgtagagaaggcccacgacgagatggtggcacgaggccgcaccacaggcaacctgatcgacccagagacctgcgaggtctgcctgctcggcgctgtcggcgtggcaggtataggtgaggagaagctcaagaagaccctctacgaagagttctactacggcggcaagttgcatccggtg

SEQ ID NO: 25389 - DNA, 260 bp, Unknown
  Description of Unknown: LeftRegion for integrase A957 sequence
gatggaaagcttgttgtttttgtcgctgaccgccgtcaggggcattttaagaaggcttagcaaatggaatcaccaaactacgcaaggaacgcgcacaaggcagcgcaagcagaaagggcgcacgactaccctatggcggttgtgttttggcaaaaggcagcacagagcgaatgcacagacaaacaacgccattgggctgagtgccgctgtcagcactgtaatagatttgtggagatgtgggatgtttaatcaatacgaca

SEQ ID NO: 25390 - DNA, 260 bp, Unknown
  Description of Unknown: LeftRegion for integrase A958 sequence
gatggaaagcttgttgtttttgtcgctgaccgccgtcagggttcgcataagaaggcttagcaaatgcaatcaccaaactactcaaggaacgcgcacaaggccgcgcaagcagaaagggcgcacgactaccctatggcggttgtattttggcaaaaggcagcacagagcgaatgcacagacaaacagcgccattgggctgagtgtcgctgtcagcactgtaatagatttgtggagatgtgggatgtttaatcaagcaagca

SEQ ID NO: 25391 - DNA, 260 bp, Unknown
  Description of Unknown: LeftRegion for integrase A959 sequence
ttaaattcggtgctatatgtaagtgtttgtttttattgcttctttttgcatcgaattgacgaatcgaaaattcggcagtctgtatagtttgtgatatttgagtgattttcagcatccaaaaactgtgatttacgtcactgacgaatcaatcgtcgtttttgtagaatgaatcgacaacaacaaaaccaataggaacaaccatgctaaaaacaaaatcaattcaggtttgcactgtggccgatgttttggtgaagactcgc

SEQ ID NO: 25392 - DNA, 260 bp, Unknown
  Description of Unknown: LeftRegion for integrase A960 sequence
ttagttcgcgtcgagattcacggcgattttgaggaaaagctaacggtgattaatcattagtgtgaggcctgtcactgaatcaaaaaccaataacgcttaaattacctaaaaaacacaaggtgattaatatggaatacaaaggaaacataacgctacctagttactcagagttttgcgagtcaattgtgtcttctgcggcaaagtctaacgaaaaggttagatgcaaagaatgtgatggaagtggcgagattgaagaggat

SEQ ID NO: 25393 - DNA, 260 bp, Unknown
  Description of Unknown: LeftRegion for integrase A961 sequence
gtccgacgtgcgggcgtggtggccggcatgccacgaccacgaggaggacccaacgtgaccgtcgtcggcatcttgggggcggccgcgttctcggccatcatcggcgccgctggctacagcgtgtggtggctcaacgagaaacgcaacgcccgaccccaggaacacaacaccatcaccggcaccggtcaggagatcccccgatgacaaccaccgcgccggcggcgaccaccctcaccgccgaccaaaccaccaccgcgcga

SEQ ID NO: 25394 - DNA, 260 bp, Unknown
  Description of Unknown: LeftRegion for integrase A962 sequence
atgaccactgcggcaattttcgatgatgttgtctatccgctgcatttcgacaatgccggcaaggtcaggcaagaaatggaaggcgctgttaactggttctgcaggtggcgcaacgaagagaaagccgttgtgaaagcgagattgttggtcagttgctggggtcaatatctgagccatgagcaggttatccgggaggccgcatgacacacactatcaaaaccattccagacatgctcattgagacatacggaaaccagaca

SEQ ID NO: 25395 - DNA, 260 bp, Unknown
  Description of Unknown: LeftRegion for integrase A963 sequence
atgaccactgcggcaattttcgatgatgttgtctatccgctgcatttcgacaatgccggcaaggttaggcaagaaatggaaggcgctgttaactggttctgcaggtggtgcaacgaagagaaagccgctgtgaaagcgagattgttggtcagttgctggggtcaatatctgagtcatgagcaggttatccgggaggccgcatgacacacactgtcaaaaccattccagacatgctcatagagacatatggaaaccagaca

SEQ ID NO: 25396 - DNA, 260 bp, Unknown; identical to SEQ ID NO: 25395
  Description of Unknown: LeftRegion for integrase A964 sequence

SEQ ID NO: 25397 - DNA, 260 bp, Unknown
  Description of Unknown: LeftRegion for integrase A965 sequence
atcattaatgggacggcgctgtcaggctcctctatatcggattatgtctcggcattcggagacagaaaaatgatatctgaatgggcgaaagacgagagatgcacagtcacagccaaaaccattctaaggcgaattctttcaggcattccgcctgaacaagctatttcctccaaaagaagaccagatatccgggaggccgcatgacacacactatcaaaaccattccagacatgctcatagagacatatggaaaccagaca

SEQ ID NO: 25398 - DNA, 260 bp, Unknown
  Description of Unknown: LeftRegion for integrase A966 sequence
aggaatatcttaatgataagtgagctacaggcatttcacctgatggtgaagcacagcatgattatcatccactgtgaccgggataaattagtgtttaccgatgacctgcagtataccgaacagtggtctgataagtttgataaacccaaagccacatgtcgtttaatcgaacgtgtagcgcgtgacagaggtgaacagttatgaaagcaacagtgcatactatttatgaattattaccatctacccgtggtaacattact

SEQ ID NO: 25399 - DNA, 260 bp, Unknown
  Description of Unknown: LeftRegion for integrase A967 sequence
gaccgcggcgacgccggcgtggcttggggtcgtgccgcgtgcgctgtctgtcgtggcgctggccaactcggtggccgtgacatcactgctggtggccgctgctcgcagcccggccgtatcgacttctagtccgtttgccatgccaatcccccaaccggcaatctcctggttgtgagcgtacctcagcgttgctgagcgacgtgacgcgagaatatgcgacatggccgccaattcgggctggtcagccgcgcctcgagttc

SEQ ID NO: 25400 - DNA, 260 bp, Unknown
  Description of Unknown: LeftRegion for integrase A968 sequence
atgaccactgcggcaattttcgatgatgttgtctatccgctgcatttcgacaatgccggcaaggttaggcaagaaatggaaggcgctgttaactggttctgcaggtggtgcaacgaagagaaagccgctgtgaaagcgagattgttggtcagttgctggggtcaatatctgagtcatgagcaggttatccgggaggccgcatgacacacactgtcaaaaccattccagacatgctcatagagacatacggaaaccagaca

SEQ ID NO: 25401 - DNA, 260 bp, Unknown
  Description of Unknown: LeftRegion for integrase A969 sequence
atgaccactgcggcaattttcgatgatgttgtctatccgctgcatttcgacaatgccggcaaggttaggcaagaaatggaaggcgctgttaactggttctgcaggtggtgcaacgaagagaaagccgctgtgaaagcgagattgttggtcagttgctggggtcaatatctgagtcatgagcaggttatccgggaggccgcatgacacacactatcaaaaccattccagacgtgctcatagagacatatggaaaccagaca

SEQ ID NO: 25402 - DNA, 260 bp, Unknown
  Description of Unknown: LeftRegion for integrase A970 sequence
acttgaatcagcacccaaaggcgctacccattattttcttgtgccaaatggatctggtgagccttattttgttcttgaaaaagaaaagaagttttactggttccacggtcaggatgaaataactaagccacacattttaagttggattaagccaattgaatcactgaaagaagttaaagcggaaagtaaggaggggtgaaatgacaaaaacatccatagatcaagaaattgacgaagctatagccaaaggtggaagcttt

SEQ ID NO: 25403 - DNA, 260 bp, Unknown
  Description of Unknown: LeftRegion for integrase A971 sequence
aaaatgcttgggattagtcgaacggggttgggtggtattttgaagagggtatgtagatgaaaattgatgaaattatttgggcgcaatgtcgcggattccaagtttatgggaaaacaaaacatggaataaaaaaatacaattattctggtcttatatcggctggttttggtattcataaattcacagatgaagacggaagcaagtattttgtaaaagttaattcatacaatgatagtttaatgactataaacccttgggat

SEQ ID NO: 25404 - DNA, 260 bp, Unknown
  Description of Unknown: LeftRegion for integrase A972 sequence
aagatgcttgggattagtcgaacggggttgagtgggattttgaagagggtgagtagatgaaatttaatttagataaaacggattatattttatatccagaatcaatatataagagcaaggttagatttacgctatttgttggtgtgtattgggtttggtgcttgttatggcttggtgttgctttatacaatattgttgttaatcacaattatgctgatggattaatttcaggtgtaattcatattttatgtttatttatg

SEQ ID NO: 25405 - DNA, 260 bp, Unknown
  Description of Unknown: LeftRegion for integrase A973 sequence
aagatgcttgggattagtcgaacggggttgggtggcattttgaagagggtgagtagatgaaatttaatttagataaaacggattatattttatataccgagtcgatgtataagagcaaagttagatttacgctatttgctggtgtgtattgggtttggtgtttagtttggtttggcattgctttatacaatattgtagtgaattacaattatattgaaggtttgatttcaggtgtgattcatattttatgtttgtttatg

SEQ ID NO: 25406 - DNA, 260 bp, Unknown
  Description of Unknown: LeftRegion for integrase A974 sequence
atgcggaggaatatctaaataatgaacggtgaacaggcttttgacattctggtaaaatataacattatcgttattcattgtgaccgtgatcagattgttttcactgatgatctgcgttatgaagaaccttatgacggtgataaacgatcagcaacgttaagactgattgaacgtgtagcgcgtgacaaaggtgaacagctatgactcatactattcatgaattattacccactacccgtgggaacatcactgaattagcc

SEQ ID NO: 25407 - DNA, 260 bp, Unknown
  Description of Unknown: LeftRegion for integrase A975 sequence
gagcgtaacgggcaatataatttatttacaaatatcagcgagcaatacggcaatggataaaaaatcaaagcaaatctacgacgcagtttttaaaaacgtgcatctaacgagtagtaagaaagcggctgaacaccttggcttaacatcaactgaaatatccagggcagcgcgtaagcattcgattatcagcgaaacaatacgccgtaataagattaagcagggtggcgcttatgctagagcgttttcgttgatgcctgtga

SEQ ID NO: 25408 - DNA, 260 bp, Unknown
  Description of Unknown: LeftRegion for integrase A976 sequence
aacttgtaaaaaggaaaacaaataatgtctaatggaaaagtaaatatctaccatgcttggaaaatgttcctattgtttgaaaataaaacagtgaaagaggttacctcaattattgaaacttttgaaaattttcttcataataatgagccagaaaaagcgcaagaatttttagataccttatttgaaaaggaaaacaagtaatgagggattttaaccttaaagaagaaacaagaaagtttcaaaaatctttaatagaacaa

SEQ ID NO: 25409 - DNA, 260 bp, Unknown
  Description of Unknown: LeftRegion for integrase A977 sequence
aacggtcgtaccgtgaatgcaattaggcaaaagtactatagtattttaaattgcaggtaacgtacttgtatatggtgcgttgacgataggaaatgcattatatacggtgttacctggcgaagtgaacagttattattaaaagaaaaaaagcgatggcaaattatttttgcaaaaaataaaatatgtatgattgatataaggttgagtgataatttagagttaatggcagaaatgcaagataatacagtagatttaattta

SEQ ID NO: 25410 - DNA, 260 bp, Unknown; identical to SEQ ID NO: 25339
  Description of Unknown: LeftRegion for integrase A978 sequence

SEQ ID NO: 25411 - DNA, 260 bp, Unknown
  Description of Unknown: LeftRegion for integrase A979 sequence
tgtttgatagtcatggcttatgaggtggaaggtgatggggtgatggggagtgttgtctcagatagggatctcaatctgctcatcttggttctgaaggtaactgttcgaggggtaaggggtcaacaagggaaacctgttcgacttgatacatacatattcgggaaggctgtgcttgtcaacatcagaacagggcggtttgtatgaatggataccccaaaaggatcagaaatcagatactcgcccttcatgaacaagggatg

SEQ ID NO: 25412 - DNA, 260 bp, Unknown
  Description of Unknown: LeftRegion for integrase A980 sequence
tgctgatccggagaataatcttccggcacaaaatagcgatacaccttagcctcaaatggtgatgagacgtatagcacgtcaccgccgtttccaggggcagcgccctggcagaaatggagcgcgagctgatcgtcgagcgtacccgcgccggtttagccgcagcgagggagcaggggagagtaggtggacggcgccgggtaatgaccactgaggttgtggagcgatgccgcaggatgttgggtacgggcgcaacccggcag

SEQ ID NO: 25413 - DNA, 260 bp, Unknown
  Description of Unknown: LeftRegion for integrase A981 sequence
ttgatgctaaaaggcaagcaacgcttcttctatctgcacgtcattattgctactaaattctgtaagaagctaccacaccatactcaagttaatcataaagatggcaataaattgaataacgctaaagataacttagagtggtgtactgctagcgaaacatactgcacaaataccatggagacatacaaggagatattactttgtactctaagatgaaagaactaagagctgtaggaatgacctataagcagatagcacag

SEQ ID NO: 25414 - DNA, 260 bp, Unknown
  Description of Unknown: LeftRegion for integrase A982 sequence
ctgtgctgcgcgggagttggcggatgcgctcgtccgccggggtgaacgagcggtgggcggggcatcgtgaaggcggcggggatgagccggacgcggtccttgatggggccgggggtgcgggctgatgccgcaggtgggtgcgttgtgcgagcaggtgacggtgctggccaacatggtcgagtcggcgctgggcggcggtcatgaacgggctgtcgaagatcacggcgtcgcaccgctccaggacggcggcgatctatctg

SEQ ID NO: 25415 - DNA, 260 bp, Unknown
  Description of Unknown: LeftRegion for integrase A983 sequence
cggtcgctcgggatgaaggagagccaggtcgggaaggtgcgcaagacgatctccgccctgcgcaaggggagggaccccgcctcgatcgccgccctccgcacccgctcctgacgacgtcccgcggcgccgggcgtcgtccgtcccccgcagggtcccgaaattccggtttcgggacccccggccgtccacgggcccgtcgtatggacccgcgccgtccgcgatcccctcgaggggccgcgcgaccgagtccgcgcccgatc

SEQ ID NO: 25416 - DNA, 260 bp, Unknown
  Description of Unknown: LeftRegion for integrase A984 sequence
atcccaggttcccggcgaggtcaccggccggggggaggagagcatgtcgcgcgagcgcccgtggcacgtccagcgcagcggcgtgccaaccgcgaccggccagcagcactgggaccgggcctatcagctcctcctgcagtgggcgacgaccccgtccgtctcggccgagacgctgaggccgaacctgccggaggcatcccatgcgtgtagccctgtacgctcgcgtctcgaccagccatcaagtcgagcaccaaaccatt

SEQ ID NO: 25417 - DNA, 260 bp, Unknown
  Description of Unknown: LeftRegion for integrase A985 sequence
cccagcagtttgcgagctttggtccggatggtccgtgagcacggcagagcgccgtcaacggagaccagtgatgccatgtcccaccaccaggatttggacgcgcctgccgctcgatgcgaaggcagcgacgacgcagctctgggccgagctgatgctccggcgcgcagcacgcgagcgcgcacgcaacggggtgcccggccatgaccgcgcattccaaggtggagggacggcacctgcggctgctcgcccttgtctacatc

SEQ ID NO: 25418 - DNA, 260 bp, Unknown
  Description of Unknown: LeftRegion for integrase A986 sequence
ctcttcttcagcggcgtgatgagtcgccgcccgctcaaggagaaggcatatgcaactgaagctgacatttgccgaggaagacagcaaccggcattccgaaccgcctgcctgtgagaagctggacgccgaggcgcgggcaaaggcgttgcgccgacttgccctgatgatcgcacgcatgctgacagccagggaggcctgcgatgattgaacacagcaagattgccactggccatctggcacggcaggctgtcgtctccctg

SEQ ID NO: 25419 - DNA, 260 bp, Unknown
  Description of Unknown: LeftRegion for integrase A987 sequence
atcacgccggggccggcgaggtgtcctgtgcaccttgtccggccagcggtccgaagatcccggctcggctggtcccacgctccaatgggcggatcttccgccctcgccgccggtgccatgagggatgtggcttctcatgttgcccggaggacgaccgccggccggaaggcggggacggcccgaccggaaggggattctgcatgaagcggttgaatggcctgttcgatgaggctgcccgggatcggcgcgccctggccgcg

SEQ ID NO: 25420 - DNA, 260 bp, Unknown
  Description of Unknown: LeftRegion for integrase A988 sequence
atcattgatgctttgctgcgccagacggaacaggagagcaacgatgcaactgaacctaaccttcgcagacctgccgccggacgacgacagtctgtgggaacaactcgaccaaacaacacgccaagcggtgatcgacagtctggctcaagcgatcgcgaaggtcgtgacgggcaacgatccgatccacagggagaacgctgatgagtgacactgccaacaagatcggtaccagccatttgcagcgtgcggcgttcgtctac

SEQ ID NO: 25421 - DNA, 260 bp, Unknown
  Description of Unknown: LeftRegion for integrase A989 sequence
gagaagcgcaatgggcaagctgccaaacgtcgttccagcaagtctgcagtcgttgcaatcgataccgcgccagatgaacatgacgttcgacgccgtcgagcttcaggggatgagcgcggtacaacgcgcaagggcaatcacccatctggcgagcctgctgatgcaggccgccggcgtcgccacgccaaaggagcataacgatgacgaacgttgatcgtttgcctgagctccttcttaaacgcaaagcggtgatctacgtc

SEQ ID NO: 25422 - DNA, 260 bp, Unknown
  Description of Unknown: LeftRegion for integrase A990 sequence
gtggcacagcaccgggcaactcaggacttagacgcacaagcaggtgtcgtatgccaggacagcccattcccccccgtctcaaccgccagcagtccatcaactgtggtttcagttatcccttgcccaacgccaacgattagtagccgttctcaccgagatgatgagcgctcagatcactgctctggagcaggaggaacatcatgaatcctaaacgtgaagctcacaaccgccgctctgagaagattgacgatctgcatctc

SEQ ID NO: 25423 - DNA, 260 bp, Unknown
  Description of Unknown: LeftRegion for integrase A991 sequence
ggctggcggtccgtgaggggagcgaaccgtcatgtgcggcggaagcgacgtcggccccagaagccggtccgagctcatctgagcgaacgtgtgtgggacaggttgccggaagtgaaccggcaagtggtcgttcagcagttggtgaggctggtcggccgtgtgatagcgccggatgagcggggtcggccgtgacggcggtgatgccctgggagagggctaacagcaaggtatgtgaccgtcacctgcagcggttggcggtg

SEQ ID NO: 25424 - DNA, 260 bp, Unknown
  Description of Unknown: LeftRegion for integrase A992 sequence
ccgcttatggcccgtagcggcctgatgctctttctgcgccggggcatgtggggatgggttcaggcgctgacagcaacagcaagcaccccgcgagagcagatttacccatcgtcaattgcttggccgctgcacggcgggcacagcgccgttgttcacgtccttgcgacaatcgccatgagcatcaacgatcggagatcaccatgaatgtacatctcaaagtccagcctcatcacctcgaacgcggcgcctacctgtacatc

SEQ ID NO: 25425 - DNA, 260 bp, Unknown
  Description of Unknown: LeftRegion for integrase A993 sequence
gcatcgggagacatcgcatgtccgtcgccccccgtcacaacgctcccccccgcgcctgacgacggcgccctgcccaccgccgacggtcgcaccgacgatctgggcccgcctgccggccgaccggcagcgacagctccgcgacctgctcggccaactcctcgccaggctcctggcggccacccgaagcgaggaggccggccatgagtgacgcaacccgctcgcccaagctccggccctggcatctcgaccgggcggccttc

SEQ ID NO: 25426 - DNA, 260 bp, Unknown
  Description of Unknown: LeftRegion for integrase A994 sequence
ccgctcatggcccgtagcggcctgctgctctttttgcgccggggcatgtggggatgggctcaggcgttagcctcaacagcaatcaccccgcgagagcagaattacccgtcgtcaattgcttggccgctgcaccgcggacacagcaccgtcgttcacgtccttgcgacaatcgccatgagcatcaacgatcggagatcacgatgaatgtacatctcaaagtccagcctcatcacctcgaacgcggcgcctatctgtacatc

SEQ ID NO: 25427 - DNA, 260 bp, Unknown
  Description of Unknown: LeftRegion for integrase A995 sequence
ccgcttatggcccgtagcggcctgatgctctttctgcgccggggcatgtggggatgggctcaggcgctgacagcaacagcaagcaccccgcgagagcagatttaccaatcgtcaattgcttggccgctgcacggcgggcacagcgccgttgttcacgtccttgcgacaatcgccatgagcatcaacgatcggagatcaccatgaatgtacatctcaaagtccagcctcatcacctcgaacgcggcgcctacctgtacatc

SEQ ID NO: 25428 - DNA, 260 bp, Unknown
  Description of Unknown: LeftRegion for integrase A996 sequence
ccgctcatggctcgtagcggcctgatgctctttctgcgccggggcatgtggggatgggttcaggcgctgaccgcaacagcaaccaccccgcgagagcagagttacccatcgtcaattgcttgtccgctgcatgtcggacacagcgccgtcgttcacgtccttgcgacaatcgccatgagcaccaacgatcggaggtcaccatgaatgtacatctcaaagtccagcctcatcacctcgaacgcggcgcctacctctacatc

SEQ ID NO: 25429 - DNA, 260 bp, Unknown; identical to SEQ ID NO: 25426
  Description of Unknown: LeftRegion for integrase A997 sequence

SEQ ID NO: 25430 - DNA, 260 bp, Unknown
  Description of Unknown: LeftRegion for integrase A998 sequence
gaggtgattcgcgatgaacgtgcaatcaaaaccgtaccgcgtagcgtctcagtccctcgtaaagcttctgaccccgagcacgacagtcccgcgtccgtggctcgatctgccaccggagacgcggaaacaagtcgctcaaaagcttgcccgcctgttgatgcggatgcggtcaatacgcgcgccgacaaaggtagaccggcatgctgagagcgacgaatagcccagacgagcgcgtcacggccgagcatcgcggcaagctc

SEQ ID NO: 25431 - DNA, 260 bp, Unknown
  Description of Unknown: LeftRegion for integrase A999 sequence
aaggtgatccacgatggcccaacgctgtcccttgaaccgggagcccgcttctccgaccaggctgcacctgcaccgctctcggcaccaaccgatccggccgtggccgaacctcccggccgagacgcaaacgcagatggctcagcttctggccgagcttgtgcgacggatgcacccgatgccgccgatcagggagaagaccgatgctgagcgtcacgaacccttctgacgagcggctgacctcggcccgccgcgccaagctg

SEQ ID NO: 25432 - DNA, 260 bp, Unknown
  Description of Unknown: LeftRegion for integrase A1000 sequence
gacccaccgaccgcttccaggtcgcgttgcgtatcgacccctgccgaccttggcagatccacccggccgtccgacggccgacgttccgcgcctgtggcccaatctgtcgaccgcgacgcaaacccagattgctcaaacaatcgccgcgctgatgcggcgaatgcaagcgatccccggcacgcccggaaggggactgggtcgtgctgatcagctcgaacatcgctgacgagcggctcacgaccgcacaccgagccaagttg

SEQ ID NO: 25433 - DNA, 260 bp, Unknown
  Description of Unknown: LeftRegion for integrase A1001 sequence
aaggcccgtagcggcctcatgctttttctgcgccgcggcatgtggggatgggcccgtgcactgcctgcggcggcaagccctgatcaagacccgttttacctgtcattggccacccgaccggcgcgcgacgacctcagcgccgtcgttcatgtcctggcgaccatcgccatgagcatccaccaacggagagcaccatgaacatgaatgtacacctcaaagtccagtcccatcaccgtgaacgcagcgcctacctctacatc

SEQ ID NO: 25434 - DNA, 260 bp, Unknown
  Description of Unknown: LeftRegion for integrase A1002 sequence
ctgccgctcaaggcccgtagcggcctcatgctttttctgcgccgcggcatgtggggatgggcccgtgcactgcgtgcggcggcaagccctgatcaagacccgttttacctgtcattggccacccgaccggcgcacagcgccgtcgttcatgtcctggcgaccatcgccatgagcatccaccaacggagagcaccatgaacatgaatgtacacctcaaagtccagtcccatcaccgtgaacgcagcgcctacctctacatc

SEQ ID NO: 25435 - DNA, 260 bp, Unknown
  Description of Unknown: LeftRegion for integrase A1003 sequence
atgcgagtcgttgcgctggcagaggcgttgcgccgttcatcacaggacgaggaatgccagagtgaacatcagctctccccggagacggccaaagatccagatatggtcgagcctgccgccagcaatccagcgtcagctggcggcgacgatagcgcaggctttgtgctcgcgcccaactgcccgctacgccggtgacaccgatgttgagagattatgccgtagatgaacggataagcaccacgcagcaggccaagctggcc

SEQ ID NO: 25436 - DNA, 260 bp, Unknown
  Description of Unknown: LeftRegion for integrase A1004 sequence
ccggtcgcggcgaccgaaccacggatgtcgatggagaatcgaacgaagctgagcgtcgaggcactacacgatctgacctctctggttgagcagctcgaacacgatgccgatcgatccaaaagacctttgggccacgctgtcaacgacactgcagcgccaaatcgtcagcgaggtcgccgcggtgctggcggaggcaagtcatgaaatccgagctgatcaaaccgatacacctggcgcgacgggcggtcgtgtacatccgg

SEQ ID NO: 25437 - DNA, 260 bp, Unknown
  Description of Unknown: LeftRegion for integrase A1005 sequence
gacggcgcagcatcggacaactcacccacggaggaggttgccgatgaccagacgaccgcggccgacgtcccaactctcgctcgctctctctgttccgcttcaggacatcgccgttccggacgaagtcgtgcaagtactggcggatctcctcttggaagctgtgggcgcccatctcgacatggagaacagggaggaggcccatgagcaccaagatcaccgttgatcatctgggccgcggtgccgcgatctatgttcgccaa

SEQ ID NO: 25438 - DNA, 260 bp, Unknown
  Description of Unknown: LeftRegion for integrase A1006 sequence
ggcggcgcagcatcggacaactcacccacggaggaggttgccgatgaccagacgaccgcggccgacgtcccaactcttgctcgacctcacggttccactcccgggtctcgtggttccggacgaggtcgtgcaggtcctggcggacctcctcctggaagccgtcggagcccggctgggcacgaagaaaaaggaggacggccatgagccccaagatcaccgctgatcacctcggccgcggtgccgcgatctatgtccgccag

SEQ ID NO: 25439 - DNA, 260 bp, Unknown
  Description of Unknown: LeftRegion for integrase A1007 sequence
tcgaaagccttaaggaactcatccaaatccaccgagcagcacgctgaacgattcgatccgcacccgcgtcactcaccggatgcgtacctctgttccgcttcaggacatcgccgttccggacgaagtcgtgcaagtactggcggatctcctcttggaagctgtgggcgcccatctcgacatggagaacagggaggaggcccatgagcaccaagatcaccgttgatcatctgggccgcggtgccgcgatctatgttcgccaa

SEQ ID NO: 25440 - DNA, 260 bp, Unknown; identical to SEQ ID NO: 25437
  Description of Unknown: LeftRegion for integrase A1008 sequence

SEQ ID NO: 25441 - DNA, 260 bp, Unknown
  Description of Unknown: LeftRegion for integrase A1009 sequence
aaatcccgtccttcgaggaagaaggagaaggatgatgcgaagcaggcgacatcaaaatcgcgaccaactcgttctgcagttggagcgccaaaatcttcaggttccggcggtcaagaacgtcaaagggttggtggaagcgctggcggatcttctgctggaagctatggacgcgaacagaatgacgaagacgggaggcgttgatgaacacgaagatcacgcctgaccatcttggccgcgccgctgtggtctatgtccgccag

SEQ ID NO: 25442 - DNA, 260 bp, Unknown
  Description of Unknown: LeftRegion for integrase A1010 sequence
aaatcccgtccttcgaggaagaaggagaaggatgatgcgaagcaggcgacatcaaaatcgcgaccaactcgttctgcagttggagcgccaaaatctacaggttccagcggtcaagaacgtcaaagggttggtggaagcgctggcggaccttctgctggaagctctggaagcgaacagaatgacgaagacgggaggcgttgatgaacacgaagatcacgcctgaccatcttcgccgcgccgctgtggtctatgtccggcaa

SEQ ID NO: 25443 - DNA, 260 bp, Unknown
  Description of Unknown: LeftRegion for integrase A1011 sequence
gtgcccgtggcggcgaccgagccactcgccttgccgcgcgctcccacaaaattgagcgttgaagctttgtttgatctactaaatgtggtagatatagagcatcatgagcacggcacccgaagatctttggacgacactgccggtgacgctaaggcgccagatcatcggcgatatcgccgtggttctggcggaggtctttcgtgatgtccgagttgattcagccgatacatctgaagcgcaaggcagttgtctacatccgg

SEQ ID NO: 25444 - DNA, 260 bp, Unknown
  Description of Unknown: LeftRegion for integrase A1012 sequence
agctctcgtccttcgaggaagaaggagaagggtaatgcgaaacaggcgacatcaaaatcgcgaccaactcgttctggagttggagcgtcaaaatcgccagattccggtggtcaagaacgtcaaaggactggtggaaacgctggcggatcttctgttggaggctttgggagcgagcaaaacggcgaagacgggaggcgtagatgaacacgaagatcacgtctgaccatctgggccgcgccgcgattgtctatgtccgccag

SEQ ID NO: 25445 - DNA, 260 bp, Unknown
  Description of Unknown: LeftRegion for integrase A1013 sequence
attccagaggaggatgcgcatgccctgccgacccaaacgcctctcgcagccgaaacaaccgaagcccaagcagctctgcttgccgttggacgacagccggaaccgtcccccggcagcaccagcgacacccgcaattctggaggccttggccgagctgctgctggtggccgcgaacaagatggcggagggcgcgcaaaatgatgcatgcaaagatcaccgttgagcatctcgcccgcagtgcgctcgtttatgtccgtcag

SEQ ID NO: 25446 - DNA, 260 bp, Unknown
  Description of Unknown: LeftRegion for integrase A1014 sequence
gcaagatcccgtccttcgagaaagaaggagaagggtgatgcgaagcaggcgacatcaaaatcgcgaccagctcgtcctacagctggagcgtcaaaatcttcaggttccggtcaagaacgtcaaagggttggtggaagcgctggcggatcttctgctggaagctttggaggtgaacaggacggcgaagacgggaggcgcagatgaacacaaagatcacgtctgaccatctcggccgcgccgctgtagtctatgtccgtcaa

SEQ ID NO: 25447 - DNA, 260 bp, Unknown
  Description of Unknown: LeftRegion for integrase A1015 sequence
caagcaaccgcaatcgaatattatgagcaagaggcaaatcagattaagctgagtatggaggctctactcgagcttttatcgacagcggattgtcccgacgcacatgagcatggatccagccgatctttggtcgacgctgacgcccgcgctccgacgccagatcgtcgaagacgtcgccgcaattttggcggagatccctcatgaagtccgagctggtcacaccaagccacttggcgcgcaaagccgtagtctacatccgg

SEQ ID NO: 25448 - DNA, 260 bp, Unknown
  Description of Unknown: LeftRegion for integrase A1016 sequence
cgggcgcagctctcacgagcaagcgctgagccgggcaagacagaggggcgagcgacattggttagtttgccgaacgaagctgccgccaccgggatggttccgagcggacggccgcatgagatcacgatgcttctggcgagcctggtgctctcgacccgtcatccgtcaggtctgtcgccaggtgatggaggatatcgagcatgtccatgaacagcgagtctcatcaaaagatcacaagcgcacacctgtcacgcatggcg

SEQ ID NO: 25449 - DNA, 260 bp, Unknown
  Description of Unknown: LeftRegion for integrase A1017 sequence
cccgtgtcagcgacacagggatatgtcgaagccacgaatcagattaaacttagcgttgaggcagttcgggatcttatcgcggtggcggaaactctcgaaggtcatgatgatcgaaccgaagaacctgtgggcgacgttatcacccgcgttgcggcgtcagattctcgacgacgtcgccgcagttctggcggaggtatgtcatgaagtccgaactggtcaagcccacccatctggcacgcagagcggttgtttacgtccgt

SEQ ID NO: 25450 - DNA, 260 bp, Unknown; identical to SEQ ID NO: 25449
  Description of Unknown: LeftRegion for integrase A1018 sequence

SEQ ID NO: 25451 - DNA, 260 bp, Unknown
  Description of Unknown: LeftRegion for integrase A1019 sequence
cccgtgtcagcgacacagggatatgtcgaagccacgaatcagattaaacttagcgttgaggcagttcgggatcttatcgcggtggcggaaactctcgaaggtcatgatgatcgaaccgaagaacctgtgggcgacgttatcacccgcgttgcggcgtcagattctcgacgacgtcgccgcagttctggcggaggtgtgtcatgaagtccgaactggtcaagcccacccatctggcacgcagagcggttgtttacgtccgt

SEQ ID NO: 25452 - DNA, 260 bp, Unknown
  Description of Unknown: LeftRegion for integrase A1020 sequence
tctattgcagcaacagaatacctgcatgacaaaagcgatcaaacaaaattgagtattgaggcgttacttgatattatcaatgtgtcagactgtattcatgacagcaaatgcgaatccgaaggacctctggaaacaactaccgtcgtccctccgacggcagattgtcgacgatgtcgcagcggttctgacggaggttctgcgtgatgtcagagctgatcaaacccacccatctggcacgtaaggcggtcgtctatatccga

SEQ ID NO: 25453 - DNA, 260 bp, Unknown
  Description of Unknown: LeftRegion for integrase A1021 sequence
cggcacaggtcctcactccgaaggccacgccgcaatacgctttcatggtgtattgaacggcctcgcgatcaaactctcgcacgctctgtgcaccgaagttgccgtcccagccgtgtttgattccaactcagtgcgggataacggtgcgctcgtacgcgtgctggccaacctcgtgctgcgcgcccacgaggagcttgcccatgtctactaactccgctcagaaggtcacctcggaacatctccggcgagatgcctttctt

SEQ ID NO: 25454 - DNA, 260 bp, Unknown
  Description of Unknown: LeftRegion for integrase A1022 sequence
gggtcaggcccgccccgaggggctcggcgccatcgtctatcacggcatgctaaacggattgacgctgatcctgacgagcccgcccgttgcgtccttcgtccagagtgccccggcaggcgccgtcgcccccatcccgaacaaccgtcaattcgtgcgcctgctcgccaacatgctgctgcgaacccagtcggaggtggtccatgtttactgaaacccatcagaaggtcactgccgatcatctcagccgcgatgccttcctc

SEQ ID NO: 25455 - DNA, 260 bp, Unknown
  Description of Unknown: LeftRegion for integrase A1023 sequence
ggcttgcgcaaggcggatgggcgccatcgtctttcacggactatggcgcggcctggccgtgctgatcacgccagagcagtccacgatagcgcgacagcagtcggcgcctcggtccacgacaacttcagtggtcgcgcacgatcgccagctcgtgcacatgctcgccaatatggtgctggcagcagagacaggaggaagccatgtctactgataacgccatgaagattagtgccgatcacctgcggcgcgatgcatttctc

SEQ ID NO: 25456 - DNA, 260 bp, Unknown
  Description of Unknown: LeftRegion for integrase A1024 sequence
cgacacaggtcctaactcagaaggccacgcggccatacgctttcatggcctgttgcacgggctggcgatccaacgcccggacgcttcgcgcatcgaggctcccactccaaccgtgcctgcttccaactcagtgcgggataacggcgcgcttgttcgcgtgctcgccaacctcgtactgcgcacccacgaggagcttgcccatgtctactaactccgctctgaaggtcaccgctgaacatctgcggcgtgatgcgttcctc

SEQ ID NO: 25457 - DNA, 260 bp, Unknown
  Description of Unknown: LeftRegion for integrase A1025 sequence
tgcttgcgcgaggcgcatgggcgccatcgtctttcacggactgtggcgcggcctggcagtgctgatcgcaccacctcaatccgcgatagcgcgacagcagtcgacgcctcggttcaagacaacttcaatggtcgcgcacgaccgccagctcgtgcacatgctcgccaatatggtgctggcagcagagacaggaggaagccatgtctactgataatgccatgaagattagtgccgatcacctgcggcgcgatgcatttctc

SEQ ID NO: 25458 - DNA, 260 bp, Unknown
  Description of Unknown: LeftRegion for integrase A1026 sequence
cggtcaggcctgcgccaaggacatgggcgccatcgttttccacggcctttggcaagggctggcggtgctgatcgcgcagcctcccccgccgacgcatcggcggctggaatcacggcctacggcttcggtcgcagtgcacgatcgccagctcgtgcacatgctcgccaacatggtgctggcagcagagacccgagggaaccatgtctactgacatcgccataaaggttgacgccgaccatctgcggcgtgatgcattcctc

SEQ ID NO: 25459 - DNA, 260 bp, Unknown
  Description of Unknown: LeftRegion for integrase A1027 sequence
ggcttgcgcgaggcgcatgggcgccatcgtcttccacggactgtggcgcggcctggcagtactgatcgcaccacatcaatccgcggtagcgcgacagcagtccgcgcctcggttcaagacaacttcaatggtcgcgcacgaccgccagctcgtgcacatgctcgccaatatggtgctggcagcagagacaggaggaagccatgtctactgataatgccatgaagattagtgccgatcacctgcggcgcgatgcatttctc

SEQ ID NO: 25460 - DNA, 260 bp, Unknown
  Description of Unknown: LeftRegion for integrase A1028 sequence
ggcttgcgcgaggcgcatgggtgccatcgtctttcacggactgtggcgcggcttggcagtgctgatcgcaccgcatcaatccgcggtagcgcgacagcagtcagcgcctcggctcaagacaacttcaatggtcgcgcacgaccgccagctcgtgcacatgctcgccaatatggtgctggcagcagagacaggaggaagccatgtctactgataatgccatgaagattagtgccgatcacctgcggcgcgatgcatttctc

SEQ ID NO: 25461 - DNA, 260 bp, Unknown; identical to SEQ ID NO: 25459
  Description of Unknown: LeftRegion for integrase A1029 sequence

SEQ ID NO: 25462 - DNA, 260 bp, Unknown
  Description of Unknown: LeftRegion for integrase A1030 sequence
ggcttgcgcaaggcggatgggcgccatcgtctttcacggactatggcgcggcctggccgtgctgatcaagccagagcagtccacgatagcgcgacagcagtcggcgcctcggcccacgacaacttcagtggtcgcgcacgatcgccagctcgtgcacatgctcgccaatatggtgctggcagcagagacaggaggaagccatgtctactgataacgccatgaagattagtgctgatcacctgcggcgcgatgcatttctc

SEQ ID NO: 25463 - DNA, 260 bp, Unknown
  Description of Unknown: LeftRegion for integrase A1031 sequence
cggcaccccgcgcgccgagggcgccgcagcgctgcgctatcacgggatgctgcatggacttcctgtactcgtgaagtcaacggcggccatagacgctacctcgcgtcaccaggcgcagcgtatggacgcctttccggctggcgacgagtttgtgcgtttgctggccaacctcgttctacggacccattcggagctcgcccatgtctactgaacggtatcagaaggttacgcacgaccacttgcgccgtgatgccttcctc

SEQ ID NO: 25464 - DNA, 260 bp, Unknown
  Description of Unknown: LeftRegion for integrase A1032 sequence
ggcggccgtcaccgctcgcccgggcgtgcactcttcctgttcaaagggatggcggcctggatgcgtggcgtcagcgaaacggccccgagtccggccgccgccgctctgcgcaatgagtcgaggttaccggcggggatggaacagcacctgatcaatctggtcgccagcatggcgctggcgacggcacgggagagtaggccatgatgggtgagcagcacgcaaaaatacaggcgcgacacctgaagagaaatgcctatctc

SEQ ID NO: 25465 - DNA, 260 bp, Unknown
  Description of Unknown: LeftRegion for integrase A1033 sequence
gagaaacgcaatgggccagctgccaaggggtgttccagcacgaccgcaatcgccggcggtgacgccgcgccagatgaacatggtgttcgacaacgtcgagcttcagggaatgaacacggcgcaacgcgcaaaggtaatcacgcatcttgcaagcctgctgatccaagccgccggcgcaaccaccgggaaggagcgtgacgatgacgaacgctgatcgtttgccggcgccccttctccagcgcaaggcagtagtttatgtc

SEQ ID NO: 25466 - DNA, 260 bp, Unknown
  Description of Unknown: LeftRegion for integrase A1034 sequence
acgtcagaaattccttgtgttcctgaaaataaaggagttgaacacaggaaaaacaataatgatacaaaagcatctactaccaaccactcaaccagccaacaaagaaaggctaagtcgtctaataaaactaacagcaaggttagtagacaagatactcgtaagcaaaagtctcaacgagtcgatagtaaggagtaaaccagatgaatagtaaagttaggacgacccatctggaacgccatgctgttgtatatttaagacaa

SEQ ID NO: 25467 - DNA, 260 bp, Unknown
  Description of Unknown: LeftRegion for integrase A1035 sequence
ataacgtccgaatcttcttgtgttcttgatgatattgaagtcgaacacaagaaaaaaaatgagaaaaaagcatctactagcaaccgctcaagccaaaaacgaagaaaggctaagtcgccttataaagctaacagcacggttagtggacaaaatactctccactcaacagacagagaaagcgataactaggagtgaaccagatgaataataaaattagttcaacccatctggaacgccgtgctgttgtgtatttaagacag

SEQ ID NO: 25468 - DNA, 260 bp, Unknown
  Description of Unknown: LeftRegion for integrase A1036 sequence
gaggaagaaagccccggaggattcggcaatgagaaagcagtgtcgtgcgcaaatcgatctgttccttcccctaacccggcccggcgatatgagtggtgccgaacgccagaaggctatggcgcttctgcgagtattgctaatggaagcggcggcgcagccggccaacgagcctcaggccaacggcaaaaagggagcaggcaatgagtaagatcacgcccgtgcatctggcccgtgccgcattcgtgtacatccgccaatcc

SEQ ID NO: 25469 - DNA, 260 bp, Unknown
  Description of Unknown: LeftRegion for integrase A1037 sequence
cgctcggttcaagaagccgaagggataagccatgagaaagcaatttcgcatgcaattggatctgttcgtgacagcccggccggtagacctgagcgacacccagcgccgggaagccttaacactccttcaattactgttgacggaagcggcggcaaagctggccggcaagcggttcgccgacggcggaaaggaggcgggcaatgagtaagattaccgccgaccatcttagccttagcgccttcgtctacgtccggcagtcg

SEQ ID NO: 25470 - DNA, 260 bp, Unknown
  Description of Unknown: LeftRegion for integrase A1038 sequence
tgctcggtgcaagaagccgaagggataggccatgagaaagcaatttcgcatccaattggatctgttcgtcacagcccggccgatggatctgagcgacacccagcgccgggaagcattgacactcctgcaactattactgacggaagcggcggtaaaactagccgccgagcggtgcgtcgacggcagaaaggaggcggacaatgagtaagatcaccatcgaccatcttgccctgagcgccttcatctacgtccggcagtcg

SEQ ID NO: 25471 - DNA, 60 bp, Unknown
  Description of Unknown: LeftRegion for integrase A1039 sequence
ggcggtgcaaaatcgggccgcggtgggcgtgcgctgctttctgggctcctttcctgcggt

SEQ ID NO: 25472 - DNA, 260 bp, Unknown
  Description of Unknown: LeftRegion for integrase A1040 sequence
cgagatcatcgaggaaatctgcgagatcaaccgcgaactattgcgccgccgcgaggcgctctgaggggcgccggtgaaccagtctccgctgtcactcacccacatcatcgatccgcaatcggccggcgtactcatcgccaacatgctcgaggcctggctcaccgccgggcccgcgctggagctgaccgaggaggccgccgatgaacaccaagatcaccccccaacatcaaagcaagccggcgtacatctatatccggcag

SEQ ID NO: 25473 - DNA, 260 bp, Unknown
  Description of Unknown: LeftRegion for integrase A1041 sequence
attcccggagacacccatgccgcgccgaccgacaccccagcaacccgacctcttcgacccgccatcggatcccgagcggttcccgacgccgcaatggcagagcttgcccgacgaggtgcggctgacgctgaccgagttgatggcccgcttgatcctcgaccacgccatcgacgcggcccgccaacggaaggacgcgggacatgatgcatgagaagatcggaccgcatcatctggagcgcaaagcgctcctctatgtgcgg

SEQ ID NO: 25474 - DNA, 260 bp, Unknown
  Description of Unknown: LeftRegion for integrase A1042 sequence
caacgcgatgatggagtcgcattggaggaagtcgatgaacaagcacgacacgcccgcaccggcctcgggcagacagatgagcctgatcttcgagccccggagggtggacgggatgagcgaggcggaacggacgaaggccgtaatcacgcttgctcaaatcctgatgcaagccgctggcctcgtcgtcgaggagctcggcgatgaccggcactgatttaatcccggcgcaactgctgaagcgcaaggccgtcgtctacgtg

SEQ ID NO: 25475 - DNA, 260 bp, Unknown
  Description of Unknown: LeftRegion for integrase A1043 sequence
cgagatcatcgaggagatctgcgagatcaatcgcgaactattacgccgccgcgaggcgctataaggggcgtcggtgagccagtcgccgctgtcgctcaccgactccatcgacctgcaatcggccggcgtactcatcgccaacatgctcgaagcctggctcaccgcagagcccgcgctggagttgaccgaggaggccgtcgatgaacaccaagatcaccccccaacatcagagcaagccggcgtacatctatatccgccaa

SEQ ID NO: 25476 - DNA, 260 bp, Unknown
  Description of Unknown: LeftRegion for integrase A1044 sequence
cattcgggaggtctcaatggcttacaagtccaaggtgttgcagctcgatctgttttcctgtccccgcaattccgcgataaccccgacaccaagatgggacacgctgccagcgcagacgcgccagacattgacgtcgctgatcgtgcgcctgctgctcgaccacgtcaacgatcccgtcatggaacagcgggaggtgcgtgatgatctgtgagaagattgggccacagcatctcgaccgcaaggcgatcctgtatgtgcgg

SEQ ID NO: 25477 - DNA, 260 bp, Unknown
  Description of Unknown: LeftRegion for integrase A1045 sequence
ccgagcgcaatcagattcgcatgggaggaagtcgatgaaacagaacaacgtgtcagctccgatcgcgggcaggcagatgagcctgatattcgaaccccgcagattggacgggatgcgcgacgcggagcgggcgaagacagtactgcttcttgcccaaatcctgatgcaggccgccggcctcgtcgtcgaggagttgggcgatgacgaagtctgatctgatcccgacggtgctgctgaggcgcaaggccgtcgtctatgtg

SEQ ID NO: 25478 - DNA, 260 bp, Unknown; identical to SEQ ID NO: 25477
  Description of Unknown: LeftRegion for integrase A1046 sequence

SEQ ID NO: 25479 - DNA, 260 bp, Unknown
  Description of Unknown: LeftRegion for integrase A1047 sequence
cattcgggaggtctcaatgccgcgcaagtccaagacgttgcaactcgacctgttctcctgcccacgcgatttcgagatatccaagacaccacggtgggacaccctgccagcgcagacacgccagacgttgacgtcgttgatggtgcgcctgttgctcgagcacttcgacgatcccgttgcggagctgcgggaggtgcaagatgatctctgagaagatcgggccgcagcatctcgagcgcaaggcaatcctgtatgtgcgg

SEQ ID NO: 25480 - DNA, 260 bp, Unknown
  Description of Unknown: LeftRegion for integrase A1048 sequence
ccaagcgagaatggaatcgcacgggagaaagtcgatgaaacagcacaacgtgcctgcaccgacctcgagcaggcagatgagcctgatattcgaaccccacaggctgggggggatgaacgaagtggagcgggcgaaggccttgctgacgctcgctcaaatcctcatgcaggccgccggtctgatcgtcgaggagctcgatgatgaccagcactgatctgatcccaactgcgctcttgaagcgcaaggccgtcgtctatgta

SEQ ID NO: 25481 - DNA, 260 bp, Unknown
  Description of Unknown: LeftRegion for integrase A1049 sequence
cgaagtggacgtagaatcactcaggaggaccatgatgagatcccgcaatacgctggtgccggcgtcgggccggcagctcgacctgatattcaaaacccggatgctcgacggactgagcgacaaggatcgcaagaaggcgatttcaacgctggcttgcctgctgatgcaggccgcaggcctcgtcgtcgaggagctcaacgatgagcaacactgatttgattccgacagcgctgctcgcgcgcaaagccatcgtctacgta

SEQ ID NO: 25482 - DNA, 260 bp, Unknown
  Description of Unknown: LeftRegion for integrase A1050 sequence
aagccacatgacccagtcaccgcacacgaagctcctgtcgacgatctcaagtgcgccgcgccctacgacgccgcgccagatgaacatggtgttcgagtcagcagtaacccaggacctgaccgcgagcgagcgggccagcgtggtcgcgcaactggccaccctgcttctgcaggccgccggccggcccacggaggatgacgatgacgaactctgaactgctgcctgccaccgtgctgcggcgcaaggccgtcgtctacgta

SEQ ID NO: 25483 - DNA, 260 bp, Unknown
  Description of Unknown: LeftRegion for integrase A1051 sequence
aatcggggagacttcgatgccacgcacgccagcccatcagttcgagttgttctccgctccgcagggaaaggagaagttgagcttgccgcagtggcaggcgctgcccgagggaatacgccagacgctgtccgaactgatggcgcaactgttgctcgaccacgtcgccgacgaaagcgcgcctctcccgggggagatgcggcatgatgcatgagaagatcaggccacatcatctggagcgcaaggcggtcctctacgtgcgg

SEQ ID NO: 25484 - DNA, 260 bp, Unknown
  Description of Unknown: LeftRegion for integrase A1052 sequence
ccgcgtgaaggaggggatcatgcaaccaagacgccacttgcaacggggcctgttcgaggaggatcgccagacgccggagattccggcgtcgcagagaagcactctcgtccgcctgatcgaggggctgctggtcgaggccctcgccgacggcgccaatatcgagacgggcacgccaaccacagagacgagggaggccgctgatgagcaagatcacgcctgagcacctcgcccgtcaggccgtcgtctacatccgtcagtcg

SEQ ID NO: 25485 - DNA, 260 bp, Unknown
  Description of Unknown: LeftRegion for integrase A1053 sequence
catgagccatcatgtacccggacatcgccgacggttgacgacatcggcatcacttcagccatctcccccacgccagctgagcctgaccctcgagtccccggtccttcgggacatggcctcgagcgaacgggccgccgtggtcgcacggctggcaacgctgctgctgcaggcagccggccttcaaaccgaaaggagtgatcatgacgacctctgatctgttgccggccgcagtgctgcgtcgcaaagctgtcgtctatgtg

SEQ ID NO: 25486 - DNA, 260 bp, Unknown
  Description of Unknown: LeftRegion for integrase A1054 sequence
tgccgcggcatgaccatgggaacgccacgcgtcgatcttgcgacgctaatcgaattgaacaggctggtctctggcggcagcaaagcggcacccttccgaagtggacgtagaatcactcaggaggaccatgatgagatctcgcaatacgctggtgccggcgtcgggccggcagctcgacctgatattcgaggagctcaacgatgaccatcactgatttgattccgacagcgctgctcgcgcgcaaggccgtcgtttatgtg

SEQ ID NO: 25487 - DNA, 260 bp, Unknown; identical to SEQ ID NO: 25486
  Description of Unknown: LeftRegion for integrase A1055 sequence

SEQ ID NO: 25488 - DNA, 260 bp, Unknown
  Description of Unknown: LeftRegion for integrase A1056 sequence
cgaggtgaacatagaatcactcaggagcaagatgatgagatcccgcaacacgctggtgccggcgtcgggccggcagctcgacctgatattcaaaacccgcacgctcgacggactgagcgacaaggatcgcaagaaggcaatatcaacactggcttgcctgctgatgcaggcggccggtctggccgtcgaggagctcaacgatgaccagcactgatctgattccgacagtgctgcttgaacgcaaggccgtcgtttacgtt

SEQ ID NO: 25489 - DNA, 260 bp, Unknown
  Description of Unknown: LeftRegion for integrase A1057 sequence
cgaagtggacgtagaatcactcaggaggaccatgatgagatcccgcaatacgctggtgccggcgtcgggccggcagctcgacctgatattcaaattccggatgctcgacggactgagcgacaaggatcgcaagaaggcgatttcaacgctggcttgcctgctgatgcaggccgcaggcctcgtcgtcgaggagctcatcgatgagcagcactgatttgattccgacagcgctgctcgcgcgcaaagccatagtctacgtg

SEQ ID NO: 25490 - DNA, 260 bp, Unknown
  Description of Unknown: LeftRegion for integrase A1058 sequence
cgaggtgaacatagaatcactcaggaggaagatgatgagatcccgcaacacgctggtgccggcgtcgggccggcagctcgacctgatattcaaaacccgcacgctcgacggactgagcgacaaggatcgcaagaaggcgatatcaacactggcttgcctgctgatgcaggcggccggtctggccgtcgaggagctcaacgatgatcagcactgatctgattccgacagtgctgcttgaacgcaaggccgtcgtttacgtt

SEQ ID NO: 25491 - DNA, 260 bp, Unknown
  Description of Unknown: LeftRegion for integrase A1059 sequence
cgaggtggacgtagaatcactcaggaggaagacgatgagatcccgcaatacgctggtgccggcgtcacgccggcagctcgacctgatattcaaacctcggacgctcgacggagtgagcgacaaggaccgcaagaaggcggtagcaactctggcttgcctgctgatgcaggcggccggtctggtcgtcgaggagctcaacgatgaccagcactgatttgattccgacagcgctgctcgcgcgcaaggccgtcgtttatgtg

SEQ ID NO: 25492 - DNA, 260 bp, Unknown
  Description of Unknown: LeftRegion for integrase A1060 sequence
ctacgttttctgcagagcgactcacgccagccaggagacgaccatgcagcgcaggcaatgccgaaccgaccagccagacctgttttccacgacggctccaacgccgagccttccgggcgaagtgcgggaacgaaccctcccgctgatagaagccttgttgagggaagcggtggtgagccagacgggacgggaggcagatcatgaagatcaccgctgaacatctcgcgcgcggcgcctatgtctatgtccggcagtcgacg

SEQ ID NO: 25493 - DNA, 260 bp, Unknown; identical to SEQ ID NO: 25481
  Description of Unknown: LeftRegion for integrase A1061 sequence

SEQ ID NO: 25494 - DNA, 260 bp, Unknown
  Description of Unknown: LeftRegion for integrase A1062 sequence
ggactcacggccatccaggaggcgcgccatgaaggcactaccacgaccctcgtcgctatcgatgctgacccagcagctgagcatgccgctcgatacgccgcagatgcgaggcctgagcgaggcgcagcgaagcgccgttgttgccaggctggcgaccctcttgatggccgcagccggcgtcgcggcgaaggaggccagcgatgacgggcaatgatctccttccagtcacggtgctcaagcgcaaagctgtggtgtatgtc

SEQ ID NO: 25495 - DNA, 260 bp, Unknown; identical to SEQ ID NO: 25486
  Description of Unknown: LeftRegion for integrase A1063 sequence

SEQ ID NO: 25496 - DNA, 260 bp, Unknown
  Description of Unknown: LeftRegion for integrase A1064 sequence
ggtctcacccccatccaggaggcgccctgtgaaggcattaccaccaccctcgacgttaccgatgctggcccgtcagttgagcatgccgctcgatatgccgcagattcggggcctgaccgacgcggaacgcagcacggttgtcgccaagttggcgaccctcctgatggcggcggccggcgtcgcggcgaaggagccgagcgatgacgggcaataatctcattccggccacggtgcttaatcgcaaagctgtcgtctacgtt

SEQ ID NO: 25497 - DNA, 260 bp, Unknown
  Description of Unknown: LeftRegion for integrase A1065 sequence
ggtctcacccccatccaggaggcgccctgtgaaggcattaccaccaccctcgacgttaccgatgctggcccgtcagttgagcatgccgctcgatatgccgcagattcggggcctgaccgacgcggaacgcagcacggtcgtcgccaagttggcgaccctcctaatggcggcggccggcgtcgcggcgaaggagccgagcgatgacgggcaataatctcattccggccacggtgcttaatcgcaaagctgtcgtctacgtt

SEQ ID NO: 25498 - DNA, 260 bp, Unknown
  Description of Unknown: LeftRegion for integrase A1066 sequence
cgacgagccttgctccacggccgtcgtgtgagccgccgtgcaagctgacacgtgaggcactggaggaactgatcgccctggccgacgagtgcggggtggcgccatgcccatgcgacccgaacgcgtctggagacgcttgcccgacgaactccgcgccgcgatcgccgaagacgtcgccgccatcctcacagaggtgatctatgagatcggaacttatcaccgaccggcatctggcccgccacgcggtcatctacatccgc

SEQ ID NO: 25499 - DNA, 260 bp, Unknown
  Description of Unknown: LeftRegion for integrase A1067 sequence
ggactcaccgccatccaggaggcgccctatgaaggcattaccaccaccctcgacgttaccgatgctgacccgtcagttgagcatgccgctcgatatgccacagattcggggcctgaccgacgcggaacgaagcacggtcgtcgccaggttggcgaccctcctgatggcggcggccggcgccgtggagaaggagccgagcgatgacgggcaataatctcattccggccacggtgcttaatcgcaaagctgtcgtctacgtt

SEQ ID NO: 25500 - DNA, 260 bp, Unknown
  Description of Unknown: LeftRegion for integrase A1068 sequence
gatagcaacgtcgtccaggaggaccgtcatgaggaagtcattcgacctgatcttaacgccccgcccgccgcgccagctctgcattctactggacccgcccgagttgaaggggatcaaggccaccgaacgaagcgcggtcaccataaggttggcgcggcttctcatggaagccgccggcgcgataacggtggagaacggcaatgactgacgtcgatattttgccgccttcaatattaaagcgcaaggccgtggtttatgtt

SEQ ID NO: 25501 - DNA, 260 bp, Unknown
  Description of Unknown: LeftRegion for integrase A1069 sequence
cggagagatgtccatgccacgccagttcatgacatatcagttcgatctgttctcgggtctacacagcgggaggacagcggcgatgccgcaatggcaggagttgccggaagggacgcgccaggccctgacggcgctcatggtgcgcctgctcatcgaccacgcaaacggcggacgcgcctctcaacggaaggaggccggtcatgatgcatgagaagatcgggccacaccatctggagcgcaaggccatcctgtacgtccga

SEQ ID NO: 25502 - DNA, 260 bp, Unknown
  Description of Unknown: LeftRegion for integrase A1070 sequence
cggagagatgttcatgcctcgccagcccatgacatgccagttcgatctgttctcggccccgcagcgggggaagacggcagggacgccgcaatggtcggagttgccggaggagacccgccaagcgttgacggtgctcatcgtgcggctgttcgtcgatcacgcaaagtgcggacatgcctcccaacagaaggaggccggtcatgatgcatgagaagatcgggccgcatcatctggagcggaaggccatcctctatgttcgg

SEQ ID NO: 25503 - DNA, 260 bp, Unknown
  Description of Unknown: LeftRegion for integrase A1071 sequence
cggagagatgttcatgcctcgccagcccatgacatgccagttcgatctgttctcggccccgcagcgggggaagacggcagggacgccgcaatggccggagttgccggaggagacccgccaagcgttgacggtgctcatcgtgcggctgttcgtcgatcacgcaaagtgcggacatgcctgccaacagaaggaggccggtcatgatgcatgagaagatcgcgccgcatcatctggagcggaaggccatcctctatgttcgg

SEQ ID NO: 25504 - DNA, 260 bp, Unknown
  Description of Unknown: LeftRegion for integrase A1072 sequence
cggagagatgttcatgcctcgccagcccatgacatgccagttcgatctgttctcggccccgcagcgggggaagacggcagggacgccgcaatggccggagttgccggaggagacccgccaagcgttgacggtgctcatcgtgcgactgttcgtcgatcacgcaaagtgcggacatgcctcccaacagaaggaggccagtcatgatgcatgagaagatcgggccgcatcatctggcgcggaaggccatcctctatgttcgg

SEQ ID NO: 25505 - DNA, 260 bp, Unknown
  Description of Unknown: LeftRegion for integrase A1073 sequence
cggggagatgtccatgccacgccagtttacgacatatcagttcgatctgttctcgagtgcccacagcgggaagacgccagcgatgccgcaatggcagacgttgccggaaggaacacaacaggcgttgacggcgctcatcgtgcggctgctcgtcgaccactcaaacggcgagagcgcctcccagtcgaaggaggccaatcatgatgcatgagaagatcagcgcccaccatcttgaacgcaaggccattctgtacgtccga

SEQ ID NO: 25506 - DNA, 260 bp, Unknown; identical to SEQ ID NO: 24281
  Description of Unknown: LeftRegion for integrase A1074 sequence

SEQ ID NO: 25507 - DNA, 260 bp, Unknown; identical to SEQ ID NO: 24284
  Description of Unknown: LeftRegion for integrase A1075 sequence

SEQ ID NO: 25508 - DNA, 260 bp, Unknown
  Description of Unknown: LeftRegion for integrase A1076 sequence
cggagagatgttcatgcctcgccagcccatgacatgccagttcgatctgttctcggccccgcagcgggggaagacggcagggacgccgcaatggccggagttgccggacgagacccgccaagcattgacggtgcttaacgtgcggctgttcgtcgatcacgcaaagtgcggacatgcctcccaacagaaggaggccagtcatgatgcatgagaagatcgggccgcatcatctggcgcggaaggccatcctctatgttcgg

SEQ ID NO: 25509 - DNA, 260 bp, Unknown
  Description of Unknown: LeftRegion for integrase A1077 sequence
cggagagatgtccatgcctcgccagtccatgacataccagttcgatctgttctcggccccgcagcgcgggaagacggcagggacgccgcaatggccggagttgccggaggagacccgccaaacgctgacggtgctcatcgtgcggctgttcgtcgatcacgcaaactgcgggcgcgtctcccagcagaaggagaccggtcatgatgcatgagaagatcggaccgcaccatctcgagcggaaggccatcctctatgttcgg

SEQ ID NO: 25510 - DNA, 260 bp, Unknown
  Description of Unknown: LeftRegion for integrase A1078 sequence
cggagagatgccgatgcctcgccagcctacagcctaccagttcgacctgtttctaattccaagcgaaggacagacagcgcccgtgccgccgtggcagaccttgccgcacgaggcacgccggaagctgaagcaactgatggcgcgcttgatcctcgatcacgtcgcgggagaaccgacaaactcaaaggagggcgcggatcatgatgcatgaaaagatcaggccgcatcatctcgagcgcaaggcaatcctgtatgtcagg

SEQ ID NO: 25511 - DNA, 260 bp, Unknown
  Description of Unknown: LeftRegion for integrase A1079 sequence
gctgccttgtcgttgctccgcgagcgagacaacggagggcggcatgagacaccccaaagcgaccgtgcaaccggacttgtttgcgccgacgcggccggaggccgcccttccgctggaggtggcgcaacggctcctgccgcttctggaacagctcctgctggaggtgctggcgagcgaaaccctggtgacggaggcgggcgatgagcaagatcacccctgaccacctcgcgcgtcatgcctacgtctacgtccgccagtcc

SEQ ID NO: 25512 - DNA, 260 bp, Unknown; identical to SEQ ID NO: 24284
  Description of Unknown: LeftRegion for integrase A1080 sequence

SEQ ID NO: 25513 - DNA, 260 bp, Unknown
  Description of Unknown: LeftRegion for integrase A1081 sequence
ggcttgcgcgaggcgcatgggcgccatcgtctttcacggactgtggcgcggcctggcagtgctcatcgcaccacatcaatccgcgatagcgcgacagcagtcgacgcctcggctcaagacaacttcactggtcgcgcacgatcgccagctcgtgcacatgctcgccaatatggtgctggcagcagagacaggaggaagccatgtctactgataatgccatgaagattagcgccgatcacctgcggcgcgatgcgtttctc

SEQ ID NO: 25514 - DNA, 260 bp, Unknown
  Description of Unknown: LeftRegion for integrase A1082 sequence
agtatttcggctgaccgccccgcgatctccgcctcggcgccgtccataaagcaagggcctcatcactcacccacacggtcaaatcaccacgttgacgcaggctttcattataggccgcccaattcgtcaccttaaacttctgcttggctatcttgtcccgtcggtcggcattgaacttatgcggcatcatcaaaaccccgatcaggagactgaaaaccaaagcccaatatcagtcgccgggtgatccgcgcaacaacgcc

SEQ ID NO: 25515 - DNA, 260 bp, Unknown
  Description of Unknown: LeftRegion for integrase A1083 sequence
gatgacgcaactgttatcgaggaggcatgtgatgaaagcgcgacagcaccacgccatcgtaaaacaaccctgccagctcagcatgacgttggaaacgcccgagctgacgcggatgagcgccgtggaacgacaagcaatgattttgcgccttgcgcaattgatcctgcaggcgggcgggacgacgatcacggaggacagcgatgacgcacgttgatcttcccgcatcgcttttgaagcgtaaggccgtggtttatgtccgt

SEQ ID NO: 25516 - DNA, 260 bp, Unknown
  Description of Unknown: LeftRegion for integrase A1084 sequence
cgcgtcagtagcaatctgaccgcacgggaatgggattgtctgctttgggcgggcgagggaaagacgaactgggaaacttcggcgattcttggaatctcaagatcaaccgtgaccaagcatatcatggcggcgcgcgcgaagcttggtgcagtcagcaaagctcatgccattgccacggcgattcggacgaagctccttcgctgaaagcgttaggtcaggccatcgtctacattcgtcagtcgaccgccggccagctcgcc

SEQ ID NO: 25517 - DNA, 260 bp, Unknown
  Description of Unknown: LeftRegion for integrase A1085 sequence
cgtaacaaccacactaaacaaaacatggatatttgtgtcccccctcctcgcagaggggggatttttttaactatacacatcatcgcgatgcaacactatactgtaatcggcaaaaaagatgaaccattaaacataaaaatattctcataataacgctgtcacaaagccgtgctatacttattctgaaaggagttgatagcatggctgaaataactataatacagccaagagaacagccccgcagaaaacttcgctgcggg

SEQ ID NO: 25518 - DNA, 260 bp, Unknown; identical to SEQ ID NO: 25481
  Description of Unknown: LeftRegion for integrase A1086 sequence

SEQ ID NO: 25519 - DNA, 260 bp, Unknown
  Description of Unknown: LeftRegion for integrase A1087 sequence
agagggcgcctgagaggctggcgagcgtggtgtaaagcgctgatgcggcgtaggattcggttgtgaagccaaccccatcacctcaaccgcgaacgccacgcccgccatgaccgacgatacgattccgcccttctcgtttccagggtactgtccagaatctttcgcacttttgatcaggcgacggctccggtttcagagagttgtggctgatagagcggtcgcatgttcatgtagcatttggtcgcgtccaggtgattgac

SEQ ID NO: 25520 - DNA, 260 bp, Unknown; identical to SEQ ID NO: 25469
  Description of Unknown: LeftRegion for integrase A1088 sequence

SEQ ID NO: 25521 - DNA, 260 bp, Unknown
  Description of Unknown: LeftRegion for integrase A1089 sequence
gcgacgacgcggaccaccaccggccagcagtgggacgaaccgaacggctgggcgccgctgcagtacctcgcggtgatggggctgcgccgctatagcgagccggagctcgcgcgcgatatcgcgacccgctggattcgcaccgacgttgcgtactatcagcgcaccggcgagctcgttggacctcaaagtataatagatgaatgcccgcagggctccgtccagcaagggcttcagccgaatggaagcgaaggctcgaccgc

SEQ ID NO: 25522 - DNA, 260 bp, Unknown
  Description of Unknown: LeftRegion for integrase A1090 sequence
aacaacgtgacatcgccctcgccagcccatgacatgccagttcgatctgttctccgccccgcagcgggggaagacggcagggacgccgcaatggccggagttgccggaggagacccgccaagcgttgacggtgctcatcgtgcggctgttcgtcgatcacgcaaagtgcggacatgcctcccaacagaaggaggccggtcatgatgcatgagaagatcggaccacaccatctcgagcggaaggccatcctctatgttcgg

SEQ ID NO: 25523 - DNA, 260 bp, Unknown
  Description of Unknown: LeftRegion for integrase A1091 sequence
caactcaaataacagcaactgcgggaataggaacaaatctttacttagcaaaaattgcaatggatatattagccaaaaaacaaaatattaataaagatggatttgcatagggtgttgtatgctctaaaagacttcttaatcaagcggttgagaagtctcttagaacacacaacctaaaaccgaagaaaggagcgcaagttatgagaaaaaacgagaaaataacagctctgtacgaacgactgagccgtgatgactttggc

SEQ ID NO: 25524 - DNA, 260 bp, Unknown; identical to SEQ ID NO: 25523
  Description of Unknown: LeftRegion for integrase A1092 sequence

SEQ ID NO: 25525 - DNA, 260 bp, Unknown; identical to SEQ ID NO: 25433
  Description of Unknown: LeftRegion for integrase A1093 sequence

SEQ ID NO: 25526 - DNA, 260 bp, Unknown
  Description of Unknown: LeftRegion for integrase A1094 sequence
ctggcggtggcaacaaaataggtggtgtagatcaacatcagttcgtgtgaaagcgccataatttcctctgtggctgattaagtcccgatttagggttatatcgttgaacgcgacatttttctatgccagatctgttaattaggtgttaattcgctatgctgtggctccacttaaccggggtgtaacgcaggagaagggctgtgaatctgagccagcgcgaacatatcgccaatgtggttgccagcgtcgagcaggcggca

SEQ ID NO: 25527 - DNA, 260 bp, Unknown
  Description of Unknown: LeftRegion for integrase A1095 sequence
ctgccatgcatagcgccggcgcaattcccatgcccgcagggctgaaattctacacgaaaacggtcaaaagtggccgtcgagggaagcaaccgcacgttgtctacctgctgatggacgacgatccgcccgtggacctgtcagaggtcgaaatgtttgcagacttgatgaaccgcaagtcggcggcttcgtaggaggaacaaatggtagtcaaaccccgtccgtccctctccaagccgcggtgcgtcatctacgctcgtgta

SEQ ID NO: 25528 - DNA, 260 bp, Unknown
  Description of Unknown: LeftRegion for integrase A1096 sequence
ggtaaaaatgcaagcaataaagatttatagcatgagagttgctatgttatgtaggctttatgatcttaaattaattaatgagaaggaatatacaaaaattaagaacaggttagaaaatgattataagaagagagatagaaagtagttaatcttgtgatataataacactgtagaaagatacaaaatgggaaggaggtaaaatgaatactaaagtaaaattaataaaagcttcaaatttaggagcaagaaatagaaatgca

SEQ ID NO: 25529 - DNA, 260 bp, Unknown
  Description of Unknown: LeftRegion for integrase A1097 sequence
ggctaccgcctcgtctatcaggtcgtggaacagcggatcgtcatttttgtcatcgcggtcggacgccgtgaggacagcgaaatctacacgacggcaaccgggcgcatcccggagacgccagccgaccggataaaacagcccagcggcaaaagtcgcaaaaggtaaagcttacgaaaaaccacctgtggggaaaagccgccatgacccgtgtcgcactctatgctcgctattcctcggacaaccagcgggcggcttctatc

SEQ ID NO: 25530 - DNA, 260 bp, Unknown
  Description of Unknown: LeftRegion for integrase A1098 sequence
gaacgaaccaggccgatgaaggacgaggaccgcaatggccaagctttgcaaaaggcgccatcctctgcgccttgaggtcggcttcgaggtcagacggggcagtcaagaagtcctgggacgcgcctacgagcgcctcctgcccctgcgcacctgttccctgccatcacgggcgcaggccgccatgtccaagggagcgtacgatgagaactccgcacctgagagccgtttcggcaccgcagaccctgcaggtcgccctttac

SEQ ID NO: 25531 - DNA, 260 bp, Unknown
  Description of Unknown: LeftRegion for integrase A1099 sequence
ggaggcgccgatgacccggcagacgcgtcatccgctcctgcaggtgcaggagtccttcgagatcacgcggttcagccccgaatgcctgatcgaggcctaccgccgcgtcgtacccatccaaaccaaagccatccggagagccgccgaacaccgccgatcccaaactcccgtccacaccacccgaagtcagggaggtaagcatgtctgatcgccgcattgccctttacgcgcgggtctccaccgaacagcaggcccgggat

SEQ ID NO: 25532 - DNA, 260 bp, Unknown
  Description of Unknown: LeftRegion for integrase A1100 sequence
tctccgggctgggggggccggggaggggaagcggtaagagcgacaacgatgaggcatggcgctgctgcaggaacttgtcggagccgtgccgggaagatccgcggatgtcgaacactccgcacccgttgcttgccggaccagatgcaaatgatgatcatgggtccgaagagcgaaccggatccagacgaaggagcctcgccatgagcaagggcaatcgcgtggcgatctacgcccgcttctcgaccgacctgcagcgggag

SEQ ID NO: 25533 - DNA, 260 bp, Unknown
  Description of Unknown: LeftRegion for integrase A1101 sequence
gagatgcttacatgtactatatataattttttattctctaataaagctataaaaccatatataatttttatttaccgacaaaaacttatataataaatacaaagcatagaaggaggacgaaaacatgctcatcaataaagaatacataaaagcatcattatctatcctaaacaaatataacgaaacgagggagcaataatatgcctgataacagaaaatacgcaatttacagccgcaaatccaaatttaccggcaaaggt

SEQ ID NO: 25534 - DNA, 260 bp, Unknown
  Description of Unknown: LeftRegion for integrase A1102 sequence
cgatcctgcggtttctgtcgacgagatctgggaagatgtttaccgcatcgcccgcaagattatccgggtcaagcgccgccgtgaagccgaagccgctgcacaggctgccaacaccccctgatcgtcatccgccctttccccgttgcccgtcaaccggttaaatgtcgtgtatacatacgacacagaccggaggaaacgtcatgctggtcgccatttacgcgcgccacagcaccgacaaacaggacacatccagcgccgat

SEQ ID NO: 25535 - DNA, 260 bp, Unknown
  Description of Unknown: LeftRegion for integrase A1103 sequence
cgatcctgcggtttctgtcgacgagatctggggagatgtttaccgcatcgcccgcaagattatccgggtcaagcgccgccgtgaagccgaagccgctgcacaggctgccaacaccccctgatcgtcatccgccctttccccgttgcccgtcaaccggttaaatgtcgtgtatacatacgacacagaccggaggaaacgtcatgctggtcgccatttacgcgcgccacagcaccgacaaacaggacacatccagcgccgat

SEQ ID NO: 25536 - DNA, 260 bp, Unknown
  Description of Unknown: LeftRegion for integrase A1104 sequence
cgagcgcgaagcgctgctcgaatctttgctgctggacgagccggagttgacgtttacgccgcgcggcattcccgaccctcgccttctgcgtctggtcggcatcctggcaaagcaggcggcacgggaatgctttgcagaggaagtgacgttatccaggcaaaggaggaagcgcacctcctgatgcggataggagccatgttttgaaagtcgcgatctacgcccgttattcttccgacaatcaacgcgacgcttccatcgcc

SEQ ID NO: 25537 - DNA, 260 bp, Unknown
  Description of Unknown: LeftRegion for integrase A1105 sequence
taacttaaagtttcaacaacaaaaggcaatcattgatgaacttaaaaaggcaagtttgattaccaatgaagaatggtatctttgcctaacaaaactactaaagataaataatgaaaaaagcaacaaatagcacggtattgacttgctatttattgctttttgagtgatgtatatagtaactaattataggaggtacaagaatgcaggaaaaacgagttatagttattgaaccaactcaagtaatccatgaagatataaac

SEQ ID NO: 25538 - DNA, 260 bp, Unknown
  Description of Unknown: LeftRegion for integrase A1106 sequence
atccgcgacttcgtccgcgcgatgtgggactggtttgtggcgcagacccgcacgcgctgcattctcacgggtgaagcggcgacgcagctcccgagcggccgagtcgtgggccgcgcgggcgagaagctgctcaagcgcgaccccgcggcgttccaagcacaagtctacggccccgaagccgcctgacaggagacccatccatgtcgctgccgtcccacggcttcaccatcctgcgcaacgcgcccgacagcgcccgcgga

SEQ ID NO: 25539 - DNA, 260 bp, Unknown
  Description of Unknown: LeftRegion for integrase A1107 sequence
cgacacagacgcgatggtgcattgctgcgcgaaaccgccccagcggtaacgccggaggagcttcgcacagccatgcttaagtttgtcgaagcactcgccatcgccgatgccagaggcgatcatctcaaatccgtcggcgcttcggctgaccgaaatgctgccatggatgcagatcgctgcaacaagaaggcttccgatacatgaggcgggccgctgtctatgcacgcttttcgaccgagctgcagaacgaaaaatccact

SEQ ID NO: 25540 - DNA, 260 bp, Unknown
  Description of Unknown: LeftRegion for integrase A1108 sequence
aattgctcacagagagccgactaaagccaacggtagcacgccgcgacggttgatggatgacgatctccaagtcccgcccatcgacgttggccgaccgcagggcagtatagaagcgcgctccaattttgatcgtggcccaagattggcaagaatggtcaaatctgtagactgatcacaaagctcaattctggagactccgaatgccccgtgtagctctgtatgcccgctattccgacgacaagcagagccctgcatccatc

SEQ ID NO: 25541 - DNA, 260 bp, Unknown
  Description of Unknown: LeftRegion for integrase A1109 sequence
tggtgctttagatttagataatctgcccgatccaacgccagcaaaaaatcaagagatgaaaaatagttttgacatggcaaaaacacaaattgagacggactaataaaagtgttataatatacttgaaatgatagtccaaacttaaattcaaaaatcaaagtttatatatgatatagaaaaattataatgaggttaatgctatgttaaaagaaaaaataaaagtatacctctatacacgagtatctacgtcaatacagata

SEQ ID NO: 25542 - DNA, 260 bp, Unknown; identical to SEQ ID NO: 25530
  Description of Unknown: LeftRegion for integrase A1110 sequence

SEQ ID NO: 25543 - DNA, 260 bp, Unknown
  Description of Unknown: LeftRegion for integrase A1111 sequence
gaccgagacgtacaacagccgaacggcttcttgtggtcgccgacgcgacccgcgaaccggttgcgcttgcgtcatcaaaacccgatccacgcctcgtcaatctggtccgactgctggcgcgacaggccgcgcgggacttcgttcgagccgaaactgatagccggacgcgagaccaccttccggagtaaggaggtcgcctcgtgaaggtcgcgctctacgcccgctactcatcagacaatcagcgagacgcttcaatcgag

SEQ ID NO: 25544 - DNA, 260 bp, Unknown
  Description of Unknown: LeftRegion for integrase A1112 sequence
ggtgaatcaaaaccaaacttgattcaatttagaggcgcgataggaagggcttaccataaaatttatgaacaaattatgccatataaagatgaactggattttcttggtgtaattaaaaattagggtcgtgaaattaaagttttgtattggtttacgaattaacaagcataagttaaaatattagttagagaggagaacttatgctttgttattcttatgtcagattcagtacaccagaccaagctaaaggtgatagttat

SEQ ID NO: 25545 - DNA, 260 bp, Unknown
  Description of Unknown: LeftRegion for integrase A1113 sequence
actcgtcggcacggtgcggaacgtcgggggcccggcaacagcagcatggagaactgctgttgccgggcccgggtctgagtagttgcggtacaggatgtagcgctgagattgatcatggtcgctatcacagcgaacggctccggtggggagcttccgggaaagatcgttgagcgggtgcgggggctggctacggtccggctgtgccggtggaatttctgactgacgagcaagccgctgcctacgggacgttcggtgaggtg

SEQ ID NO: 25546 - DNA, 260 bp, Unknown
  Description of Unknown: LeftRegion for integrase A1114 sequence
atgggaacttataagtttataatcgcactcagcccttcagaagtacttctcttgataagtgatactcctatgacaaaaaagagtatcaaaaacgaactagatgtatataaggctatgccatccatttatacggacaaagtaaaaagcatgaacgagaaatatgacataacatatcatgtggtagatttgagggaacaagaatgaatgcagtagagataattgatttcaataaacttgagtcaaaagatagattaaagaat

SEQ ID NO: 25547 - DNA, 260 bp, Unknown
  Description of Unknown: LeftRegion for integrase A1115 sequence
ctggaggaactggcggaaatcaccggccgggccggctccaatctgtcacgcaccctgaaaaccatggagaactacggtcttgtgcgactcgaaccggggcatgggcgtaagctcgcgcccaaggtggtgcatgaccgcgtggagctggcgttgcccctgatcgaccaccccaagatgaagaaagctatgggaggccgaccatgaacattcacagcccaaccactaccgcccgcgccgcgctctacctgcgcgtttcgact

SEQ ID NO: 25548 - DNA, 260 bp, Unknown
  Description of Unknown: LeftRegion for integrase A1116 sequence
acccggtctattaaagacaaggcctaatttaatctaagatttcataacacatataccgaaatctaaaaactagatagatctatattcaaagaatacaaatctttcatattattttgttgttttcgtattcaatgttagatagaatgtttttacagatacttctgttttgacattaaacacaataaagaggtgctaaatttttggagttaaaaaatattgtcaattcttacaacatcacaaatattttaggttatcttaga

SEQ ID NO: 25549 - DNA, 260 bp, Unknown
  Description of Unknown: LeftRegion for integrase A1117 sequence
aagtacaactgctgcacttataatcgcataccttatataacagaggaacttgtgcatattattcaaggctttacgccctcggaagagatcaacaagcaaatgctcacaaagactgttgagaagataacatttgataaaaacaaagtgataaccgttactttcaaaaacggcagaaaaatagcggcaaaggagggagaaatatgtcaagaccgatagaagcggcttcaaacgtcaagataattcctgcaatgtcctcggag

SEQ ID NO: 25550 - DNA, 260 bp, Unknown
  Description of Unknown: LeftRegion for integrase A1118 sequence
gaaatacaacgcctgcacatacagcagagagccgtatatcacgcaggagcttcaagacctgattgcaggacatgagccttccgaaacgattgatacggagcttttattgcagatcgtaagcagaataaccgttgatgaaaacaaggttatagcgatagagttcagaaacggaaagcgcatcgcatacaaggaggttaacaatgccgaagaataacgatatggcttccaatgttacgatgatacctgccctctcgcctgcc

SEQ ID NO: 25551 - DNA, 260 bp, Unknown
  Description of Unknown: LeftRegion for integrase A1119 sequence
agacataagcagtgaatgcgggaacgatcgccacgtatcgtccaaagatcacgcgacgccgttcgaactttctctgatacgtttcgtcgaagcccttgcgatcgcggacgcgaggcgcgatcatctcgcttcaagcgctccgttcatcccacaggcaactcccgagcggacgcggacattgcaggcgggagcgtcgacccatgactcgcgcggtcatctacgcaagattctcgactgaactccagagcgagaaatcgact

SEQ ID NO: 25552 - DNA, 260 bp, Unknown
  Description of Unknown: LeftRegion for integrase A1120 sequence
agaggaagggggagtgcttatgcaaatagggcggcctgtaccaaggataagggttattcctgtggggaatgttgccgatcacagaagggcctatgcccgggtggttgatattatacgccaggcctgccctgacaggcaggaaaacccgcaagggatgttgaaggaagtaaacatgaatcctgctatggggaagaagaaagatgaaggccgtgatttacgctagggtaagcacccaggaccaggcccttggtttttccctg

SEQ ID NO: 25553 - DNA, 260 bp, Unknown
  Description of Unknown: LeftRegion for integrase A1121 sequence
atttataacggaagaagaatttatcaaaatagatgatgaaaataaaaagacttttaatagatagattatgggcttgagctatagtagttcaagcctataattttttagatttttttatatgttcttacaagctaattaacttgctatgaggctggagtagaggtaacatgtgactaccttgaaagggaggagggtttatattgaagaaaataactgctattgcagcaaagaataaagtggatattcatgaaactgcatta

SEQ ID NO: 25554 - DNA, 260 bp, Unknown
  Description of Unknown: LeftRegion for integrase A1122 sequence
ttactcaacatgatttggctgaaaaaataggcataagtgcttcatatttaagcgagttagaacatgggacaaagtatccaaattcatttatgattatgaatatagcttgcgcactagatgtatgtccaaaatgtcttatagaatgcacaaaagaatgtaaagaaagaaatttagaaaaatgtaattattaggaggaagatatgaacattgctatatacagcagaaaatcagtttttaaagaagccggagattctgtacaa

SEQ ID NO: 25555 - DNA, 260 bp, Unknown
  Description of Unknown: LeftRegion for integrase A1123 sequence
aattttagaacaaaaaggtaaaagtgtatattggctaaaaaatcaaacaaatataagtcattctacaatttataaaatggttaataatgaaactaaaatgatttcatttgaaaatcttcataaaatttgtaaagctttgaaatgtacacctaatgatgtatttgtatttaatgatatagaaaaggagattaacattaaaaatgaaagtagcaatttatagtcgtaaatcaatgtttacgggtaaaggtgactctgtagaa

SEQ ID NO: 25556 - DNA, 260 bp, Unknown
  Description of Unknown: LeftRegion for integrase A1124 sequence
tagcttcttataatgcctacttaatgcatgttgatatctgttattcctacactattagcactagaaaagatagctttaaaagtgatgtataaataataactattttagtgtgctacaaatggtttacatgtagtagcacacttctggaaaacatgttatacaagtaattatgaaaggttaatggtaaaaatactaaatggatggcattcaatatgagaacagtaggttatgcgcgtgtcagtactgaggagcaaggaaga

SEQ ID NO: 25557 - DNA, 260 bp, Unknown
  Description of Unknown: LeftRegion for integrase A1125 sequence
gccattttccccctggcgcaggaggtctctgcggcgggagggcatgatgcgggagtggcgggtgtgccgggtgttccagccccatccggacggccagagataccgggaccgagcctatcagcagctcctatcctggaacgaggcggagccgctgtgcgccgccccggccggtcccgagcctcccaaggaggaggtcagccatgagggtcgctctttatgcgcgggtgtccactcaacgtcaggcccaggccgacggcgtt

SEQ ID NO: 25558 - DNA, 260 bp, Unknown
  Description of Unknown: LeftRegion for integrase A1126 sequence
ttgatgataacaaagataaaaactcaaaaaactaaaaatgcacccattccagtaagtgcatttttaatgaactaaaaacatataacgttgaaaccgcaacggcttcttttaaacatattataccacaattatattaaatttaaacttatttaaatttatttttataaattatagcatttctatagatgaggtgtatttttatgatagcagctatatactcaagaaaatcaaaattcaccggtaaaggtgatagcatagag

SEQ ID NO: 25559 - DNA, 260 bp, Unknown
  Description of Unknown: LeftRegion for integrase A1127 sequence
cttgtcctgtataggaaaaggcactaaaaaactaaaaaaatatcggttttacgatttaaagtgttgacaaatcgttcgagatgtgttatactattattatagaacgcatcttgacaattgaatacccaatgttggacaagcacaacgatttatctaccgatatttagaacaacatgatctgaaatcggaggtaatcgtaaatgaacacagtttatacattatacagagtatccaccaagcagcaggtcgataagaccaag

SEQ ID NO: 25560 - DNA, 260 bp, Unknown
  Description of Unknown: LeftRegion for integrase A1128 sequence
ataatacaaaattttatgtgatttcaaaatttataggagctgtaacacttcaacatcttataaagagattgataaaaaatgaggtaggacaggtcgttaaatgacactaaaacagtcaaataaatagctgaaacccctatgagggcgtggtataatggaatggatatgagttgtttgtttgctgtggaaaggagcttacattgttaaaacagcaagcaaataataaagaaaaagttgcattatactctcgcctttcacga

SEQ ID NO: 25561 - DNA, 260 bp, Unknown
  Description of Unknown: LeftRegion for integrase A1129 sequence
taaagaaataagaagagtaattgaaatgagagaaaccactcttacagagtttgatgataatatatttgaaaatttaatagaaaagatagtagctttaacaccaacacatttagaatttcatcttaagaatggaatgaaggttgaagaagaatttattaaaaagagaggagtcaacggacttcagtaaaggagagatttttatggctagggtttcagtaataccagcaaggcaagtggctgttataaatggagttcagagg

SEQ ID NO: 25562 - DNA, 260 bp, Unknown
  Description of Unknown: LeftRegion for integrase A1130 sequence
tcttgcagaggaaaaaatcggctgcattgagtacaacgtgaaaaccgagcagaccgcgcatatagaggacgctatcaagaattgtgtggagctgccggagtttctaatacaagcggtcaggcacatctatgtcacgcccgacagagtgcgtgttaagttcatcaacggaaagacggtcaaaagtgaaaggagcaccaaccatgagtaatataaagacagcggcaaacgtgacacttatccctgcaaaggagcaggcaaac

SEQ ID NO: 25563 - DNA, 260 bp, Unknown
  Description of Unknown: LeftRegion for integrase A1131 sequence
gacacaagaaaacccaacccctattgttaatttgttattacagagccacttttggattgaccaaaggtggtttcttatttaaaatgtgatatacaagctttgcaattctgaaaatacagtgaatgaaaatccgcttgtttaatttgttaatacaatgggtatataaaatgtgttcaaattaactattaagaggtgaattcatgataggaggaatttatgccaggagttctttaggacaaaccaaacagggagatacagtt

SEQ ID NO: 25564 - DNA, 260 bp, Unknown
  Description of Unknown: LeftRegion for integrase A1132 sequence
aggtttactaatgaagaaatatattaagactactataagcagggataaattatatgatagaaactacagtagggacagtattgaagatgtaataatagatgaaaaagttaatagtagaataagatatgattctttagttaaggtattaacctctaagtatttagattctcaagaaaatggagtaaaaatatgaggagtgaatgctggtgataaaatctaaggttgttgaaattataagagcttgtgcatatattaggtat

SEQ ID NO: 25565 - DNA, 260 bp, Unknown
  Description of Unknown: LeftRegion for integrase A1133 sequence
gaatttgatgaggtgactttcaaccgccaaatagaggagattcagattcctgatgcgaacctgcttttatttgttttcaacgatgggcgcacagatctaagagaatggcagagcaaatcacgtagtgaaagttggaatgaggaagcaagggaaaaggccagaatgcgccagattgaatacttagaagggaggaagggagaatgcgtacggcacgtgcagtaagaatgatacctgcaacggcaaaacttcatgagcctgtt

SEQ ID NO: 25566 - DNA, 260 bp, Unknown
  Description of Unknown: LeftRegion for integrase A1134 sequence
ccaaaataatgaggatacattcaaatcaaaggtaaccaagataatcgttcaagaaaataggatgttagaatttcatatgaaagacgggaagatattaaactaccgatggaaacataagtctagaagtaagagttggacacctgaaatgaaagaacaagcacgattaagagcactagaacagcatcatggaggtggagaaaatgcctaaagtcacagtcataccatcaacaattaatcctattacacaaatgcctatccat

SEQ ID NO: 25567 - DNA, 260 bp, Unknown
  Description of Unknown: LeftRegion for integrase A1135 sequence
gggcgcgttgcgccgcgcctgctcgcggacctcgcccccgactacgcgacccgcgtcaccgtcgccgacgagaagaccggtcacggcatcacccgccacctccgccccacaacgagggccggccgagcccgcgccgccgaggactacccgttcatcgacctctccacagagggcaccggccgccagcccggtggcctgatgtggacactgagcgtagacatggaccacgacaactcgctgctgcggctattcgcggccga

SEQ ID NO: 25568 - DNA, 260 bp, Unknown; identical to SEQ ID NO: 25567
  Description of Unknown: LeftRegion for integrase A1136 sequence

SEQ ID NO: 25569 - DNA, 260 bp, Unknown
  Description of Unknown: LeftRegion for integrase A1137 sequence
ggcaacccctgtagggggcacaacctacgcgaaacactcctcgaacaagcctgcgcagacatgctcggcacccaaagtttcgaccccgtccaggttggcgagcagatcgtgatgattgaagccttcccgcaccagctcacattccacctcgcggatggaactatgacgccggtgggcttaaccagtgaggggaggttggcatgagtcgcacggtcactgcgatacccgcaacaaagaaacccggaactgtcacaaccccg

SEQ ID NO: 25570 - DNA, 260 bp, Unknown
  Description of Unknown: LeftRegion for integrase A1138 sequence
cggccatcacgtctgcataggcctggcgcccggccaacgcccctttccaagccggtaacttcttgccctttttcggcaacatctcccgttcctttcgcagctacactgctgatgagaacgtagaggcgagcagtcgtgggtttcgtgcggcagcggatggtcgccctggctgctgcagcaaacccatggagaggcgagccttggaggactggcgcactcaagacggcaccgaccatgacccggcatcgccgatcgtgcgc

SEQ ID NO: 25571 - DNA, 260 bp, Unknown
  Description of Unknown: LeftRegion for integrase A1139 sequence
cggccatcacgtccgcataggcctggcgcccagttaatgcccccttccaagccggtaacttcttgccctttttcggcaacatctcccgttcctttcgcagctacactgctgatgagaacgtagaggcgagcagtcgtgggtttcgtgctgcagcggatggtcgccctggctgctgcagcaagcccatggagaggcgagccttggaggactggcgcacccgagacggcaccgaccatgaaccggcatcgccgtgcgtgcgt

SEQ ID NO: 25572 - DNA, 260 bp, Unknown
  Description of Unknown: LeftRegion for integrase A1140 sequence
gaattaagtgatgtaaagcaattacgtgaaaagataagtaattaccaatcctctatctcattgtcctatgatgatataaaggagaatcgacagttaggttccttttttcaagatttaatacaacaagttaaaaccgacggaaagaactgcgaaattgtttttaaacacccattcttacgtactcaagaggtgttaacatcatgaagctttctcatatattacaaccaaatatgaaggctgctttttatggccgtcattct

SEQ ID NO: 25573 - DNA, 260 bp, Unknown
  Description of Unknown: LeftRegion for integrase A1141 sequence
attaaaaaaggttcctgatgtagtaaagaatttggaaggtaatatccataaacaattaatgttagattccttatcagattataagagtatggagttatttcaagatttgatttttactgtaattgtagatagacacggatatgaaattatttttaaacatccatttttacattatccagaggtgcatacatgtgaagacaattcgtgatgttttagaaaaaggaaaaaaaggagccttttatgcgagggtttcgtctgat

SEQ ID NO: 25574 - DNA, 260 bp, Unknown
  Description of Unknown: LeftRegion for integrase A1142 sequence
cctatcgatcgtcccgtggggccgcattgcggcggaacgggggcgccggcgctcacaaagtgagtcagcgtttaccgacagttgaaaggcttggtttccaaacagaaaagccgggcattcgacataaactggaggggtgttttgaaccaaaccacaggccgatgatcgttagcatgtcccgaatggcaggagcgcaagcgatggacgaggttgcaacgaccctaaaagctccttctggtaggcgcgtagtgcgtgcggcc

SEQ ID NO: 25575 - DNA, 260 bp, Unknown
  Description of Unknown: LeftRegion for integrase A1143 sequence
tagcgtcttcgcagctgattgcaaacagcctactcgatcgacgcgccatagcttcgctgctaccttggcagggcgaacacgaccgccgagcgccgacgcacgacctttccatcaggcccgcatcgaccgacggcgtcgcctgcgccaccggtgccttgccggtgaggcccgttggcccgttgacctggtggaggccgtacatgcaatcggacgtcccacgaaccgaagggcaggaggtgcccatccgcatgcgcgcggcc

SEQ ID NO: 25576 - DNA, 260 bp, Unknown
  Description of Unknown: LeftRegion for integrase A1144 sequence
atcgttcacctcacggtgctgaaatccacggaggggattcgcgcggaaagtttgtaaatagatgactcgtgccgcctaacgttacgcgctgctactctggttccgtcgcgaagcgctccgctccgtagggcgtcgattggcggttcgctcggacgagttctacggtacgcatgaagcgggtcatcggattggtggcaaaaatggcaggcgataccgaaccaacggtgtgcgaaggcggctcccatacgagagctgccgag

SEQ ID NO: 25577 - DNA, 260 bp, Unknown; identical to SEQ ID NO: 24325
  Description of Unknown: LeftRegion for integrase A1145 sequence

SEQ ID NO: 25578 - DNA, 260 bp, Unknown
  Description of Unknown: LeftRegion for integrase A1146 sequence
ttgaaagccatggtttccaaagcgcaaaggaaacgggcaaacccgctgatctcaacggccgataaagttgcgcacggatatatatttatatctggatgcggccgacggctcgcattcgaagcaaactcgacatgttttcctaaccaaatcgcaggcggtacaggcccctattatcaggtctgagtaccatggcccgcgcgatggacaaagcaaccacaccccccgagtttgaaaggcgaagggctcgcgctgctcaatac

SEQ ID NO: 25579 - DNA, 260 bp, Unknown
  Description of Unknown: LeftRegion for integrase A1147 sequence
ctcttcatcatcggcttcaatcgtcatgtcagaaacccggttataataccgggcgcccgctttcgtgaaccggctttcttaacgcgtgtgccaagataaaccccgtccttgcctgtaaggcactccttaacgataaaaatgcccggccagtaaaacggatggtgtgcccgccttcacataacctgagcgacacaggtggcatgctgtcgcgatatgaaggagggcatcatgataaagaagccatagcctatgtgagattc

SEQ ID NO: 25580 - DNA, 260 bp, Unknown; identical to SEQ ID NO: 24332
  Description of Unknown: LeftRegion for integrase A1148 sequence

SEQ ID NO: 25581 - DNA, 260 bp, Unknown
  Description of Unknown: LeftRegion for integrase A1149 sequence
tgccctcgccgaagtcgcttcgcagtgccgtcgctatggcagaagcaaaggccgcagcacctaagcgcccttcggttgaagaaggaaatccttttccgtttttggactgaatatttcggcccttgttcgtaggcgacatttcgtttcccctcgaattaatatcagaactcgggaaatgcctcaaaatagctgcgagatagatgaccggagctggcgatcagacacacaagactgaaaatgtgcgtgcggcacagtatgtc

SEQ ID NO: 25582 - DNA, 260 bp, Unknown
  Description of Unknown: LeftRegion for integrase A1150 sequence
taaagctgaagaagttagagataaacgtgcaaaggatttaggacgagtggtagagcttgccgctttcacctctccccctcccaaagaacgattcaaaatgaaaaaggcagataataagatgccagtggatccttttgaacgagcagaatacttatacagtctgatagaaagcgaggaataaagtgacagagaaaaatataatggttattcctgctcgtaaaagagtaggaagtacagccgcaaaagaaaagataaagaaa

SEQ ID NO: 25583 - DNA, 260 bp, Unknown
  Description of Unknown: LeftRegion for integrase A1151 sequence
tggcgggctccgaatttcagaggcctaagtttcgcttaaggggcgcctcgcacgatcaactcacagtcccggcgctggtagaggatgcttcggcagccagcccttgacgggtaggttcctcgatgccggtgactgtccaattctggccttcgcattggaaaaggcgcaccatcttcctaccgacacgctgggagcgcgagatggtcaagtcactcaagcctcagctcgacccggaaagggtcatacgagcagctgagtac

SEQ ID NO: 25584 - DNA, 260 bp, Unknown
  Description of Unknown: LeftRegion for integrase A1152 sequence
tttttgttcctctttttccattaatgcaagtggtgaatgaataatgacttttgtattaccaaattgaaattctttcatcatatccccccttgcattatatgtatgcaagacaggaaaaaagacgaactatcattttcataggacaagctagccatacatatctataacaataataatagacaagttggtaggtgaaactaatgtaccatccacaagaacttgatgtattcatctatttacgtaaaagtcgaaaagacctt

SEQ ID NO: 25585 - DNA, 260 bp, Unknown
  Description of Unknown: LeftRegion for integrase A1153 sequence
caccggcccgatgttgaccgccaccgacgtgatcatcgccggtttccatgagccggtgtttgcgccgcaggataaagcgtccaatactgaagcgatgatcgccgcaatggcgcagggggacgtgcatatcatcagccaccccggcaacccgaaaagaatttctgcgtattaaagtaactgattgattcttggagtgtttgatgaaattgtacagctatcagcggtggtcaagtgcagtacaggaggctggtactactaag

SEQ ID NO: 25586 - DNA, 260 bp, Unknown
  Description of Unknown: LeftRegion for integrase A1154 sequence
gcatcggacggcgaggagcatgaaagaaacgagtgcatttttatccagttgcagaatgggctgacatactgcactgacgaagattaaacggaattggtacggaacaggcgaattgcttgttccgtattcaaaaagcaacaggtcatctaaaccgtaaatatgtatcaaaatctgaacagtaaaaacaggagctgatgtttatgaagaaaatgacagtgatccctgccgtgtcgcagatcaggcagggacgtatcagagtg

SEQ ID NO: 25587 - DNA, 260 bp, Unknown
  Description of Unknown: LeftRegion for integrase A1155 sequence
tagcacgccctggcgctcctctcctccaagctgaacgtcagttacaaaaacgcctcggatcagagcgacccgtacgcggagcttgcattattcgcagcatcagctatcacactagcttgatcgggaggtgtggtatgcgacccgcgacccatatgcgcccccgaccggacacatcgtcgactgcggttcagtacgtgcgtatgtccacggacctgcaacgcgactcgcccaccaaccaaaaggaggtacttgcgcggtac

SEQ ID NO: 25588 - DNA, 260 bp, Unknown
  Description of Unknown: LeftRegion for integrase A1156 sequence
ggagataaaaaaatgaaaataattgcaggctatgccagagtttcttctcgtgaacaagctgttgattctcatgctttgaaacaacagacaacaagactaaaatccgccggagcaaccgagatttatcaagttattcaatccgttagtaaggacgatagaccacgttttaaaaatagacattatttgaaaaaactgagattatgactgagaaaacaaaaataattgtaggctatgccagagtttcttctcgtgaacaagct

SEQ ID NO: 25589 - DNA, 260 bp, Unknown; identical to SEQ ID NO: 17319
  Description of Unknown: LeftRegion for integrase A1157 sequence

SEQ ID NO: 25590 - DNA, 260 bp, Unknown
  Description of Unknown: LeftRegion for integrase A1158 sequence
aatgccagtagaagctgaatatctcagtgtcaaagatcctctgctcgctccgaacatgggtgtgttgtcagcccgctttgcaatcatggcatatgcatcttttgacgcctgaaggctcgcagtaaagttggcgtgatttctcttaataactgctggttttatgccagcattatcgctcatgttctttcggagcatcagcaatgaaaaaagccatcgcataccttcgcttttccacttcctcgcagcagtacggagactca

SEQ ID NO: 25591 - DNA, 260 bp, Unknown
  Description of Unknown: LeftRegion for integrase A1159 sequence
tcgttttatgctttttgttaatgtctttagtttttattcattcttttgatctttcaagaccatggtgtaagaaaattgcaatacgattattgttgtatattcaagataatgtgaccttaattgtctttttaaataaaaattaaacaaaaatcatatctcaccactaaggtttataaaagcatactttagcaggtgtcaccatgaaaaaagccatagcatatatgcgattttcatcaccaggtcagatgtctggtgattca

SEQ ID NO: 25592 - DNA, 260 bp, Unknown
  Description of Unknown: LeftRegion for integrase A1160 sequence
aatttatgaatagtttataggttttattaattaaagtttactaatttttttaaatttattaatagttaaaaaaaaattattatttttattttcacaaaaaaaatgtgcaggatttattcaattaaaccttgcacattttttaattaattgtttataataaaactaattaattaagtttaaaaagcaacacataatttaatatgcaccaatataatatagtaggctatgcacgggtgtctagtcgtgaacaggcagaaaat

SEQ ID NO: 25593 - DNA, 260 bp, Unknown
  Description of Unknown: LeftRegion for integrase A1161 sequence
gcagcgaaaatgctgacgatgataataacgccgataacgatacggcttcatgagcgcctaatattatgcggagcaggtcaagcgcctgttccgtatataaaaatatgaaaggtcaactgttttgtagcaaggctgtcaaccgtattgtaaggagcttgtcaactgttccgttggaatgaataagaagggagaaatttggtatgaacaacatgatagtagtacctgcggctgcaaaggttcagcgagggctgacaagggtg

SEQ ID NO: 25594 - DNA, 260 bp, Unknown
  Description of Unknown: LeftRegion for integrase A1162 sequence
tagtggctttggggagcctcggatgttcgcggcgacaatcgcaggccgaagatcggaatatcatagtgctccagcggaaatgtatgtgcatcggcctgcaacactgggccagtttcaggggtgatcggcgtccaataaccagccacccctgatctggcagactaccaccctgggtttggacgacagggtggcggacagggatgttgacggtggagacgatcgcacggatacgacgcgagcacgcgaaggggaaaagcatc

SEQ ID NO: 25595 - DNA, 260 bp, Unknown
  Description of Unknown: LeftRegion for integrase A1163 sequence
cacgccggagcaggaagcggccaaacgccgggaactggagcagcagctttatgaggtgttccgcaaatacgccgataagcggcagaaagaggaagccggggcataaggtttcccgaagccatcgttgatttgcggggctgctggcggtataataaaactgtcagcagctccgtttcttttttaagaaaaggagcgacaaaatgaataacaggatagacgcgatctatgcaaggcaatcggtagacaaaaaggacagcatt

SEQ ID NO: 25596 - DNA, 96 bp, Unknown
  Description of Unknown: LeftRegion for integrase A1164 sequence
taatcgagttgcgatgctaactggcatactagcgcagtgagacttccagcgcagccactaccctccgatctcatcgacgcgctgtacgcgctgccg

SEQ ID NO: 25597 - DNA, 260 bp, Unknown
  Description of Unknown: LeftRegion for integrase A1165 sequence
ccccccgtgcaatttgttttgaaaggtgatgattttaatgaccgtgcaaaagaagcttcaacttagatcgatttcgtatattcatgatcctgaagctgcacaaaaatggtttcaattatatgtggaacttttagtagaaataatgaaacaaaatgattctatggacaaggatgacgtgcatacattgtaagcacaacaagatggaagggctggttgtattgaagaaaacagtcgcatattaccgtagttcatctaaaaaa

SEQ ID NO: 25598 - DNA, 260 bp, Unknown
  Description of Unknown: LeftRegion for integrase A1166 sequence
ctgcgtcctccttcgataatactctgggaaggacatgaaaagcggcagttcgtatttgcgcccaatctgcggtagagggccatcagctcgaagcagcccacatgatttcttgggaggcgggcgtggctcggggaaaagcaccattatccgaaggagaaaccgagccgtccgcgcagctgctggctgcggagtacgtccggatgtcgaccgagcatcaacagtattcaacccagaaccaggcgcagacgatccgcgaatac

SEQ ID NO: 25599 - DNA, 260 bp, Unknown
  Description of Unknown: LeftRegion for integrase A1167 sequence
tttaggcatgcaatcacgcgaagaatgatgcgaagtgatcgctcccccttgttaatatccaatttagctcaaaatttaggacatgagaaagaccagggcgttatcatttcatgttatggtactagccctgaacatgacagggcggggattttaaaggcatttgagctggagtagtagcaattttaaagaggtaatgaattatgaaagccgtaatattcgccagagtatcatcaagagatcaagaagatggtcattcattg

SEQ ID NO: 25600 - DNA, 260 bp, Unknown
  Description of Unknown: LeftRegion for integrase A1168 sequence
agcgccctccggttgaagaaggaaatccttgtccttttttggactgaatatttcggcccttgttcgtaggcgacatttcgtttcccctcgaattaatatcagaactcgggaaatgcctcaaaatagctgcgaaatagatgaccggagctggcgatcagacacacaagactgaaaatgtgcgtgcggcacagtatgtccgcatgtccactgagcatcagaagtattctaccgaaaaccaagccatcgagatcgctaagtac

SEQ ID NO: 25601 - DNA, 260 bp, Unknown
  Description of Unknown: LeftRegion for integrase A1169 sequence
ctttttcggcaacatcttccgctccttcatgcgctaggattgcgatgcggatgtctgcaaaaatggatgtgctcggcgccgcgccagcctcaggatcaagcgcctttgatcaacgacaggaggggcaaaaagtggatcgggagacctttaacggcatgtcatcggagccgcagccaattcgggctgccgaatatgtccgtatgtcgaccgatcatcagcgatattctaccgaaaaccagtcggaggcaattcgggactat

SEQ ID NO: 25602 - DNA, 260 bp, Unknown
  Description of Unknown: LeftRegion for integrase A1170 sequence
ctttttcggcaacatcttccgctccttgatgcgctagaattgcgatgcggatgcctgcagaaatggatgtgctcggcgccgcgacagcctcaggatcagacgcctctgatcaataacaggaggggcaaccagtggatcgggagacctttaacggcaggtcatcggcgtcgcagccagtgcgggctgccgaatatgtgcgtatgtcgaccgatcatcagcgatattctaccgaaaaccaatcggaggcaattcgagactat

SEQ ID NO: 25603 - DNA, 260 bp, Unknown
  Description of Unknown: LeftRegion for integrase A1171 sequence
gcaagatgcaggccagcttcgcgaagggccagagcctgggcaacgcgcggaagactgcggccaagccggcggccaagcggaccaccaagaagtaagccgtagcgcttcgggaaggccctccaagtttggggggcttttttacgggttgcccccgcaacatcagtcctggcccgcacgtctgcgggccacaataggtcatcatgccaaacgcttccttgcgcgctgcgacctaccgccgagtctcgaccgaggagcaggtc

SEQ ID NO: 25604 - DNA, 260 bp, Unknown
  Description of Unknown: LeftRegion for integrase A1172 sequence
gagggtgttgccgtcctccggcccttgagtcgcttgtgattgcaaagagaggacttgttcgaactgccggcgacttgctgctaccttccaacacaccaaaagctgattcaaatcacctggcagccatgtcgatcgatcacggactcgaacgctgcggtggcgaggccgccgcgccattccgggcagccgaatacgttcggatgtcgaccgagcatcagcagtattcaacgctcaatcagtccgacaaaatccgcgaatac

SEQ ID NO: 25605 - DNA, 260 bp, Unknown
  Description of Unknown: LeftRegion for integrase A1173 sequence
atgatctgcccttcttcggcaacatgcttcgtctccatgacgatacactgagagaagcagagggtttccggcgtaggatcgtccgtacaacggtcgattgcttggtgtgccggtaagacgggtggtgaccgccaatgacagcgccgcgcaatgagatctcttccggctttcccgaggtgcgtgccgcgcagtacgtgcggatgtcgaccgagcatcagcgctattcgacggagaaccaggcggatgccatccgtgactac

SEQ ID NO: 25606 - DNA, 260 bp, Unknown
  Description of Unknown: LeftRegion for integrase A1174 sequence
actgcgcagcgaacgtcatgtgcaagacgcggccgaggtcaggcgatatcggcggcatgcggttgggactggaactgcatgagccggctggcgcttgttcgccgtcccgcggttgggggggccaagctctctgcgctcaggttgcgcagtttgtgaacgagcagtagaggcgaaccgagggttcgcaaggggaaaaagctatgcgcgccgcgggatacgttcgcatgtcatctgaccgacaagagctttccattggcacg

SEQ ID NO: 25607 - DNA, 260 bp, Unknown
  Description of Unknown: LeftRegion for integrase A1175 sequence
aaaaagacgggcgaatctttactgccacactcgaagataaatgggtttttcgcaaggccgcccaccttaaagagttaaaagatgccgagtgggggaaatcgccaatttttctaagaataaacgggaaagaaattgacggacaagtaactcaggccatgattgttgatgtaggtgaagacaaagagtaagaccaaaaacccatgatcgcagcagtctatatccgaaaatcccgcgaagataaaaataaaccctcccaccgg

SEQ ID NO: 25608 - DNA, 260 bp, Unknown
  Description of Unknown: LeftRegion for integrase A1176 sequence
gacagtatctgaacgagtctcaccgtgagccggtggagatcacgcgacatggacggcgcgagtttgtactgatgtcggccgcccaatatgacgagctactgtcagccgcgcagcgcagcggcaaggccgctgaagccgccaccgaacccgaacgtcattaagatccctcccccgacacggagcctgaaaggactgccgatatgacccgcgttgcgctttatgcccgatattcttccgacaatcagcgcgaagcgtcgatc

SEQ ID NO: 25609 - DNA, 260 bp, Unknown
  Description of Unknown: LeftRegion for integrase A1177 sequence
attgatttaactcactcaacttatttccaggttagccaactgtcttgaagaaagagatttctcaataacctttttgttccactgaattttcttgaggagctaaacgtcaaactttgttagcctttgtcgaacatttagttcaatcaatgtttgacatacaattagttaactaattaatcgattacggagagaatataaggatgaaactgaaacctattattggttatgctcgtgtctcaacggaagaacaagccaacacc

SEQ ID NO: 25610 - DNA, 260 bp, Unknown
  Description of Unknown: LeftRegion for integrase A1178 sequence
aggaatatgtaaaatgaataagcaaaagaaaattacaattacatcagtaagctatgttcatgatccagaatcagctcgaaagtggtttgaagcatatatcaagattgttgaaaaagaattagttaaagcaattaataaggactagctgctatttttgatacatacagtgtaaatagaacatcatgagaggaggtcctgaattgaagaccgttgcatattatagaagttcaattgattctcaggaaaactcaatcgaaatg

SEQ ID NO: 25611 - DNA, 260 bp, Unknown
  Description of Unknown: LeftRegion for integrase A1179 sequence
aagcagttcgaccggcccgctgagcactcggcggttcctggacctcatggccgccgcgaacaggcgcatctgaaccgccggggcgaggagccgcctgtcttcgccgcgctcaccattcgtcgaccccccagggtggaccggtcgcgacggcggcgggctcaacccacagctgcaatctcaaatgtcgctaaactaccctcatggcgaaagcaaaaactcctggtcagcgggtgggagtggggtcggcggcgatttacgcg

SEQ ID NO: 25612 - DNA, 260 bp, Unknown
  Description of Unknown: LeftRegion for integrase A1180 sequence
aatgagttacattgtaattcactcatgcttatcaagcaaggagcaacagtcaacttggagtataccccatcctgacgtcaggcacaggcccgaaaagcgtcagattagggtccttttcggaattgattgacactctcactccggggtcttagactctaacttgacacttttgccttccccctcaaaaaacaggagttcccttgagcgaccagcgcatcggctatgtccgcgtctcaagcgtcgaccagaacacggaccgc

SEQ ID NO: 25613 - DNA, 260 bp, Unknown
  Description of Unknown: LeftRegion for integrase A1181 sequence
gcgcacatggtccggcgcatggatagccctgtgctgcgcatgcacgtgtcgttcgaagcgacaagaaccggcccccaacttctgatcgaggcctacgcccatcttgtgccgacgatacggcgcacgaagcaacggccggtgcgtcgagcgaacccctcatcgaaggtgacgaaagcgatggcgagatcgggaggtgagcaatgaccgagacacgatgcgcgctctatgcgagggtgtcgagtgaggcgcagacgcgcgac

SEQ ID NO: 25614 - DNA, 113 bp, Unknown
  Description of Unknown: LeftRegion for integrase A1182 sequence
agctgacctgggctacttgtcaagggtgacatgtacggttcacactatcggacgtgacttcgacgatcgttcgtgtagtgatctactgccgcatctccaaggaccggatcggc

SEQ ID NO: 25615 - DNA, 260 bp, Unknown
  Description of Unknown: LeftRegion for integrase A1183 sequence
caactcaatattaatatggaagatttatacgaattcattcagtcggaaaaacagtgagtttttctcactgcacctgaaagtcaactacttgattgacctcgattcataatgcgccttattgaaacttatattttcacatagtattcgtctaataaattaaaaatatacataaaatattgattaagaaaggggtttagctaatgaaatgtgtcatttatagacgtgtatcaactgacatgcaagttgaagaggggatttca

SEQ ID NO: 25616 - DNA, 260 bp, Unknown
  Description of Unknown: LeftRegion for integrase A1184 sequence
ttctcgaaaagaaaaaatgaactcaagaatatgccttggccttttacattcccaatcgagagtgtaaacgaagtggttcattaatgattccatacaatgtacacaataaaatgacatatgttatctcttataaagcgctcggcatgagcgctctatttttgttagcacggaatttgtttttttcaaaggagggcaaccaaatgaaagtcgccatttacgccagagtaagtacagacgagcaagcgaaagaaggcttttct

SEQ ID NO: 25617 - DNA, 260 bp, Unknown
  Description of Unknown: LeftRegion for integrase A1185 sequence
aaatcgactgttgatctttagccctgaatcaaccttcaaaaagtatcatgatattgttgttccatatgacacagttaatgatcttaaaatctatgctaaagtcatatggtatgccgtgttattagattgagtctttagcgctaaagatttaatcagggcgggcgacggctcgcccaattttttctaaggggggttgactaatgagagtggccatttacgtgagagttagcacagacgaacaagcaaaagaaggtttttct

SEQ ID NO: 25618 - DNA, 260 bp, Unknown
  Description of Unknown: LeftRegion for integrase A1186 sequence
gcatcggtcagggccagcgactccccgtcgagcacgacggaccggcacgggagttcccgcgccagcgcgacgatctcgggcacggcgtcggtgatgtcgcggagcgtgcgggtgtagacgcgcacctcgtcgccgagccggtggacctggatccgggcgccagccaatagttggtcatgactcatgtagtatttggcgccatgaccagcgccaacgccatcatctacgcccgcatctcgaaggaccgcacaggcgcgggg

SEQ ID NO: 25619 - DNA, 260 bp, Unknown
  Description of Unknown: LeftRegion for integrase A1187 sequence
gccggcgctcgtcacgatgctgcgcagcagccggggacggcgaaatcggggacctgttcgtcccgagccaaaccgccaacgggattggcgatgaggacaacggtgacaacgtttgaagcgccacatcgggggttgatgccgttggcgaggtaagaccgggaacggcgctaccgtggcaaggtcgcgcctagtgtctgcatatggaagctgcggtgtacctgcgtcagtccgtcgataagtacggtgacgaacttgcgatc

SEQ ID NO: 25620 - DNA, 260 bp, Unknown
  Description of Unknown: LeftRegion for integrase A1188 sequence
gggtgcagctctcacgagcaagcgctgagtcgagaaagactgaggggcgatccctgtcggttagtttgccgaatgaggctgccgctgccgggacggttccgagtggacggccgcacgagatcacgatgcttctggcgagccttgtgctctcgacccgtcatccgacagtcgccaggtgatggaggatatcgaacatgtccatgaacagcgaatctcatcaaaagatcacaagcgcacacctgtcgcgcatggcgtatctc

SEQ ID NO: 25621 - DNA, 260 bp, Unknown
  Description of Unknown: LeftRegion for integrase A1189 sequence
tgaagcgactttataacgatgtggaatacgaggtgattgtgcgatcagacggacagtttgaatttcaaaaacagctctataaaagcttatccaaaattgcgaaagagattaccggtacacattggtctggacctgcgttttttggtttgcgtaagcctaacaccccatcgaaaaagaaaaagtgagggaaagaaaaatagatgagtaaacatgttatacctaaacgtcgatgtgctgtctacacacgaaaatcccacgaa

SEQ ID NO: 25622 - DNA, 260 bp, Unknown
  Description of Unknown: LeftRegion for integrase A1190 sequence
cgtgaaaagaactataggatatcgatcgctatcgccaaggaaatgctctcgaaaaggattataaacgagagggaatacagcaaaattgataaaatgcttgttgctaaatataaccctgtatttggaggcttgtaagccttaataagcttgctatgtatcaaaatcagagttaacatggtgcttgaaaggaggagctttcaatgaccagaataataaggaagataacgcctaaggcgccaaaagcacccataaaaaaacgt

SEQ ID NO: 25623 - DNA, 260 bp, Unknown
  Description of Unknown: LeftRegion for integrase A1191 sequence
tttagagatgtattacttatccattgcacccattaaatcaatgtttgagggggggattttaagtaaatctgaataccttaaagcagaagcatttttagcagacaaatattgtatcaataaaggtaacattcatcgtcttaacaacttgactaaaccccctaaaagagtgatatatggtgtaaccaaagaggaggtaaaagatgaaagaaaagaagataaccaaaatcgaagcattatccaaattaccaaagaaaactaga

SEQ ID NO: 25624 - DNA, 260 bp, Unknown
  Description of Unknown: LeftRegion for integrase A1192 sequence
gttgttttaacagtcattccccgtttacatatttatgactttgcaacagaaatttacagtttcctcactgattgaggttttttacgctttcggatcatatacttcaacataagttattgatcttatcgatcaatttcgtttatcgttaaagtaagtattttcacttgattcactagcttgttgaatggaaattaaaagccatgactggaacagccgagttggttattttcgttaccgatgcaactggctttgcaatgcag

SEQ ID NO: 25625 - DNA, 260 bp, Unknown
  Description of Unknown: LeftRegion for integrase A1193 sequence
cagctcaaaccagatgcgtactgatgtagtggagtcggcgcgaacctggttgggagcatgttcggctcagatagtgattgtcggaaaacgatcatttgccgacaaccttgcgtgagcgggagaaaccccaagataagagtgtcgaaaactcgtgccgggaatcaacgtcggcaaacccgatttcagctattttcgacatcatgttgatcggctacgggcgggtgtcgaccgccgaccagaaccccgcccaccagatcgac

SEQ ID NO: 25626 - DNA, 260 bp, Unknown; identical to SEQ ID NO: 25625
  Description of Unknown: LeftRegion for integrase A1194 sequence

SEQ ID NO: 25627 - DNA, 260 bp, Unknown
  Description of Unknown: LeftRegion for integrase A1195 sequence
agaactcgccttcattactgacgctcacacgttgagcatgctggcaggtcgaggagtgctaacccccgcagagtatcggcgtgtctatcggttgttgttccaggcgttgagcccgatctatcaaccacagattgtgggcgaaacgactggataaacacctggtttagagcgtgtatagacctaacacgaaaggagaaaacgtggcacaagttagtgtggtgacaccagttcggccgccgaccccgaaactggtcaacgta

SEQ ID NO: 25628 - DNA, 260 bp, Unknown
  Description of Unknown: LeftRegion for integrase A1196 sequence
ttccaacgccggacccgctgattaagagtcagcgggtcccgtcgctgcgggggccgcgatcgtcggccgacgggtgtcgggggtgtcgggctgtcccgataacgaaggtttttgggacaccgccgtggtgttcggctgacctggacgtttcgtgtcccaaaaacgcgtgccgaaagttgtcggtgtcggctgatacaaccatgttcgtgccactgctgggatatgcgcgagtatcgacgagcgatcagagcctcaccggg

SEQ ID NO: 25629 - DNA, 260 bp, Unknown; identical to SEQ ID NO: 25628
  Description of Unknown: LeftRegion for integrase A1197 sequence

SEQ ID NO: 25630 - DNA, 260 bp, Unknown
  Description of Unknown: LeftRegion for integrase A1198 sequence
cttcgagtaacagtttcgggccggtaactggtcttcacgaagtgagatccctgaaaaggagtactttattagtttcattagggtataccctattgagacagtcatttttgtatcatttccactgcctcactaagtcctaaccgttagttttgatacactgtccgtaatagctattaaccctattgagacactaggttgatatgacccgctacggcaccctccttggactccacggccaacccaccgaccgcgtcatcatt

SEQ ID NO: 25631 - DNA, 260 bp, Unknown; identical to SEQ ID NO: 25630
  Description of Unknown: LeftRegion for integrase A1199 sequence

SEQ ID NO: 25632 - DNA, 260 bp, Unknown; identical to SEQ ID NO: 24376
  Description of Unknown: LeftRegion for integrase A1200 sequence

SEQ ID NO: 25633 - DNA, 260 bp, Unknown
  Description of Unknown: LeftRegion for integrase A1201 sequence
ataaaaattgaatgtctttctggcttagataaaggaaaggttattgagtttatttcttcaaagaatggaaatgagtttgaattagcagctggagaatacaaaatctcagaaactcaagctccagagggctatactttaataggacaaaaaaattaactgtcctaaattgaaaaaatacatacggaaaggaggataagaaaatgtcaaggacttcaagaattacagcactttacgagcgtttgtcaagagatgatgacctt

SEQ ID NO: 25634 - DNA, 260 bp, Unknown; identical to SEQ ID NO: 25560
  Description of Unknown: LeftRegion for integrase A1202 sequence

SEQ ID NO: 25635 - DNA, 260 bp, Unknown
  Description of Unknown: LeftRegion for integrase A1203 sequence
ggcaacccgaacgagagtcaaaatacatttgcgatgtgccggcgcatcgcctgattttacgcacttccgaacccgtcatggcgaagaaaccgaaagccaaggtctacagctatctacgcttctccgatccgaagcaggccgctggcagcagtgcggatcggcaaatggaatacgcggcgcgatgggcgaccgagcacgacatgcagctcgacgctacgctgacgttacgcgacgaaggactgtctgcattccaccagcgc

SEQ ID NO: 25636 - DNA, 260 bp, Unknown
  Description of Unknown: LeftRegion for integrase A1204 sequence
ccggtcggcaagagcggcaggatattcaatcccgaacgggtgcaggtgaattggcgatgagccggcaccacaacatcgtgatcgtctgtgaccacggccgcaaaggcgatggccgcatcgaacacgagcgctgcgatcttgtcgcgccgatcatttgggtcgacgagacccagggctggttaccgcaggcgccagcggtggcaacattactcgacgacgacaaccagccgcgagccgttattggcttgccgcccaacgag

SEQ ID NO: 25637 - DNA, 260 bp, Unknown; identical to SEQ ID NO: 25635
  Description of Unknown: LeftRegion for integrase A1205 sequence

SEQ ID NO: 25638 - DNA, 260 bp, Unknown; identical to SEQ ID NO: 25633
  Description of Unknown: LeftRegion for integrase A1206 sequence

SEQ ID NO: 25639 - DNA, 260 bp, Unknown
  Description of Unknown: LeftRegion for integrase A1207 sequence
aagttaaagaagatagtaaactacaattagtatacaaagcatcaatttggaacgataaaacagtacgctttaatttagactaaataaaaaaataagcactctctcaacttggcggaaggtagagtgcttacacaaaaaatcaacctataaaataggtctctttatattgcctattttatcatataaaggagaaaaatactatgaaattacgggctgcaatatatgtacgagtatcgacaatggaacaagctgaggaagga

SEQ ID NO: 25640 - DNA, 89 bp, Unknown; identical to SEQ ID NO: 24761
  Description of Unknown: LeftRegion for integrase A1208 sequence

SEQ ID NO: 25641 - DNA, 260 bp, Unknown; identical to SEQ ID NO: 24540
  Description of Unknown: LeftRegion for integrase A1209 sequence

SEQ ID NO: 25642 - DNA, 260 bp, Unknown
  Description of Unknown: LeftRegion for integrase A1210 sequence
ttttgcatattcattgaaacgtttaataacactatagtttaatttaaaatctcctcatttggacaaacagctgttacatagcattacccaaggggtgatgcattttatgaaagtgataatcatcgagggaccgcaagctgacaaatgcattaacgattgctatcattatttaataaaactttataggaaggagattcagggtgatagcaatatatgtaagggtatcgaccgaggaacaagcgatcaagggatcgagcatc

SEQ ID NO: 25643 - DNA, 260 bp, Unknown; identical to SEQ ID NO: 24455
  Description of Unknown: LeftRegion for integrase A1211 sequence

SEQ ID NO: 25644 - DNA, 260 bp, Unknown; identical to SEQ ID NO: 24864
  Description of Unknown: LeftRegion for integrase A1212 sequence

SEQ ID NO: 25645 - DNA, 260 bp, Unknown
  Description of Unknown: LeftRegion for integrase A1213 sequence
ggaaccccgccctcgaccccgacatccccctcggcgatgccgtcgacgccatcgagaccgtcatcgtgccgcgcgcccgcgatctcggcggtttcgaggtgcgccgcgcgctgccctcggcccggaggcagatggtgggccccttcatcttcttgaacatgattggtattgtgaccccatcagagacgatgaggccgagccatgaccaatccagcaagccgaccgaaggcatacagctacattcgtatgtcctcggctat

SEQ ID NO: 25646 - DNA, 260 bp, Unknown; identical to SEQ ID NO: 25635
  Description of Unknown: LeftRegion for integrase A1214 sequence

SEQ ID NO: 25647 - DNA, 260 bp, Unknown
  Description of Unknown: LeftRegion for integrase A1215 sequence
gaccacgcgtaccgcgccggctaccaccgcgcgctcacccacgtgtcgcaaggacttctcgacgccccggcagcaccgccggacggcggagaggaagccgggcacgacccgcaggggacctgcaccccgtgcgacgacccgctcggcaacgtgcggccgatccggccgcacggagaggacatcaacccacggaaagcggtatgaaacgagacctaccaagcacgttccgcggctcccgcacgccgggcgagccgtggctc

SEQ ID NO: 25648 - DNA, 260 bp, Unknown; identical to SEQ ID NO: 24649
  Description of Unknown: LeftRegion for integrase A1216 sequence

SEQ ID NO: 25649 - DNA, 161 bp, Unknown
  Description of Unknown: LeftRegion for integrase A1217 sequence
aggctggaccacccacaacaacacccacggccacaccgaatggctaccaccaccccacctcgaccacggccaaccgtggacctgtgagatacactacacctgtgcgtgctgctgtctacctccgaatctcagaagaccgctccggcgaacagctcggcgtg

SEQ ID NO: 25650 - DNA, 260 bp, Unknown
  Description of Unknown: LeftRegion for integrase A1218 sequence
tccgtgcggccgccccgagagcgcttcgccacccgtttcggccgttctggcgcttcgccgcccgcgcggccgctccgagggcgttgcgtcacccgtgcggccgtcccgattctgcgccgcgtactatggacggcgcagaaggggagtagctcttcgcccgagaacttctgcaaggcactgctcttggctatggtctcggcatgcccatcgcgcctgagttcctgagcctcgcctacccaggtcaggagttccccgcctac

SEQ ID NO: 25651 - DNA, 260 bp, Unknown; identical to SEQ ID NO: 25647
  Description of Unknown: LeftRegion for integrase A1219 sequence

SEQ ID NO: 25652 - DNA, 91 bp, Unknown
  Description of Unknown: LeftRegion for integrase A1220 sequence
ctagtatttattttgaaaggagcaattttatatgaaacgtgcagcattgtatatacgtgtatccacaatggaacaagccaaggaaggatac

SEQ ID NO: 25653 - DNA, 260 bp, Unknown
  Description of Unknown: LeftRegion for integrase A1221 sequence
agttcttgatgctttaaataacagtatggataatcaaaaggaaaataaagtcacagttaatgatattacttatcaattttctacaattaacgctggaacaacaaatataacaactttagagattttcccaaactaaagagagcctccgggcttttcttttttaccgaaaaaaagaacgtatgtgcgaaaggagaatgagaatgaaagcggctatctatataagagtatctacacaagaacaagtagaaaattattcaata

SEQ ID NO: 25654 - DNA, 260 bp, Unknown
  Description of Unknown: LeftRegion for integrase A1222 sequence
ttcaactgttacagaattattacaaatagttggtatagtcctctttagcctttggagctattatctcatcatttgttttttaggtgaaaactgggtaaacttagtattaatcaatataaaattaattctcaaatacttaattacgtactgggattttctgaaaaaaagatcttaactttccatgcgagaggagaacggaaatgaaggcagctatttatatacgcgtatctactcaagaacaaatagagaattactctata

SEQ ID NO: 25655 - DNA, 260 bp, Unknown; identical to SEQ ID NO: 25639
  Description of Unknown: LeftRegion for integrase A1223 sequence

SEQ ID NO: 25656 - DNA, 260 bp, Unknown
  Description of Unknown: LeftRegion for integrase A1224 sequence
aaaaattcaaggaacttcttgatttgggtgctattactcaagaagaatttgaaattcaaaagtcgaaattattaaaataaataaaaaaatccgctcaagtttggcaacgaggggcggattaaaatctatgtggtatagtaaacctccaaatttggagagttttactgtacttattttatcagaaatgaggtacaaaaacaatgactaagaaagtagcaatctatacacgagtatccactactaaccaagcagaggaaggg

SEQ ID NO: 25657 - DNA, 260 bp, Unknown; identical to SEQ ID NO: 24864
  Description of Unknown: LeftRegion for integrase A1225 sequence

SEQ ID NO: 25658 - DNA, 260 bp, Unknown; identical to SEQ ID NO: 24846
  Description of Unknown: LeftRegion for integrase A1226 sequence

SEQ ID NO: 25659 - DNA, 260 bp, Unknown; identical to SEQ ID NO: 25653
  Description of Unknown: LeftRegion for integrase A1227 sequence

SEQ ID NO: 25660 - DNA, 260 bp, Unknown
  Description of Unknown: LeftRegion for integrase A1228 sequence
tgttcatcgtcataaatatcaaattcactactataattttcaactgattcttttatataagctatttctgcgtcagtaaactttacgcacatttcatcacctactttttattttattatatcacatttagtacctagtactaaatttcgggtagcccgcctacccttattatttttttgccaattttgaggagggagcacatgaaagtagcaatttatactagagtgagtacacttgaacaaaaagaaaaaggacactct

SEQ ID NO: 25661 - DNA, 260 bp, Unknown; identical to SEQ ID NO: 25635
  Description of Unknown: LeftRegion for integrase A1229 sequence

SEQ ID NO: 25662 - DNA, 260 bp, Unknown; identical to SEQ ID NO: 24488
  Description of Unknown: LeftRegion for integrase A1230 sequence

SEQ ID NO: 25663 - DNA, 260 bp, Unknown; identical to SEQ ID NO: 25639
  Description of Unknown: LeftRegion for integrase A1231 sequence

SEQ ID NO: 25664 - DNA, 260 bp, Unknown; identical to SEQ ID NO: 25635
  Description of Unknown: LeftRegion for integrase A1232 sequence

SEQ ID NO: 25665 - DNA, 260 bp, Unknown; identical to SEQ ID NO: 24455
  Description of Unknown: LeftRegion for integrase A1233 sequence

SEQ ID NO: 25666 - DNA, 260 bp, Unknown; identical to SEQ ID NO: 25633
  Description of Unknown: LeftRegion for integrase A1234 sequence

SEQ ID NO: 25667 - DNA, 260 bp, Unknown; identical to SEQ ID NO: 24846
  Description of Unknown: LeftRegion for integrase A1235 sequence

SEQ ID NO: 25668 - DNA, 260 bp, Unknown; identical to SEQ ID NO: 24846
  Description of Unknown: LeftRegion for integrase A1236 sequence

SEQ ID NO: 25669 - DNA, 260 bp, Unknown; identical to SEQ ID NO: 25656
  Description of Unknown: LeftRegion for integrase A1237 sequence

SEQ ID NO: 25670 - DNA, 89 bp, Unknown; identical to SEQ ID NO: 24761
  Description of Unknown: LeftRegion for integrase A1238 sequence

SEQ ID NO: 25671 - DNA, 260 bp, Unknown
  Description of Unknown: LeftRegion for integrase A1239 sequence
accattaactgaaaataaagatgtttataaagattaataacatctttaagcgtatcacataaaaaaacgttatcagcaactggcgaccaaaccgaaactgataacgcaaagattttaataagaaaacaacagagcaattaagaaattgcacacatttattataacatctttgctcttgttttaatactaggagtgagaaaatgaaagtagcagtctactgcagagtttcgactttagagcagaaagaacacggccactca

SEQ ID NO: 25672 - DNA, 260 bp, Unknown; identical to SEQ ID NO: 24488
  Description of Unknown: LeftRegion for integrase A1240 sequence

SEQ ID NO: 25673 - DNA, 75 bp, Unknown
  Description of Unknown: LeftRegion for integrase A1241 sequence
ttgaggagggagcacatgaaagtagcaatttatactagagtaagtacacttgaacaaaaagaaaaaggacactct

SEQ ID NO: 25674 - DNA, 75 bp, Unknown; identical to SEQ ID NO: 25673
  Description of Unknown: LeftRegion for integrase A1242 sequence

SEQ ID NO: 25675 - DNA, 280 bp, Unknown
  Description of Unknown: LeftRegion for integrase A1243 sequence
tcggtgaatggacaaaaacccggtctattaaagacaaggcctaatttaatctaagatttcataacacatataccgaaatctaaaaactagatagatctatattcaaagaatacaaatctttcatattattttgttgttttcgtattcaatgttagatagaatgtttttacagatacttctgttttgacattaaacacaataaagaggtgctaaatttttggagttaaaaaatattgtcaattcttacaacatcacaaatattttaggttatcttagacgt

SEQ ID NO: 25676 - DNA, 260 bp, Unknown; identical to SEQ ID NO: 25560
  Description of Unknown: LeftRegion for integrase A1244 sequence

SEQ ID NO: 25677 - DNA, 260 bp, Unknown
  Description of Unknown: LeftRegion for integrase A1245 sequence
tgggatgactaccggctcgcccgcatcgagaagcgggggaagggggcgcagacggccgcctagggcgttctcgggggtgatgggggctggccggtggatcggtcggcccccttcgtttttcctggtcaggccctaatacgcaagtcgataactctcctgggagcgttgacaacttgcgcaccctgatctgacctgcgacgatgcccggcatgacaacagaaacagggccggaccccgccggactgatcgacttgttctgt

SEQ ID NO: 25678-26000 - skipped (323 entries)

SEQ ID NO: 26001 - DNA, 260 bp, Unknown
  Description of Unknown: RightRegion for integrase B2 sequence
attcagtaccgcagatacctgacaactgcagcgaagcgcgagagggaagaagcggtgtgatggaaggagacaggaccctgccgggtgtggtttttgtggctgcatcaggcagggctttttttgtttttaaggttttattgtgctgctattttgcctgcttttttgtctggccttttttacccgtaaggattgctatgtgcagaatcctgttatatgttgtgggtggcgagaaatacacatacgacagaaaatacacatag

SEQ ID NO: 26002 - DNA, 260 bp, Unknown
  Description of Unknown: RightRegion for integrase B3 sequence
tcgcaggagctgctggagacgtatgtgcgcaacggcttctcgctggagcgcctgaaatgaggggaatgcggatgaaaaagttatgttcgctgctgatggcgctggtgctgctggcgggctgtgcgctgggtgaaagcgcaccggaattccgccggatgggggatgcggcgctgctgccgtatctggaaaacagcctgtacgaacagctggtgtccgatttggacagcagcgactattttgtggaaaacgtacaggcggtg

SEQ ID NO: 26003 - DNA, 260 bp, Unknown
  Description of Unknown: RightRegion for integrase B4 sequence
tcgcaggagctgctggagacgtatgtgcgcaacggcttctcgctggaacgcctgaaatgaggggaatgcggatgaaaaagctatgttcgctgctgctggcgctggtgctgctggcgggctgtgcgctgggtgaaagcgcaccggaattccgccggttgggggatgcggcgctgctgccgtatctggaaaacagcctgtacgaacagctggtgtccgatttggacagcagcgactattttgtggaaaacgtacaggcggtg

SEQ ID NO: 26004 - DNA, 260 bp, Unknown
  Description of Unknown: RightRegion for integrase B5 sequence
tcgcaggagctgctggagacgtatgtgcgcaacggcttctcgctggagcgcctgaaatgaggggaatgcggatgaaaaagctatgttcgctgctgatggcgctggtgctgctggcgggctgtgcgctgggtgaaagcgcaccagaattccgccggatgggggatgcggcgctgctgccgtatctggaaaacagcctgtacgaacagctggtgtccgatttggagagcagcgactattttgtggaaaacgtacaggcggtg

SEQ ID NO: 26005 - DNA, 260 bp, Unknown
  Description of Unknown: RightRegion for integrase B6 sequence
tcgcaggagctgctggagacgtatgtgcgcaacggcttctcgctggagcgcctgaaatgaggggaatgcggatgaaaaagctatgttcgctgctgctggcgctggtgctgctggcgggctgtgcgctgggtgaaagcgcaccggaattccgccggttgggggatgcggcgctgctgccgtatctggaaaacagcctgtacgaacagctggtgtccgatttggacagcggcgactattttgtggaaaacgtacaggcggtg

SEQ ID NO: 26006 - DNA, 260 bp, Unknown
  Description of Unknown: RightRegion for integrase B7 sequence
tcgcaggagctgctggagacgtatgtgcgcaacggcttctcgctggagcgcctgaaatgaggggaatgcggatgaaaaagctatgttcgctgctgctggcgctggtgctgctggcgggctgtgcgctgggtgaaagcgcaccggaattccgccggatgggggatgcggcgctgctgccgtatctggaaaacagcctgtacgaacagctggtgtccgatttggacagcagcgactattttgtggaaaacgtacaggcagtg

SEQ ID NO: 26007 - DNA, 260 bp, Unknown
  Description of Unknown: RightRegion for integrase B8 sequence
tcgcaggagctgctggagacgtatgtgcgcaacggcttctcgctggagcgcctgaaatgaggggaatgcggatgaaaaagctatgttcgctgctgctggcgctggtgctgctggcgggctgtgcgctgggtgaaagcgcaccggaattccgccggatgggggatgcggcgctgctgccgtatctggaaaacagcctgtacgaacagctggtgttcgatttggacagcagcgactattttgtggaaaacgtacaggcggtg

SEQ ID NO: 26008 - DNA, 94 bp, Unknown
  Description of Unknown: RightRegion for integrase B9 sequence
gacaccggcgcggtgcggatggcgcagattgccttgacattgttggaggaagcgcaatgaaggagtttctgccgaaatccgccgcgaaaatggc

SEQ ID NO: 26009 - DNA, 260 bp, Unknown
  Description of Unknown: RightRegion for integrase B10 sequence
gataaacatcatacatatcgtttggagatgaacggtataaatatgcgtgaaacggaatgatatcatctagcggtacttcgtaccgttaaaaatggaatggccgttccgcagtagcggaactggcattccgtttaagcataatttgcaaaatattaggccgctttcagcggccatatcatttttcaactgctttcttagacttcctttcttctgtaactgatgatcgatattgatggttctgttcttcatatccagatctg

SEQ ID NO: 26010 - DNA, 260 bp, Unknown
  Description of Unknown: RightRegion for integrase B11 sequence
cagggcggcgcgacccatgccattgaggaaggcggcaccgagctcatcccgctcgtctgacccataaaatcagcccggctgccaaatgatggcagccgggaaaatttagggaagctctgattaaatcagcaagagtggatggcgagagattttctgtcaagtcaaggtttgaaaaatgcaggaatactttgtgtatttctagtttttcaaaccgatggattggcggaaaatatccgccatccaccgcagatgatttattc

SEQ ID NO: 26011 - DNA, 109 bp, Unknown
  Description of Unknown: RightRegion for integrase B12 sequence
cagggcggcgcgacccatgccattgaggaaggcggcaccgagctcatcccgctcgtctgacccataaaatcagcccggctgccaaatgatggcagccgggaaaatttag

SEQ ID NO: 26012 - DNA, 260 bp, Unknown
  Description of Unknown: RightRegion for integrase B13 sequence
gcagatattctccatcaggcccaccgggtcggtaaaggtgtcggtgttgatgcgctgtaagataaagcgcttggagtggtcctcccgccagaccacgaaggtatcgttgatgtggccttcgccgtagtgacgggcatcgcagaccacaggcccgccaaaatcaaaggcatttgcggcggcgttgagaatgggttcggtaacaggtttcattttgggttcctcatttcttatccttcatgccgtttggcaggtgcagggcg

SEQ ID NO: 26013 - DNA, 260 bp, Unknown
  Description of Unknown: RightRegion for integrase B14 sequence
cagccattcgctcaacaaaccggaaatgtcataatacccatggaacagagtggcaagtagcgccatcagcgaaccgctgagcaagtcaccgttaaagcaggtgataatgattagaccaatcagaacacccagcatctttacaccggttacggtaactgtactgaatggcttgaccagatagccaaataagagcataaatgccaagccaatgaccatgacaattgcgtaggtcgaattgatctttctttgttttgtcattt

SEQ ID NO: 26014 - DNA, 260 bp, Unknown
  Description of Unknown: RightRegion for integrase B15 sequence
gccgtggtttacgacgagaccggacgcgcgacgctggaacgcgcggcgagcatggaatgaacgaacggagcgacgacagaaccccgcccgacgcgcttttgacgcttgcccttttttcgggttcatggtatactataccctgaaaaaatggcggagtgcgccgtttgtgaaacgataaaggaagtgcccttttgcaaggcgaagaaatcagggcggcgcaggccgcgttttccctcccggacccgagggagttgaacccg

SEQ ID NO: 26015 - DNA, 260 bp, Unknown
  Description of Unknown: RightRegion for integrase B16 sequence
aatctggcgttcttgattgggtttgtagccgcaaaaaagagaaaggatcggaatagatagtatccgatttgctgtaatgaactgttccttactttgacgatgagatgggggaataacaacgtcccgctttgcaatgtccgctacaacatcatctatgaaaaaatcccgaaagatcatctttcgggattttttgtcagccgctgagctcgcggatctcgtcctgaatgagccggcccgccgcggcggcgagctgatcaatg

SEQ ID NO: 26016 - DNA, 260 bp, Unknown
  Description of Unknown: RightRegion for integrase B17 sequence
aatctggcgttcttgattgggtttgtagccgcaaaaaagagaaaggatcggaatagatagtatccgatttgctgtaatgaactgttccttactttgacgatgagatgggggaataacaacgtcccgctttgcaatgtccgctacaacatcatctatgaaaaaatcccgaaagatcatctttcgggattttttgtcagccgctgagctcgcggatctcgtcctgaatgagccggcctgccgcggcagcgggacgcgccgga

SEQ ID NO: 26017 - DNA, 260 bp, Unknown
  Description of Unknown: RightRegion for integrase B18 sequence
aacagcctgcttgcccaatttacgcagtaccagttccgtggtatgcagcgggaattctgacccggaaaggagagcgcttgtgaattttgcattgtttggacgtttttttctggaatttgcaatgatgtatccggcagaatacctctgccttgcctcgctgcaggagcacttgcgtgcaccgcgtaaaacctatgcaatcggtgcgtcggcgatcacactgatgggtctggctggcgcagcggtgtgctgcatgctggaca

SEQ ID NO: 26018 - DNA, 260 bp, Unknown
  Description of Unknown: RightRegion for integrase B19 sequence
aacagcctgcttgcccaatttacgcagtaccagttccgtggtatgcagcgggaattctgacccggaaaggagagcgcttgtgaattttgcattgtttggacgtttttttctggaatttgcaatgatgtatccggcagaatacctctgccttgcctcgctgcaggagcacttgcgtgcaccgcgtaaaacctatgccatcggtgcgtcggcaatcacactgatgggtctggctggcgcagcggtgtgctgcatgctggaca

SEQ ID NO: 26019 - DNA, 260 bp, Unknown
  Description of Unknown: RightRegion for integrase B20 sequence
gaagaagtgcgcaaggcggcatgggataattccctgaaattgtatcgaatggataaataaccgggtaaaaagaaatggaagcaagcaacacaaaactattttcaaaagatgatctgaaaaaactgatcattccgctcttatttgaacaggcactggcaatcactgtgggcatggcagataccgtcatgatatcctctgcgggagaagcggcggtctccggcgtatccctgatcgacatgttcaataatctgatcatcagt

SEQ ID NO: 26020 - DNA, 260 bp, Unknown; identical to SEQ ID NO: 26016
  Description of Unknown: RightRegion for integrase B21 sequence

SEQ ID NO: 26021 - DNA, 260 bp, Unknown
  Description of Unknown: RightRegion for integrase B22 sequence
cagatttttccacgtctgactgtgttgcagttccatggtcaatgcctcccgttatattgatgtgccgcaagacggcaaagcgccgtcaaaccattgtatgcggcggtacccggttctgaccatgcgcacgggcaccttaaaaggacgggacagaaaaagccctgccagatcccaaaaggatctggcggggcttcagcatttggagcattgttcccggcaagccgcctcacatcgaaagaggcgttccttcgacacgcggg

SEQ ID NO: 26022 - DNA, 260 bp, Unknown
  Description of Unknown: RightRegion for integrase B23 sequence
gcaaggcgggagaactaccacaggaagaagcacgacgagaaaggagaacaaatcgcatgagaagattgattgataacgggaaccgccccattaccccaaagccccatatcggccactacgggcggctgcggaaagcctatctggaacaataccgccaccgcctttataccgcccttgtagccagcgagaagctatacccccaccttgcggaaacagaccgggcggcgcgggatatgctggactacctcatgccccgcctt

SEQ ID NO: 26023 - DNA, 260 bp, Unknown
  Description of Unknown: RightRegion for integrase B24 sequence
ctgggcgggcttgtgcgcacgcagaagggcgtgggttatcttgtggaggagcagacatgaacaaggaatgtaagctagcctttgcctacctgcatgaaaaacgggcggcggcctgccttctggcggcggccgtcgcctttttatttcttattacagagctgtaccatgccccgcgcgagctggccgtgtatacatcgctgatgctgagcacgggcgcggccctggcctttgccgccgggctataccgctaccgcgccgtg

SEQ ID NO: 26024 - DNA, 260 bp, Unknown
  Description of Unknown: RightRegion for integrase B25 sequence
atccagtacagacggtacttaacgacagctgcaaagagagagcgtggaatcgccgtgtgagaaaacaagaaaatgtgagagtgagaaacaaccctgctggatgtagtgaaaactacgtctggcagggctttttttgtttattggggattttacttctttgtctggtcttttttaactgtggggattgctatgtgcagagttctgttatatgttatgggtggatgagaaatacacataacagaaaagacaccggagcgttc

SEQ ID NO: 26025 - DNA, 260 bp, Unknown; identical to SEQ ID NO: 26024
  Description of Unknown: RightRegion for integrase B26 sequence

SEQ ID NO: 26026 - DNA, 260 bp, Unknown
  Description of Unknown: RightRegion for integrase B27 sequence
gagggcgaggatatcaaactcattcacaccgtgaggggtgcaggctatgtcatcaaataaaaaaacaagacccgcgcgccgccgctcttcgttcaagctgcggataacggtgtggataacgctgctcatcgccgttgtcagctccctcggcatcggaggaatactgataacaggctcgcagattgccgattcgcgcctgcagaatgagctgataagcacggtcgagcgcaatgttgacgagatagaatacaagaacggca

SEQ ID NO: 26027 - DNA, 260 bp, Unknown
  Description of Unknown: RightRegion for integrase B28 sequence
gagggcgaggatatcaaactcattcacaccgtgaggggtgcaggctatgtcatcaaataaaaaaacaagacccgcgcgccgccgctcttcgttcaagctgcggataacggtgtggataacgctgctcatcgccgttgtcagctccctcggcatcggaggcatactgataacaggctcgcagattgccgattcgcgcctgcaaaatgagctgataagcacggtcgagcgcaatgttgacgagatagaatacaagaacggca

SEQ ID NO: 26028 - DNA, 260 bp, Unknown
  Description of Unknown: RightRegion for integrase B29 sequence
gagggcgaggatatcaaactcattcacaccgtgaggggtgcaggctatgtcatcaaataaaaaaacaagacccgcgcgccgccgctcttcgttcaagcttcggataacggtgtggataacgctgctcatcgccgttgtcagctccctcggcatcggaggaatactgataacaggctcgcagattgccgattcgcgcctgcaaaatgaactgataagcacggtcgagcgcaatgttgacgagatagaatacaagaacggca

SEQ ID NO: 26029 - DNA, 260 bp, Unknown
  Description of Unknown: RightRegion for integrase B30 sequence
tgtttttgtgcaaaggcaggagaaacactttcagtaaaagcacttctgcctgtgaaatagtataccgcattttggaaaattggtcaacgggaagcaaaaactttgtaaaagaatttaaaaaaacagttgacaggtttttgaaaaactgctatgatggtcacggacaaaggaatgactgcggcgtgcgccgcttgaaaatggagaaaaatatgaaaagcaaaatcgttgtagattcctctgcaaatgtgtacgagctcccc

SEQ ID NO: 26030 - DNA, 260 bp, Unknown
  Description of Unknown: RightRegion for integrase B31 sequence
aacccccgatgtgaccgccgcaataaattttcttcgcatgataaaacctcctttttatgagcggttcatcccaggatcgagaatctccgcacttctacattgttattctccacgccggagcagtcctgaaagactttatgccgtatccggccccggatggtgttgccgctgacttccttcgtgccggcgatgccgcagccgagggagacgtccagcgtatttcctttcaaggcgctgagctgatagcagatgcgccgccc

SEQ ID NO: 26031 - DNA, 109 bp, Unknown
  Description of Unknown: RightRegion for integrase B32 sequence
gagaccgcccgcgcagtaaacattgccgcggcatttttagcaaagtggatggaagaatgaaccgttggccggcatcaccctgctgtctggcgggcagcaaaacaagata

SEQ ID NO: 26032 - DNA, 260 bp, Unknown
  Description of Unknown: RightRegion for integrase B33 sequence
atccgcgttccccctttctttcgtaaaattattatgcatttggataactttcgaccttagtttatactcgttagaataatttgtcaagcagtttttttgcgcctgcataaaaatcgtgcccggttgtttctgcatgcgcgcagagtgttgcttttttgacgaaaacaaagcgatttaaagtattctttctgactttttgcacaaaaaaatcaagaaattatatggaaaacggatattgcaatctttttccgtttgcgtta

SEQ ID NO: 26033 - DNA, 260 bp, Unknown
  Description of Unknown: RightRegion for integrase B34 sequence
gacgatctcgcagccctgatccgcgagcacggaaatccggtgcacattgcggagctgtgagcacgggcacatacgcacaaaaaagcaaggcttcccgaattcgggaagccttgctttatctatttctcttttttgcagtcacagtttctgccgcactgcgcacagttgccggtgcagccgctgccgcagcagccgccctttttcatggcgcggcgccagacgcgaaacgcgatgacggcgcacacggccacgacggccag

SEQ ID NO: 26034 - DNA, 260 bp, Unknown
  Description of Unknown: RightRegion for integrase B35 sequence
ggaggccgttatttaaaggaaaatttcaatattgatattattttattgccctttgactgataacataatcgtaaaaatgaacttggacacgtagaaatgatatctacaatggcatttcaattaatggaaggtgcaactatcgaagaattggataaagcaggtcttggaggacactttactcaatttaaccatgcattatttccagcagatccaaatggaataccatttacaagtgcttatatagcaacgactggggatta

SEQ ID NO: 26035 - DNA, 84 bp, Unknown
  Description of Unknown: RightRegion for integrase B36 sequence
aaaggcggtcgatacttaaaagagaatttttctctcaagattatattgttgtctttttaactgataacatacttgtaaaaatga

SEQ ID NO: 26036 - DNA, 260 bp, Unknown
  Description of Unknown: RightRegion for integrase B37 sequence
aaaggcggtcgatacttaaaagagaatttttctctcaagattatattgttgtctttttaactgataacatacttgtaaaaattaattgacacaataactttatcataaataaaagccacaaataaaataagaggaaaaaagagcaaaaaaaaagagaggtcgccgacattttagtcggaaaccttctttttttatttaactcttaatttttgccctgcgtaaatcgtatctgatgttagaccatttaactttttaatagt

SEQ ID NO: 26037 - DNA, 260 bp, Unknown
  Description of Unknown: RightRegion for integrase B38 sequence
aaaggcggtcgatacttaaaagaaaatttttctctcaagattatattgttgtctttttaactgataacatacttgtaaaaatgaaataggtcatttagaaatggttgctacaattgtttcacaacttatggaaaatgctactattgaagaaattaaagaagctggacttgaaagtttttatactgaacatggtaaaggtgtatttccaatgagtgctgatggtgttgcttttgatgcatcaacatttgcggttactggta

SEQ ID NO: 26038 - DNA, 109 bp, Unknown
  Description of Unknown: RightRegion for integrase B39 sequence
aaaggcggtcgatacttaaaagagaatttttctctcaagattatattgttgtctttttaactgataacatacttgtagaaatgaacttggtcatgttgaaatgatatgt

SEQ ID NO: 26039 - DNA, 260 bp, Unknown
  Description of Unknown: RightRegion for integrase B40 sequence
aaaggcggtcgatacttaaaagagaatttttctctcaagattatattgttgtctttttaactgataacatacttgtaaaaatgagcttgcacacattgaaatgatttctaccatgatttatcaattaacaaaagacgccactattgaagagttaaaagaagccggattaggtacaaattatgcagaacacaataaggcattattcccaaccgattcaaatggagtacctttttctgttacatactttgctgcaacaggag

SEQ ID NO: 26040 - DNA, 109 bp, Unknown
  Description of Unknown: RightRegion for integrase B41 sequence
aaaggcggtcgatacttaaaagagaatttttctctcaagattatattgttgtctttttaactgataacatacttgtaaaaatgaatttggacatgcagaaatgatttgt

SEQ ID NO: 26041 - DNA, 260 bp, Unknown
  Description of Unknown: RightRegion for integrase B42 sequence
aaaggcggtcgatacttaaaagagaatttttctctcaagattatattgttgtctttttaactgataacatacttgtaaaaatgaactagcccatgttgaaatgatatccgctatgatatatcaactactaaatggcgccactctaaaagaattaaaagaagctggattagaatctcactatgccgaacatggatatggactatatccaactgactctaatggcgtaccatttaccgtatcatattttgcaacaaccggag

SEQ ID NO: 26042 - DNA, 260 bp, Unknown
  Description of Unknown: RightRegion for integrase B43 sequence
aaaggcggtcgatacttaaaagagaatttttctctcaagattatattgttgtctttttaactgataacatacttgtaaaaatgaactaggtcacgtagaaatgatctgtgcaatgatatatcaattaacaaaaaatgctacaaaagaagaaatgataaaagcaggattcgatcaacattatgcagaacataaaaaagcactattcccaacagacgccaatggtgtaccatttacagcaagttactttgcaacaacaggag

SEQ ID NO: 26043 - DNA, 109 bp, Unknown
  Description of Unknown: RightRegion for integrase B44 sequence
aaaggcggtcgatacttaaaagagaatttttctctcaagattatattgttgtctttttaactgataacatacttgtagaaatgaatttggacatgcagaaatgatttgt

SEQ ID NO: 26044 - DNA, 109 bp, Unknown
  Description of Unknown: RightRegion for integrase B45 sequence
aaaggcggtcgatacttaaaagagaatttttctctcaagattatattgttgtctttttaactgataacatacttgtaaaaatgaacttgctcatattgaaatgatttct

SEQ ID NO: 26045 - DNA, 260 bp, Unknown
  Description of Unknown: RightRegion for integrase B46 sequence
aaaggcggtcgatacttaaaagagaatttttctcttaagattatattgttgtctttttaactgataacatacttgtaaaaatgaaatttctcactgtgaaatgatagcgtcaatgattactcaactaatgaaagatgctagtattgaagaactaaaaaatgctggcttatcagattactacacaactcacaaaaaaggaatattcccaagtggtgctaatggagtaccatttacagctgcttacattagttcaagtggaa

SEQ ID NO: 26046 - DNA, 260 bp, Unknown
  Description of Unknown: RightRegion for integrase B47 sequence
aaaggcggtcgatacttaaaagaaaatttttctctcaagattatattgttgtctttttaactgataacatacttgtaaaaatgaacttgggcattgtgaaatgattgcaacgatgtttagacagttaattaaggatgcaacgttagaagaattagaggcagcggggttagctgagtattatacagaacatggtaaaggtgtttatccagtaaatccttcaggagtgccatttacagcaagttattttgcatcgacgggag

SEQ ID NO: 26047 - DNA, 109 bp, Unknown
  Description of Unknown: RightRegion for integrase B48 sequence
aaaggcggtcgatacttaaaagagaatttttctctcaagattatattgttgtctttttaactgataacatacttgtaaaaatgaaatcggacatcttgaaatgattgct

SEQ ID NO: 26048 - DNA, 260 bp, Unknown
  Description of Unknown: RightRegion for integrase B49 sequence
aaaggcggtcgatacttaaaagagaatttttctctcaagattatattgttgtctttttaactgataacatacttgtagaaatgaattgacacaataagtttatcataaataaaagccacaagtaaaatagagcaaaaaaaaagaaaggtaaccgacaattatgtcggaaaccttctttttattttatcatttattttatagttaatacttgtcctggtttaattagattagggttgctaccaataacagatctattatca

SEQ ID NO: 26049 - DNA, 109 bp, Unknown
  Description of Unknown: RightRegion for integrase B50 sequence
aaaggcggtcgatacttaaaagaaaatttttctctcaagattatattgttgtctttttaactgataacatacttgtaaaaatgaacttggacacgtagaaatgatatct

SEQ ID NO: 26050 - DNA, 260 bp, Unknown
  Description of Unknown: RightRegion for integrase B51 sequence
aaaggcggtcgatacttaaaagaaaatttttctctcaagattatattgttgtctttttaactgataacatacttgtaaaaatgaattagcgcatatcgaaattatttgtgcaatgttatatcagttaatgaaaggtgcaacgcctgaagaaatgaaagaagctggattagctagtcactatgcagaacataaaaatgctgtttatccagtagatgcaagtggtgtaccatttacagtgacttattttgcaacaactggag

SEQ ID NO: 26051 - DNA, 109 bp, Unknown
  Description of Unknown: RightRegion for integrase B52 sequence
aaaggcggtcgatacttaaaagagaatttttctctcaagattatattgttgtctttttaactgataacatacttgtagaaatgagcttgcacacattgaaatgatttct

SEQ ID NO: 26052 - DNA, 109 bp, Unknown
  Description of Unknown: RightRegion for integrase B53 sequence
aaaggcggtcgatacttaaaagagaatttttctctcaagattatattgttgtctttttaactgataacatacttgtaaaaatgaactagctcatgttgaaatgatatcc

SEQ ID NO: 26053 - DNA, 260 bp, Unknown
  Description of Unknown: RightRegion for integrase B54 sequence
aaaggcggtcgatacttaaaagagaatttttctctcaagattatattgttgtctttttaactgataacatacttgtaaaaatgaaataggtcatttagaaatggttgccactatagtttcacaattaatatctaatgctacaattgatgagattaaagaagcaggactagaaagcttttatacagaacacggaaaaggagttttccctatgaacgcagacggtgtagcatttgatgcttcaacatttgctgtaactggta

SEQ ID NO: 26054 - DNA, 109 bp, Unknown
  Description of Unknown: RightRegion for integrase B55 sequence
aaaggcggtcgatacttaaaagagaatttttctctcaagattatattgttgtctttttaactgataacatacttgtaaaaatgaattaggtcacttagaaatggttgct

SEQ ID NO: 26055 - DNA, 109 bp, Unknown
  Description of Unknown: RightRegion for integrase B56 sequence
aaaggcggtcgatacttaaaagagaatttttctctcaagattatattgttgtctttttaactgataacatacttgtaaaaatgagttagcacacgttgaaatgatatgc

SEQ ID NO: 26056 - DNA, 136 bp, Unknown
  Description of Unknown: RightRegion for integrase B57 sequence
aaaggcggtcgatacttaaaagagaatttttctcttaagattatattgttgtctttttaactgataacatacttgtaaaaatgaactagcccatgttgaaatgatatccgctatgatatatcaactactaaatggc

SEQ ID NO: 26057 - DNA, 260 bp, Unknown
  Description of Unknown: RightRegion for integrase B58 sequence
aaaggcggtcgatacttaaaagagaatttttctctcaagattatattgttgtctttttaactgataacatacttgtaaaaatgaactaggtcacgtagaaatgatctgtgcaatgatatatcaattaacaaaaaatgctacaaaagaagaaatgataaaagcaggattcgatcaacactatgcagaacataaaaaagcactattcccaacagacgccaatggtgtaccatttacagcaagttactttgcaacaacaggag

SEQ ID NO: 26058 - DNA, 260 bp, Unknown
  Description of Unknown: RightRegion for integrase B59 sequence
aaaggcggtcgatacttaaaagagaatttttctctcaagattatattgttgtctttttaactgataacatacttgtaaaaatgagcttgcacacattgaaatgatttctaccatgatttatcaattaacaaaagacgccactattgaagagttaaaagaagccggattaggtacaaattatgcagaacacaataagtctttattcccaaccgattcaaatggagtacctttttctgttacatactttgctgcaacaggag

SEQ ID NO: 26059 - DNA, 260 bp, Unknown
  Description of Unknown: RightRegion for integrase B60 sequence
aaaggcggtcgatacttaaaagagaatttttctctcaagattatattgttgtctttttaactgataacatacttgtagaaatgaattagcgcatatcgaaattatttgtgcaatgttatatcagttaatgaaaggtgcaacgcctgaagaaatgaaagaagctggattagctagtcactatgcagaacataaaaatgctgtttatccagtagatgcaagtggtgtaccatttacagtgacttattttgcaacaactggag

SEQ ID NO: 26060 - DNA, 260 bp, Unknown
  Description of Unknown: RightRegion for integrase B61 sequence
aaaggcggtcgatacttaaaagaaaatttttctctcaagattatattgttgtctttttaactgataacatacttgtaaaaatgaaatcggacatcttgaaatgattgctagtatgatttatcaacttatgcaaggggcaagtatagatgaacttaaacaaaacggacttggaggattctttacagaacatgatggaggtctatttccagccgacccaatgggaattcccttttcagcttcttatattgaaacaacaggtg

SEQ ID NO: 26061 - DNA, 260 bp, Unknown
  Description of Unknown: RightRegion for integrase B62 sequence
aaaggcggtcgatacttaaaagagaatttttctctcaagattatattgttgtctttttaactgataacatacttgtagaaatgaattgacacaataagtttatcataaacaaaagccataagtaaaatagtgcaaaaaaaaagaaaggtaaccgacaaatatgtcggaaaccttctttttattttatagttaatacttgtcctggtttaattaaattagggttactaccaataacagatttattatcattgtagattttt

SEQ ID NO: 26062 - DNA, 260 bp, Unknown
  Description of Unknown: RightRegion for integrase B63 sequence
aaaggcggtcgatacttaaaagagaatttttctctcaagattatattgttgtctttttaactgataacatacttgtaaaaatgagcttgcacacattgaaatgatttctaccatgatttatcaattaacaaaagacgccactattgaagagttaaaagaagccggattaggtacaaattatgcagaacacaataaggctttattcccaaccgattcaaatggagtacctttttctgttacatactttgctgcaacaggag

SEQ ID NO: 26063 - DNA, 109 bp, Unknown; identical to SEQ ID NO: 26049
  Description of Unknown: RightRegion for integrase B64 sequence

SEQ ID NO: 26064 - DNA, 260 bp, Unknown
  Description of Unknown: RightRegion for integrase B65 sequence
aaaggcggtcgatacttaaaagagaatttttctctcaagattatattgttgtctttttaactgataacatacttgtaaaaatgaattttctcataatgaaatgatctgtacaatgttatatcaacttacaaaagatgccagtttaaaagaaatgcaagaagctggacttgatactttatacactgaacatggtaaaggtatttatccaactgactctaatggagttccttttacagcaacatattttgcatctgttggag

SEQ ID NO: 26065 - DNA, 260 bp, Unknown
  Description of Unknown: RightRegion for integrase B66 sequence
aaaggcggtcgatacttaaaagagaatttttctctcaagattatattgttgtctttttaactgataacatacttgtaaaaatgaattgacacaataagtttatcataaataaaagccacaagtaaaatagagcaaaaaaaaagaaaggtaaccgacaattatgtcggaaaccttctttttattttatcatttattttatagttaatacttgtcctggtttaattaaattagggttactaccaataacagatttattatca

SEQ ID NO: 26066 - DNA, 260 bp, Unknown
  Description of Unknown: RightRegion for integrase B67 sequence
aaaggcggtcgatacttaaaagaaaatttttctctcaagattatattgttgtctttttaactgataacatacttgtaaaaatgagttgggacatgtagaaatgctttctactatgatatatcaacttatgaagggtgctaccatagaagaaataagaaatgctggacttgatagtcattatgctgaacatgaaagagctgtatatccaacagatgccagtggtgttccttttacagttagctattttgctacaactggtg

SEQ ID NO: 26067 - DNA, 109 bp, Unknown; identical to SEQ ID NO: 26044
  Description of Unknown: RightRegion for integrase B68 sequence

SEQ ID NO: 26068 - DNA, 260 bp, Unknown
  Description of Unknown: RightRegion for integrase B69 sequence
atgagaataagtctatataataaaataaaaggtaatttggcacactataatcttatataaaattttcaaataaaaaatggggaatatcttacaaaagatactctcccttttttatctatacaaataattatgctttttatattttcaaaaatataagtttattataatatgttagtatcattaattttatttatacttatacttcgctcttcttttagtgttacaaatgattctatttcttttgttaaactatgatgact

SEQ ID NO: 26069 - DNA, 260 bp, Unknown
  Description of Unknown: RightRegion for integrase B70 sequence
gctgactatctccgcgccatcagtcaggacatcgacgtgctgcttgatttcatgggataaggatgctataagatgaaaagggaagagcctcactgcaaagcggtgaggctcttccctttggtggagcacagaggattcgtctggctcacgtgtggtggaggcgatgggagtcgaactaattcccgccgtttcatcgtgaaaaattacggattttcggctcaaaaatatggcgttgctatggcttgaaattcggcctatgg

SEQ ID NO: 26070 - DNA, 260 bp, Unknown
  Description of Unknown: RightRegion for integrase B71 sequence
gctgactatctccgcgccatcagtcaggacatcgacgtgctgcttgatttcatgggataaggatgccataagatgaaaagggaagagcctcaccgcaaagcggtgaggctcttccctttggtggagcacagagggttcgtctggctcacgtgtggtggaggcgatgggagtcgaactaattcccgccgtttcatcgtgaaaaattacggattttcggcttaaaaatatggcgttgctatggcttgaaattcggcctgtgg

SEQ ID NO: 26071 - DNA, 260 bp, Unknown
  Description of Unknown: RightRegion for integrase B72 sequence
cagacgaaagaacaggtatccgatacgaactcatcggagattactattatccctgcctgacagtagagaaaagtcctcccctttcaaaatatggtcgattgcggcaacgatatttgagggaacataagcgtgtgctatattttaatctgctgacaagcggaaagttatatgaacaccttgccgaaattgatacttcggctcgtgatatggcggaatatctgataaaggaaatggcaaagaagcaaggtgtaacggaagaa

SEQ ID NO: 26072 - DNA, 260 bp, Unknown
  Description of Unknown: RightRegion for integrase B73 sequence
cagacgaaagaactggtatccagtacgaactcatcggagattattactatccctgcttgacgatagaaaacgaagaaccgcccactctcacaaaatacggaagaatgagggaaaaatatttaagagaacacaggaaagtcttatattgcaatctgcttacaagtggaaagttatatgaacaccttgttgaaattgatacttcggcgtgtaatatggcggagcatctgataaaggaaatggcaagaaaacagggtgtgacg

SEQ ID NO: 26073 - DNA, 260 bp, Unknown
  Description of Unknown: RightRegion for integrase B74 sequence
gttgaagtgttagtgggttattcgggtaattcgcccaaatctttcaggatagaggtgtagatttgggcatgtgcctgttctgtcgggatgtccccatccaatagcccgtcatactgtgggtcaacagggtgctctttcaggaacgccttcatttgttcaatctcttccggcgtaatagttgactccatattgcgcaatctcctcaagaaaattagaaacaagatttattttagactgtgacgtcaaagaaggttcctttg

SEQ ID NO: 26074 - DNA, 260 bp, Unknown
  Description of Unknown: RightRegion for integrase B75 sequence
ccagtattgcttgatgccccgcctattaaagaaaacgggcaaaaacagaaaacagcataataaatgacgctgaaggcgacttgtgagaataaaatctcatgagccgccttctttgcgttttcagccggatacggcagaaaggaataaaacctatgacagaaaatgaaaagaagcttttacaggcgaagcacagattggaagaagccgagatgcgtgaccgacagaaagagcgaaaagcacggacacggcggctggttcag

SEQ ID NO: 26075 - DNA, 260 bp, Unknown
  Description of Unknown: RightRegion for integrase B76 sequence
tgtccgatctgcggcgaacagttgatcgcttgcgaacacgggccaaacgggaaagattgataggaaggggctttcgccccttcttttttaacagttaccgtttacaaccggtctgacaatctggtattcgatgaaggtcttcgccatgatttcggctaactctttatcaataccctgtttgattaagtcttccttgtatgctttctttgctcttttctctgctactgtcattttttatttccgcctttccttaacttctg

SEQ ID NO: 26076 - DNA, 260 bp, Unknown
  Description of Unknown: RightRegion for integrase B77 sequence
gcgattctggatgcgttccgtcactttggactcataggagaagacgggacggagaaataggacgccgtattttgcgttctaagacgttttaagcccgttggggtactcgtgtaccactcgggcttttttcgtgccttaaaacgcctctgaagcggtctgagggtatttgagcgcccttgcgcatctcgcatccgctcgatgcaagggtggccgccctgcgggcggcggtcggatgtgggtggacgtacagaagggatgcg

SEQ ID NO: 26077 - DNA, 260 bp, Unknown
  Description of Unknown: RightRegion for integrase B78 sequence
tttaaataccaactaccaaaaaataaatatatattaataaaaaaattagaccagaaataatttctggtctttaatgttaagtaaaccaaacatatgaaagcaatatcaattaactgaagtgtatttctttatgaaatctataaagttttatatttaccattatttgtgtataattaaataagaaagtaatttaaaattgtaatatactatatatatgaagtataataaaaattgaaggagaagatctatgaactgtataa

SEQ ID NO: 26078 - DNA, 260 bp, Unknown
  Description of Unknown: RightRegion for integrase B79 sequence
tgtccgatctgcggcgaacagttgatcgcttgcgaacacgggccaaacgggaaagattgatagaaaggggctttcgccccttcttttttaacagttaccgtttacaaccggtctgacaatccggtattcgatgaaggtcttcgccatgatttcggctaactctttatcaataccctgtttgattaagtcttccttgtatgctttctttgctcttttctctgctactgtcattttttatttccgcctttccttaacttctg

SEQ ID NO: 26079 - DNA, 260 bp, Unknown
  Description of Unknown: RightRegion for integrase B80 sequence
tgtccgatctgcggcgaacagttgatcgcttgcgaacacgggctaaacgggaaagattgataggaaggggctttcgccccttcttttttaacagttcccgtttacaaccggtctgacaatctggtattcgatgaaggtcttcgccatgatttcggctaactctttatcaataccctgtttgattaagtcttccttgtatgctttctttgctcttttctctgctactgtcattttttatttccgcctttccttaacttctg

SEQ ID NO: 26080 - DNA, 260 bp, Unknown
  Description of Unknown: RightRegion for integrase B81 sequence
tgtccgatctgtggcgaacagttaatcgcttgcgaacatgggccaaacggtaaaaattgataggaaggggctttcaccccttcttttttttaacagttaccattcacaaccggtctgacgatctgatattcaacgaatgtcttcgccatgatttcggctaactctttatcaatgccctgtttgattaagtcttccttgtatgctttctttgctcttttctctgctactgtcattttttatttccgcctttccttaacttc

SEQ ID NO: 26081 - DNA, 260 bp, Unknown
  Description of Unknown: RightRegion for integrase B82 sequence
tgtccgatctgcggcgaacagttgatcgcttgcgaacacgggccaaacgggaaagattgataggaaggggctttcgccccttctttttaacagttaccgtttacaaccggtcttacaatctggtattcaatgaaggtcttcgccatgatttcggctaactctttatcaataccctgtttgattaagtcttccttgtatgctttctttgctcttttctctgctactgtcatttttttatttccgcctttccttaacttctg

SEQ ID NO: 26082 - DNA, 260 bp, Unknown
  Description of Unknown: RightRegion for integrase B83 sequence
tgtccgatatgcggcgaacagttaatcgcttgcgaacatgggccaaacgggaaagattgatgggaaggggctttcgccccttctttttttaacagttaccgtttacaaccggtctgacgatctggtattcgatgaaggtcttcgccatgatttcggctaactctttatcaatgccctgtttgattaagtcttccttgtatgctttctttgctcttttctctgctactgtcatttttttatttccgcctttccttaacttc

SEQ ID NO: 26083 - DNA, 260 bp, Unknown
  Description of Unknown: RightRegion for integrase B84 sequence
tgtccgatctgcggcgaacagttaatcgcttgcgaacacgggccgaatgggaaagattagagaaagaaagccgccttcgggcggctctttctttacatcggattgataagcgtccgaaaatggaaacactgaatattatatccaccagcaccgattgtctggacttttgctatgcctttttcgccgataactataccatcaagatttcctttcggagaaactcgaagtttactggcgtctgttatctttccgacgatttc

SEQ ID NO: 26084 - DNA, 260 bp, Unknown
  Description of Unknown: RightRegion for integrase B85 sequence
tgtccgatctgtggcgaacagttgatcgcttgcgaacacgggccaaacgggaaagattagaaagaaagccgccttcgggcggctctttctttacatcggattgataagcgtccgaaaatggaaacactgaatattatatccaccagcaccgattgtctggacttttgctgtgcctttttcgccgataactataccatcaagatttcctttcggagaaactcgaagtttactggcgtctgttatctttccgacgatttcgt

SEQ ID NO: 26085 - DNA, 260 bp, Unknown
  Description of Unknown: RightRegion for integrase B86 sequence
tgtccgatctgcggtgaacagttaatcgcttgtgaacacgggccgaacgggaagaaataaaagaagccgctattcaaggcggcttctttctagtaataatatatttctgcttttggggattctatatttgtttttgatgcatattcttcaagcataactaatccatattcgcaaatacaacattctttacgcctgaccgcctggactgcaacgtggtgaattatccatttctttttgtgaaattcaacaattctatttct

SEQ ID NO: 26086 - DNA, 260 bp, Unknown
  Description of Unknown: RightRegion for integrase B87 sequence
tgtccgatctgcggcgaacagttaatcgcttgcgagcatgggccgaatgggaaagactagaaagaaagccgccttcgggcggctctttctttacatcggattgataagcgtccgaaaatggaaacactgaatattatatccaccagcaccgattgtctggacttttgctgtgcctttttcgccgataactataccatcaagatttcctttcggagaaactcgaagtttactggcgtcggttatctttccgacaatttcgt

SEQ ID NO: 26087 - DNA, 260 bp, Unknown; identical to SEQ ID NO: 26075
  Description of Unknown: RightRegion for integrase B88 sequence

SEQ ID NO: 26088 - DNA, 260 bp, Unknown
  Description of Unknown: RightRegion for integrase B89 sequence
tgtccgatctgcggcgaacagttgatcgcttgcgaacacgagccaaacgggaaagattgataggaaggggctttcgccccttctcagactgtagacaaagtggtgtttgaccgttaggtcagacaccatttttctcttgcgtttatttcattcagtaaaatttcaattctatatataaatgaaagtgattttttattcctcatagccagtatcttagctagtttttttaggttcatgcatgcaaaagtaagcccggcttt

SEQ ID NO: 26089 - DNA, 260 bp, Unknown
  Description of Unknown: RightRegion for integrase B90 sequence
tgtccgatctgcggtgaacagttgatcgcttgcgaacatgggccaaacggcaaagattgataggaaggggctttcgccccttcttttttaacagttaccattcacaaccggtcttacaatctggtattcaatgaaggtcttcgccatgatttcggctaactctttatcaataccctgtttgattaagtcttccttgtatgctttctttgctcttttctctgctactgtcattttttatttccgcctttccttaacttctg

SEQ ID NO: 26090 - DNA, 260 bp, Unknown
  Description of Unknown: RightRegion for integrase B91 sequence
tgtccgatctgcggcgaacagttaatcacttgcgaacatgggccgaacgggaaagattgatgggaaggggctttcgccccttcttttttaacagttaccgtttacaaccggtctgacaatctggtattcgatgaaggtcttcgccatgatttcggctaactctttatcaatgccctgtttgattaagtcttccttgtatgctttctttgctcttttctctgctactgtcattttttatttccgcctttccttaacttctg

SEQ ID NO: 26091 - DNA, 260 bp, Unknown
  Description of Unknown: RightRegion for integrase B92 sequence
cgttgccccgtatgccatgaacagctaattggctgtgaatgcgatttttcagacttataatcaaaacggccaggagaattaacctcctggctgctttttttatatcaactatacagtttacttctggtgttatagtataatcatagcatccccaaaggagaagaaacggtaacgttccttcactgcttcccggtaggcgtttaaaatatgctcccgtccggccagcgcgctgaccagcatcaccagtgtggactggggca

SEQ ID NO: 26092 - DNA, 260 bp, Unknown
  Description of Unknown: RightRegion for integrase B93 sequence
agtagacgagtaaatggcttaggtgctataatattagatagtataaacataatattatagtagggggataaagattgtgccagggttttttaataatggtaagttttgtgatgtaatatatgacctaaattttatagatataccttatatagatttgaatattacaccagagtatgacattagtaataccaagtttatatattttatatttgagtgtgctgtagcaactaaaaccttagatataaagccaacaataataa

SEQ ID NO: 26093 - DNA, 260 bp, Unknown
  Description of Unknown: RightRegion for integrase B94 sequence
aaactccccgttacagctataatacagaaagcttctcagacaaaaaaagaaaccacctaaaaactttcgtttctaggtggtttctttggtgcgagtagtgatacagcattttttgaaaaccatcgtagtacaatttgtttttgaggtcatcggatagcaacttgcttgtatcgcaccccgatgggcggctgtattgaaaaaacagttgccttttatataccacacaacctaaaaatcatcaagtacgcgcagcgttcact

SEQ ID NO: 26094 - DNA, 260 bp, Unknown
  Description of Unknown: RightRegion for integrase B95 sequence
ttccataaattcgggtgctacatctatgtcacggacgttgtcctctttcgtggtcgttaggtgatagcctttgttcactatgagcagtgacttatccacatggacggtgcagtggtcgaagtcaatatcttcccatgtcagcccggctaactcaccgcgccgcattccggtattcagcagccccatgacgatgacttgctccagtgtggaacagcgcggcagcaccttaaaaagagcctctacttcttccgggtgcaggc

SEQ ID NO: 26095 - DNA, 260 bp, Unknown
  Description of Unknown: RightRegion for integrase B96 sequence
ggatggcgtcacgctcccagagccatgagcggaagaagaaccggagccgccgccgtctgaagtgccgcccccgttgccggaagaagccgctcctttggggtcggcgtacttgtcccacgccgactcgtcgccatagaagatgtcgccgtcgaggttgccgttgtagccggagaggcgcaccgaactggagaactgccaggcgcagatggttccgttcacggagtagctggacgggatggcgttgttcttcccgtagttga

SEQ ID NO: 26096 - DNA, 260 bp, Unknown
  Description of Unknown: RightRegion for integrase B97 sequence
gggatcgtgtggctgcatgcgatgaggttctcgcgggagtcgacgtccgtcccgaaatagcaggggttgaggaacggcggcgcggacacgcgcatatgaacctccgtcgcgccggcctcgcggacgagctttacgatgtgggcgcaggtggtgccgcggacgatggagtcgtcgatcagtaccacgcgcttgccgcggatggtggaggagatggtgttgagcttgatgttgacggatttctcccgctggctctgctccgg

SEQ ID NO: 26097 - DNA, 260 bp, Unknown
  Description of Unknown: RightRegion for integrase B98 sequence
tgtccgatctgtggcggacgcctggcggaatgtgaacacgggccgaatggtaagaaatagcacaaggggcgttctgccccttgcttttgttttattaacaattcccatttactaccggtttgacgatctcataatcaacgaatgtcttcgccatgatttcggccaaatccttatctattccctggctgattaagttttccttatatgctttctttgctttcttctctgctgttgtcattttttatttccgcctttcctta

SEQ ID NO: 26098 - DNA, 236 bp, Unknown
  Description of Unknown: RightRegion for integrase B99 sequence
tgtccgatctgtggcgaacgactggcggaatgtgaacacgggccgaatggcaagaattaaaaataagccgcttccctggtttgggttgcggcttacttcttaaagcgtcgcgccttttacctgaacatatacagttttatttgtctttgcatctgtaattttgatttcttccagggaaatatttgtttcccactgatcgaattcttcgtcgtaagttcttttaatatcaacgtaat

SEQ ID NO: 26099 - DNA, 260 bp, Unknown
  Description of Unknown: RightRegion for integrase B100 sequence
tgtccgatctgcggcgaacagttaatcgcttgcgaacatgggccaaataagaaagattagaaagaaagccgcctttgggcggctctttctttacatcggattgataagtgttcgaaaatggaaacactggatattatatccgccagcgccgattgtctgaacttttgctgtgcctttttcgccgataacaattccgtcaagatttcctttcggagaaattcgaagttcactggcgtctgttatctttccgacaatttcgt

SEQ ID NO: 26100 - DNA, 260 bp, Unknown
  Description of Unknown: RightRegion for integrase B101 sequence
tgtccgatctgcggcggccgcctggcggaatgtgaacacgggccgaatagtaagaattaaaaagaagccgcttccctggtttgggttgcggcttacttcttaaagcgtcgcgccttttacctgaacatatacagttttatttgtctttgcatctgtaattttgatttcttccagggaaatatttgtttcccactgatcgaattcttcgtcgtaagttcttttaatatcaacgtaatattcccatttttcgatcggatcgt

SEQ ID NO: 26101 - DNA, 260 bp, Unknown
  Description of Unknown: RightRegion for integrase B102 sequence
tgtccaatctgcggcgaacgcctggcggaatgtgaacacgggccgaatggcaagaattaacacaaggggcgttctgccccttgcttttgttttattaacaattcccatttactaccggtttgacgatctcataatcaacgaatgtcttcgccatgatttcggccagatccttgtctattccctggctgattaagttttccttgtatgctttctttgctttcttctctgctactgtcattttttatttccgcctttcctta

SEQ ID NO: 26102 - DNA, 260 bp, Unknown
  Description of Unknown: RightRegion for integrase B103 sequence
tgtccaatctgcggcgaacgcctggcggaatgtgaacacgggccgaatggcaagaattaacacaaggggcgttctgccccttgcttttgttttattaacaattcccatttactaccggtttgacaatctcataatcaacgaatgtcttcgccatgatttcggccagatccttgtctattccctggctgattaagttttccttgtatgctttctttgctttcttctctgctactgtcattttttatttccgcctttcctta

SEQ ID NO: 26103 - DNA, 260 bp, Unknown
  Description of Unknown: RightRegion for integrase B104 sequence
tgtccgatctgcggcgaacagttaatcgcttgcgaacatgggccgaacgggaaagattgatgggaaggggctttcgccccttcttttttaacagttaccgtttacaaccggtctgacaatctggtattcgatgaaggtcttcgccatgatttcggctaactctttatcaatgccctgtttgattaagtcttccttgtatgctttctttgctcttttctctgctactgtcattttttatttccgcctttccttaacttctg

SEQ ID NO: 26104 - DNA, 260 bp, Unknown
  Description of Unknown: RightRegion for integrase B105 sequence
tgtccaatctgtggcgaacgcctggcggaatgtgaacacgggccgaatggcaagaattaacacaaggggcgttctgccccttgcttttgttttattaacaattcccatttactaccggtttgacgatctcataatcaacgaatgtcttcgccatgatttcggccagatccttgtctattccctggctgattaagttttccttgtatgctttttttgctttcttctctgctactgtcattttttatttccgcctttcctta

SEQ ID NO: 26105 - DNA, 260 bp, Unknown
  Description of Unknown: RightRegion for integrase B106 sequence
tgtccgatctgcggcggccgcctggcggaatgtgaacacgggccgaatggtaagaaataacgcaaggggcgttctgccccttgcgtttgttttattaacaattcccatttactactggtttgataatcccataatcaatgaatgtcttcgccatgatttcggccagttccttgtctattccctggctgattaagttttccttgtatgctttctttgctttcttctctgctactgtcattttttatttccgcctttcctta

SEQ ID NO: 26106 - DNA, 260 bp, Unknown
  Description of Unknown: RightRegion for integrase B107 sequence
tgtccgatctgcggcggccgcctggcagaatgtgaacacgggccgaatggtaagaaataacgcaaggggcgttctgccccttgcttttgttttattaacaattcccatttactactggtttgataatcccataatcaatgaatgtcttcgccatgatttcggccagttccttgtctattccctggctgattaagtttttcttgtatgctttctttgctttcttctctgctactgtcattttttatttccgcctttcctta

SEQ ID NO: 26107 - DNA, 260 bp, Unknown; identical to SEQ ID NO: 26086
  Description of Unknown: RightRegion for integrase B108 sequence

SEQ ID NO: 26108 - DNA, 260 bp, Unknown
  Description of Unknown: RightRegion for integrase B109 sequence
tgtccgatctgtggcggacgcctggcggaatgtgaacacgggccgaatggcaagaattaacacaaggggcgttctgccccttgcttttgttttattaacaattcccatttactaccggtttgacgatctcataatcaacgaatgtcttcgccatgatttcggccagatccttgtctattccctggctgattaagttttccttgtatgctttctttgctttcttctctgctactgtcattttttatttccgcctttcctta

SEQ ID NO: 26109 - DNA, 260 bp, Unknown
  Description of Unknown: RightRegion for integrase B110 sequence
tgtccgatctgcggtgaacagttaatcgcttgcgaacatgggccaaacggcaaagattgataggaaggggctttcgccccttcttttttaacagttaccattcacaaccggtcttacaatctggtattcaatgaaggtcttcgccatgatttcggctaactctttatcaataccctgtttgattaagtcttccttgtatgctttctttgctcttttctctgctactgtcattttttatttccgcctttccttaacttctg

SEQ ID NO: 26110 - DNA, 260 bp, Unknown
  Description of Unknown: RightRegion for integrase B111 sequence
tgtccgatctgcggcggacgcctggcggaatgtgaacacgggccggacaataagaattaaaaagaagccgcttccctggtttgggttgcggcttctttcttaaagtgtcgcgccttttacttgaacatatacagttttatttgtttttgcgtctgtaattttgatttcttccagggaaatattcgtttcccactgatcgaattcttcatcgtatgttcttttaatgtcaacgtaatattcccatttttcgatcggatcgt

SEQ ID NO: 26111 - DNA, 260 bp, Unknown
  Description of Unknown: RightRegion for integrase B112 sequence
tgtccaatctgcggcgaacgcctggcagaatgtgaacacgggccgaatggtaagaattaacacaaggggcgttctgccccttacttttgttttattaacaattcccatttactaccggtttgacgatctcataatcaacgaatgtcttcgccatgatttcggccagatccttgtctattccctgactgattaagttttccttgtatgctttctttgctttcttctctgctactgtcattttttatttccgcctttcctta

SEQ ID NO: 26112 - DNA, 260 bp, Unknown
  Description of Unknown: RightRegion for integrase B113 sequence
tgtccgatctgcggcggacgcctggcggaatgtgaacacgggccgaatggcaagaattaacacaaggggcgttctgccccttgcttttgttttattaacaattcccatttactaccggtttgacgatctcataatcaacgaatgtcttcgccatgatttcagccagatccttgtctattccctggctgattaagttttccttgtatgctttctttgctttcttctctgctactgtcattttttatttccgcctttcctta

SEQ ID NO: 26113 - DNA, 260 bp, Unknown; identical to SEQ ID NO: 26097
  Description of Unknown: RightRegion for integrase B114 sequence

SEQ ID NO: 26114 - DNA, 260 bp, Unknown
  Description of Unknown: RightRegion for integrase B115 sequence
tgtccgatctgtggcgaacgcctggcggaatgtgaacacgggccgaatggcaagaattaaaaataagccgcttccctggtttgggttgcggcttacttcttaaagcgtcgcgccttttacctgaacatatacagttttatttgtctttgcatctgtaattttgatttcttccagggaaatatttgtttcccactgatcgaattcttcgtcgtaagttcttttaatatcaacgtaatattcccatttttcgatcggatcgt

SEQ ID NO: 26115 - DNA, 260 bp, Unknown
  Description of Unknown: RightRegion for integrase B116 sequence
tgtccgatctgcggcggacgcctggcggaatgtgaacacgggccggacaataagaattaaaaagaagccgcttccctggtttgggttgcggcttctttcttaaagtgtcgcgccttttacttgaacatatacagttttatttgtttttgcgtctgtaattttgatttcttccagggaaatattcgtttcccactgatcgaattcttcatcgtatgttcttttaatgtcaacgtaatattcccatttttcgaccggatcgt

SEQ ID NO: 26116 - DNA, 260 bp, Unknown
  Description of Unknown: RightRegion for integrase B117 sequence
tgtccgatctgcggcggacgcctggcggaatgtgaacacgggccgaatggtaagaaatagcacaaggggcgttctgccccttgcttttgttttattaacaattcccatttactaccggtttgacgatctcataatcaacgaatgtcttcgccatgatttcggccaaatccttatctattccctggctgattaagttttccttgtatgctttctttgctttcttctctgctgttgtcattttttatttccgcctttcctta

SEQ ID NO: 26117 - DNA, 260 bp, Unknown
  Description of Unknown: RightRegion for integrase B118 sequence
tgtccgatctgcggcgaacagttaatcgcttgcgaacacgggccgaatgggaaagattgatgggaaggggctttcgccccttcttttttaacagttaccgtttacaaccggtctgacaatctggtattcgatgaaggtcttcgccatgatttcggctaactctttatcaatgccctgtttgattaagtcttccttgtatgctttctttgctcttttctctgctactgtcattttttatttccgcctttccttaacttctg

SEQ ID NO: 26118 - DNA, 260 bp, Unknown
  Description of Unknown: RightRegion for integrase B119 sequence
tgtccgatctgcggcggccgcctggcggaatgtgaacacgggccgaacggtaagaaatagcacaaggggcgttctgccccttgcttttgttttattaacaattcccatttactaccggtttgatgatctcataatcaacgaatgtcttcgccatgatttcggccagttccttgtctattccctgactgattaagttttccttatatgctttctttgctttcttctctgctactgtcattttttatttccgcctttcctta

SEQ ID NO: 26119 - DNA, 260 bp, Unknown; identical to SEQ ID NO: 26117
  Description of Unknown: RightRegion for integrase B120 sequence

SEQ ID NO: 26120 - DNA, 260 bp, Unknown
  Description of Unknown: RightRegion for integrase B121 sequence
tgtccgatctgcggcggacgcctggcggaatgtgaacacgggccgaatggcaagaattaacacaaggggcgttctgccccttgcttttgttttattaacaattcccatttactaccggtttgacgatctcataatcaacgaatgtcttcgccatgatttcggccagatccttgtctattccctggctgattaagttttccttgtatgctttctttgctttcttctctgctactgtcattttttatttccgcctttcctta

SEQ ID NO: 26121 - DNA, 260 bp, Unknown
  Description of Unknown: RightRegion for integrase B122 sequence
tgtccgatctgcggcgaacagttgatcgcttgcgaacacgggccaaacgggaaagattgatatgaaggggctttcaccccttctttttaacagttaccgtttacaaccggtcttacaatctggtattcgatgaaggtcttcgccatgatttcggctaactctttatcaataccctgtttgattaagtcttccttgtatgctttctttgctcttttctctgctactgtcattttttatttccgcctttccttaacttctga

SEQ ID NO: 26122 - DNA, 260 bp, Unknown
  Description of Unknown: RightRegion for integrase B123 sequence
tgtccgatctgcggtgaacagttaatcgcttgtgaacacgggccgaacgggaaagactagaaagaaagccgccttcgggcggctctttctttacatcggattgataagcgtccgaaaatggaaacactgaatattatatccaccagcaccgattgtctggacttttgctgtgcctttttcgccgataactataccatcaagatttcctttcggagaaactcgaagtttactggcgtcggttatctttccgacaatttcgt

SEQ ID NO: 26123 - DNA, 260 bp, Unknown
  Description of Unknown: RightRegion for integrase B124 sequence
tgtccgatctgcggtgaacagttgatcgcttgcgaacacgggccaaacgggaaagattgataggaaggggctttcgccccttcttttttaacagttaccgtttacaaccggtctgacaatctggtattcgatgaaggtcttcgccatgatttcggctaactctttatcaataccctgtttgattaagtcttccttgtatgctttctttgctcttttctctgctactgtcattttttatttccgcctttccttaacttctg

SEQ ID NO: 26124 - DNA, 260 bp, Unknown
  Description of Unknown: RightRegion for integrase B125 sequence
tgtccgatctgtggcgaacagttaattgcttgcgaacatgggccaaataagaaagattagaaagaaagccgcctttgggcggctctttctttacatcggattgataagtgttcgaaaatggaaacactggatattatatccgccagcgccgattgtctgaacttttgctgtgcctttttcgccgataacaattccgtcaagatttcctttcggagaaattcgaagttcactggcgtctgttatctttccgacaatttcgt

SEQ ID NO: 26125 - DNA, 260 bp, Unknown
  Description of Unknown: RightRegion for integrase B126 sequence
tgtccgatctgcggcgaacagttaatcgcttgcgaacacgggccgaatgggaaagattagaaagaaagccgccttcgggcggctctttctttacatcggattgataagcgtccgaaaatggaaacactgaatattatatccaccagcaccgattgtctggacttttgctgtgcctttttcgccgataactataccatcaagatttcctttcggagaaactcgaagtttactggcgtctgttatctttccgacgatttcgt

SEQ ID NO: 26126 - DNA, 260 bp, Unknown; identical to SEQ ID NO: 26108
  Description of Unknown: RightRegion for integrase B127 sequence

SEQ ID NO: 26127 - DNA, 260 bp, Unknown; identical to SEQ ID NO: 26112
  Description of Unknown: RightRegion for integrase B128 sequence

SEQ ID NO: 26128 - DNA, 260 bp, Unknown
  Description of Unknown: RightRegion for integrase B129 sequence
tgtccgatctgcggcggacgcttggcggaatgtgaacacgggccgaatggcaagaattaacacaaggggcgttctgccccttgcttttgttttattaacaattcccatttactaccggtttgacgatctcataatcaacgaatgtcttcgccatgatttcggccagatccttgtctattccctggctgattaagttttccttgtatgctttctttgctttcttctctgctactgtcattttttatttccgcctttcctta

SEQ ID NO: 26129 - DNA, 260 bp, Unknown
  Description of Unknown: RightRegion for integrase B130 sequence
ctgctccttttgggggcggtgttgctggccggctgcatcggggtaattaccctgttgtgagcccggaaagcccacgcaaagaaaaaaccgcccccggaaaggaagcctgccgcttcccctccgggggccttgccattaaaattcacttcgtttatcccgcagcatcagctcagtcagcgccgcggccgggtctttcccgttaaacagaatatcataaacacactcgcagatgggcatatggacccccagcttttgggcca

SEQ ID NO: 26130 - DNA, 260 bp, Unknown
  Description of Unknown: RightRegion for integrase B131 sequence
ccgacagcggagaaagtggaagccataaaggatgcgttgaagcattttgaagtgatttaatgaggataggcgtatcattagaaatagtggtacgcttatttttttacatagttgtcttttcgttgaccaatattttatttggttataaaagcggaggacagattttatactaaactgcctaattgatagaattaaaagcgttcactttgctattattgacttaaagagaaaaatcaaatataatatagtaaagtgcccaa

SEQ ID NO: 26131 - DNA, 260 bp, Unknown
  Description of Unknown: RightRegion for integrase B132 sequence
aaaaacttaaataaaattagtagtaaatttaatattgatataggctattttttaaagtaggaaattaataaaatttcctactttttatttttagtttttattattaatataactcttgtttttttaccagatttagcttgtctctttttcatatgtattcccccggtaatcactaattttactttactactaaattataccgctaatggttcaaatattcaagaacatctgttcgagttaaatattttaaatgttccttt

SEQ ID NO: 26132 - DNA, 260 bp, Unknown
  Description of Unknown: RightRegion for integrase B133 sequence
aaaaaaaatataagcaagatatgttcatattttaatatatctgaaaattactttgattaaaaatgcctagggagtattccctggacatctttttattattctcaatataactcttttcttattctttttttctttagcttttgatccacccataatatcgttatcccttccccaatattttttaatacacgaataatttacttaaattataccaaacatacattcgtgtttcaaatcgtttttttatttttaaattagat

SEQ ID NO: 26133 - DNA, 260 bp, Unknown
  Description of Unknown: RightRegion for integrase B134 sequence
gcccatcgggcgcagcaaatcattgacctgagtggacaattcggaaacgatcatagttgacacatcctttctatgcgtcaactctaaccgaaaaatacttaaaatttatcaattacgtcgatatacgtcgtaaagcgtcgaaacacgccaaacaaaaacagccccgaggaaccgtcaggctccccggggctgctgctatactatgattttgttggcgttaacatttttgtgatgccgcgaaaacgtcacatataggtctt

SEQ ID NO: 26134 - DNA, 260 bp, Unknown
  Description of Unknown: RightRegion for integrase B135 sequence
gcccatcgggcgcagcaaatcattgacctgagtggacaattcggaaacgatcatagttgacacatcctttctatgcgtcaactctaaccgaaaaatacttaaaatttaccaattacgtcgatatacgtcgtaaagcgtcgaaacacgccaaacaaaaacagccccgaggaaccgtcaggctccccggggctgctgctatgtatgggattaccgcttgatacagcggttcgtcagcttgccgtatacatcctcgtacagct

SEQ ID NO: 26135 - DNA, 260 bp, Unknown
  Description of Unknown: RightRegion for integrase B136 sequence
gtgtgcggatcagatgtcggagagggaacagaggagaacagagatcgagcagacctttgattatgatggctatcaggtcgcccggagggaactttttgcacatcttcgagatcccgccattataataaggaaagacagcatcacattcaacacggcctgcattgcaggtttggaggatgtggtgtacgtcaacatcatgtttaacagcgacttaaagcggcttgtagttaaaggctgtaatgaaaatgacagggatgctc

SEQ ID NO: 26136 - DNA, 118 bp, Unknown
  Description of Unknown: RightRegion for integrase B137 sequence
tcactatatcgggggtgttctttcattggagagtatggtatactcggcttagcccagtaaattggaagttgtgaacttagaattagaggtgttgaaaatgaaaataataattatattt

SEQ ID NO: 26137 - DNA, 260 bp, Unknown
  Description of Unknown: RightRegion for integrase B138 sequence
tgtccgcaggagaaggtggagtatattaaggatgcgttgaggcattttaagttgatttagtttgtggaggttggtatgcagagatatttattaacaatgtgttatgagcatgaaaattatgttaatgatatagaaagaaaaaaacaatataaaaatgatattgtgtcagtaatacataaacaaaagcttccttttttcaagaaacggaaaatattgaaactagtacaagctttatgtgatatgcaatttttattagatga

SEQ ID NO: 26138 - DNA, 260 bp, Unknown
  Description of Unknown: RightRegion for integrase B139 sequence
ccggaaaaggaagcagcaatcacggatgctttaaagcattttgggatgattccagactaagtgattgtatagctgattttctgaactttcataggaatacaacttgtcttcgaaaacaaagaaaaggagacaaacacatgaaagaaagaattacagaaaatggaattgattatgtattggtcggagattattatattcctgatctcaagctgccagaggaaaacagaccgattggtcgttggggacgaatgcaccgagat

SEQ ID NO: 26139 - DNA, 260 bp, Unknown
  Description of Unknown: RightRegion for integrase B140 sequence
gtaatccctacacacggagagcttgaagatgaattagaacaaatctatgaggcaatgtaaccggaggacgatatggataacgataatttttcctttctcgctgatgcagaaagctcgataacgggagataaaaccgaagggtacacgcccaaggagcaggagctgattcatcaattggttcaagaacgactgggcaagaaaaatgccatcgagtttgaatctctcgatgactatgtcgttccgcccaaaatgttcttctc

SEQ ID NO: 26140 - DNA, 260 bp, Unknown
  Description of Unknown: RightRegion for integrase B141 sequence
caccccggtttgtggaaagatatgcgtgtggatatatttctggtaaaaaaagaaaattgaaaaagttgtggaaaaaatccgattcgctgttctcttatgtattaggaggttccaaacctccgaaaaagtgaatagcgtcctctgctgtaccgcattggggaagcagcgccatgactggattccacgagcgtgccaagatgcgagaaaacatatcgcatggctgcaaagcgatgcgaggcaaagcgccgggaagggttgcc

SEQ ID NO: 26141 - DNA, 260 bp, Unknown
  Description of Unknown: RightRegion for integrase B142 sequence
tgtccgcaggaaaaggtggagtatattaaggatgcgttgaaacattttaagttgatttagtttgtggaggttggtatgcagagatatttattaacaatgtgttatgagcatgaaaattatgttaatgatatagaaagaaaaaaacaatataaaaatgatattgtgtcagcaatacataaacaaaagcttccttttttcaagaaacggaaaatattgaaactagtacaagctttatgtgatatgcaatttttattagatga

SEQ ID NO: 26142 - DNA, 260 bp, Unknown
  Description of Unknown: RightRegion for integrase B143 sequence
gatgctgcaactgagtgcggaacagatgtcggagcgggagcagaggagaacggagattgagcagacctttgattacgatggctatcaggtcgcacgacgggagctttttgcccatctccgggacccggccattataataaggggagatagcatcacgtttaacacagcatgcattgcaggactggaggatgtggtgtatatcaacattatgtttaacagcgaattaaagcggattgtggtcaaaggctgcaatgaaaatg

SEQ ID NO: 26143 - DNA, 260 bp, Unknown
  Description of Unknown: RightRegion for integrase B144 sequence
gccctctgcggtgaacacggggtgctcagtgctgaacacaagccagccgccgggacatagccagcgtgagatattctgcaccaggccgggccaatcctgcacatagtgaaaggcaagggaggacagcacaatatcaaagctgccggcaggaaagcaggcgtcctctatggcgcagcggcggtaggcaatggcgcgcgggccgcgtttttcccgtgctacggcaagcatcctttccgagatgtccagccccagcacactgg

SEQ ID NO: 26144 - DNA, 260 bp, Unknown
  Description of Unknown: RightRegion for integrase B145 sequence
attagcaaaagaattccaaatgaaaaatatctaaaacagctcaaatcgcaaataaaataagacttcaattagtgaagtcttattttatttgcgatttgagctgtttatattcttattgataagcttacttaaatagaaacttatatatatttttttatctatttagctatataaagttattattaattttatgtattcgccggcaaattgtaagcaaaattataattaccaacaaatttaattaagtccaataattagta

SEQ ID NO: 26145 - DNA, 260 bp, Unknown
  Description of Unknown: RightRegion for integrase B146 sequence
tcagattctgttacctcgtggatgcgtcataatcacaatttcctctttgcaaataattaagccccgataggggctatttcatgcctgtttttcactctcagtactaaatactctaaataatgtacttgagaggatttatgaatttattagttaaaattattttagaagtactcgcattcgttttttgcgtttgtgtactattaccattctacctggtttgtttaattatttacatgatcttaggtgtgctaacactgcct

SEQ ID NO: 26146 - DNA, 260 bp, Unknown
  Description of Unknown: RightRegion for integrase B147 sequence
gtagagatagctaaggctcagaatcaagttctagagtatcagtataagccggaagcataaactaaaaagcctattctatgataggctttctttttatatcttctctacgctgctatagagctttataatattctctcctttgattctgaatccgcttccgtggtcgtgtggtttaccaaagttcttaccactactataagctcccattctaatatcatacattatctctccttcatccagcatttttaagaaggtatcta

SEQ ID NO: 26147 - DNA, 95 bp, Unknown
  Description of Unknown: RightRegion for integrase B148 sequence
cccattcaatttgaaccgtcttttgaaacgcctgaagagatgaaaggagaatccgcatgaacgaactgaagaaatctatccatgacaacgccaac

SEQ ID NO: 26148 - DNA, 260 bp, Unknown
  Description of Unknown: RightRegion for integrase B149 sequence
gatttagttttatacaagaaagagcaaacagaagacgaagagaaaagctccaaagattagctaaagctgaagtagcatttcgaagaaaggctacgaagcaggaatttgactttgtcaaaattcctaaccccctatgagttttgacatactatcaaaactcgggggctctgcgaggcatcgaattagctatcttttcatcaaaaaacgaatgattttcttatcagaaaatcaagtgtaaaatttcattttacaagtcgttt

SEQ ID NO: 26149 - DNA, 260 bp, Unknown
  Description of Unknown: RightRegion for integrase B150 sequence
ctccttgctcgtgaaggttttgagatcttcgtaaacgaagatcaaattgattggttttagtgttgcggcttaccggggaatttatcgttcagataaattaaaaagagggtagtttgccgtttctttcgtttgcagctgataaaagtacatccctaaattagcgacaagtgccatgtaactcttgaaatattatagagcctttattatgggaagcattgctgatttacttgttaaaaagtgaatttcgacctcaccagacg

SEQ ID NO: 26150 - DNA, 260 bp, Unknown
  Description of Unknown: RightRegion for integrase B151 sequence
ctccttgctcgtgaaggttttgagatcttcgtaaacgaagatcaaattgattggttttagtgttgcggcttaccggggaatttatcgttcagataaattaaaaagagggtagtttgccgtttctttcgtttgcagctgataaaagtacatgccttaattagcgacaagtgccatgtaattcttgaaatattatagagcctttattatgggaagcattgctgatttacttgttaaaaagtgaatttcgacctcaccagacg

SEQ ID NO: 26151 - DNA, 109 bp, Unknown
  Description of Unknown: RightRegion for integrase B152 sequence
ggagaacgtagtgaaattgttgtaaaaccagtaaaattctccgaagaagatactaaataattgttgcaacttttactttggttatgggctatgttgcaacaatcaaatt

SEQ ID NO: 26152 - DNA, 260 bp, Unknown
  Description of Unknown: RightRegion for integrase B153 sequence
aaggaagaaatgcctgcgaatgagagggaagagcgaagtacctgtctgtcggaatcttgatagcatatattttcgtatggttcgtgacggaaggcatacatgttgttatttttctggcttaacagggtctgaggaaaacagaattatggcagaatacgatgctgaacaatcaagacgacattgccggtacctctgcagcagctcgcgccagattggagatacactagatctcgtctttggcgagtgaaaggagacaaaaa

SEQ ID NO: 26153 - DNA, 260 bp, Unknown
  Description of Unknown: RightRegion for integrase B154 sequence
atttcagtgggtgttaaaccagtaaagttctgcgaagataacactgaagaaaaaaattaacgtagcacgttttgtttttatgaaataaaaatgaaagtggtgatagttaatttgaataaaatttgtctgtgtaagataaattttattgcctcgcagagcccccgagttttgataaaatgtcaaaactcatagggggttaggacttatggcaaagccaaagtccatagctacgaagaaatttcaaaggagggattttatgg

SEQ ID NO: 26154 - DNA, 260 bp, Unknown
  Description of Unknown: RightRegion for integrase B155 sequence
aaggaaggaatgtctgtgaatgagcgggaaaagcgagatccccttctgtcggaatcctgatggcatatctttttgtgtggttcgtgacgggaagtataccagttattgttattctgacttaacagtacctgaacaattaagactactttgccggtgcctctgcagcagcttgcgcctgattggggatacactagatctcgtctttgacgagtgaaaggagacaaaaatggaaatggaaaatcaaagtacctttatctcac

SEQ ID NO: 26155 - DNA, 260 bp, Unknown
  Description of Unknown: RightRegion for integrase B156 sequence
cctatttcgataggtgttaagccagtaaaattctccgaagaagatacggaagaaaaataaaatgttgcagacacaaaaagattgcttttatttgagcaacatttgcaaaaatagatgtatgaatttgttttgtagaaaaacaaaatttaggcagatatttttgtatcaatttgaaagtaatttcaaattgatttgcctcgcagagcccccgagtttagatggcacgtctaaactcatagggggttaggactttaaacaag

SEQ ID NO: 26156 - DNA, 109 bp, Unknown
  Description of Unknown: RightRegion for integrase B157 sequence
attcctattgaaattggtgttaaacctgttaaaaaggaattgctctctatagaaaaataaaatgcgtggcacgttttgcgagtttactcgcgaaagtggcgatagcatt

SEQ ID NO: 26157 - DNA, 260 bp, Unknown
  Description of Unknown: RightRegion for integrase B158 sequence
caaaaaaagaagaactgccccgcatggcagtgcttctttctccgctgtattaataagtaagaaataagaataagaggtttttgtttcagccggttctttatctgcatctataatagcatttattttggcttattacaaatacacaggtatgatatcatgttggctgttatcgtttttatcaattatatttctttctatgccagatcatgtcctaagagtcgcacgaagtctgtccgtcttaagcagcaagtccaagcctt

SEQ ID NO: 26158 - DNA, 260 bp, Unknown
  Description of Unknown: RightRegion for integrase B159 sequence
gaagatggtacggtgtttcaggcgtactattttaatgacgatacaatttcaaagtggtaatataaaaggcagacgtttttagcgcctgccttttaattttggtgaacgattgttgaagggcatagaaatttatgctattataaaaatatcgcagatatgttcagattcacaaaggagaatttctgtgggaattttttcaagatttcgcaagaatgagcaaaaaataattctgaatctgttagcttgagcccaaaagaaaa

SEQ ID NO: 26159 - DNA, 260 bp, Unknown
  Description of Unknown: RightRegion for integrase B160 sequence
ttaagagatttaaaagatgttcctagtaaacctattaaaatggaattaataaaaaaataaaatatgtggcacgttttgttgaacttgttcaatgaaagtggcgatagtattttatatcaattctttatgtagttttatttcattacaaagttttgaaatattacgaaataaagcaaacggattctaaggtgttaaaccttagcccactggtatcttgttagtatgacaagatacctagggggttatatattatgtcaaaa

SEQ ID NO: 26160 - DNA, 260 bp, Unknown
  Description of Unknown: RightRegion for integrase B161 sequence
gacatgcatattcaggatcgtgacaaagatcgagattgcgatcgtcatggcgatgattgactcggtacccgcgccgatccagacgatgaacaccgggccgagcgccgttttcggcagcgcgttgagcacgaccagatatgggtcgagcacgcgcgagagcagctcgctccaccacaggccgatggcgatgagcgtgccgagcagcgtcccgagcacgaagccaaccacgacctcgaggcacgacgtgccgatgtgcagcc

SEQ ID NO: 26161 - DNA, 260 bp, Unknown
  Description of Unknown: RightRegion for integrase B162 sequence
tatgacgttgaccgcgtggatttagctgccgggatcgtgtatctgacgaaagccgcataacagaacgaacaccccgcaccgtgcgtttacaagacgcatggtgcggggtgtttttgcgttttcaggaggtttctcttcgcaacggccccagcataccgccaaattcgcctacaagaccgctacgatgcgctacgtcttttcttatatactttcaccccttccgccaaaacgccgccagaagccgtctacgggccgtacag

SEQ ID NO: 26162 - DNA, 260 bp, Unknown
  Description of Unknown: RightRegion for integrase B163 sequence
ccaaatccacgagagcggatgcgccaatccgatcaaaacgaaatcaacatgagtttgtaagcgccggggttctagagataaaaccccggcgcttttttgcgtttggaggaggtaatcgacataaatacagagcaaaacaaccccgcatcctatggcaagactgtcggacagaccgcccataagtgcgagggttgcccctacccccatcatggttttattttgctgggggaaagacggcagctgtatgcgcaccgatgtag

SEQ ID NO: 26163 - DNA, 260 bp, Unknown
  Description of Unknown: RightRegion for integrase B164 sequence
agaactggaaagcaagccttgattgatgtatacaataaggagaacaaagatgaaatataacaaattgtatcatatggtggccgccctgctggtggtgatgctgctggtgctgaccgcctgcggcagcgagccccggcagccgcaaacgcctaatgaaaccaccgtgaccggccctgaggagatcggtgagatatacctgtacggggaataccatgccaatgagcatctgctgcaaaaggagctggccctgtggaaggact

SEQ ID NO: 26164 - DNA, 260 bp, Unknown
  Description of Unknown: RightRegion for integrase B165 sequence
aaggcgcgggaatatcgggcaaagcgaaaggcgcaagccgctgcgctgcccgtatcgtaaaacagaataaccgacagcagaaagggattttccaactatgggaaatcctttttttgcacccaaaggaaggagtgacccaatgacagaaaagaaaaccacaaccaccgcgcagaagcagccggatggtatcatcacaacacagcggaacggacagaccatcgttgcggagttgtttttcaatcacagaagcgcagaaacat

SEQ ID NO: 26165 - DNA, 260 bp, Unknown; identical to SEQ ID NO: 26164
  Description of Unknown: RightRegion for integrase B166 sequence

SEQ ID NO: 26166 - DNA, 260 bp, Unknown
  Description of Unknown: RightRegion for integrase B167 sequence
ccagataatgttacggaagaagattttttaaataatgatgaaaattctagtcaagaataaatttatttacttgcgaagttcttgactagaaatagtaaaaataataatggaaaaagtttaaaacaaaaagttatctttcttgttttagacttatctactgaaaatttttttgttaactttttttctaaaaaaagttataacaaacgaacacgttttgttgaaacgtagtttcaatgaaagtgggaaaagtttgtttaata

SEQ ID NO: 26167 - DNA, 260 bp, Unknown
  Description of Unknown: RightRegion for integrase B168 sequence
ttgaagcattttcggatgctggatgaggatgtggagtacaggaaggagagtgcagagtgaagaaaaaatgttatatttatatccgtgtttctacggcgatgcaggtggacggttacagtctggaggcgcagaaggaacggctgatcaagtttgcggaatttcaggatatggaagtggtcagggaatactgtgatgcaggaaagtccggaaagagtattacaggcagaccggagtttcagcggatgctgcaggacgtgtct

SEQ ID NO: 26168 - DNA, 260 bp, Unknown
  Description of Unknown: RightRegion for integrase B169 sequence
atcacgcacgaattaggcggcgttatgccacaggaggtaagcaatggaaacttggaatgatgaataccgtatgggcgagcctgctgcggtgtatcaggttgcggaggtcaaggaacgggtgaatcccgaggctcctctgttggaaaagggcgacgagatcatcgacatgggcgctgatttcgattttgacggcttccaggtagtgcgaagagagttcttcgctcacttagcggagcccgcggtcacttttaataactgca

SEQ ID NO: 26169 - DNA, 260 bp, Unknown
  Description of Unknown: RightRegion for integrase B170 sequence
ggattatcacgtaaagactttatagcacgttttaaggtttgcaaggccgagaaaaggtaagtataaaaaggtcaaagtggattatgaagatatagaatatatcatttaaattaacagtatttttaaatactcaattatttgtggggtaaggtttatgaaaactaaagagcaaaaaaatttagaaaaggatgcagcagtagaagaaaaacggaaattaatcagagacgtgattgaaactctggcagagaaaggtatcccgc

SEQ ID NO: 26170 - DNA, 260 bp, Unknown
  Description of Unknown: RightRegion for integrase B171 sequence
attatgaaagaactgggtggtacaatgccgcaggaggaccgcaatggaaacatggaatgatatccggcacgcagatattcttgctccaaccgaagacagcgcatctgtacccatgaacgatttctctgatgtcccgtctctaagcacaaatgacgaagttgttgacatgggtacggattttgatttcgagggttttcaagtcgtccgcagagaattctttgcgcacttgcatgagccgtctgtgaccttcaacaattaca

SEQ ID NO: 26171 - DNA, 260 bp, Unknown
  Description of Unknown: RightRegion for integrase B172 sequence
tgcaacattatatatggtcaaatacgacagaagtcattgattttctttgtttatctgtgataccattcgttacgagacctccaccattgctctcttcgcttatggttgagactccggcactcaaagaaactttccgaaaaacacaacgaggtgaccatttttgaaacgtcgaacttttcttgtctgcaccgctgcacttttttgcggtgcgtttctggcagggggctgcactcaaaaaacttctcagcctgtccttcagc

SEQ ID NO: 26172 - DNA, 260 bp, Unknown
  Description of Unknown: RightRegion for integrase B173 sequence
ataattcgggacatgcgtcagggaggagaaatgaatggaactattcaaccagtggaatagacaggatccggtttccagtgcattgcagggcagatctgtaaacatccccatggaatcttcgtttgattatgccatactgcgtcagaccccggtgacggagactattgaaaataaagatgcacttgtcatggaagcggcacctgaagtgcaaagcgcaccgcttgcggagtcggagatcgtcaacatgaaggacttctcct

SEQ ID NO: 26173 - DNA, 260 bp, Unknown
  Description of Unknown: RightRegion for integrase B174 sequence
ataattcgggacatgcatcggggaggagaaatgaatggaactattcaaccagtggaatagaaaggacccggtttccagcgcattgcagggcagatctgttagcattcccgtggaaccttcatttgattatgctgcaccgcttcaggccccggcgcaggagccaatcgagaagaaagatgagcctgtcacggcagccgcccctgaagcgcaaagcgcacctcttgcggagtcggagatcgttgaaatggaggatttctctt

SEQ ID NO: 26174 - DNA, 260 bp, Unknown
  Description of Unknown: RightRegion for integrase B175 sequence
gtagtaacacacgttatacctcctgaaagtaccaagaagaaaaagagcaaaaataaataagctagtttgtaagtgcatatttttcacagataaatttttcattacatttttaacaataatcgcttaagtataatacaaaatttactgctcaaaatatgcacctgcctcgccctttactaactaaaatttagcaacattttaaattggcgaggcagaaatgaattttgctttgacaaaattcataaccccctatgagtttt

SEQ ID NO: 26175 - DNA, 260 bp, Unknown
  Description of Unknown: RightRegion for integrase B176 sequence
cagagatatatcaagcaggaactaagcgtgttaactagaccggaggtaaatcatgaatgatttgacagttgggaatattttgactccaagaggatcggacagtgttccgtctgatgtatccagtacacccatagattcgatcatggctgctgaaattgaagacgatattttggaaatgaacgaaagcttcgaccttgatgaatttcaggtagtgcgaagggagtttttcgctcatcttcatgagccgtcgatctgtttta

SEQ ID NO: 26176 - DNA, 260 bp, Unknown
  Description of Unknown: RightRegion for integrase B177 sequence
actatgacggagttcatggaatcgaacgtgtggcattccataccgttcaagcatttttgaaaaatgatgcgtcacatagtccggagcaaatgtgcgcccatcgggccatttgaaaacatagtcattcttctggtaggccttgccgaacaaacgctggttttcttcttcctcagcttttgctttcagaaaaatctcccgtgcttcttctgtcataggaaagcttcggcggctgctttgggttttcgtcttatccttttcca

SEQ ID NO: 26177 - DNA, 260 bp, Unknown
  Description of Unknown: RightRegion for integrase B178 sequence
gaatcgactggtttaacacgtaaagagttcatagagcgttatcggatagaccagatctagacgggcatttattttggcctagaaagtagattagaaataccgtaaacaaaaaataatatagtagtagttgttatgccccgtatcgattgatgtcgcattacggggctttttttcgtcttattgataaataattgtacataataattataaggggaaactatgttagattggttagtcagtgcttttgtattagtggtagg

SEQ ID NO: 26178 - DNA, 109 bp, Unknown
  Description of Unknown: RightRegion for integrase B179 sequence
actatgacggagttcatggaatcgaatgtgtggcattccataccgttcaagcatttttgaaaaatgatgcgtcacatagtccggagcaaatgtgcgcccatcgggccat

SEQ ID NO: 26179 - DNA, 260 bp, Unknown
  Description of Unknown: RightRegion for integrase B180 sequence
actatgacggagttcatggaatcgaatgtgtggcattccataccgttcaagcatttttgaaaaatgatgcgtcacatagtccggagcaaatgtgcgcccatcgggccatttgaaaacatagtcattcttctggtaggccttgccgaacaaacgctggttttcttcttcctcagcttttgctttcagaaaaatctcccgtgcttcttctgtcataggaaagcttcggcggctgctttgggttttcgtcttatccttttcca

SEQ ID NO: 26180 - DNA, 260 bp, Unknown
  Description of Unknown: RightRegion for integrase B181 sequence
ggtcagctaccaaaagaagaaccgcgcaaaggcagcatagcagccagcgcagcagtctaattatcacgaagcaaaggagaatgaatatgagtaagttgacttacattcgttgtggagattatgatatacccaacctaaaactttctgaacagccggaaacttctatcggcaagtacggcagaatgcgaaaatcctacctaaaggaacatcgccccattctctacaaccatctgctgatgagcgagaagctgtatccacac

SEQ ID NO: 26181 - DNA, 260 bp, Unknown
  Description of Unknown: RightRegion for integrase B182 sequence
ttcatcaacgagcaattaagcgcttcaaaacagttggaaggagcggactacaatgcatgaacaatccaacattccgacagttcggaatcttgatggtgtatattaccgtgtggttcgtgatggcaatcacgtcagccgatgcttttctgacctatcggaatctgaacaggatgtgattatggaaaagtatgacgcagagcagctcagacggctttgtcgctatctcagcatgagcctacgccagattggagatgcgctgg

SEQ ID NO: 26182 - DNA, 260 bp, Unknown
  Description of Unknown: RightRegion for integrase B183 sequence
ttcatagcagagcaattagcccccataaagcagatggaagaggtggattttaatgcctgaaaaaaacgatattccaatctttcggaatcttgatggagtgtactaccgcgtggttcgtgatggtatacatgtcaacagatgcttttctgatttgtccgaagccgagcaggatgtgatcatggcagagtataacacggaacagctcagacggctttgtcgctatctcagcatgagcctacgccagattggagatgcgctga

SEQ ID NO: 26183 - DNA, 260 bp, Unknown
  Description of Unknown: RightRegion for integrase B184 sequence
ttcatagcagagcaattagcccccataaagcagatggaagaggtggattttaatgcctgaaaaaaacaatattccaatctttcggaatcttgatggagtgtactaccgcgtggttcgtgatggtatacatgtcaacagatgcttttctgatttgtccgaagccgagcaggatgtgatcatggcagagtataacacggaacagctcagacggctttgtcgctatctcagcatgagcctacgccagattggagatgcgctgg

SEQ ID NO: 26184 - DNA, 260 bp, Unknown
  Description of Unknown: RightRegion for integrase B185 sequence
ttcatagccgagcaattagcccccataaagcagatggaagaggtggattttaatgcctgaaaaaaacgatatcccaatctttcggaatcttgatggagtgtactaccgtgtgattcgtgatggtatacatgtcaaccgatgcttttctgatttgtctgaagccgagcaggatatgatcatggcagagtataacgaggaacaactcagacggctttgtcgctatctcagcataagcctacgccagattggagatgcgctgg

SEQ ID NO: 26185 - DNA, 260 bp, Unknown
  Description of Unknown: RightRegion for integrase B186 sequence
ttcatagccgagcaattagcccccataaagcagaaggacgaggtggattttaatgcctgaaaaaaacgatatcccaatctttcggaatcttgatggagtgtactaccgtgtggttcgtgatggtatacatgtcaaccgatgcttttctgatttgtccgaagccgagcaggatgagatcatggcagagtataacgcggaacaactcagacggctttgtcgctatctcagcatgagcctacgccagattggagatgggctgg

SEQ ID NO: 26186 - DNA, 260 bp, Unknown
  Description of Unknown: RightRegion for integrase B187 sequence
ttcatagcagagcaattagcccccataaagcagatggaagaggtggattttaatgcctgaaaaaaacgatattcccatctttcggaatcttgatggagtgtactaccgcgtggttcgtgatggtatacatgtcaaccgatgcttttctgatttgtccgaagccgagcaggatgtgaccatggcagagtataacacggaacagctcagacggctttgtctctatctcagcatgagcctacgccagattggagatgcgctga

SEQ ID NO: 26187 - DNA, 260 bp, Unknown
  Description of Unknown: RightRegion for integrase B188 sequence
gcaattgaaaaaacaggattaactcgtcaacaatttattgaaaaattcaaaatacaataaaatattatagccccaacaatgttgattaagccccgaaaggggctatttcatgtctgttttttactctcagtactaaatactctaaagaatgtacttgagaggatgtatgaatttattagttaaaattattgtagaagtactggcattcgttttttgcgtttgtgtattattaccattctatctggtttgtttaatcatct

SEQ ID NO: 26188 - DNA, 260 bp, Unknown
  Description of Unknown: RightRegion for integrase B189 sequence
ccacagcgtccttatcgatcatgtaaatggacaggaccttgcttccgctgttttccatagcaccatcagaaaggtaggttttcagggtccggttataggtgtacgcctgtgccagttccatgatcttttctttctggtcctctgtaatgtggtcgtaggcttcagagtggatatagggttccccgttctggacgccaaaggtgttgctgtgcaagagcaaggagccattttcagggatgcagctcgataagggcagcggt

SEQ ID NO: 26189 - DNA, 260 bp, Unknown
  Description of Unknown: RightRegion for integrase B190 sequence
aatgagtttgtagatatagctatagctaataattgggttatagaataccaatatatctagtgacagttgaggaatcttattcaagatgtaaggagcaaatatcgttaataatggtgattatttgctcctttttagtacctttgcgctaaattggattaataggcaaataatgaatttacgctttatagatttattcgcagggattggaggaatccgcaaagggttagaactagctgctattgaagctggttataccccta

SEQ ID NO: 26190 - DNA, 260 bp, Unknown
  Description of Unknown: RightRegion for integrase B191 sequence
aatgagtttgtagatatagctatagctaataattgggttatagaataccagtatcaataataattatccccagcctattaaatagctgaattagttaaggtttagcctattggatatttatctgatagtgaactattgacagattaagtattgactaatttgaataataaaatattttgtatatttacttattattcctatatttgtaatatttaattaaattatactatgaatgctttctttgatggcttatggctgta

SEQ ID NO: 26191 - DNA, 260 bp, Unknown
  Description of Unknown: RightRegion for integrase B192 sequence
aatgagtttgtagatatagctatagctaataactgggttatagaataccagtatcaataataattatccccagcctaccgattaaagtaagctggggataattatatttagttagattttttacttttattataaagagtagttccccagtatattaagtatggtattaacaatgtatataatataaattcagagccatcataatatcttaaatctgtagatacaaatggaaacagccaatcacttgcatctctattttt

SEQ ID NO: 26192 - DNA, 260 bp, Unknown
  Description of Unknown: RightRegion for integrase B193 sequence
aatgagtttgtagatatagctatagctaataattgggttatagaataccaatatatctagtgacagctgaggaatcttattcacgctgtaaggagcaaataaccgtcgtaattaatggtttttgctccttttttagtaacttcgcactaaattagattgaagatgataaataaaagactgaaggctatttctttattctctggagcaatggggctagatttaggaatagagaaagctgggatagaaataaagttatgcgt

SEQ ID NO: 26193 - DNA, 260 bp, Unknown; identical to SEQ ID NO: 26189
  Description of Unknown: RightRegion for integrase B194 sequence

SEQ ID NO: 26194 - DNA, 260 bp, Unknown
  Description of Unknown: RightRegion for integrase B195 sequence
aatgagtttgtagatatagctatagctaataactgggttatagaataccagtaccagtaatagctactgcccttccaaagttaaacacaaaaactttggaagggtacttcatagtgaagtgaaattgggataatattctattggggaactaatcaagaatttccatatcactaatatttgaatgaatacaaggacagctacaataatacataaatacggcaatgatagcaaaaagactaactccacagcacccaactgga

SEQ ID NO: 26195 - DNA, 260 bp, Unknown; identical to SEQ ID NO: 26189
  Description of Unknown: RightRegion for integrase B196 sequence

SEQ ID NO: 26196 - DNA, 260 bp, Unknown; identical to SEQ ID NO: 26189
  Description of Unknown: RightRegion for integrase B197 sequence

SEQ ID NO: 26197 - DNA, 260 bp, Unknown
  Description of Unknown: RightRegion for integrase B198 sequence
aatgagtttgtagatatagctatagctaataattgggttatagaataccaatatatctagtgacagctgagaaatcttattcacgctgtaaggagcaaaaaccattaattatgacggctatttgctccttttttagtaactttgtccgattaaactgtagatggatgaaaccaatactgaaatataggggtggtaaatcaaaagaattatctatgttattgccttatgtacctgcctttgctggaaggtacatagagcct

SEQ ID NO: 26198 - DNA, 260 bp, Unknown
  Description of Unknown: RightRegion for integrase B199 sequence
cgtctcccagactgccttcagcgtttccagactcacttcgccggttgccgcggcatttgacttgccatagccggcggtggagacaccggctccggaacccgcggtgtccgctctctgcggctcctgatcctcaggctgtgccgtatccagatcttcatatacgcttgggtcggggtcgccgaagcgtacggacatcttggttacgctgtcctcaatcatcggcttataccaattattgtaagaccacgggcggctgtccg

SEQ ID NO: 26199 - DNA, 260 bp, Unknown
  Description of Unknown: RightRegion for integrase B200 sequence
aatgagtttgtagatatagctatagctaataactgggttatagaataccagtatatatagtgacaactgagaagtcttattcacgctgtaaggagcaaataaccgtcataattaatggtttttgctccttttttagtaactttgtattcttaaactgtagatggatgaagccaatactgaaatataggggtggtaaatcaaaagaattatctatgttattgccttatgtacctgcctttgctggaaggtacatagagcct

SEQ ID NO: 26200 - DNA, 260 bp, Unknown; identical to SEQ ID NO: 26189
  Description of Unknown: RightRegion for integrase B201 sequence

SEQ ID NO: 26201 - DNA, 260 bp, Unknown
  Description of Unknown: RightRegion for integrase B202 sequence
aatgagtttgtagatatagctatagctaataactgggttatagaataccaatatatctagtgacagctgaggaatcttattcacgctgtaaggagcaaaaaccattaattatgacggctatttgctccttttttagtaactttgtccgattaaactgtagatggatgaaaccaatactgaaatataggggtggtaaatcaaaagaattatctatgttattgccttatgtacctgcctttgctggaaggtacatagagcct

SEQ ID NO: 26202 - DNA, 260 bp, Unknown
  Description of Unknown: RightRegion for integrase B203 sequence
aatgagtttgtagatatagctatagctaataactgggttatagaataccagtatatatagtgacaactgagaagtcttattcacgctgtaaggagcaaataaccgtcataattaatggtttttactccttttttagtaacttcgcactaaattagattgaagatgataaataaaagactgaaggctatttctttattctctggagcaatgggattagatttaggaatagagaaagctggaatagaaataaagttatgcgt

SEQ ID NO: 26203 - DNA, 260 bp, Unknown; identical to SEQ ID NO: 26199
  Description of Unknown: RightRegion for integrase B204 sequence

SEQ ID NO: 26204 - DNA, 260 bp, Unknown; identical to SEQ ID NO: 26199
  Description of Unknown: RightRegion for integrase B205 sequence

SEQ ID NO: 26205 - DNA, 260 bp, Unknown; identical to SEQ ID NO: 26189
  Description of Unknown: RightRegion for integrase B206 sequence

SEQ ID NO: 26206 - DNA, 260 bp, Unknown
  Description of Unknown: RightRegion for integrase B207 sequence
aatgagtttgtagatatagctatagctaataattgggttatagaataccaatatatctagtgacagctgaggaatcttattcacgctgtaaggagcaaaaaccattaattatgacggctatttgctccttttttagtaactttgtccgattaaactgtagatggatgaaaccaatactgaaatataggggtggtaaatcaaaagaattatctatgttattgccttatgtacctgcctttgctggaaggtacatagagcct

SEQ ID NO: 26207 - DNA, 260 bp, Unknown; identical to SEQ ID NO: 26202
  Description of Unknown: RightRegion for integrase B208 sequence

SEQ ID NO: 26208 - DNA, 260 bp, Unknown
  Description of Unknown: RightRegion for integrase B209 sequence
aatgagtttgtagatatagctatagctaataactgggttatagaataccagtaccaataagcaacaaccgccagcctatcaaatagctgaattagttaaggtttagcctattggatatttatctgatagtgaactattgacagattaagtattgactaatttaaataataaaatattttgtatatttacttattattcatatatttgtaatatttaattaaattatgctatgagtgctttctttgatatgttatggctgt

SEQ ID NO: 26209 - DNA, 260 bp, Unknown
  Description of Unknown: RightRegion for integrase B210 sequence
aatgagtttgtagatatagctatagctaataattgggttatagaataccaatatatctagtgaaagttgaggaatcttattcaagatgtaaggagcaaatatccgtcgtaattaatggtttttgctccttttttagtaacttcgcactaaattagattgaagatgataaataaaagactgaaggctatttctttattctctggagcaatggggctagatttaggaatagagaaagctgggatagaaataaagttatgcgt

SEQ ID NO: 26210 - DNA, 260 bp, Unknown; identical to SEQ ID NO: 26202
  Description of Unknown: RightRegion for integrase B211 sequence

SEQ ID NO: 26211 - DNA, 260 bp, Unknown; identical to SEQ ID NO: 26209
  Description of Unknown: RightRegion for integrase B212 sequence

SEQ ID NO: 26212 - DNA, 260 bp, Unknown; identical to SEQ ID NO: 26199
  Description of Unknown: RightRegion for integrase B213 sequence

SEQ ID NO: 26213 - DNA, 260 bp, Unknown; identical to SEQ ID NO: 26189
  Description of Unknown: RightRegion for integrase B214 sequence

SEQ ID NO: 26214 - DNA, 260 bp, Unknown; identical to SEQ ID NO: 26189
  Description of Unknown: RightRegion for integrase B215 sequence

SEQ ID NO: 26215 - DNA, 260 bp, Unknown; identical to SEQ ID NO: 26189
  Description of Unknown: RightRegion for integrase B216 sequence

SEQ ID NO: 26216 - DNA, 260 bp, Unknown
  Description of Unknown: RightRegion for integrase B217 sequence
attgaagaaacactagaaaatatactcaataaccaaaaccaggaggaaacaaatgagtaaagaactaaacaacaatgaaatggaaatcattaacgacgatgatttcagttacgaaggataccaagttgttcgtggtgaattcttcgcacatatttttgagccttctttcacttttaacaactataaggtatctgtaaatacagcatgcattaaaaagctcccagaatatgattatgttcaaatcctggtaaaccctgatg

SEQ ID NO: 26217 - DNA, 260 bp, Unknown; identical to SEQ ID NO: 26209
  Description of Unknown: RightRegion for integrase B218 sequence

SEQ ID NO: 26218 - DNA, 260 bp, Unknown
  Description of Unknown: RightRegion for integrase B219 sequence
aatgagtttgtagatatagctatagctaataactgggttatagaataccagtatcaataagcaagaaaaggcactataaaatattttgtgtaaatgcaaaatacgggattcagttataagttctcttatatctgaatcccgttttacatttacacaaaattgtggacagtgccaaaggataagcggttataacttatcctttttgtttttattgaaataaagatttgtctgcatatttattaaggtctacagcttcacca

SEQ ID NO: 26219 - DNA, 260 bp, Unknown
  Description of Unknown: RightRegion for integrase B220 sequence
aatgagtttgtagctatagctatagctaataactgggttatagaataccaatatatctagtgacagctgagtaatcttattcaagatgtaaggagtaaataaccgtcgtaattaatggtttttgctccttttttagtaacttcgcactaaattagattgaagatgataaataaaagactgaaggctatttctttattctctggagcaatggggctagatttaggaatagagaaggctgggatagaaataaagttatgcgt

SEQ ID NO: 26220 - DNA, 260 bp, Unknown
  Description of Unknown: RightRegion for integrase B221 sequence
ttgctgagatgtaattcagtcatttttgtgttaatgggtaaaaccatttatcagccataaggcaaaattaaatatcaaatttagaccttgtagaagcaattctgcaaggtcttttttacccgcaaaacatagaaaaagccttgtaaacactgcgtttttgtcaataaaacaggaattttatttacattatttgcggcggtgctgttgataacgatttttacatcgtggttgataaacagctttgcacaatgacatagagc

SEQ ID NO: 26221 - DNA, 260 bp, Unknown; identical to SEQ ID NO: 26189
  Description of Unknown: RightRegion for integrase B222 sequence

SEQ ID NO: 26222 - DNA, 260 bp, Unknown
  Description of Unknown: RightRegion for integrase B223 sequence
aatgagtttgtagatatagctatagctaataattgggttatagaataccagtatcaataaacaaccgcaacttattaataagtgaattggtcaaggtctagcctattagatatttatctgatagtgaattactgacagattaagtattgactaatttaaataacaaaatattttgtatatttacttattgtttatacatttgtaatatttaattaaattatgctatgagtgctttctttgatatgttatggctgtatttt

SEQ ID NO: 26223 - DNA, 260 bp, Unknown; identical to SEQ ID NO: 26190
  Description of Unknown: RightRegion for integrase B224 sequence

SEQ ID NO: 26224 - DNA, 260 bp, Unknown
  Description of Unknown: RightRegion for integrase B225 sequence
gtggtttctccgggcaaaatgacgagacgattcacaagtttctgggaaaggtcgatttgaaagacacccagcaagtggaagccctcaaggattctttctgcaacaagtacgccagttccaaagttgagaatatgatggtcatcacccgcaacggtgaagtccattatatgaccgacaataatccccgaggggttgactgctcgtatctgggtggtaaactgaaagggagttacaacatccacacgcacccgccagatacc

SEQ ID NO: 26225 - DNA, 260 bp, Unknown
  Description of Unknown: RightRegion for integrase B226 sequence
ttcattccgctatcactgcttcccccagcagaaccgaagaaaggagttgcatcagcatgagcaaattagaaagaatcattcacgataacagtaatggtctggattatatccttgtcggggaaatctatctgccactgatcgcagtacccgaagagaaaagagagattggtttttatggaagtcttcacagaaactatctgaaagattacaagagtggcttgtattcctatctgacattgagtggtaagctctggacgtat

SEQ ID NO: 26226 - DNA, 260 bp, Unknown
  Description of Unknown: RightRegion for integrase B227 sequence
gggcagctaccaaaagaagaaccgcgcaaaggcagcatagcagccagcgcagcagtctaatcatcacgaagcaaaggagaatgaatatgagtaagttgacttacattcgttgtggagattatgatatacccaacctaaaactttctgaacagccggaaacttctatcggcaagtacggcaggatgcgaaaatcctacctgaaggaacatcgtcctattctctacaaccaactgctgatgagcgagaagctgtatccacac

SEQ ID NO: 26227 - DNA, 260 bp, Unknown
  Description of Unknown: RightRegion for integrase B228 sequence
gctcgcccgcgcccgtttgccttgcaagaaactatcccggaaaatgcgttgctgcggtaagttgacgggcgaccaatggtcgcccctacacacgtaataggacaagaatgcaattttttgacggtctgtttttgttgcccgctttttctgctgttttcagaatgctcaatttccccgcagccggaaaccgtggagtggttcatgcccatcctgcaaaatcagaaaccgggcacagaattgcagcgggcacttgcaatccg

SEQ ID NO: 26228 - DNA, 209 bp, Unknown
  Description of Unknown: RightRegion for integrase B229 sequence
ttacgcattccctatgctcgtcagctcgtatcttctggtccgtatggaaggcagaattgaaaagctgagtgccaatatcgataccctaacccgtgtgctgcaggaaagactcgtgatgcaatttccatatgtacagcagtaaatagtatatacaagcaaaaatatactaagaactaatcatatggcacaggggctgtcgtacacaaagt

SEQ ID NO: 26229 - DNA, 260 bp, Unknown
  Description of Unknown: RightRegion for integrase B230 sequence
gctcgcctgcgcccgtttgccttgcaagaaactatcccggaaaatgcgttgctgcggtaagttgacgggcgaccaatggtcgcccctacacacgcaatagggcaagaatgcaattttttgacggtctgtttttgttgtccgctttttctgctgttttcagaatgttcgatttccccgcagccggagaccgtggagtggttcatgcccatcctgtaaaatcagaaaccgggcacagaattgcagcgggcacttgcaatctg

SEQ ID NO: 26230 - DNA, 109 bp, Unknown
  Description of Unknown: RightRegion for integrase B231 sequence
attcctgtcagcaatatgccgaagttagagccgaaaatcgcaccacagaaaggagcttaatcatggaactgaattttatcaaatgtggggactactacatcccagacat

SEQ ID NO: 26231 - DNA, 260 bp, Unknown
  Description of Unknown: RightRegion for integrase B232 sequence
atcgtttatatcaaggaaaagttcgaacatagcgaatgctattgggaggtggtagagtagccagcacgttaaaaaagtatgccaccaacccgaactctgacagtagttccagaccccttgtaacccggcattgatttccgtcggcctacggctcggtgtggacaattactaccattattttgaacagttcggcctaaaacagcgcaccggcatcgacttgccgggggaagctgggactatcatgcataaaaaagaggata

SEQ ID NO: 26232 - DNA, 260 bp, Unknown
  Description of Unknown: RightRegion for integrase B233 sequence
atcgtttatatcaaggaaaagttcgaacatagcgaatgctattgggaggtggtagagtagccagcacgttaaaaaaatatgccaccaacccgaactctgacagtagttccagaccccttgtaacccggcattgatttccgtcggcctacggctcggtgtggacaattactaccattattttgaacagttcggcctaaaacagcgcaccggcatcgacctgccgggagaagctgggactatcatgcataaaaaagaggata

SEQ ID NO: 26233 - DNA, 260 bp, Unknown
  Description of Unknown: RightRegion for integrase B234 sequence
atcgtttatatcaaggaaaagttcgaacatagcgaatgctattgggaggtggtagagtagccagcacgttaaaaaagtatgccaccaacccgaactctgacagtagttccagaccccttgtaacccggcattgatttccgtcggcctgcggctcggtgtggacaattactaccattattttgaacagttcggcctaaaacagcgcaccggcatcgacctgccgggagaagctgggactatcatgcataaaaaagaggata

SEQ ID NO: 26234 - DNA, 260 bp, Unknown
  Description of Unknown: RightRegion for integrase B235 sequence
atcgtttatatcaaggaaaagttcgaacatagcgaatgctattgggaggtggtagagtagccagcacgttaaaaaagtatgccaccaacccgaactctgacagtagttccagaccccttgtaacccggcattgatttccgtcggcctacggctcggtgtggacaattactaccattattttgaacagttcggcctaaaacagcgcaccggcatcgacctgccgggggaagctgggactatcatgcataaaaaagaggata

SEQ ID NO: 26235 - DNA, 260 bp, Unknown; identical to SEQ ID NO: 26234
  Description of Unknown: RightRegion for integrase B236 sequence

SEQ ID NO: 26236 - DNA, 260 bp, Unknown
  Description of Unknown: RightRegion for integrase B237 sequence
atcgtttatattaaggaaaagttcgaacataacgaatgctattgggaggtggtagagtagccagcacgttaaaaaagtatgccaccaacccgaactctgacagtagttccagaccccttgtaacccggcattgatttccgtcggcctgcggctcggtgtggacaattactaccattattttgaacagttcggcctaaaacagcgcaccggcatcgacctgccgggagaagctgggactatcatgcataaaaaagaggata

SEQ ID NO: 26237 - DNA, 260 bp, Unknown
  Description of Unknown: RightRegion for integrase B238 sequence
atagaagaaaacatcaaatccatgatagatggaatgagacaggaggcaaataatgaatgatgagatacaactcaaggaagctgtagattatgtggaggacgaggcttttacctttgaaggttatcaggttgtacgaggagaatttttttctcacgtatttgaaccctccttcacatttaataactataaagtccaggtcaatactgcctgtattaagagattaccggattttgactatgttcaaatattggtgaacccag

SEQ ID NO: 26238 - DNA, 260 bp, Unknown
  Description of Unknown: RightRegion for integrase B239 sequence
gtccccgtcagcaatatgccgaagttagaaccgaaaatcgcaccgcagaaaggagcttgagaatgtggatagtacgatttatccgtaaggatgccaagcccgatgaagaatacttctatcactcgcagggtgaagcggaatatcatcgtgatctgttccagaacgatgattctggactatatgaaaaaatcgaagttatcaatgaaacagatttataaggaggttgctatggaactgaattttattaagtgcggagatta

SEQ ID NO: 26239 - DNA, 260 bp, Unknown
  Description of Unknown: RightRegion for integrase B240 sequence
gcgggcctgacggtctaccgcacggacatgcagggcaatatattgatcacagtggactgagaggactacatggcagagagaaaaacgcccaacaagggctatcagaaattaaaaagcgacctgagcgcgggagagatcggtcaggtctacatctttcacggcgaggagagttacctgcgtgaatactacctcggcgagatcaaaaaaaagctcgtccccgcgggctttgaggagttcaactaccaccgcctgagcggcaa

SEQ ID NO: 26240 - DNA, 260 bp, Unknown
  Description of Unknown: RightRegion for integrase B241 sequence
gaggaagcaagggagcaatcccaagcagcccaaaaagaaaagaaaaccggcgtagcctaaactacgccgattctctcacataaatgttttcttacggaaccacgccttttagccgtcctcttttcctatatagcaccgccttcgtgttgtccattgcaattgctgatcgtaccacctctcatcgtgaatacgcagtcctttccaatatccacagcaccgccatcaccatcgtcatctctgcaattcgcaatgatactgct

SEQ ID NO: 26241 - DNA, 260 bp, Unknown
  Description of Unknown: RightRegion for integrase B242 sequence
aaggcgcgggaataccgggcaaggagaaaggcacaggccgccgcagcacccacacagtaaaacagaataccgacaaccaagagggattttccgggctacgggaaatccctttttcgcgcccggagaaaggagccgcctatggcagaacagacccccgacagtatcatcacgacacagaggaacggacagaccatcgttgcggaattgtttttcaatcacagcggcacagaaacattccgcgacaagctgctcaaagtgat

SEQ ID NO: 26242 - DNA, 260 bp, Unknown
  Description of Unknown: RightRegion for integrase B243 sequence
atggtggaaatagctattaataatgggtgggtcttatcctattgttataaacaaaaataacagtcttatagtatgcctagtattactatagtacctagcaaagtattactagtataggtaatacattatatggcagtctagtagtggatattatattattgctactacctcattactagtatcagctatagaagtgcgcctatttttatttattacagaaatggtatctatatcttggtaatgtcctagaaactaaatat

SEQ ID NO: 26243 - DNA, 260 bp, Unknown
  Description of Unknown: RightRegion for integrase B244 sequence
aaagctggcaccatcctaccagagaatctacccgccgaaacaaaaggagaatggttatgattgatttgaaaaaacacatccatgatagtgccaatggtctggattacacccttgtcaacgaccactatctgccgaacctgaccgtagcagccccggcagagcaccccaccgggcggtggggccgcttacataagatgtatctgaaggagcaacatcccatccggtacaaccaactgctcctgtccggcgaactgggcggc

SEQ ID NO: 26244 - DNA, 260 bp, Unknown
  Description of Unknown: RightRegion for integrase B245 sequence
tttatccctgtcagcaatcttccgaagcgagagccacagaaaggagctatcacagcatgaaagaactgaaaccgagaatccacgaaaacggcattgactatatccttgtgggagattactatgtgccggatttgaagctgccagaggaaaagcgacctgtcgggcattggggcagacttcacaaagcctatttgcagaactaccgccccgccgtttacaacgagcttgttttgtcctgtcggcttcattccgtccttgcg

SEQ ID NO: 26245 - DNA, 260 bp, Unknown
  Description of Unknown: RightRegion for integrase B246 sequence
acggggtttgaagaactcaaaagttttatcacgcaagaattgcagggcgtagatatttaggaggtagtttatgaatgatattactgagcaaaggactatgacagagacctttgctccccaagcggactcagaactgcataaaattccggtattaaaagacgaggaagaattgattgaaatgagcacggacttcaacctggaggaattccaggttgtccgcagagagttctttgctcatattcgtgagcctgcggttacat

SEQ ID NO: 26246 - DNA, 260 bp, Unknown
  Description of Unknown: RightRegion for integrase B247 sequence
gttgtgcttttcaaagttgtatgcgccgatggcctcgtacatggtggcaccgctgtgtaggtcattgatgatgaactgccgcagcgtctcctccttttcggtaataatacacacccggcgcttgatgctgttatcgaagatgaaatgatccagcacgatgccgttgaagtaggtaccgaggatactcagtactacggtctttttatcgtagacaagggcggcagagagtgccacgcacatgcccgaaagggacatggcct

SEQ ID NO: 26247 - DNA, 260 bp, Unknown
  Description of Unknown: RightRegion for integrase B248 sequence
gatctcacgaaaggaatcgtggaaattatggaagaaataaaggagaatcgtaatgactgacacacctgtaaacacatgggaactggcacaaaatattcccgaagatatgagcaaacctcaaaatcccctgccagtaactatcacaccgggaaaggatggacaatccgacatcattgaagacatggatttcagctttgatggatatcaagttgtccgtggcgaatttttcgcccatacatttgagccttcctttacattta

SEQ ID NO: 26248 - DNA, 260 bp, Unknown
  Description of Unknown: RightRegion for integrase B249 sequence
tttatccctgtcagcaatcttccgaagcgagaaccacagaaaggagctatcacagcatgaacgaactgaaagcgagaatccatgaaaacggcattgactatgtccttgtgggagattactatgtgccggatttgaagctgccggaggaaaagcgacctatcgggcattggggcagacttcacaaagcctatttgcagaactaccgccccaccgtttacaacgagcttgttttgtcctgtcggcttcattccgtccttgcg

SEQ ID NO: 26249 - DNA, 260 bp, Unknown
  Description of Unknown: RightRegion for integrase B250 sequence
gaaatagcagaagaaaatcaatgggtattatcttttgaatacaactgcaaaaagaagtagctatctgatgtagttcttatatatataataaggtacacgtatataataaggtatatatataactaataaggtatagcttctatatttaaagtattataaaatccagtcagaaatggctggattttgcttttttattagtatctttgtcttctaaacataaataattaaatgaatgaaattgctagaagataataaaagat

SEQ ID NO: 26250 - DNA, 260 bp, Unknown
  Description of Unknown: RightRegion for integrase B251 sequence
gatatagcagaagaaaatcaatgggtattatcttttgaatacaactgcaaaaagaagtagctatctgatgtagttcttatatatatataataaggtacacgtatataataaggtataataaggcatagtttctatatttaaagtattataaaatccagtcagaaatggctggattttgctattttatttgtatctttgtacttaatttcataacaaatatgacatgaactttacagaattacgaacagaaattaatagct

SEQ ID NO: 26251 - DNA, 260 bp, Unknown
  Description of Unknown: RightRegion for integrase B252 sequence
aaagaagcaattgataaatttacgctcacaccttacttaaaaatcttaacaaacgaataaagaaaaaaagaaacccttgattttaaagggtttttttgttggggtttatcaatgacatttaaaatgtacgtactcttacgtatatacattatataaatgatttacacaacaaaaaaaagagtgcctagcactcttttataaaccacacttttccatggtctgctctcaaatctctttgagaatatacataatatgcacca

SEQ ID NO: 26252 - DNA, 260 bp, Unknown
  Description of Unknown: RightRegion for integrase B253 sequence
tctaagtgccgatacggcgagcgaggtgccgcagccgccggagcggtgcttgagccgtaaggtgggaattgtgcggtattgccttaaatttccccgcagccggagaccgtggagtggttcatgcccatcctgtaaaatcagaaaccgggcacagaattacagcgggcacttgcaatccgggcggaaaacaggtataatagcaactgttacctgtctcagtagctcagctggatagagcacacgcctcctaaggttgcgtt

SEQ ID NO: 26253 - DNA, 260 bp, Unknown
  Description of Unknown: RightRegion for integrase B254 sequence
cgagtgtatcacggcattaacccgcataaaaccttgatttttagcatttttaagacttgaaaaatggtgatttgccacccatttgccaccattgaacattgaacacgaaaaagaggattgaaccgttgaacattttggcggctcaatcctcttttttctcttatgacagtttcttttgttctatcgcctgttcaaaaatatcaacagaacggtttgccatcgcttctgtatcatgtacataggtttgcagggtggtttga

SEQ ID NO: 26254 - DNA, 260 bp, Unknown
  Description of Unknown: RightRegion for integrase B255 sequence
tataatcagaatcataaaattcataaatggaacgacttaaaagtttctatttatctataggctaaaaaaatagggtaggagattacaaataagtagtcttctaccctatattatatatagttagttggacgaccattattggtcgtcctttttttttgattatttaaaagtccaataaagatgttatagagaaatccaattaatgaaaattatctttatttttaaatttaaaaactgttttaccaaatatcttataatac

SEQ ID NO: 26255 - DNA, 260 bp, Unknown
  Description of Unknown: RightRegion for integrase B256 sequence
tctaagtgccgatacggcgagcgaggtgccgcagccgccggagcggtgcttgagccgtaaggtgggaattgtgcggtattgccttaaatttccccgcagccggagaccgtggagtggttcatgcccatcctgtaaaatcagaaaccgggcacagaattacagcgggcacttgcaatccgggcggaaaacaggtataatagcaactgttacctgtctcagtagctcagctggatagagcacacgcctcctaagcgtggggc

SEQ ID NO: 26256 - DNA, 260 bp, Unknown
  Description of Unknown: RightRegion for integrase B257 sequence
aggaacgttttgattctgcaaatgtggaattgcaacagatgcgtgaagctggtacaataaaggcgaaaggcaagttgattgaatcgccgcctgcacccaatgaaatcaactttgcgagcgaacacgttctgcagcgctgggcagaacgtggcatggggccgatggatgagggcggtcaaaaattgatggaggtggtcaaaaagcatggaattccgcattagtgacgatgtaaaactcgaagaatggttttgtcccattta

SEQ ID NO: 26257 - DNA, 260 bp, Unknown
  Description of Unknown: RightRegion for integrase B258 sequence
ttcgtggctactctgcacaggctgctattgctgaaatgtaattcagtcattttgtactgatattatatagcgtaatattttgggctgtcccgttttgggacagcccttttgcattgcttaaataataaaaaatcagaacaaggctttttaaagtcttgcgggctttgcccacacccacaaactttgaaaagtcataatttattcgacatcatattattgaaaagtcagattatttgtgataaaatttacttgaaaagtca

SEQ ID NO: 26258 - DNA, 260 bp, Unknown
  Description of Unknown: RightRegion for integrase B259 sequence
tcctatcctattgacaacacatgtggagatggtggtattattgtcaagaaaatagaataacaagctataaaactgtcgaaataggtggcttttaggattttaaaagaaatcagttctataataaattaaaaatcgtgttggtagaaaaatcgtctacttctaccaacacgattttacaaagagccagtacttacatctctttttctcctgtaaaaccattgtatattgatactttaaggagtttcaatcattcgatctgt

SEQ ID NO: 26259 - DNA, 260 bp, Unknown
  Description of Unknown: RightRegion for integrase B260 sequence
ttcgtggctactctgcacaggctgctatcgcaaacaagtaatccacacaggatgtattgacaggtaacttaatacaagtttattcctgatataaaatcagagggtgttccaatcggaacaccctctttttgatgtattatgtaaaataaatttatattttgttgcttttgaaaatataatgatgattttcaaaggagacaaatgtatgggaaataacattatatctaaggtacttaaatttgtgggtataggcgtaatta

SEQ ID NO: 26260 - DNA, 260 bp, Unknown
  Description of Unknown: RightRegion for integrase B261 sequence
gctatagacaaattcacgcttacacctcatttaaagatactaattgatgaaattgaataaataagcaaaaagaaaaacccttgatattaaagggtttttttgttggtgtaaatcaatgataattaaaatgtacgtactcttacgtatatttattatataaatgataaacacaacgatttaatcatcaatattaaagtaatatcttttaatatcacttttgctaaagcgtttcattaattcttttaaatcatttctttcaa

SEQ ID NO: 26261 - DNA, 260 bp, Unknown
  Description of Unknown: RightRegion for integrase B262 sequence
gctatagacaaattcacgcttacacctcatttaaaaatactccttgaagaaaatgaataaataagcaaaaaaaagaaacccttgatattaaagggtttttttgatgggttttatcaatgataattaaaatgtgcgtactcttacgtatatttatgttgtaaatgataaacaccacgatttaatcataaacattcaaataataacgtttaacgttttcttcaccaaatttatcaatgagattttgaactgtttcttcacta

SEQ ID NO: 26262 - DNA, 260 bp, Unknown
  Description of Unknown: RightRegion for integrase B263 sequence
gctatagacaaattcacacttacacctcatttaaaaatactccttgaagaaaatgaataaataagcaaaaaaagaaacccttgatattaaagggtttttttgatgggttttatcaatgataattaaaaggtacgtactcttacgtatatttatgttgtaaatgataaacaccacgatttaatcataaacattcaaataataacgtttaacgttttcttcaccaaatttatcaatgagattttgaactgtttcttcactat

SEQ ID NO: 26263 - DNA, 260 bp, Unknown
  Description of Unknown: RightRegion for integrase B264 sequence
aggagcagagaacagaaaaggatagcatgtatgaactgtccgcaaaaaatgaccgactgatatagatcctactgcagatacattagaagaagcaaaaaagtggaaaaaagagaataaatatgataatgaaaaagaaaaagtatgttggccattcggagaaatgaatggtaaaaaaatgtggatgtctatactagctatagttagaatgcagcaaactgattttaaaaatacaggtattccttatgaatcttcatctaata

SEQ ID NO: 26264 - DNA, 260 bp, Unknown
  Description of Unknown: RightRegion for integrase B265 sequence
tcatcgtcgataacggcaaaatcgtccgtgccggtctcagccgcctgctgggcgctctgagcgtttctagcttcgctggcataactttccgtctgttcatcaaaaccccgcgtagacgtgctgtcaggggctttcgagccgcaaaagctgacctcacgcacctgaatctcataggcagtgcggttgttgccctgcttgtcctgatatttccgggtctgcaagctgccattgacggcgatcatgctgcccttgtcgaaata

SEQ ID NO: 26265 - DNA, 260 bp, Unknown
  Description of Unknown: RightRegion for integrase B266 sequence
gcaatagacaaatttacccttacacctcatttaaagatactaattgatgaaactgaataaataagcaaaaagaaaaacccttgatattaaagggtttttttgttggtgtaaatcaatgataataagaatgagcgtactcttacgtatatttatgttgtaagtgataaacaccacgatttaatcataaacattcaatacacctccaaataataacgtttgacattttcttcaccgaatttattgataagattttcaattgt

SEQ ID NO: 26266 - DNA, 260 bp, Unknown
  Description of Unknown: RightRegion for integrase B267 sequence
gctatagacaaattcacgcttacacctcatttaaagatactaattgatgaaattgaataaataagcaaaaaaagaaacccttgatattaaagggtttttttgatgggttttttcaatgataattaaaaggtacgtactcttacgtatatttatgttgtaagtgataaacacaacgatttaatcataaacattcaatacacctccaaataataacgtttgacattttcttcaccgaatttattgataagattttcaattgt

SEQ ID NO: 26267 - DNA, 260 bp, Unknown
  Description of Unknown: RightRegion for integrase B268 sequence
gccaacgagaatgtcatcccttacaattatatatatgagcgcgcgtatgaaggggaatgaatacatagagaaagccaaagcacttgtcgaggcaaaaaagcaatattacctaactttatctgaactatcaaggtttagtccagatgaagagagtgcttatgccaaaatacaaaagatgtctcagttcttacgcaccgtcattgattatgggaaaagaggggaagatatacctctgtctttattcatgaatcttggtggta

SEQ ID NO: 26268 - DNA, 260 bp, Unknown
  Description of Unknown: RightRegion for integrase B269 sequence
gtaaacattagagatgtatttgaaacaatacctgataatgttaccaaagaagatttttaaaatacgtggcacgttatgaaattacaaagtaattttgtaagtggcgatatcaatttaaaaattaatactttatgaactttaactaatacgatagtttagttattgtgaaataaagtataaacggtttcaaaggtggtaaaccttagcttccatatcttggtcatgacaagatatatagaaagttatgaataatgacaaag

SEQ ID NO: 26269 - DNA, 260 bp, Unknown
  Description of Unknown: RightRegion for integrase B270 sequence
aaatacttacgtaagaatcaatggtctgacgcaatcattgatgtcgcagtagaactataaagagttctattaatgtccaaacgatatataatacctcatggtgtgagaaatcatgccgtggggtattattttatttacaattaataaacgtaaaaaaataggacagaagagtattattgcgcaactgtcctaaattattttcatcctcttgacttgtagaacaaatgtttgtataatgtaagcaaggaggtaaaatacta

SEQ ID NO: 26270 - DNA, 260 bp, Unknown
  Description of Unknown: RightRegion for integrase B271 sequence
aaatacttacgtaagaatcaatggtctgacgcaatcattgatgtcgcagtagaactataaagagttctattaatgtccaaacgatatataatacctcatggtgtgagaaatcataccgtggggtattattttatttacaatttacagacgtaaaaaataggacagaagagtatcattactcaactgtcctaaattatttttattctcttgacttgcagaacaaatgtttgtataatgtaagcatggaggtaagatgctat

SEQ ID NO: 26271 - DNA, 260 bp, Unknown
  Description of Unknown: RightRegion for integrase B272 sequence
aaaaggatgaactggagaagaaatgatcctgatgatatggaattaactatttatatgtagttgttaaaacccttgaaatcaagggttttttattgttggtggaactgcttgtaggtgtatggtacttatagtacagaaccaagataatatatgttattacaccaacaaaaaaagagccggtataaaccaactctttaaataattacttttcaatttcccaagccttatcagataaataaccatttatctcaccagatacg

SEQ ID NO: 26272 - DNA, 260 bp, Unknown
  Description of Unknown: RightRegion for integrase B273 sequence
cgcggtcatccggcggcatccgccagttccgcgaaaacgacatcgagtggctgcgggtgatcggctgcatgaaaaaagccggtatgtccatcaaggacatccggcaggaactgaagcagcagccggagggctgagcccttctcagtgccagaacacgatgcccagtacggcagaaagcaggatcatcccaatgggggatggtgctttctgccgtatttttttgtacccgcagtgcaccagccccagcagcacaaacaccg

SEQ ID NO: 26273 - DNA, 260 bp, Unknown
  Description of Unknown: RightRegion for integrase B274 sequence
gaaaccattatacaaaatataaagaatattattacagaaattaaaggagacacccaatgagcgagcaacctataaatcaatggaatatgactacagaaccttctgatatgatgaaaatcaacacacctatgccaataacagtcgcgcccagcccctcaaatcaaatggaagtcattgacgatgattctttcagctatgacggttatcaagttgtacgtggcgaattcttcgctcatatttacgaaccttcgtttacgttt

SEQ ID NO: 26274 - DNA, 260 bp, Unknown; identical to SEQ ID NO: 26273
  Description of Unknown: RightRegion for integrase B275 sequence

SEQ ID NO: 26275 - DNA, 260 bp, Unknown
  Description of Unknown: RightRegion for integrase B276 sequence
cgccttgcgggtggtatcaaaggtatccacggccttcatcagcccaatggttccaattgagatcaggtcctcctggtcgccgggctgggcgtagtatttctttgccacatgggccaccagccgcaagttgtgccggatgatcttctcccgcgcactcctgtcccccgcccgcagagccgcaaaggcttcgatctcctcccgcgcgctgagcggctttgggaaactccccgcttccagatgcagcgccagcaccagaaatt

SEQ ID NO: 26276 - DNA, 260 bp, Unknown
  Description of Unknown: RightRegion for integrase B277 sequence
aaaaggatgaactggagaagaaatgattctgatgatatggaattaactatttatatgtaattgctaaaacccttgattttcaagggttttttattgttggtggaactgcttgtaggtgtgtggtacttatagtactgaaccatagtaatatatgttattataccaacaaaaaaaaagaaccgtttaaggttctttaatctttgctactttgttgctgcttttaagtcattgattacttgttttatttctttttcatcagt

SEQ ID NO: 26277 - DNA, 260 bp, Unknown
  Description of Unknown: RightRegion for integrase B278 sequence
gaaaccattatacaaaatataaagaatattattacagaaattaaaggagacacccaatgagcgagcaacctataaatcaatggaatatgactacagaaccttctgatatgatgaaaatcaacacacctatgccaataacagtcgcacccagcccctcaaatcaaatggaagtcattgacgatgattctttcagctatgacggttatcaagttgtacgtggcgaattcttcgctcatatttacgaaccttcgtttacattt

SEQ ID NO: 26278 - DNA, 260 bp, Unknown
  Description of Unknown: RightRegion for integrase B279 sequence
gaaaccattatacaaaatataaagaatattattacagaaattaaaggagacacccaatgagcgagcaacctataaatcaatggaatatgactacagaaccttctgatatgatgaaaatcaacacacctatgccaataacagtcgcacccagcccctcaaatcaaatggaagtcattgacgatgattctttcagctatgacggttatcaagttgtacgtggcgaattcttcgctcatatttacgaaccttcgtttacgttt

SEQ ID NO: 26279 - DNA, 260 bp, Unknown
  Description of Unknown: RightRegion for integrase B280 sequence
aaatacttacgtaagaatcaatggtctgacgcaatcattgatgtcgcagtagaactataaagagttctattaatgtccaaacgatatataatacctcatggtgtgagaaatcatactgtggggtattattttatttacaattcataaacgtaaaaaataggacagaagagtatcattactcaactgtcctaaattattttatcctcttgacttgcagaacaaatgtttgtataatgtaagcatggaggtaagatgctatg

SEQ ID NO: 26280 - DNA, 260 bp, Unknown; identical to SEQ ID NO: 26278
  Description of Unknown: RightRegion for integrase B281 sequence

SEQ ID NO: 26281 - DNA, 260 bp, Unknown
  Description of Unknown: RightRegion for integrase B282 sequence
aaatacttacgtaagaatcaatggtctgacgcaatcattgatgtcgcagtagaactataaagagttctattaatgtccaaacgatatataatacctcatggtgtgagaaatcatactgtggggtattattttatttacaattcacagacgtaaaaaataggacagaagagtatcattactcaactgtcctaaattatttttatcctcttgacttgcagaacaaatgtttgtataatgtaaacatggaggtaaagatacta

SEQ ID NO: 26282 - DNA, 260 bp, Unknown
  Description of Unknown: RightRegion for integrase B283 sequence
aacattagagatgtatttgaaacaataccagataatgttaaggaagaagatttttgttaaataaaattatgagaacttttacttacgatagtttgtaaaaggtacgaataattttcatagataaaataataagcaatgcttactattttatcagaagtcttatgtagttttaactatttacgaagtttatagttattacgaaataagacaggtggattctaaggttgcctaaaccttagcccccagattttgatacttgt

SEQ ID NO: 26283 - DNA, 260 bp, Unknown; identical to SEQ ID NO: 26278
  Description of Unknown: RightRegion for integrase B284 sequence

SEQ ID NO: 26284 - DNA, 260 bp, Unknown
  Description of Unknown: RightRegion for integrase B285 sequence
gcgcgggaataccgggcgaagaaaaaggcgcaggcagccgccgcacagcccacacagtaaaacagaataaccgtcaaccaagagggattttccgagttacgggaaatccctcttttgcgcccaaagaaaggagccgcctatggcagaacagacccccgacagcatcatcacgacccagaggaacgggcagaccattgttgcggagttatttttcaatcacagcagcacagaaacattccgcgacaagctgctcaaactgg

SEQ ID NO: 26285 - DNA, 260 bp, Unknown
  Description of Unknown: RightRegion for integrase B286 sequence
aaagaaaccattatacaaaatataaagaatattattacagaaattaaaggagacacctaatgagcgatcaacctataaatcaatggaatatgaccacagaaccttctgatatgatgaaaatcaacccacctatgccaataacagtcgcatccagccccacaaatcaaatggaagtcattgacgatgattctttcagttatgacggttatcaagttgtacgtggcgaattcttcgctcatatttacgaaccttcgtttaca

SEQ ID NO: 26286 - DNA, 260 bp, Unknown
  Description of Unknown: RightRegion for integrase B287 sequence
acccagcagagtacggaaagcacacggcgcagacgtgccgccgcccgaaaagcggcatagcagatggatcgtccgcaaagtctgtccgtccgacatagagcagcgtgagggcagggccatccggcagggaaataccaacaaaaaggtgttcatccaccgctatgtgacggaagggacgtttgacgcttattcgtggcagctcattgagacaaagcagcggttcatatcccaggtgatgagcggaaaagcgccgtcccgtt

SEQ ID NO: 26287 - DNA, 260 bp, Unknown
  Description of Unknown: RightRegion for integrase B288 sequence
gcgcgggaataccgggcaagaagaaaggcacaggcagccgccgcacagcccacacagtaaaacagaataaccgtcaaccaagagggattttccgaactacgggaaatccctcttttacgcccaaagaaaggagccgcctatggcagaacagacccccgacagtatcatcacgacccagaggaacgggcagaccattgttgcggagttatttttcaatcacagcagcacagaaacattccgcgacaagctgctcaaactgg

SEQ ID NO: 26288 - DNA, 260 bp, Unknown
  Description of Unknown: RightRegion for integrase B289 sequence
gcgcgggaataccgggcaaggagaaaggcgcaggcagccgccgcacagcccacacagtaaaacagaataaccgtcaaccaagagggattttccgaactacgggaaatccctcttttacgcccaaagaaaggagccgcctatggcagaacagacccccgacagtatcatcacgacccagaggaacgggcagaccattgttgcggagttatttttcaatcacagcagcacagaaacattccgcgacaagctgctcaaactgg

SEQ ID NO: 26289 - DNA, 260 bp, Unknown
  Description of Unknown: RightRegion for integrase B290 sequence
cggttgcatctcacctctgcatttttgacagaggccgagagtgaaaataccgccgcctaaaaaccgaaaagctgcgctatctggctatacgggcatttggaggatatgacaatgaaactttacaaatattccggcaccatcgaggagcttgccgttgaacacggccgaatctcctacatcaaactctttgatgtgaccgacctcaacaaagcacccacccggctggaagtcttcggtgcgctgagcaagtacattgaggc

SEQ ID NO: 26290 - DNA, 260 bp, Unknown
  Description of Unknown: RightRegion for integrase B291 sequence
attgaatataatcgcatgggcggcggcgaaataaaacttgatatctgttggcttgtttaatttttttgtggcgaaatgttgagaatttcgctactttttcaaaagtcacatcaatgcgactttcaaaattaacgcgaaaatctcaacaaaaagaaaaacggcagggcgggcgcgtccctctctgccgttgatttctttatcgcttattgattttcacttgaccgacaatttcgttataattgccgcttgaattcagcgtt

SEQ ID NO: 26291 - DNA, 260 bp, Unknown
  Description of Unknown: RightRegion for integrase B292 sequence
ggctgccgagaacctggacgcggcttttttcaccttctttgtcatggtgatggggaataaaactgccggagctgtgacagggcttgtggcaggaatcacgcttctgaccctgggtatggctgtttacagccgtcttgctgaggatgaatttacctatgagccgaagagtgtttacgaagcaatgcaggatgtggttggggaaaacacagaggaaagtgtggatttctatctcaacgacaacacggaatgggtaaagattc

SEQ ID NO: 26292 - DNA, 260 bp, Unknown
  Description of Unknown: RightRegion for integrase B293 sequence
agatggaataaggaagcaataaatcagtttgagttagcggttgaaacctatgatttctaatgttctaaccgttgtgtaaatcacatacactaagttaggaacatactcgtctgtatatttttaatataaatgataaagacaacaaaaaaaagactaccaattaaggtagtcttttattattttatttctaacacttgtcctactttgattatgtaagggaatttaatattattcttttttgctaagtcagtccattttac

SEQ ID NO: 26293 - DNA, 260 bp, Unknown
  Description of Unknown: RightRegion for integrase B294 sequence
aaaaaggcgcaaagacaagcgcagttcagatcaagtaaaatgagtaagaaaaaacgttaagaagcaagtatgatttcttgtgtaggtacgacaaaaggctttctatagaaaatattataaaagtcataacacataatttgaatagattttattcaaacttgtgctatgactttttcatttaatttgattagattattcattttccaatcaacaagtacttttctactaagtattgttgtatcgactgattttatcatatt

SEQ ID NO: 26294 - DNA, 260 bp, Unknown
  Description of Unknown: RightRegion for integrase B295 sequence
ggcataattcatttcctccttggttgttatttggtttactgttacattgctagtatgtgaaaaccataaaataatacactggcagttaaaggaaatttaacatataaaaatatttccgttcataaattataccgcagtaaaaaagcgaatgtatggttgctttttgactagaattgcggttataataatctctgcatcacatataatatctgtcagacaaaaaaagtaaggggagcccgtgaaaaagaagcgttatccta

SEQ ID NO: 26295 - DNA, 260 bp, Unknown
  Description of Unknown: RightRegion for integrase B296 sequence
cgggacggactcgcacttcgcgcaagcgctcgtgttcgtctcgcggggactggtcgctaaaaatggttgcgggtttgtgagcaggggccacgattgagcgtgagcgaaagcggggagcgaacaatgtacgccgcgcgcttcgtacaaccgcacgagcggttttgcgaagcaaaatggaggctttacgggctgacaagcggaccagactgaattcttaacgcgcccactgatggtgcaccaaagaatgccttacacaaaag

SEQ ID NO: 26296 - DNA, 260 bp, Unknown
  Description of Unknown: RightRegion for integrase B297 sequence
gaagcgaggaaagcgtgggcagaaatagaagcggagaaagcaaaggtagtaggtcattaattatcgtgaatttgcgattgtgaaaatggcagacgaggaaattatcaagtgaataataaggaatggttttgctacgatatttaacgagcaaaatcagaataaaagggcattcaaaacggacagtggaacatgtttgtagtggatgtcttttttgtggtcttgtcggtgcaaccttcccttccccttccttctctttctct

SEQ ID NO: 26297 - DNA, 260 bp, Unknown
  Description of Unknown: RightRegion for integrase B298 sequence
ctcttactgttattccgcactcgaactcgatttcgatttccttgttggacagcacagtgattttccgcacaaggcttttgaacatcactcgatcaaactcttcaagtatctttcctgtctgtagtagtttggtcacttcttcgattcggtacgacgcgagttggacttttccttgctcggacagtatctcttcttttctcataagcagttggtctatttgcattccgacctgctgactttgctgttcatattctttatcg

SEQ ID NO: 26298 - DNA, 260 bp, Unknown
  Description of Unknown: RightRegion for integrase B299 sequence
tatgacggcggaagaaaacatgaaagagcagtattatgttttgggtttgccgtcttttgaaggaatccctcagattttgaaactggtggggctggaagatgcagggaagaaaaaggcaaaagatttttctctcgggatgcgtcagagactgggaattgcgattgcgctggcaggaaaaccagatctgcttgtgttggatgagccaaccaatggtctggatccacaggggatcgtagagatgagagaactgatattaaagc

SEQ ID NO: 26299 - DNA, 260 bp, Unknown
  Description of Unknown: RightRegion for integrase B300 sequence
ggaaggtggaacaaagaagaagctaccaccttcactttggaaatatctctaaaaatatagttaaaacaaaaagaagaaatttatgcgatttcttctttttcatatttccatatataattatatgattttttgcatttatttttcaagcatttacatatattgtatgacttaaaacctaactctctttcaacttcttttgcactattccatttttttataaaatttccgtttagatcgtattgtaaaattggtttgtttgt

SEQ ID NO: 26300 - DNA, 260 bp, Unknown
  Description of Unknown: RightRegion for integrase B301 sequence
tattcaacaaaacataggatcttccgatgggaagatatcaatgtaagcatttttatgtgagtattccatagatactatgaataaaacgtagtgtcttatatgtccaaacagagaaaatgccccacgtgtgagaaatcgcattgtggggctatttttattcataaaaaattatgaattacaaataataatctataataaatatttgatatcaattacataaagtatagaataagtataaaagttgtgataaaattataata

SEQ ID NO: 26301 - DNA, 260 bp, Unknown
  Description of Unknown: RightRegion for integrase B302 sequence
gctaaaaagtgtgttgaagaacatttatcaaaattgatggaggaacagctagatgtctgatgaaattatattaaaaactgaagatgtgtcatatgacgatgatgaagatattgaagaagtcgatgactttgattatacaggatatgaagtagtaagaagagaattttacgctcatctatacgatgcagcagttaattttaaaaatgatagtattcaatttaataccgcttgtgttaataaaattaatggcttgtatatac

SEQ ID NO: 26302 - DNA, 260 bp, Unknown
  Description of Unknown: RightRegion for integrase B303 sequence
gctaaaaagtgtgttgaagaacatttatcaaaattgatggaggaacagctagatgtctgatgaaattatattaaaaactgaagatgtgtcatatgacgatgatgaagatattgaagaagtcgatgactttgattatacaggatatgaagtggtaagaagagaattttatgctcatttatacgatgcagcagttaattttaaaaatgatagtattcaatttaataccgcttgtgttaataaaattaatggcttgtatattc

SEQ ID NO: 26303 - DNA, 260 bp, Unknown
  Description of Unknown: RightRegion for integrase B304 sequence
tattcaacaaaacataggatcttccgatgggaagatatcaatgtaagcatttttatgtgagtattccatagatactatgaataaaacgtagtgtcttatatgtccaaacagagaaaatgccccacgtgtgagaaatcgcattgtggggctatttttattcataaaaaattatgaattacaaataaatatttgatatcaattacataaactatagaataagtataaaagttgtgataaaattataataatattactaataa

SEQ ID NO: 26304 - DNA, 260 bp, Unknown
  Description of Unknown: RightRegion for integrase B305 sequence
tattcaacaaaacatcgtatcttacgttgggaagatatccatgtatgtatttttatataaaaattatcctaaatattatgaataaaacataatatcttgatctatgtccaaacgtaaaatttgacctggagaattgtagaaatacagttctctgggtcatttttgtattatgatacaatgtgcttgataaaaagtataaaacataatataatataaataaaaactatggggaggtattgagtatgaaaaagaaaaaaatt

SEQ ID NO: 26305 - DNA, 260 bp, Unknown
  Description of Unknown: RightRegion for integrase B306 sequence
ggaaggtggaacaaaaaagaagctaccaccttcactttggaaatatctctaaaaatatagttaaaacaaaaagaagaaatttatgcgatttcttctttttcatatttccatatataattatatgattttttgcatttgtttttcaagcatttacatatattgtatgccttatagcctagctctctttcaacttcttttgcactattccatttttttatgaaatttccgtctaaatcgtattgtaaaattggtttattagt

SEQ ID NO: 26306 - DNA, 260 bp, Unknown
  Description of Unknown: RightRegion for integrase B307 sequence
agtgcattatattctcgtttaaatagaaaagaacaaccaaataagttatgctatatttagatgtaaaagtattaatacattaaatggtttatcccatattggtagtcataacaaacgagaaaaagaatcttataaatctaatcctgatataagaaaagaagacagtattaacaatatagaattagtaaaatgtaataacaaatatagagaaaaattttatgaaatcactaaagaatataaaaaagaacacgaagaaaaaa

SEQ ID NO: 26307 - DNA, 260 bp, Unknown
  Description of Unknown: RightRegion for integrase B308 sequence
tcatggatcattatttataaacccaactttgttatttcaccatggcagacgctgatataataaaaaaagagtgcattaccacctcagataatgcactcttatattttactctatttttcctccagcccgctgagcgaaagcctgctctccattttctgaacagtcttgctctcctgctttgcgatctttgcttcaaaccagaaggtcgagcctttgccctcctccgattgaacgccgtatgcaaagccgtgggctttgag

SEQ ID NO: 26308 - DNA, 260 bp, Unknown
  Description of Unknown: RightRegion for integrase B309 sequence
ggcggcgctttttctatttttcttggtttggtatatttcctgtcttatgcgatatactaattgccccgccgtggaggattacaacgacttttccgaagccttggaggacatctggcagaaggacgggatgctcctgacctacgccgccgtgctggaggctgagcggccggatacgctgcgcggagcctgtgagctcctgcgaaatctggacaactatcagcgcatcacggagggtgcttacggttacggtcagcagcgat

SEQ ID NO: 26309 - DNA, 260 bp, Unknown
  Description of Unknown: RightRegion for integrase B310 sequence
tattcaacaaaacataggatcttccgatgggaagatatcaatgtaagcatttttatgtgagtattccatagatactatgaataaaacgtagtgtcttatatgtccaaacagagaaaatgccccacgtgtgagaaatcgcattgtggggctatttttattcataaaaaattatgaattacaaataataatctataataaatatttgatatcaattacatgttgtgataaaattataataatattactaataatagtggagg

SEQ ID NO: 26310 - DNA, 260 bp, Unknown
  Description of Unknown: RightRegion for integrase B311 sequence
atagagtatacaaggattgacggcggtgaaatctcgcttgacatatgttggctgatttaattttttgaaatattgtcgggattctcgcgggcattccgaacattacatcaatgcgatgtttgaaatcaccgcaaataatgcaaaaaagcggagaattttctccgctttttgttatctcttattttttgcaatgagtcccgcagtctcgttgtatgttcctgcgttcgtcagagtgcttgttgcgccgttgatgtacgttt

SEQ ID NO: 26311 - DNA, 260 bp, Unknown
  Description of Unknown: RightRegion for integrase B312 sequence
tattcaacaaaacatcgtatcttacgttgggaagatatccatgtatgtatttttatataaaaattattctaaatattatgaataaaacataatatcttgatctatgtccaaacgtaaaatttgacctggagaattgtagaaatacagttctctgggtcatttttgtattatgatacaatgtgcttgataaaaagtataaaacataatataatataaataaaaaatatggggaggtattgagtatgaaaaagaaaaaaatt

SEQ ID NO: 26312 - DNA, 260 bp, Unknown; identical to SEQ ID NO: 26309
  Description of Unknown: RightRegion for integrase B313 sequence

SEQ ID NO: 26313 - DNA, 260 bp, Unknown
  Description of Unknown: RightRegion for integrase B314 sequence
atagagtatacaaggattgacggcggtgaaatctcgcttgacatatgttggctgatttaattttttgaaatattgtcgggattctcgcgggcattccgaacattacatcaatgcgatgtttgaaatcaccgcaaataatgcaaaaaagcggagagtgttctccgctttttctttatctcttattctttgcgacaagtcccgctgtttcggtgtatgttcctgcgtttgtcagagtgcttgttgcgccgttgatgtacgtt

SEQ ID NO: 26314 - DNA, 260 bp, Unknown
  Description of Unknown: RightRegion for integrase B315 sequence
gaactgataaagatatgtatgcagaatggttgggaaatagattatacttacaagatgtaatatttcactgaatattattattaactagtaaatgtggttgattaaattgaaaatgaggttgtgccaatgtcttgacacaacctcacgaaagatgctattgggcgtttaatgcagctaaagctgcttctaaagcttctttagacatgccactcaataactgtgcttgacttgaatgtttcagttctgtacagttcttaatc

SEQ ID NO: 26315 - DNA, 260 bp, Unknown
  Description of Unknown: RightRegion for integrase B316 sequence
gaactgataaagatatgtatgcagaatggttgggaaatagattatacttacaagatgtaatatttcactgaatataattattaactagtaaatgtggttgattaaattgaaaatgaggttgtgtcaagacattggcacaacctcacgaaagatgctattgggcgtttaatgcagctaaagctgcttctaaagcttctttagacatgccactcaataactgtgcttgacttgaatgtttcagttctgtacagttcttaatc

SEQ ID NO: 26316 - DNA, 260 bp, Unknown
  Description of Unknown: RightRegion for integrase B317 sequence
gaaggacgtattcgcttttgtgggggaggcggtgtgggttattgggagattttagaataaggaggtaaggcacatcagacgtaaaatggtgataactttattgtgagatggggggtattgtgttaaaatataattagagaaaatgtagaggagaatagggagtgatattaaaaaatctgcatattacgaattttaaattgtttgaagagatagaattcgagtttgagtctggatttaatctcatacttggagataatgga

SEQ ID NO: 26317 - DNA, 260 bp, Unknown
  Description of Unknown: RightRegion for integrase B318 sequence
gaactgataaagatatgtatgcagaatggttgggaaatagattatacttacaagatgtaatatttcactgaatataattattaactagtaaatgtggttgattaaattgaaaatgaggttgtgccaatgtcttgacacaacctcacgaaagatgctattgggcgtttaatgcagctaaagctgcttctaaagcttctttagacatgccactcaataactgtgcttgacttgaatgtttcagttctgtacagttcttaatc

SEQ ID NO: 26318 - DNA, 260 bp, Unknown; identical to SEQ ID NO: 26317
  Description of Unknown: RightRegion for integrase B319 sequence

SEQ ID NO: 26319 - DNA, 260 bp, Unknown
  Description of Unknown: RightRegion for integrase B320 sequence
ctaaatgagttgctccgtgaagcggagaagataatggaaggatggactgattatagatgaatgaagaaaacacaacaatcatgccgccagagaagcagattgtgcaggatgatagagacgcacgggcggaagaactggaaagtgccttttcgtatgatggctaccaggtcgtgcgaaaggaattgtttgcccatctgcgtgacccggcaatcgtgattcgtaaagatagtatcacattcaatacagcctgtatcacaggg

SEQ ID NO: 26320 - DNA, 260 bp, Unknown; identical to SEQ ID NO: 26315
  Description of Unknown: RightRegion for integrase B321 sequence

SEQ ID NO: 26321 - DNA, 260 bp, Unknown; identical to SEQ ID NO: 26317
  Description of Unknown: RightRegion for integrase B322 sequence

SEQ ID NO: 26322 - DNA, 260 bp, Unknown
  Description of Unknown: RightRegion for integrase B323 sequence
gaactgataaagatatgtatgcagaatggttgggaaatagattatacttacaagacgtaatgttccactgaatataatagttgatttatatataatgctgtatctggtttattatgtgttatctaagcaagctacttaaatggctaggtaataatactactattccctactagtagggtcaagtacataggaatttactagtggaaggtagggtaggatatataggcatacagagactttatatcctacgtttcttagca

SEQ ID NO: 26323 - DNA, 260 bp, Unknown; identical to SEQ ID NO: 26317
  Description of Unknown: RightRegion for integrase B324 sequence

SEQ ID NO: 26324 - DNA, 260 bp, Unknown; identical to SEQ ID NO: 26315
  Description of Unknown: RightRegion for integrase B325 sequence

SEQ ID NO: 26325 - DNA, 260 bp, Unknown
  Description of Unknown: RightRegion for integrase B326 sequence
gaactgataaagatatgtatgcagaatggttgggaaatagattatacttacaagatgtaatatttcactgaatataattattaactagtaaatgtggttgattattgaaaatgaggttgtgccaatgtcttgacacaacctcacgaaagatgctattgggcgtttaatgcagctaaagctgcttctaaagcttctttagacatgccactcaataactgtgcttgacttgaatgtttcagttctgtacagttcttaatcca

SEQ ID NO: 26326 - DNA, 109 bp, Unknown
  Description of Unknown: RightRegion for integrase B327 sequence
gaacgagatactaatgcactttcgctcccagaaaaagtctgccaacgatatccactttgacgagcctgttgactccgataaggacggcaatcagctttgccttatcgac

SEQ ID NO: 26327 - DNA, 260 bp, Unknown
  Description of Unknown: RightRegion for integrase B328 sequence
agagagcctgatgatttcgcataccaactgaacgaagaccatatcgaatggattgactaatactgaagaggttaaatgacatgtggattaacccgcttatagatataatacttggtattggcctagtgtgcggtattggttggttaatccttcgattttggccttactttttcagtacaggtttgatcctcgcaacgttttacgagatatggaacatttttagatgatagaaacctcgaaaggggttttgttgtttgcta

SEQ ID NO: 26328 - DNA, 260 bp, Unknown
  Description of Unknown: RightRegion for integrase B329 sequence
agcccagatggaacactgctatataaaaatatttttaaaacaagtaaactaccaacttaatacttgttttttaatataaatatttatactaatttaaattattatttatattcttgttatattaattctttatattatattattatattatgttagacaaaaaatataaatcttattcaaaataaaaagactagttatatttcaaactaatctcatcaataaattgactatctaagttttgtcaatactaaatttataaa

SEQ ID NO: 26329 - DNA, 260 bp, Unknown
  Description of Unknown: RightRegion for integrase B330 sequence
agcccagatggaacactgctatataaaaatatttttaaaacaagtaaactaccaacttaatacttgttttttaatataaatatttatactaatttatattattatttatattcttgttatattaattctttatattatattattatattatgttagacaaaaaatataaatcttattcaaaataaaaagactagttatatttcaaactaatctcatcaataaattgtaatttgtcttttacaataatagcataaaaaaga

SEQ ID NO: 26330 - DNA, 260 bp, Unknown; identical to SEQ ID NO: 26329
  Description of Unknown: RightRegion for integrase B331 sequence

SEQ ID NO: 26331 - DNA, 260 bp, Unknown
  Description of Unknown: RightRegion for integrase B332 sequence
aatgctctgctccatgaagcggaaaaaataatggaaggatggactgacacagatgaatgaaaatacgaacgccatgccaccggaagagcaggcagaaaatgatagagacgcaagagcggaagaattagaaagtacattttcctatgatggataccaggtcgtgcggaaggagctgtttgcacatctccgtgaccccgcgatcgtgatccgcaaggacagcatcacatttaacacggcctgcatcaccgggctggaagatg

SEQ ID NO: 26332 - DNA, 260 bp, Unknown
  Description of Unknown: RightRegion for integrase B333 sequence
tttcaaactttttgcccagctccatgcgggaagactgctggatatgggcgtaagtgttaaccagaagatccgcactggcgtggccggttgttccctgcacagatttgatatcgccgcccgagatcatcagctggtaggtggcgctggaatgtcgcagcccgtggaagacgatgcgggggaactccgggtgagcgtcctgccatttgaggaactttttgcggatcagaacgggctccacggcctgaccattgggcaggcgg

SEQ ID NO: 26333 - DNA, 260 bp, Unknown
  Description of Unknown: RightRegion for integrase B334 sequence
aaagaaaaagcagctttagaagctgcaactgatactgacaaatctaaaaagggagcataggcaactgccggaaactcccattacataagggtttcaagcccacttctaaaaatatccctatgaaagtgaaacatgagtatgacgcagaacatgagttgtaatctcgacgtctttgttcagcacccggtgggcggtctccttcagacatttattgtatgcccagtaatgcacatgatctccggatatatccgggataaaga

SEQ ID NO: 26334 - DNA, 260 bp, Unknown
  Description of Unknown: RightRegion for integrase B335 sequence
tcagtactcgataatgtatcttctttcggctggggcggttacctgccccgcctcggttaactttgctcagcgccaacaacatacgcgtccatcagatctttgatttcgtcgacggtgtaggttttgcccttctcgcctttgtcaaggatcttctgcaggtcgtaaaccgtcgccttccgtacaactgcaatcttttctttctctgacatggtgtcacgccttctttcagtgtcgttttcttatcactgctttcaggataa

SEQ ID NO: 26335 - DNA, 260 bp, Unknown
  Description of Unknown: RightRegion for integrase B336 sequence
atatatggaaatgacggtgcgggaatatctggaattcgctgcagaattaaaaggaattaaaaaagacaaaagagagccgcagatagaagaagttataagacttgcaaagctgagagacgtagaaaaccggctgatccagaacctgtcaaaaggttataagcagagagtcggacttgcacaggcagttctgggattcccggagatcattatcctggatgagccgacagtaggccttgatccgaagcagatcatcgaaatcc

SEQ ID NO: 26336 - DNA, 260 bp, Unknown
  Description of Unknown: RightRegion for integrase B337 sequence
cagctgcaattgaccatagataacctaacgagaggaaacgaaatgccctatgatggatgatcagactgaacagatttttatgaacgccgaggcgattacggaagccgacgctgaaacggaggtccttgcagatcttgcgggatatcaggttacgaaggccgagctgttctcccatacaagggagccagctattacgatctgggagtcccggatcaaattcaatatggcctgcctacggaagtttccgaatgttacgcata

SEQ ID NO: 26337 - DNA, 260 bp, Unknown
  Description of Unknown: RightRegion for integrase B338 sequence
gaagggcgaattcgttttaatggtgccggtggcaagggctgctgggaaattctggaatagccggaaaataggcaaaaaatgagtattacgatatcagttcgtatccgtatgcctgcacagttaaacgtctgggaaccgtagatgatcaggtatccaagtccctggcgggcgccaatgaattctccgatgatcacgccgacaaggcacaacccaatgttgactttcatcacacttaagatgaggggcacagaagacggaag

SEQ ID NO: 26338 - DNA, 109 bp, Unknown
  Description of Unknown: RightRegion for integrase B339 sequence
tcccggcgggttgcggcccggggcaaaaagagggttgacaaactgccgcagcggtggtagagtacgaataatacaaaaaccgatgagtaagaggagtacccgcagggga

SEQ ID NO: 26339 - DNA, 109 bp, Unknown
  Description of Unknown: RightRegion for integrase B340 sequence
atttttacctatctgcacaggctgctattgcagagcaggcaaaatagacaaaggttctaatttaaaagtctatatataagattttgcaagggaaagtatttagtacttt

SEQ ID NO: 26340 - DNA, 260 bp, Unknown
  Description of Unknown: RightRegion for integrase B341 sequence
gagcagctgcagctgtcgatcaatgatttaaggagaggaatcgacgaggatgatggataacaacgaattagagcgctactttcaaaaaagcacgatactgcaggaaccacaggatgatcccgaagaattggtcaaccttgcaggctatcaggtgacgaaggctgagctgttcgcacacacccgcgaaccggccataacgatttgggataacagagtcaaattcaatatggcctgcctgcgccggtttcccggttgcaccc

SEQ ID NO: 26341 - DNA, 260 bp, Unknown
  Description of Unknown: RightRegion for integrase B342 sequence
cgcagcccgcaggccgtgacaaacgctttttattttactgtgcgcccaagcgcattttgaagtcctgataaccgaagtgcaccagttcccggcaattgccgtctgcgcccagcagccagatgggcggcaggggcatcccgttgaaggtgttgttcttgcaggtggtgtagatggccatatcgccgaagatgagcttatcaccctcggcaaggggggcgtcaaagctgtaatccccgatgatatcccccgcaaggcaggtg

SEQ ID NO: 26342 - DNA, 260 bp, Unknown
  Description of Unknown: RightRegion for integrase B343 sequence
atttttacctatctgcacaggctgctatcgcaaacaagtaatccacacaggatgtattgacaggtaacttaatacaagtttattcctgatataaaatcagagggtgttccaatcggaacaccctctttttgatgtgctatgtaaaacaaatttatatttggttgcttttgaaaatataatgatgattttcaaaggagacaaatgtatgggaaataacattatatctaaggtacttaatttgtgggtataggcgtaattat

SEQ ID NO: 26343 - DNA, 260 bp, Unknown
  Description of Unknown: RightRegion for integrase B344 sequence
atttttacctatctgcacaggctgctatcgcaaacaagtaatccacacaggatgtattgacaggtaacttaatacaagtttattcctgatataaaatcagagggtgttccgattggaacaccctctttttgatgtgttatgtaaaacaaatttatattttgttgtttttgaaaatataataatgattttcaaaggagacaaatgtatgggaaataacattatatctaaggtacttaaatttgtgggtataggcgtaatta

SEQ ID NO: 26344 - DNA, 260 bp, Unknown
  Description of Unknown: RightRegion for integrase B345 sequence
cacaaccgcttatgctggggcacctcccataaggaagttgccccagggcgggggccgtgagtaacaagttacctatttggacagcgcagcttcagctacgccgtctttttcttgcgctttttcatggcccgacagtaggacagatactcccattccatcgtttccgggtcgggtgctgtccacaggccaatggtgttgtagtggatgtccacccgttggtgccgcttgccatctaccttgtcaggcttggacaccacgat

SEQ ID NO: 26345 - DNA, 260 bp, Unknown
  Description of Unknown: RightRegion for integrase B346 sequence
tccggctacttttcactggttgaacaccaattttcggcccgtttgtggcgcaccgcataatctgtaattattttgtaatctttgcgcaaacaaaaaatgccccgccagcaatccgtcaggatgccagcggggcattgctttacttagtggagataccttgccaattcagatgcaacaaagcctgcgatcactgccgcaatgactgcccaccagagtttgtttccaaatactccgggggctttttccagcgcggtcaagcg

SEQ ID NO: 26346 - DNA, 260 bp, Unknown
  Description of Unknown: RightRegion for integrase B347 sequence
agcacaaaccgcaaaaggctacaccgaaaagacaatagcaaactaccgctcacactttaagtctatcagcagacacattgatattgatcgagcgttttccaacctgacacaagccgacattgacggtatgatcgtttcaatgagggaaagcgggttggcaacaaactccatcagcagttatgtccgcgtgttcaaaacctttatgaattggagcagacagcagggctacacaacattgactgtgccgaactataaacagg

SEQ ID NO: 26347 - DNA, 260 bp, Unknown
  Description of Unknown: RightRegion for integrase B348 sequence
cctttcacacggagcgtcaggagctgcatttcaggtgcagttccgttagatgttcgttagaatattacagtgctgccgttgctgtgccagctcacagcaggcttccctgtctgaacgcagcgtttcccgaaagccgggagatgctgcgttttctcttgcccgcaaaccgggctgaaagggaagccgccatgtccacattccgcgtcaacaaaaacgtcaactacaccgtcatgagcaactaccatcttcaggacaagaag

SEQ ID NO: 26348 - DNA, 260 bp, Unknown
  Description of Unknown: RightRegion for integrase B349 sequence
gaagaattgcagcaaagtatggcaacaataaagaaaggtactgatgacaaaaatgaatgacaacaatcaaatcgaagatataacggcaaaggctgaacttctggagaatgtgagcgaggatgttgaagaaatcaatttagcaggatatcaggtcaccaaagctgaacttttttctcataccaaagaacctgcaataacagtatgggaaaaccgtgttaaatttaatatggcttgtctaagaaaatttcccggagtaacgc

SEQ ID NO: 26349 - DNA, 260 bp, Unknown
  Description of Unknown: RightRegion for integrase B350 sequence
ttgttagaagaagtgttacttggcataattcatttcctccttggttgttatttggtttgatgttacattgctagtatgtgaaaaccataaaataatacactggcagttaaaggaaatttaacatataaaaatatttctgttcataaattataccgcagtaaaaaccgaatgtatggttgctttttgactggaattgcggttataataatctctgcatcacatataatatctgtcagacaaaaaaagtaagggggtcccgt

SEQ ID NO: 26350 - DNA, 260 bp, Unknown; identical to SEQ ID NO: 26349
  Description of Unknown: RightRegion for integrase B351 sequence

SEQ ID NO: 26351 - DNA, 260 bp, Unknown
  Description of Unknown: RightRegion for integrase B352 sequence
acattgcaatatcctgccctatacggcagcgcgaacgccccaagaattaagactaattaagatgtcaccgtatgcttttcttgctataatactggccgcagaacaaaaaacaccatcaggagaacagagcaaatgacaagcgtaagaagatgggcaatcgaaaatcgtacaaacggcatgccggccgcgcagaaagcgcccgtccggtccgtgccggtcgtatccttttctccggcaaggacggcaaaacagcctcattg

SEQ ID NO: 26352 - DNA, 260 bp, Unknown
  Description of Unknown: RightRegion for integrase B353 sequence
ggagataaagataatcccacttttacactgaatctcaagccccgaatcccgcgtatttaggggcttttctattagcgacaacatttttggactcacgaacttgcccatctcgagatgatctgcgccattgtgcaccagcttacccgcgacctgacacctgaacaattaaaggaatctggattcgaccaatattatgttgaccacacgttagcactttggcctcaggcagccagcggcacaccttggagcgcaacaacatt

SEQ ID NO: 26353 - DNA, 260 bp, Unknown
  Description of Unknown: RightRegion for integrase B354 sequence
catgctgagtatacaaaggcaaatcgttttaaagatattgtttgcaaaatctatatatagttcgagagggaagcatttgcttccctttcttttatctctcgattaggactaaatccctgaaataaaaaaggatttagtcctttttttatataaaaatattttaaaggagattgattatgaaagtatatgtagtagcaaatttaaaaggtggcgttggaaaaaccaccacaacagtaaacgtagcttatacattttcggaa

SEQ ID NO: 26354 - DNA, 260 bp, Unknown
  Description of Unknown: RightRegion for integrase B355 sequence
cggaatgataccgtaggtgtttggatgcgtaatcaattcaattttcttacgtctaactaatcaccgcatttgaacgtgtttttgatggttctccactaaatatctctaggttcattacttggagatattaatcgtgttagattgggtaattacttctgctggagctacatcatcggatttatcattttggtaacggggtttatcaagtacgtgttacttggatggattctgtacctactaattatggtagttttatgggt

SEQ ID NO: 26355 - DNA, 260 bp, Unknown; identical to SEQ ID NO: 26351
  Description of Unknown: RightRegion for integrase B356 sequence

SEQ ID NO: 26356 - DNA, 260 bp, Unknown
  Description of Unknown: RightRegion for integrase B357 sequence
tgtatccttgacatgaaaatacccccagagctttcagagttttttctctgtctactctaggggtagcatatcaaagaagcaccgggcttcatattttttattttgcctgcctgctggcggcgtggcgcttgggcagggggatggagcatacgatggcaatgccaagggccagggcaacggcaacttttaaggtttcaatgcctttgctggtgcacagggcgcggtcgttgcgcaaaaaatagtaagccgtgtaataaatg

SEQ ID NO: 26357 - DNA, 260 bp, Unknown
  Description of Unknown: RightRegion for integrase B358 sequence
ttgggaaaaacgcagcccctcagcgccgcaaaagcgcgttggggggagaatagcaaatgaactccgcatggacctgcggcgggggcggcggacgggagtgacgctgtcgctgcaggagccgctcgaggcggacgggcagctgacgctggcggacaccctgcccgatgaagccgacatggaggccggctgcgagagccgcgccgacgccgcccggctgcgcgctctggtggacgctctgcccgcccgggaacgcgctatta

SEQ ID NO: 26358 - DNA, 260 bp, Unknown
  Description of Unknown: RightRegion for integrase B359 sequence
actggtggacttgataagtccaaatccgaaatagtagcggtattgttttcaccgctgtaattgtaggttatgacaatcttatcatcatagacgaaaacggcgtgaacaaaggtatcaataagctgctggcggtatttttcgcttgttatgttgccgtccttaaaactggaaatccaataaataatttgttccctgctgatgatccgccgcgcaatgctttcttttgcgatctctatttcaacgttgcgcttttcgtcctc

SEQ ID NO: 26359 - DNA, 260 bp, Unknown
  Description of Unknown: RightRegion for integrase B360 sequence
acatacaaacatccggccctatgcgacagcgcgaacgtcccaagaattaagactaattaagatgccgccgtatgcttttcttgctataatattggccgcagaacaaaaaacgccatcaggagaacagagcaaatgacaagcgtaagaagatgggcaatcgaaaatcgtacaaacggcatgccggccgcgcagaaagcgcccgtccggtccgtgccggtcgtatccttttctccggcaaggacggcaaaacagcctcattg

SEQ ID NO: 26360 - DNA, 260 bp, Unknown
  Description of Unknown: RightRegion for integrase B361 sequence
aaaaaagtaaatagaattgtaggagcaattagagtaaaagaacgagaaaaagttagttaaaagatttataaatggaggaattgaaaatggaaaataaagaattaaaaacaaataatattgaaaataaatatggaattgaatacacaaaggttggagattactatctaccaaatttagttttagaaaaagaaaaaattgtgttaaacaaatatggaagaatgagattaaaatttttaaaagaaaacagaaaagcagaatat

SEQ ID NO: 26361 - DNA, 260 bp, Unknown
  Description of Unknown: RightRegion for integrase B362 sequence
gatattacatttggattagtatttagacctactattaaagagataattaatgaaaaataagtaagtaaataataagcaggataaagagaatgatagcactaccctaatttattctatataaataaaggatttatagtgctatcatttcttattttgcacttgcaaaattgagttaaaaatatggaagaattctaccatacttttgattttatccttttgattaaagtatttgcaaggttatattttgcttccaacagttg

SEQ ID NO: 26362 - DNA, 260 bp, Unknown
  Description of Unknown: RightRegion for integrase B363 sequence
ttagaagaactacataaagcaggtttggatggtaggctcagaccattaaaaaaggaataacttcatcctttttaattatctttgcttccaaaccatataagcaaagatatgagaccaattgaaagacttgaagaaacttatttccctaaaggcataaagttacttgaatacatggaggaagtagcagtactttatgtaccagatgatgatatagaccatgaaacaggagaacaatatatttatggcacaaccgccttacc

SEQ ID NO: 26363 - DNA, 260 bp, Unknown
  Description of Unknown: RightRegion for integrase B364 sequence
ataaatttatcgaatataaaaggtattaatggtgctccactatataaacaaataaagtaatcctttaatgcttgtattttaatataaatatttatatttttgttatattaattctttatattatattatcatattatgttagacaaattttccatcgtggatagaaatatcttctaccctagatggaaatattttctaccctagacaaaaaatataaatcttattcaaaataaaaagactagttatatttcaaactaatc

SEQ ID NO: 26364 - DNA, 260 bp, Unknown
  Description of Unknown: RightRegion for integrase B365 sequence
cgtggaagacagcaagccggatgccgaacggttgaaacagctgctgaaaaaggcatttgaaaatgagaacatatcctgcagctgttttgccagcggagatgaatttttgcggaccggcgggcgcgaagggtatcaggtggtgtttctggacatctgcatggagggcaccaatggcattgagacggcgcagcggctgcgtgcggccgacccggacctgctgatcgtgtttgtgacatcctcgccggagtacgtgtgggatg

SEQ ID NO: 26365 - DNA, 260 bp, Unknown
  Description of Unknown: RightRegion for integrase B366 sequence
ttaaaagaactacataaagcagggttggatggtaggctcagaccattaaaaaaagaataacttcatcctttttaattatctttgcttccaaaccatataagcaaagatatgagacctattgaaagacttgaagaaacttattaccctaaaagcatagagttacttgaatacatggaagaagtagctgtactttatgtaccagattatgatatagaccatgaaacaggagaacaatatatttatggcacaaccgccttacc

SEQ ID NO: 26366 - DNA, 260 bp, Unknown
  Description of Unknown: RightRegion for integrase B367 sequence
gatgaaaacatgaaaaaagtcaataaatggaatgatattaaaataaaagttacaatataaagtaattattaagggaagtaagtttaatcttgcttcccttttcttgtccaacgacgagtcaaatacataagcttgcttgaatgtatttgacgactgcatacaatcccgaaacaagcgaagcggtttcgtggattatctaaaaaatatagaaaggataaggccaggaagtcacaacctctatatatcaaatcgatttaatc

SEQ ID NO: 26367 - DNA, 260 bp, Unknown
  Description of Unknown: RightRegion for integrase B368 sequence
cgtagaagacagcaagccggatgccgaacggttgaaacagctgctgaaaaaggcatttgaaaatgagaatatatcctgcagctgttttgccagcggagatgaatttttgcgggccggcgggcgcgaagggtatcaggtagtgtttctggacatctgcatggagggtaccaatggcattgagacggcgcagcggctgcgtgcggccgacccggacctgctgatcgtgtttgtgacatcctcgccggagtacgtgtgggatg

SEQ ID NO: 26368 - DNA, 260 bp, Unknown
  Description of Unknown: RightRegion for integrase B369 sequence
agagacaatatggtagctgtatggatgcgacataatatcaatttcttattcgataagtaattactatgccatatattactatttaaatggtgagctatctaattctgattttagttcgattgaataaatttaatgattctgtgaatggataatatgagtgtttattgaataccttagcgacataagtgttatcagtactaataacattgaaatgcaaaggaaaattaaccttggccttttttggttcctaaatactaata

SEQ ID NO: 26369 - DNA, 260 bp, Unknown
  Description of Unknown: RightRegion for integrase B370 sequence
ttagaagaactacataaagcaggtttggatggtaggctcagaccattaaaaaaggaataacttcatcctttttaattatctttgcttccaaaccatataagcaaagatatgagaccaattgaaagacttgaagaaacttatttccctaaaggcataaagttacttgaatacatggaggaagtagcagtactttatgtaccagattatgatatagaccatgaaacaggagaacaatatatttatggcacaaccgccttacc

SEQ ID NO: 26370 - DNA, 260 bp, Unknown
  Description of Unknown: RightRegion for integrase B371 sequence
gatattacatttggattagtatttagacctactattaaagagataattaatgaaaaataagtaagtaaataataagcaggataaagagaatgatagcactgccctaattcattctatataaatataggaatagttgtgctatcatttcttattttgcacttgcaaaattgagttaaaaatatggaagaattctaccatactttttatttaaatcaattaattaaaaggtttgcgaggttttattttacttccaactgttg

SEQ ID NO: 26371 - DNA, 260 bp, Unknown
  Description of Unknown: RightRegion for integrase B372 sequence
atgcacattgtcggtggtatttgcggtacagcttttggttttgccgtccggaagagataacgaatgatcgggaagaggatcttatttatgatgattaagcacatttttcagaaagaacccgtcctgagcattgccacttgtttggcgatcatttccgctttctttgtcctcccggacgcagaatacctcggatatatcgatttccgtactcttgcaatcctgttttcgctaatgacagttatggccggactgagagggca

SEQ ID NO: 26372 - DNA, 260 bp, Unknown
  Description of Unknown: RightRegion for integrase B373 sequence
tgcgcagacatccgggaaaggccgcgctctgcggcaagctgccttgccagtgcaccataggtcgtggtctggccgcaggggatacggcgcagcagcgcccacacctcctgctgaaaggcagagccagcgggatggagcggcggggtaaagtccggctcctgcccgccgaaataaacatccagccagcgtctggcctcggagagcacagcggtctcctgctcctgatgcaccgtatccagggtgcgggcaaagtacttctg

SEQ ID NO: 26373 - DNA, 260 bp, Unknown
  Description of Unknown: RightRegion for integrase B374 sequence
gaaaaaggcggtagaggctacgaaagtaatttttcaataataatacaccctaagttctaattagggcttttttacgtctctatcgttgttatacagaagaacttggtcatgttgaaatgatatgtacaatggtccatcagcttacaaaaaatgcgacaattgatgaacttgaaaaagcaggacttggaagttattatacagaacatggagtaggtatattcccagttgatgctacaggaaatccatttacatgtgcatac

SEQ ID NO: 26374 - DNA, 260 bp, Unknown
  Description of Unknown: RightRegion for integrase B375 sequence
tgcgcagacatccgggaaaggccgcgctctgcagccagctgccttgccagtgccccataggtcgtggtctggccgcaggggatgcggcgcagcagcgcccacacctcctgctgaaaggcagagccagcgggatggagcggcggagtaaagtccggctcctgcccgccgaaataaacatccagccagcggctggccttggagagcacagcggtctcctgctcctgatgcaccgcatccagggtgcgggcaaagtacttctg

SEQ ID NO: 26375 - DNA, 260 bp, Unknown
  Description of Unknown: RightRegion for integrase B376 sequence
cagaaactaaagaaacaggctgaaaaagaagccagagaaaaagccaattcagaggcttaaataaaagaaaaaaggacactaacctcaaagcgtcctttagaacggcaatgtgagtgtcgcagatcatgcattctaatttttttttaacccctgataattcagaatatttattcatcattctagaaagtgcgtatttgtctaccaaaaataaacggtcgctaggcttataaccatatagtagtttaacatattcttgcagg

SEQ ID NO: 26376 - DNA, 260 bp, Unknown
  Description of Unknown: RightRegion for integrase B377 sequence
gaaaaaggcggtagaggctacgaaagtaatttttcaatagtaatacaccctaagttctaattagggcttttttacgtctctatcgttgttatacagaagaacttggtcatgttgaaatgatatgtacaatggtccatcagcttacaaaaaatgctacaattgatgaacttgaaaaagcaggacttggaagttattatacagaacatggagtaggtatattcccagttgatgctacaggaaatccatttacatgtgcatac

SEQ ID NO: 26377 - DNA, 260 bp, Unknown
  Description of Unknown: RightRegion for integrase B378 sequence
cggcgtaaggtcgaacttgaaagtaatgttgagctgatgcccacgataaacataaactaaaaaatccgccgaggactcctcccgaaaaaacgggaagaatcctcggcggatttcgtttatcgtgttggctctttttcggctggctcagattcaggctgatctttcgcttttttcacagagaacacctcatttgcgggcaatcatcagatgccacggaacgtaaaggtgaactccacaggcttggtcacatcaggaatata

SEQ ID NO: 26378 - DNA, 260 bp, Unknown
  Description of Unknown: RightRegion for integrase B379 sequence
ggagtgcatcacggcatttgtccgcatgaatccttgatttttgacgttttcaaggtttgaaaagcgtcaatttgccacccatttgccaccgctttttgaaaattcacccctgaacagcagaaaaagggctgaaccgattgaacaaggtctttcggttcagcccttttcgctgtattatgccaattctaccaggctttcaaacagatttactgtggtctgcttcatttcatccgtgttatgaacgtatttgttcattgtgg

SEQ ID NO: 26379 - DNA, 260 bp, Unknown
  Description of Unknown: RightRegion for integrase B380 sequence
aacccgaggcggcctgcccgcaggcaggcgaatgtcccaacacctctgagagagacttgatctcaaacccaacttcgacggcgcgcgtcgcaaacgtatgccgcagcgtgtgaaaatgcactccctcaaggccgcatttgcgggtgtacttttccatcctgtattgcagggctcttggctccatgaagctgtccgtaccagtcaaaacataagcggctgaactatggggggccatcttcccacaaagctcagccgtgtag

SEQ ID NO: 26380 - DNA, 99 bp, Unknown
  Description of Unknown: RightRegion for integrase B381 sequence
gataaaggcggacgtggatatgaaaataatttttcaatcgtaatacaccctaaattataggtggcacttttatatgtcaatcgttgctgtactgaagaa

SEQ ID NO: 26381 - DNA, 260 bp, Unknown
  Description of Unknown: RightRegion for integrase B382 sequence
gtacggcgtaagatcaaagttgccttttcgggcacaatctttgtcaggctcaggagctgaactgctcctctcccagctacggtgcgctcagcgggggcgcaccgttttattttcttccagttttttgatagaccacgcgcccagccagccgcaggcagtgcccagcaccgcaccacccagaatatccgtcggaaagtggacgcagaggtacatccgggagaacgcgatcagcactgccagcggcagcgctgccattgccc

SEQ ID NO: 26382 - DNA, 260 bp, Unknown
  Description of Unknown: RightRegion for integrase B383 sequence
ttgctatcgcatgtgggttatccagaacttgatagtaaaatgttttggcctagaaaatagctaacttcatctacttcacatttgaaagtatattttcagcctcgtaggattgcccctgcgaggtttttttatatgtagtaatgcgggttgaatgggttagggcttgaactgcttagaaagcgttacaggaggaattataaagtttagcattgggaaggttttgtgattgttcaattatcaaccatctagtggggggtgaa

SEQ ID NO: 26383 - DNA, 260 bp, Unknown
  Description of Unknown: RightRegion for integrase B384 sequence
ggttcacagacagcacctcgatgctgttttcgagatagattcagctgcgaccagccgtgaggaaataggcaatccgccgcactacggcaccaaaaacaaactatacgaggagcatattcctcttattccacaccgcgcgagacagatgacacgcgatgattatttgtactatgaccttctgattggaatggacactgcaaatatcaggaatatgacaagaattgcaggtggcagtgacagtcagcagaagatatttaaga

SEQ ID NO: 26384 - DNA, 260 bp, Unknown
  Description of Unknown: RightRegion for integrase B385 sequence
ctgctatcacatgttggttatcctgaacttgatagtagaatgttctggcctcgcaaatagttaacaagccccttcgggggcttttttattatgggatgtttttctcctgtatctagtaaatactttacatagtcagatacaggagaaaacacactatgattaacattctaattgagatactctctacagtattctatatgttcgtactattcccaatgttcttagtactaaatcttttctttatgattcttgtagtactt

SEQ ID NO: 26385 - DNA, 260 bp, Unknown
  Description of Unknown: RightRegion for integrase B386 sequence
gatattttaatattagtgccaagattagtgccgaaaaatgaattaattaacactatttaaagaagaaaggaatgataaaaatgaaagttacttatacaagaaaaggagattatttattaccagatttatatttagaaaaaggcgaaaattatggaaggcttggaagatatggaatattaagattacactttattgcccaaaacaagcaagcactttatgaaacattattgatgacaaataaattaactcatcatcttctt

SEQ ID NO: 26386 - DNA, 260 bp, Unknown
  Description of Unknown: RightRegion for integrase B387 sequence
ggtccacagacagcacctcgatgctgttttcgagatagattcagctgcgaccagccgtgaggaaataggcaatccgccgcactacggcaccaaaaacaaactatacgaggagcatattcctcttattccacaccgcgcgagacagatgacacgcgatgattatttgtactatgaccttctgattggaatggacactgcaaatatcaggaatatgacaaggattgcaggtggcagtgacagtcagcagaagatatttaaga

SEQ ID NO: 26387 - DNA, 260 bp, Unknown
  Description of Unknown: RightRegion for integrase B388 sequence
ggtccacagacagcacctcgatgctgttttcgagatagattcagctgcgaccagccgtgaggaaataggcaatccgccgcactacggcaccaaaaacaaattatacgaggagcatattcctcttattccacaccgcgcgagacagatgacacgcgatgattatttgtactatgaccttctgattggaatggacactgcaaatatcaggaatatgacaaggattgcaggtggcaatgacagtcagcagaagatatttaaga

SEQ ID NO: 26388 - DNA, 260 bp, Unknown
  Description of Unknown: RightRegion for integrase B389 sequence
atcaggttgatggctacgtatgtgataattcccatggagataccttcggaaatgctgtagaagaacggcattgcgatgatacatacataacatgggattgcctcggacatatcgctgaaatcaatgctgataacattgctgagcatgtacagaccgacgatcaccagagccggagctgtggcaaaggacgggattgccaggaagatcggagacaggaacagggacaggccaaataagatggcagttgtcactgcggtaag

SEQ ID NO: 26389 - DNA, 85 bp, Unknown
  Description of Unknown: RightRegion for integrase B390 sequence
aataattctcgggttgacgaagataccgttgaaaccgtagcgatcctcgggcgccgctagcccaccccagtagatttttgggaca

SEQ ID NO: 26390 - DNA, 260 bp, Unknown
  Description of Unknown: RightRegion for integrase B391 sequence
ggtacagctgctttgttagaagaagtattgtttgacataatcattttcctccttggttaattgttgttttgtttgatgttacattgctagtatgtactctgaaaatgaaaatacactgggaataaatggggtgatcaaaaaaagacaacaaaaaaaatatgccggatagcaaaatgttttaacttgacgctacattctcagtgtagaaattcttatattgggagcatatcttattacaagaacaaaaaattgcatacaca

SEQ ID NO: 26391 - DNA, 260 bp, Unknown
  Description of Unknown: RightRegion for integrase B392 sequence
tcgcccgccagcttaacggaactgcttcttttccgggatggttattcacgcaaaaagtgagggcgcacatcatgcgcccccagcgtgtcgaaaaaccatctgcgaaacagaccccccgatgcgagaaaggtggcgcttgcgccagaggctaagggagggaaacacaccttcttcgacattcaaaggacaattactgttctcccactctatattgctctgacgcgttttttaataaagttaaacagcataatctgcccgat

SEQ ID NO: 26392 - DNA, 260 bp, Unknown
  Description of Unknown: RightRegion for integrase B393 sequence
ctaaatgagttgctccgtgaagcggagaagataatggaaggatggactgattatagatgaatgaagaaaacacaacaatcatgccgccagagaagcagattgtgcaggatgatagagacgcacgggcggaagaactggaaagtgccttttcgtatgatggctaccaggtcgtgcgaaaggaattgtttgcccatctgcgtgacccggcaatcgtgattcgtaaagatagtatcacattcaacacagcctgtatcacaggg

SEQ ID NO: 26393 - DNA, 260 bp, Unknown
  Description of Unknown: RightRegion for integrase B394 sequence
ccggagcagtacggcgtggaggatgattcttttgaggaagaagaaacggagcaggcgtaaacctgctccgtacaaatgtaaattagtcgtcctcgtcatcatcaggccacgaggataccaaatggatatctccggaatccatgtccatggccatattatcgcccatgcgcatcatcatatttccgtcagaatccatcgccatgttgtccgagacggtgaatgcaaaatcgccgtcttcaaaatcaaaaaagtgtttaccc

SEQ ID NO: 26394 - DNA, 260 bp, Unknown
  Description of Unknown: RightRegion for integrase B395 sequence
aaacttaataaagtacttcgaaatggcttgagaattagagtagaatgtgatataacataaataataattttttgaggaggtactatatgagcaaagaaacagagaaaatattctcacaaatgaacaaatatatggaacaatttaactttgatagtgaagaacaaatggaaaaagaaatgaaaaattttatacaaaaactaaacaataacgaaattgaatttgatgatccaaaatttaagtcggatgatttattggaaggg

SEQ ID NO: 26395 - DNA, 109 bp, Unknown
  Description of Unknown: RightRegion for integrase B396 sequence
tgggcgttccggcatccaccctgcgctactatgacaaggaaggtctgctgccctttgtagcgcggtcatccggtggcatccgccagttccgcgaaagcgacatcgagtg

SEQ ID NO: 26396 - DNA, 260 bp, Unknown
  Description of Unknown: RightRegion for integrase B397 sequence
gcgtgtcggctgtctgatcgaggcaccgggcatttatccaaatatgacggcgaaagataatctgatgatcaaggcgcagctgtttggcattcatgaccgcaaatatgcggatgagcttttagacatggttggtcttggggatgtcggcaggaaaaaggcaggtcatttttcgctgggaatgaagcagaggcttggcattgcgctggcacttgtcggaaatccggatcttttggtattggatgagccgatcaacggactgg

SEQ ID NO: 26397 - DNA, 260 bp, Unknown
  Description of Unknown: RightRegion for integrase B398 sequence
ctattatcagtagtgcattaccccgatttagacgggcggttattctggcctagaaaataaatcgacctccagccctcgaaagggggctttacctactataattagtagattgtcagaattttacagtcctgtataataaacagacaagacgagccgccgtgaaaatactttatagtattgatgggggcttgcttgcgtctatatttgccgattatccggcagggcttaccctttaagccctttttttaatcacccaggag

SEQ ID NO: 26398 - DNA, 260 bp, Unknown
  Description of Unknown: RightRegion for integrase B399 sequence
gtctacaaagacgaaaccggcccggaagagcatgagagcgccgtggaagcgtcagaataaatccccgggggagtttttcccccggggatttcccgtgcctctcagggcctcctattcgctcataaactcgatgaggcggtccaggcgcttcaggtgtgcgcggaggtttgccagcctcttctcgtccgggatcaccgcggccttctcctcttcggtcaggtcgaagttgatgtccgcgcagtaggtcacgacatcggcga

SEQ ID NO: 26399 - DNA, 260 bp, Unknown
  Description of Unknown: RightRegion for integrase B400 sequence
aatgttattaaagatattttaatattagtacctaaaaatgaattaattaatgcaatttaaataagaaaggaatgataaaaaatgaaaattacttatacaaggaaaggagattatttattaccagatttatatttagaaaaaggtgaagattatgggagaattggaagatatggaatgttaagattacactttattgcccaaaataaacaagcactttatgaaacactattgatgacaaataaattgactcatcatcttct

SEQ ID NO: 26400 - DNA, 260 bp, Unknown
  Description of Unknown: RightRegion for integrase B401 sequence
ggctacaatcttgataagcaaaaacaggcagagcaagaaaaccatcagaacactgaataatgcgcattgcacaattttcaagcaatagccaaaagcgccgaaggcataagccctcggcgcttttgggtatgtaaagtgtggttctccaccttacaaatgttaaatttctctattatttcacgaacatggcatcgccaaaggagaaaaagcgatatttttcctgtacggcaaccttatatgcagccatggttttctcatac

SEQ ID NO: 26401 - DNA, 260 bp, Unknown
  Description of Unknown: RightRegion for integrase B402 sequence
aatgttattaaagatattttaatattagtgccaaaaaagaaattaattaacactatttaaagaagaaaggaatgataaaaatgaaagttacttatacaagaaaaggagattatttattaccagatttatatttagaaaaagacgaaaattatggaaggcttggaagatatggaatattaagattacactttattgcccaaaacaagcaagcactttatgaaacattattgatgacaaataaattaactcatcatcttctt

SEQ ID NO: 26402 - DNA, 260 bp, Unknown
  Description of Unknown: RightRegion for integrase B403 sequence
aggatgccgctgaccgtgtttaccgcctggatctgggtgtctttggtgacgtgggcgtaggtgtccagcgtgaatccggcgctgtaatggcccatcattccagagactgttttcacgtttcccccgttctgccgggcgatacgccgctggatacggagcgtttttctctggaagtcaatgcctgtccattttaatcccaacagctctccccgccgcaggccggttgtccaggtccatgtagcagcgttcatacacgccgc

SEQ ID NO: 26403 - DNA, 260 bp, Unknown
  Description of Unknown: RightRegion for integrase B404 sequence
cccccttttcggaaatttcttcaaaaatttccgcgccatcgtaggttgatacagccttgagctgttccacttggttgaagctggcgttcagggtaatcgagatctcatagtcttttcggacgcgaatctccttaatgaactgctgcaaaatggcgcggcgttcatcgtggttggcggtgtcgtacacatccgcccatgtaaacagctcgttgcagatgtagttgctacgctttgccgttttggtggcttcttcgtattct

SEQ ID NO: 26404 - DNA, 260 bp, Unknown; identical to SEQ ID NO: 26402
  Description of Unknown: RightRegion for integrase B405 sequence

SEQ ID NO: 26405 - DNA, 260 bp, Unknown
  Description of Unknown: RightRegion for integrase B406 sequence
agtggcacctctatagggcatgaacaggagataaaatacagctatcgttttgcattataattaacataggatgaagaagaaggagcgagattaaacagaaaggagtgaaaaagaatgaatatccataccgcatatgatgtaatgcgagagtatatgattacaggagcagagttggacggactgtatcaaattccaatgttggatagatacacaggccgaccgggcgaagatactgtagatttcaaggacagtttcagtcc

SEQ ID NO: 26406 - DNA, 260 bp, Unknown
  Description of Unknown: RightRegion for integrase B407 sequence
ggctacaatcttgataagcaaaaacaggcagagcaagaaaaccatcagaacactgaataatgcgcattgcacaattttcaagcaatagcaaaaagcgccgaaggcataagccctcggcgcttttgggtatgtaaagtgtggttctccaccttacaaatgttaaatttctctattatttcacgaacatggcatcgccaaaggagaaaaagcgatatttttcctgtacggcaaccttatatgcagccatggttttctcatac

SEQ ID NO: 26407 - DNA, 260 bp, Unknown
  Description of Unknown: RightRegion for integrase B408 sequence
ggctacaatcttgataagcaaaaacaggcagagcaagaaaaccatcagaacactgaataatgcgcattgcacaattttcaagcaatagcaaaaagcgccgaaggcataagccctcggcgcttttgggtatgtaaagtgtggttctccaccttacaaatgttaaatttctctattatttcacgaacatggcatcgccaaaggagaaaaagcgatatttttcctgtacggcaaccttataggcagccatggttttctcatac

SEQ ID NO: 26408 - DNA, 260 bp, Unknown; identical to SEQ ID NO: 26405
  Description of Unknown: RightRegion for integrase B409 sequence

SEQ ID NO: 26409 - DNA, 260 bp, Unknown
  Description of Unknown: RightRegion for integrase B410 sequence
agtggcacctctatagggcatgaacaggagataaaatacagttatcgttttgcattataattaacacaggatgaagaagaaggagcgagattaaacagaaaggagtgaaaaagaatgaatatccataccgcatatgatgtaatgcgagagtatatgattacaggagcagagttggacggactgtatcaaattccaatgttggatagatacacaggccgaccgggcgaagatactgtagatttcaaggacagtttcagtcc

SEQ ID NO: 26410 - DNA, 260 bp, Unknown; identical to SEQ ID NO: 26406
  Description of Unknown: RightRegion for integrase B411 sequence

SEQ ID NO: 26411 - DNA, 236 bp, Unknown
  Description of Unknown: RightRegion for integrase B412 sequence
ggctacaatcttgataagcaaaaacaggcagagcaagaaaaccatcagaacgctgaataatgcgcattgcacaattttcaagcaatagcaaaaagcgccgaaggcataagccctcggcgcttttgggtatgtaaagtgtggttctccaccttacaaatgttaaatttctctattatttcacgaacatggcatcgccaaaggagaaaaagcgatatttttcctgtacggcaacctta

SEQ ID NO: 26412 - DNA, 260 bp, Unknown
  Description of Unknown: RightRegion for integrase B413 sequence
aagtttattactcattgtgttcttcctcatcaatcttttcatttccttcattcagcatgaagtatagcagagcttccagcaatgttgccatataatgaagcgaccagttttcttccggctcttttgtcatcttatcaagcacggctcgaaaagccgtggtacggtcaatccttgtttcctcatcaatgcggtcaagtatgcccttcattttcagggcgagttctttttcctcgtcagaaagctccggtatgccaagtaac

SEQ ID NO: 26413 - DNA, 260 bp, Unknown
  Description of Unknown: RightRegion for integrase B414 sequence
caaaagaggatggaagcgcaactggagcaaacagatgctcccacgcaagaaacagcataatgttatgcaaggcggtttgcgagatgcaggccgcctttttgtacacttaaacaacattttgaagtccgcacagcggcagaaaggaaaatatcatgaaaaagactttttattccgtcacctacgcagtatggggatccagcttctgccgtgaggcatggttcgacagcaagtccgcagcggacgccttcgccgcacacgat

SEQ ID NO: 26414 - DNA, 260 bp, Unknown
  Description of Unknown: RightRegion for integrase B415 sequence
aagtttcttactcattgtgttcttcctcatcaatcttttcatttccttcattcagcatgaagtatagcagagcttccagcaatgttgccatataatgaagcgaccagttttcttccggctcttttgtcatcttatcaagcacggctcgaaaagccgtggtacggtcaatccttgtttcatcatcaatgcggtcaagtatgcccttcattttcagggcgagttctttttcctcgtcagaaagctccggtatgccaagtaac

SEQ ID NO: 26415 - DNA, 260 bp, Unknown
  Description of Unknown: RightRegion for integrase B416 sequence
aaaagtttccgcattttgttcaccgcagcacaggcagctatcgctgagaagaatgcataattaacataatgttaaggggcaaagcgaaatatcctctaaagaggtaaaatagccaaccagccctaaagtgtccaaacgtaaaatttgaccttggagaattgtagaaatacagttcttcagggtcttttttgttatattacacagcggtattcttttgtttaaggtttacgtatctgtagttgtaaccatcctgcatgcgg

SEQ ID NO: 26416 - DNA, 260 bp, Unknown; identical to SEQ ID NO: 26412
  Description of Unknown: RightRegion for integrase B417 sequence

SEQ ID NO: 26417 - DNA, 260 bp, Unknown
  Description of Unknown: RightRegion for integrase B418 sequence
ttccgagatgacgaggcacacgttgagacaatagtgttgctacaaagagaaaccttgtagaaatccttagatttaggcacttttcccgccatgtggtgtttgacgcagagggtgataaattccgcaataagcgtattgaggactatatcacggtttcggtagttattgatatggagtgtgggaacacaaaaaactaaatagttgactgaaaaggacatcgtgcaagcggtgtccttttcttttaggcgaaaccgcagatt

SEQ ID NO: 26418 - DNA, 260 bp, Unknown
  Description of Unknown: RightRegion for integrase B419 sequence
atgccccaccagttccgccgtgcagcgtggaccgacctaactgtggaggtgtatctgtgatgcttctggaaagcacccccgtgttaaacgcaattcacctcatacatgagcaaacaaataaggctcaccgccaaaattgacggtgagccttattttacgctcgatttttaacgttaagtcgttataaaaaccttatgctctcggttttttaatagcagcctgtgctgccttctgctgggcgttagcctgcttcagtgccc

SEQ ID NO: 26419 - DNA, 260 bp, Unknown
  Description of Unknown: RightRegion for integrase B420 sequence
agaggagggtttttaagaaaaaaccaatggcgagatttgactgtacatgtttttgtgtgaaagaaaggggacggggtaaccgtcccctttaggttaattctgcttgcaattttagtattgatatggtattatattaccaacaaagtaatatgtcggcaagggcgaacatcgcacatccgaggggcaactaatagtgttgtaatattaacacaactactatatatagtatatagcagctcgttttgctataatatgagttg

SEQ ID NO: 26420 - DNA, 260 bp, Unknown
  Description of Unknown: RightRegion for integrase B421 sequence
gctgcatcatccccctcaatgtacggcgtaaggtcgaagttgaacgtaatactgagctgatttgtcagtgtggttgtcgaatcgctgctcaccctcttgggtattccacacccggatgccgtttcgcacaaaccattctacaacaaacggcgttccatctgcgatgcgtccgattcggtcgcacatgaacaccagcagaatgtcaaacttgccttttcgggcataatctttgtcaggctcagaagctgagctgctcctct

SEQ ID NO: 26421 - DNA, 260 bp, Unknown
  Description of Unknown: RightRegion for integrase B422 sequence
gctgcatcatccccttcaatgtacggcgtaaggtcgaagttgaagggaatgttgagctgataacccctcttctttgcagatctttctgatccgttctccaacaagggatgctagttcggctggctcagattcaggctgatctttcgcttttttcacagagaacacctcatttgcgggcaatcatcagatgccacggaacgtaaaggtgaactccacgggcttggtcacatcagaaatatactccgggtggacattggcac

SEQ ID NO: 26422 - DNA, 260 bp, Unknown
  Description of Unknown: RightRegion for integrase B423 sequence
gctgcatcatccccttcaatgtacggcgtaaggtcgaagttgaaggtaatgttgagctgatacccacgataaacatctactctacggataagctgattgacgatcattttctttgcttcaaaactggcactgtcgtagagatcagaaaaagaaatcagttcttcgtacagttttgatacgttgtccatcagttcggcagttttttctgtttctgcataggaagattcataaagagcatccaattcccgaagtttttcctc

SEQ ID NO: 26423 - DNA, 260 bp, Unknown
  Description of Unknown: RightRegion for integrase B424 sequence
acacgccctgcctccaaacggggaacagaagttttgtttttggtaagtgccggtgtgtagcaactataccattataatataatcggtctgtcaaccattctatgtaaagcagaaatgttacccctcaaagcgtttattacgcccgaggggtatttttttgtacaagtgttaacgcactcctggcgttaatgaataatgggaatgtgaaccccgtcatatagccgcgagtccggttctacgagcttgtccacttattactc

SEQ ID NO: 26424 - DNA, 260 bp, Unknown
  Description of Unknown: RightRegion for integrase B425 sequence
aatggactgacacatatttttctatatcgtgatgaaatggccgaaaacgtaccgaaatagtgaaaaacgtacacaaacgcggctgaaatgttcaaaaaccggcgttttctgttttattgcaacggttaggggcgtgtaaggtccccggctttcagtggtggatctttatttatggccgtagtacagaaacgcgggtttaattctcccacggcgcccggttcacattaaacccggccggaacctgtcaaacaacattacaa

SEQ ID NO: 26425 - DNA, 260 bp, Unknown
  Description of Unknown: RightRegion for integrase B426 sequence
gtccgtggacaatctgcggacagtcacagaatgcagctattttcacttaccgttcagtaagattttcgcaatttttaatcgcgcgttctcatttgcgcaagaatccacacaaacacaactctgaatgctataatgcgcttgcagacgttcagagggaggaggttttcatcatggacatgaccgcacgtttcaaggcatacagagacctgaaccgggaaattgacctgcaaattgaacgactggagcagttggaagcaaag

SEQ ID NO: 26426 - DNA, 260 bp, Unknown
  Description of Unknown: RightRegion for integrase B427 sequence
accagcaagtccaacctttgttctctcgcttgttctttcaatttcttgttggctaactgatgttaaaatacgacttatcattttaccatttgcactagtagtatttatatcatcattagcacagtctaaatatgcttcgttttcttctaaaaactttaagatattttcccagtcataaacagaacgtgtaagtctatctaattttaaaactactatggtgttacatttcctatcttttatatcttgcaataatctttcaa

SEQ ID NO: 26427 - DNA, 260 bp, Unknown
  Description of Unknown: RightRegion for integrase B428 sequence
atgccgagccagttcagacgttgttcttggacagatttgagggtcgaagtgtatgtttgacagaaaaacaaatgtgcgctgctgacaagcagcggcgcacattttagtcaattttcagcctttttcgggctttaatttttaacgataactcgttaaaaattaatcacttcgctctgggtgctttaatggctgcctgtgcggcggccaggcgggcgatgggaacacggtagggagagcagctgacgtagtccaggccaacg

SEQ ID NO: 26428 - DNA, 260 bp, Unknown
  Description of Unknown: RightRegion for integrase B429 sequence
aggatattgcccatggtctgggcggctttcagttgggcgtcggtggtgacgtgggcgtaggtgtccagcgtaaagcccgccgagtagtgacccagcatactgctgacggtcttgacgtccacgccgttttgcagggccatcgtcgcgaaagtgtggcgcaggtcgtggaatcgtatccgtggcagccccgcccgtttcagcactctctgcagcatatgcagcacgctgtccggggacatagggcctccgcttggcgatgg

SEQ ID NO: 26429 - DNA, 109 bp, Unknown
  Description of Unknown: RightRegion for integrase B430 sequence
aataacttccgagatgacgaggcacacgttgaaaccgtagcgatcctcgggcgccgctagcccaccccagtagatttttgggacatgccttaaaatctaccggcacaag

SEQ ID NO: 26430 - DNA, 260 bp, Unknown
  Description of Unknown: RightRegion for integrase B431 sequence
ggccgccttggcagtgacggcggcattgatgaggtcgcgctcgtcgtcggacaggcctaaggggtcagtctggttcaggttttgggtcgggtctacaccggccgtgccgggctggtaggtgccgttctcagaggcagagcgggcaatcgtgacgatcatcacgttgttgtcgttcatgctgtctttccaagtggcgttctggccgtccagcgcagcctggctcggctccttgctggagaaaacgccggtcgtggagggag

SEQ ID NO: 26431 - DNA, 109 bp, Unknown
  Description of Unknown: RightRegion for integrase B432 sequence
ccaaagttttttcacccatctggtgaacacccatggtcttgcagaccagtttgtcattgacagttgtgcaacaagcagagaagaaatcggcaatccaccccacagagga

SEQ ID NO: 26432 - DNA, 260 bp, Unknown
  Description of Unknown: RightRegion for integrase B433 sequence
gcagcggcatctcgttatactgcacgcggcggacaagttcgtccgcttccagctccttaagtgcgctggtgagcgcggtgttggtgacgggcgctagcagcttcctcagctcgccaaagcgcagcggtgagcttatgcacagctcgtagattatctgcatcttccacttcccctgcagcatctgcaccacaggcgtgaccgggcaattgccctcatcggtcaatatcacaccgcccactttttccttaaattcctcatat

SEQ ID NO: 26433 - DNA, 260 bp, Unknown
  Description of Unknown: RightRegion for integrase B434 sequence
atgagtacaagagtaaaaaagttaaggagtgagaaacattggtcgtccaaaagaaagtaaccaccataccggcatcgctgacccgctttacagcgacgccgatcacagaattaaagaagcgccgtgtggccggatatgcccgtgtttccactgaccacgatgaccagttcaccagctacgctgcgcagattgattactacaccaactacatcaagagccgagacgattgggagtttgtcgaggtctacaccgatgagggc

SEQ ID NO: 26434 - DNA, 260 bp, Unknown
  Description of Unknown: RightRegion for integrase B435 sequence
ataattttgataaaactacggcggcttctttgttgcacggcattttcgtggatggtataatgagcgttagagaaagtaatttttggggaggaatagtatgatttaccacggttcgtgtatttctgggctgcacacaatcaaggcaaattcaaaatctcattctaccggaaaaatggttgcctatttcagcgaggacagatgctatgctctggtttgctgcagaagcagggccgaaaattatgttacgatgggcgttggag

SEQ ID NO: 26435 - DNA, 260 bp, Unknown
  Description of Unknown: RightRegion for integrase B436 sequence
ttacatccgctttacgccatgaaatccggcaggggcttgccctccttcagccattggtgatactcggcggtagcggcaaactcaacgtcgccagcggagttcagcgccgtctcgaccgaatcctggatgacaccaatgataaagccgacaccaacgacctgcatcgcaatgtcattggagatgccgaacagcgaacaggccatagggatcagcagcagcgaaccgcccgcaacgccggaggcaccgcacgcgcccagtgc

SEQ ID NO: 26436 - DNA, 109 bp, Unknown
  Description of Unknown: RightRegion for integrase B437 sequence
catggcgcagagtgtctttgcccatctggcggcggaagcgaacctggcagattattttgaaattgattccgcggcgacaagccgcgaagaaatcggaaacacaccacat

SEQ ID NO: 26437 - DNA, 109 bp, Unknown
  Description of Unknown: RightRegion for integrase B438 sequence
aatgtcagaattcgtattaaaagacatggtggaacagcgtggcttgacagaacaatttgaaatcgcttcggcggcgaccagcacagaggaaatctggaacggcaaagga

SEQ ID NO: 26438 - DNA, 260 bp, Unknown
  Description of Unknown: RightRegion for integrase B439 sequence
agtgaacacatgaagcagctacggaaggagcgtgggaaagcatggcgcaaagaaaagtaacggcgatcccggctaccatcagcaggtacacagccacgccgataaacagtacgaagaaacgccgtgttgcagggtacgcccgcgtttcgaccgaccatgaagaccagaccaccagctacgaagcgcaggtcgattactatacgaattacatcaggagcagggatgattgggagtttgtggccatatacacggacgaagga

SEQ ID NO: 26439 - DNA, 260 bp, Unknown
  Description of Unknown: RightRegion for integrase B440 sequence
aaaataggcgacaagtcttttgttcatggcaatgcactccctcttgatgattttgtataggataagtatagcacggtaggggagcagcatcaagcggttgcccatgatataacatcaacgacaatgttatattatggacaactgttcgtaaaaatttaaggattttgagggagttgtacagcttgatatgaggagcgatttatggtaagatgaaagtacaataagagcttatacgctcttgttgaatctactgcgaggaa

SEQ ID NO: 26440 - DNA, 260 bp, Unknown
  Description of Unknown: RightRegion for integrase B441 sequence
attcccggtgtaccatggggctgccccatcgccgtggcggcgggtgtgatttatttataataccacttacggctctttttgtaaaattgatttccatgagacaagcaggttttcctctcgcaatccggggtgggttgtggtatactggagcagaatccggaaatcatcctttgaaacgaggtatccccatggagatcatcattcatcaggccatcctgcatgtgctggacaccacccttgacgccccggtgctcagcggc

SEQ ID NO: 26441 - DNA, 260 bp, Unknown
  Description of Unknown: RightRegion for integrase B442 sequence
ccgaaaaaggtcacctatcggtggcctttttctcgtatcggaggagggaatgcggtataatggtgtgggacgataaaatgctggcaaagaaagcagaaaactgaggacaattggaatttgtgagcttggaagaaatggtgccgcaggatcacttgctgcgaaagatcgacacagcaatcgacttcaagaagatctacgaatttgtagaggatctgtactgcgaggacaacggccggccaagcgtagacccggtggtactg

SEQ ID NO: 26442 - DNA, 260 bp, Unknown
  Description of Unknown: RightRegion for integrase B443 sequence
ttcagagcctgctccagatcgatctcttccgcatcgccccacagacgctccaaatcatagaacttgcgggcctcgtcggtaaagacatggaccactaccgcagaaaaatccatcagcagccaggtgccgccccggtgtccctcaatgtgatgggcacgctcgccgtgggcctccatggcctcttcacaggcgtccgacatggcctttacctgggtgttggaggtagcagtgcagatcacaaagtaatccgccagagtagt

SEQ ID NO: 26443 - DNA, 260 bp, Unknown
  Description of Unknown: RightRegion for integrase B444 sequence
tatagtaatgaaactattatagaccaaataatgttaatacctaaaaccgaaatatgttaaagaaaggacttactaattatgaaattattaagtaaaaataatattattaaaagtcaagtaaatacaatagaacaatataaagttttaaactacttaaaagatacttttgatactgatgctattgatatttatttagttgatagatttactattaaagttatagataaaaataatgatattggctattttaaatacaatag

SEQ ID NO: 26444 - DNA, 260 bp, Unknown
  Description of Unknown: RightRegion for integrase B445 sequence
tatagtaatgaaactattatagaccaaataatgttaatacctaaaactgaaatatgttaaagaaagtacttactaattatgaaattggtaaacaaaaataatattattaaaaatcaggttaatacaatagaacaatataaagttttaaactacttaaaagatacttttaattctgattatattgctgtttatttagttgatagatatacaattaaagtcatagatacgaataatgatattggctattttaaatacaatag

SEQ ID NO: 26445 - DNA, 260 bp, Unknown
  Description of Unknown: RightRegion for integrase B446 sequence
tcccgggttgatgggaatcacgacgagacggtagttttgatgtctaggaaagagaaataaatagcgaaaagtagcgtatttacgggcttttttgagattagtaggtagctcatgaaagtccgtatttcttatattgaaacatatctactgtaaaaacggtcagagagtttaggctgttgattagatgtcgtgggttgtggcactaagatagatgttatctagggtgcaaactcaatttgagtgagtgatttagatgttgt

SEQ ID NO: 26446 - DNA, 260 bp, Unknown
  Description of Unknown: RightRegion for integrase B447 sequence
ttgcgcggggtacgcggaagaaacgcgggtcggcgatacggtcatgttcgggcaatatgaacaggatggaaatctggacaacggcagtgagcctattgcgtggcaggtgctggatgtgcagggcggcaaagcgctgctgatgagccgctatgcgctggactgcctgccgttccatgacgagaaaaccgatgccgcgtggaatcaaagcgcgctgaatgcgtggcttcaggcggattttcatgcggcgttcacggatgctg

SEQ ID NO: 26447 - DNA, 260 bp, Unknown
  Description of Unknown: RightRegion for integrase B448 sequence
ttgcgcggggtacgcggaagaaacgcgggttggcgatacggtcattttcgggcagtatgagcaggatggcaatctggataacggcagcgagcccattgcgtggctggtgctggatgtgcagggcgggaaggcgctgctgatgagccgctacgcgctggactgcctgccgttccatgacgagaaaaccgatgccgcgtggaatcaaagcgcgctgaatgcgtggcttcaggcggattttcacgcggcgttcacggatgctg

SEQ ID NO: 26448 - DNA, 260 bp, Unknown
  Description of Unknown: RightRegion for integrase B449 sequence
gaggcaatgagtgaaagaatcaagaaaataaggagcgaaaagaaatggccaaatccgtaaccacgataccggcgacgctgtcacgcttcacggcggcaccgattaacagcactaagaagcgacgtgtggcggcctacgctcgtgtcagcaccgacaacgaggagcagctgaccagttacgaagcgcagattgactactacacgaattacatcaatggccgggatgattgggagttcgtcggggtatatcctgacgaaggc

SEQ ID NO: 26449 - DNA, 260 bp, Unknown
  Description of Unknown: RightRegion for integrase B450 sequence
catgtaagctccatagtctttaagaatggccttacacacaaatttatctataaaaattgacaccgacataaatgtcgggcacaaaaataaccaggaagcgttcgtacctcctggttattcttatattttctgtgttttttctccatccaacaaatgttagaaatggatgttaaatgataagcatggcatccccaaaggagaagaaacgataacgctcttttaccgcttcctcgtaagcagccatgatcttatcttttccg

SEQ ID NO: 26450 - DNA, 109 bp, Unknown
  Description of Unknown: RightRegion for integrase B451 sequence
catggcagaattcatattaaaagatatagtaacaaaacgtggtattgccgatcagtttgagatcgcatcggcagccaccagcacagaagagatttggaatggtgttggg

SEQ ID NO: 26451 - DNA, 260 bp, Unknown; identical to SEQ ID NO: 26446
  Description of Unknown: RightRegion for integrase B452 sequence

SEQ ID NO: 26452 - DNA, 260 bp, Unknown
  Description of Unknown: RightRegion for integrase B453 sequence
aaattgtgtttacatagtagctccgacacatgtggaaacagtttgtttattatcacgtaaataggcggttttactggcttttatgagtggggttcagtctatttgccacccatttgccaccctaattccgaaaaacatcactgaacacaagaaaagcactgaacccgttgaactattgccggattcagtgcttttttcaggtctttatgtagttgttatgatgtttttgcctgtgtcacctgttcaaacagatcaacaga

SEQ ID NO: 26453 - DNA, 260 bp, Unknown; identical to SEQ ID NO: 26447
  Description of Unknown: RightRegion for integrase B454 sequence

SEQ ID NO: 26454 - DNA, 260 bp, Unknown
  Description of Unknown: RightRegion for integrase B455 sequence
aatgacaacttattatcctttagaaaaattaagaaagataccaggactagaacatgctaagtatgtggatccatatgcaggaagtaaaggtaactcaatgagatatctatctgttgctcctagaactaatgacatgaaggttcaaggagtggataatttattctgcgctggagaaaaaagtggtctttttgttggacatacagaagctcgttattccaaattgcgatgaatattaataatttactatacgatgacatgcc

SEQ ID NO: 26455 - DNA, 260 bp, Unknown
  Description of Unknown: RightRegion for integrase B456 sequence
gaggcaatgagtgaaagaatcaagaaaataaggagcgaaaagaaatggccaaatccgtaaccacgataccggcgacgctgtcacgcttcacggcggcaccgatcaacagcaccaagaagcgacgtgtggcggcctacgctcgtgtcagcaccgacaacgaggagcagctgaccagttacgaagcgcagattgattactacacgaattacatcaatggccgggatgattgggagttcgtcggggtatatcctgacgaaggc

SEQ ID NO: 26456 - DNA, 260 bp, Unknown
  Description of Unknown: RightRegion for integrase B457 sequence
aggcttttatccagttttagggcaaaagtttcagccagtgaaaaatctaaattcacgtaaataagcgtgaaagtgtccaagcataagaataaccttggagaactgtagaaatacggttcttcaaggtttttttgtttctatggcagcagtttcacaggatttactgatatttggaaagtagagaaaagccttattttaagggctttcaaggggcttgatttacacataaaattgacattttatgaggaacagaaaatgta

SEQ ID NO: 26457 - DNA, 260 bp, Unknown
  Description of Unknown: RightRegion for integrase B458 sequence
cgcgtggcttcgatagagtttaagaatggactcgttcacgagttcctttacagagagtgagagcaggctgaggaggcagcctgctctctttatgtgtgtatgagtaagattagattaacaagaaaggttgattttacaaggttttaggtatcttgtttttagagttcatctgacacccgaatgtctttacaaaataagtcataggacggccgatttctttagatttcttttcaacaaaatcctttgcctttgccatgtaa

SEQ ID NO: 26458 - DNA, 260 bp, Unknown
  Description of Unknown: RightRegion for integrase B459 sequence
aaaccggatcagctcttaacggtgaactttgcggaatcgagcagctggttgccgatgtagatggacagggtataatcgccgtcggtctgcggggtgcgcgggaagtagccgacgaacatattcttttcccacatgtccttccagaccagcacggagctggacgaatcgacgatcttcccgtccgcgttgcggacgacaaggttgaccatgaccgttccgtcggaggaagcgtccagattgctgcccgcgtccacgtcgaa

SEQ ID NO: 26459 - DNA, 260 bp, Unknown
  Description of Unknown: RightRegion for integrase B460 sequence
atgagtgaacagatgaaagccctgcgaaaggagcgtggtgaaaattggcaaagacagtaagagccattccggctaccatcagccgttatacagcgatctcgattaacagccggaagaagcggagagtagctggctatgcccgggtttctacggatcatgatgaccaggttaccagctatgaagcgcaggtggactactacacgaattacatcaaggggcgggacgattgggaggttgttgctatctacacggacgaaggg

SEQ ID NO: 26460 - DNA, 260 bp, Unknown
  Description of Unknown: RightRegion for integrase B461 sequence
ggaaattcccgggttgccggaaatcacgacgagacggttgtattgatgtcaaaaaaataaaatcaagtgccagaaagtagcgtatttccgggctttttcggagatttggatttgaagccagacttctgaaaaagctcggttttcttatatggaaacatatctactgcaaaatgtgtgtcaggttgtaatctcggattagctgtcacgatttgagacagtggattagatgtcaggcattttagagtgatttttggaaaacg

SEQ ID NO: 26461 - DNA, 260 bp, Unknown
  Description of Unknown: RightRegion for integrase B462 sequence
acggaagcgaaaaaacgactagatcatccccgaacactgatcgatgaactgacggaataaaggtaagtgttagtgccattgtaaaattgccccacagaaatgttagcgtaatccatcgctatatagccatgaatcgctctgtatcttgtcagagcgattaaagcagacttcaggcatcgttcaatataaaacccccgtaaaacttgatacagagcgttgtagagcaagggttcaaaattacatcgtattcattctgtcta

SEQ ID NO: 26462 - DNA, 260 bp, Unknown
  Description of Unknown: RightRegion for integrase B463 sequence
atgagtgagaaaatgaagcagatcaggaaggagcgcggagcacagtggcgaaaagagtaacgacgatcatgccgacattggtgcggtttacggaagcgcccattgccgagcatcgcaagcggaaggttgccgcttatgcgcgtgtctctacggacagcgacgagcagtttaccagctatgaagcgcagattgactattatacccagtacatcaaggcgcgggacgactgggaattcgttcaggtttatacggatgaaggc

SEQ ID NO: 26463 - DNA, 260 bp, Unknown
  Description of Unknown: RightRegion for integrase B464 sequence
cctgcatgtatcttctttcttccgggcacattcgttttggttataaagtttgtcaaataacaaggacgcaaaaatcccccgtaacggtttctacaccgctgcgggggattttttgatatttgactttgttgtttacgcatgatacaatatttatagcttagtgaccgtgttgtagtaacctgcgggtctacaaccatattgaccccccgcacctctccatattgaaagatatgcgatgtgtcccagtgggggacattttt

SEQ ID NO: 26464 - DNA, 260 bp, Unknown
  Description of Unknown: RightRegion for integrase B465 sequence
acaggtgggccgccgcgcaggccgccatcaagaatccccgctaaaggcgagcatttataaagtaaacaggagcgccgcccaaatgggcggcgctcctgctgtttgtaccaaagagagagcccggacagcggaaccgctggccgggctcaaaacatctacggaatacacagccgtatcagacgtagcattttcatagcgagggtggggggtgtccacaacgaggatgctgcaaagtggttccgccataagctaggtcaata

SEQ ID NO: 26465 - DNA, 260 bp, Unknown
  Description of Unknown: RightRegion for integrase B466 sequence
ctcttttcgtttttgaacgatattattcgtagtcgatgggcagggtgggcaggccgttgagctccagcccggcggtgtgcccggcgatgtactggtagtagccctgggcggcgatcattgcgccgttgtcgccgcagaacttgagctccggcaggtagactttggcacccagcttctgtgcgccgtcgttgacgagctggcgcagccggccattggctgcgacgccgcccgccaggcagacctgcttcgctccggtgtcg

SEQ ID NO: 26466 - DNA, 260 bp, Unknown
  Description of Unknown: RightRegion for integrase B467 sequence
tcatttctgcgtaatcaaccatccataacaaaaactctaaatctaaaattaaaaatgtaaaaaatgggggcaagagaaacaaaatctcttaccccttatttattagccccaaattgtagggctaatttctctaagaataaaacctattacaccacctgtaaccgcagcaagtacaatttggataattgcatcaacccatttggaacgcctcttcataggttcagctttaaccacggcaatttcttttttaacggtcttaa

SEQ ID NO: 26467 - DNA, 260 bp, Unknown
  Description of Unknown: RightRegion for integrase B468 sequence
attgagctccaatttttctacaaaccgtccaaggatgacaaaagcccagaaaccgcttgatttctgggctttttcgctatttcttgttgtcgggatctggattgcttccaataaacatcgcatcgccaaaggagaagaaacgatatctctcctccacggcggctttataggcttccaggacatgctcgcggcccgccagcgcagaaaccagcatgatgagggtactctcgggcaaatgaaagtttgttatcaacccgtcc

SEQ ID NO: 26468 - DNA, 260 bp, Unknown
  Description of Unknown: RightRegion for integrase B469 sequence
gctggcggagaagtaagcaacaagtcgtttgctcatgacaaatgcacttcctttgattgattttcatggtttaagtatagcacgttgaatagggagcatcaagtaaggctgagtggacgaatgtgctaatattgcaaatgaaataagcacaaaagaaaatttgtgttgactttcgtgcttatttagaatacaatataagcacgaaggtgaggtgacgcttatgatgaacatgaacaatttggctcaaacacatgagattt

SEQ ID NO: 26469 - DNA, 260 bp, Unknown
  Description of Unknown: RightRegion for integrase B470 sequence
ctctcaattcgcttcaaaaacggtcttgaacacaaatttttgtacaaggacgcagaatagcaaagagccgaaaaccctgcaatttcaagggttttcggctctatttttttgcttgtggcatcctttacaggataagcattgcatcgccaaacgagaagaaccgatagcggttttcgacggcgatcttgtatgcgttgaggatgtgctcccgcccggccagcgccgacacgagcatgatgagcgtgctctccggcaggtgg

SEQ ID NO: 26470 - DNA, 220 bp, Unknown
  Description of Unknown: RightRegion for integrase B471 sequence
ctctcaattcgcttcaaaaacggtcttgagcacaaatttttgtacaaggacccagaatagcagaaagccgaaaaccctgcaattccaagggttttcggctctattttttggcttgtggcatcctttacaggataagcattgcatcgccgaaggagaaaaaccgatacctctcccgcacggcctcttcataagcccgcaatacattttcgcggccagccag

SEQ ID NO: 26471 - DNA, 260 bp, Unknown
  Description of Unknown: RightRegion for integrase B472 sequence
ataattcacgaatttgtgtacgccgacgaagaacctgttgccgaggcttcagagggctaaaaacgccgaaaaatccccgaaatacgctgatttcgaggatttttcttttggctcaagggccttctaaaaaactgttatcgaatgaacatcgcgtcccccatgaccacgggatatgagttttggtgcattggggaacccgcttgtaatcgtcgtaacgtactcattttatatcagaagccggtttcttgtcaatccgggtc

SEQ ID NO: 26472 - DNA, 260 bp, Unknown
  Description of Unknown: RightRegion for integrase B473 sequence
tggaaaagaaatgacagacgcagatacaaatatgcgggaaagaataggtgttgtttatgacggagataattttccagcttattggacagcagcacaattagcgaaagttatgtcgggattttataagcaatgggacaatattttgtttcagaaatttttaaaagaatacaaattacctgcaaatcaaaaaattaagcaatattccagagggatgacaatgaaattagcgattgcggttgctttatcgcaccatccacaac

SEQ ID NO: 26473 - DNA, 260 bp, Unknown
  Description of Unknown: RightRegion for integrase B474 sequence
ctctcaattcgcttcaaaaacggtcttgaacacaaatttttgcacaaggacgcagaatagcaaagagccgaaagccctgcaattccaagggttttcggctctgttttttggcttgtggcatcctttacaggataagcattgcatccccaaacgagaagaaccggtagcggttttcaacggcgatcttatatgcgttgaggatatgctcccgtccggccagcgccgatacgagcatgatgagcgtgctctccggcaggtgg

SEQ ID NO: 26474 - DNA, 109 bp, Unknown
  Description of Unknown: RightRegion for integrase B475 sequence
aagaacggtctgcggcacgaatttatctattccgaagacagcaacagccaggagaactaacctcctggctgttttttgtgtcaactgtacagtttatttttggtgttat

SEQ ID NO: 26475 - DNA, 260 bp, Unknown
  Description of Unknown: RightRegion for integrase B476 sequence
ataattcacgaatttgtgtacgccgacgaagaacctgttgccgaggcttcagagggctaaaaacgccgaaaaatccccgaaatacgctgatttcgaggatttttcttttggctcaaggaccttctaaaaaactgttatcgaatgaacatggcgtccccaatgaccacgggatatgagttttggtgcattggggaacctgcttgtaatcgtcgtaatgtactcattttataacagaagctggtttcttgtcaatccggctc

SEQ ID NO: 26476 - DNA, 260 bp, Unknown
  Description of Unknown: RightRegion for integrase B477 sequence
tgttatttctgggcggcgccggtaagcagggggcgggtcatagtattctttttcaaataaagttaatggcctatttttactgttactatagcctgtccaggtggctctttcaagtcctctgaatagggttcttttgcaacctttcccaaagaaggtatatctgctcgggcaagtgttcttcccacatgtccaaggcatcctccgtcaccgctatatgactctttaactgtctattttcttgtgtttacagtctttctatc

SEQ ID NO: 26477 - DNA, 109 bp, Unknown
  Description of Unknown: RightRegion for integrase B478 sequence
ataattcacgaatttgtgtacgacgacgaagagccagctcccgaacacaaagaggactaaaaatgccgaaaaatccccgaaatacgctgatttcgaggatttttctttt

SEQ ID NO: 26478 - DNA, 109 bp, Unknown
  Description of Unknown: RightRegion for integrase B479 sequence
ctggaattgcagtttttctacaaaaccgccgagacagcaaaaagcccgaaaaccttttgatttccgggctttttgttacttcgacttttcgtcgtctttcatgtttccg

SEQ ID NO: 26479 - DNA, 260 bp, Unknown
  Description of Unknown: RightRegion for integrase B480 sequence
ctgtccattcgctttaagaacggacttgaacacaaatttgtttacaaatccagcgtgtaggccgacataatatcacgcttcccgtaaacataggggacgccatgttcatcgccagcggtgcggtgccgcaggcttgagtatatcccctttgatacgcataaaaaatctcccttcgatagctgggtgtatgtaagacagtattgcgctaagattgacgaagcggcacgaaaccgcatgaagctgatcgtgcggtcactggc

SEQ ID NO: 26480 - DNA, 260 bp, Unknown
  Description of Unknown: RightRegion for integrase B481 sequence
ataattcacgaatttgtgtacgccgacgaagaacctgttgccgaggcttcagagggctaaaaacgccgaaaaatccccgaaatacgctgatttcgaggatttttcttttggctcaagggccttctaaaaaactgttatcgaatgaacatcgcatcccccatgaccacgggatatgagttttggcgcatcggggaacctgcttgtaatcgtcgtaatatactcattttatatcagaagcaggtttcttgtcaatccagtca

SEQ ID NO: 26481 - DNA, 260 bp, Unknown
  Description of Unknown: RightRegion for integrase B482 sequence
gcctccatccgcttcaaaaacggcattgagcaccaatttttctaccgtgacaaagagtagaaaaaagcccaggaaccgcttggctcccgggcttttcttcgtgcctctggaaatatttacatctgttatccaatgaacattgcatctccaaaggagaaaaaccgatagcgctgctccaccgcctccttataggcggccaggacatgctcccgccctgccagggcggaaaccagcatgataagcgtggattcgggcaggtg

SEQ ID NO: 26482 - DNA, 260 bp, Unknown
  Description of Unknown: RightRegion for integrase B483 sequence
ctctcaattcgcttcaaaaacggtcttgaacacaaattcttgtacaagtacgcagaatagcaaagagccgaaaaccctgcaattccaatggttttcggctctgttttttggcttgtgacatcctttacaggataagcattgcatctccaaatgagaaaaaccgataacggttttcaacggcaattttatatgcgttgaggatatgctcccgtccggccagcgccgagacgagcatgatgagcgtgctctccgggaggtga

SEQ ID NO: 26483 - DNA, 109 bp, Unknown
  Description of Unknown: RightRegion for integrase B484 sequence
acctcgattcgcttcaaaaacggcatagagcaccaatttttctaccgggacccagaatagcaaaaagcccaggaaccgcttggctcctgggcttttcagcacctcgctg

SEQ ID NO: 26484 - DNA, 214 bp, Unknown
  Description of Unknown: RightRegion for integrase B485 sequence
acctcgatccgcttcaaaaacggcatagagcaccaatttttctacaaggactcagagtagcaaaaagcccaggaaccccttggctcctgggcttttcagcgttccgctggaaatatttacatctggtctccaatgaacatcgcatcgccaaaggagaagaagcggtatttctcccgcaccgcctcctcataggcggccagcacgtgctcccgcc

SEQ ID NO: 26485 - DNA, 260 bp, Unknown
  Description of Unknown: RightRegion for integrase B486 sequence
ctctcaattcgcttcaaaaacggtcttgaacacaaatttttgtacaaggacgcagaatagcaaagagccgaaaaccctgcaattccaagggttttcggctctgctttttggcttgtggcatcctttacaggataagcattgcatcgccaaacgagaaaaaccgatagcggttttcgacggcgatccgataggcgttgaggatgtgttcccgtccggccaatgccgagacgagcatgatgagcgtactctccgggaggtgg

SEQ ID NO: 26486 - DNA, 260 bp, Unknown
  Description of Unknown: RightRegion for integrase B487 sequence
ctggaattgcagtttttctacaaaaccgccgagacagcaaaaagcccgaaaaccttttgatttccgggcttttttgttacttcgacttttcgtcgtctttcatgtttccgataaacatagcgtcgccaaacgaaaagaatctgtaacgctcctgaacggccactttatatgcggccatcgtcttttcgtaaccatagagggccgacacgagcatgatgagggtgctttcgggcagatggaagttggtgatgagaccgtcg

SEQ ID NO: 26487 - DNA, 260 bp, Unknown
  Description of Unknown: RightRegion for integrase B488 sequence
ctggaattgcagtttttctacaaaaccgccgagacagcaaaaagcccgaaaaccttttgatttccgggcttttttgttacttcgacttttcgtcgtctttcatgtttccgataaacatagcgtcccctatgctcacgggaaacatgataccgtaccggaaaaagtcgtcaaaatgttcgtttttggcttctgggaatgtctgatttcgtttggggctaccgaaaggaagatatatttgttcagcaaaaaagccccgtgaa

SEQ ID NO: 26488 - DNA, 109 bp, Unknown
  Description of Unknown: RightRegion for integrase B489 sequence
aaaaacggtttgcttcatcgttttatttattcttcagctgaaaagagccagggttcttagtttcctggctcttttttgtatcaactattcagtttatttttggtgtcat

SEQ ID NO: 26489 - DNA, 260 bp, Unknown
  Description of Unknown: RightRegion for integrase B490 sequence
gaatcgaacaggacggccgcccgcaggcggcaaaaaacaatccagcggattgttttttagtccgcgggagatggacgcacgggtcaccaaaaagcactacttcatttgaggtagtgcttttttcaatatagtgtactttttagggagtagaggagtgcgggaatcgaaaagcccgggccccgtgtccggcgtcccgcggggcaaaaacgcccctgcggggcgtttttagggcgggggagattcccgcacagtttttaata

SEQ ID NO: 26490 - DNA, 260 bp, Unknown
  Description of Unknown: RightRegion for integrase B491 sequence
caaaccattctacaacaaacggcgtttcatctgcgatgcgtccgattcagtcgaacatgaacaccagcagaatgtcaaacttgccttttcgggcataatctttgtcaggcccaggagctgaactgctcctcttccatctacggtgcgctcagcgagggcgcaccgttcttctttcttccagctttttgatggcccacgcgcccagccagccgcaggcagtgcccagcaccgcaccacccagaatatccgtcggaaagtgg

SEQ ID NO: 26491 - DNA, 260 bp, Unknown
  Description of Unknown: RightRegion for integrase B492 sequence
gaatcgaacaggacggccgcccgcaggcggcaaaaagcaatcctgcggattgttttttagtccgcgggttctttatttttcacgcaccgtttgctatggaataacggttcaggtatctgccaactatttttatatcgtataaattactcctccgccaactccaccaccaatttggcttcggtggcggcgatggcaagttggagtttattctctaagttcgtcttttgcagcatattgatgacgtggtactttacggtgga

SEQ ID NO: 26492 - DNA, 145 bp, Unknown
  Description of Unknown: RightRegion for integrase B493 sequence
acctccatccgcttcaaaaacggcatagagcaccaatttttctatcacgacgaagagtagcaaaaagcccaggaaccctttggctcctgggctttttctcattcctctggaagtttctgtatctggtctccaatgaacatcgcat

SEQ ID NO: 26493 - DNA, 260 bp, Unknown
  Description of Unknown: RightRegion for integrase B494 sequence
ggtcggatttcgttctgtatctctgcagcaggggcttttatgatggagagttcgagataaaaggagcatttcatgaactgaatgtaaggggacaagataaatgacaaaagtgggaatggacgggatatgatgggacgaggtgggaaaagatgagaattcagggattttcgaagggtcaaggcgaaacggaatttcgggttttgacaaataagctgtctttggagcttcgcaagtgggcggagctcttttttgtgcttgaa

SEQ ID NO: 26494 - DNA, 260 bp, Unknown
  Description of Unknown: RightRegion for integrase B495 sequence
aaaaacggtttgcttcatcgttttatttattcttcagctgaaaagagccagggttcttagtttcctggctcttttttgtatcaactattcagtttatttttggtgtcattctataaacatcgcatccccaaatgaaaagaacctgtatcgctcccgaatagcctcctcatatgccttcaggatatgctctcttcctgccagagcgctgactaacatcaccagcgtagattctggcagatggaaattggtaatcagagaat

SEQ ID NO: 26495 - DNA, 260 bp, Unknown
  Description of Unknown: RightRegion for integrase B496 sequence
ctgcatcggctgcgggcggcagcgccaggtgtggcggtgcagacggccaatgcgctgtagcagcaggtccatcgggcaaagttccgtcaccataacgtcaaaatcaatgtccaacgactgttcgagcacctgcgtgcccaccacaatgagtccatcccgccggaccggagtcgagtgcttgccgatccgctccatgagctcctgctcccgcgcggcgcggtccggcatcaggaattgtgcgtggaacacctgcacttctt

SEQ ID NO: 26496 - DNA, 260 bp, Unknown
  Description of Unknown: RightRegion for integrase B497 sequence
aacgacgagctcatcagccccttttttcaaacgttttttacagtgttgtccaacacataaagaggaaaaccacaaatgtgcactcaagaattaaaaattggcacaattccggctgtactgtacggcaaaccggcccccaacatctggttgttcgtgcatggccagggcggtaataaaacggaagccgcagcatttgcggcgcttgccgccccaaccggctggcaggtgctgggcattgacctgccggaacatggagaccg

SEQ ID NO: 26497 - DNA, 260 bp, Unknown
  Description of Unknown: RightRegion for integrase B498 sequence
gaatcgaacaggacggccgcccgcaggcggcaaaaaacaatcctgcggattgttttttagtccgcgggagatggacgcacgggtcaccaagaagcactacttcatttgaggtagtgcttttttctttttatttacttttcaataggtttcgagtgtaaacggtgagccgtgcgggaatcgaaaagcccaggctccgccctaaaaacgcccctgcggggcgtttttagggcgggggagattcccgcacagttttttataga

SEQ ID NO: 26498 - DNA, 260 bp, Unknown
  Description of Unknown: RightRegion for integrase B499 sequence
aaggatgtgtgttcctatgttagtgacaacacacgtcgaaaccgtgtgtctactttctaggaaataagcgggtttgcggacttgaaatgcggaagttcagtcgatttgccacccatttgccacccgcaaaaataaaatagaccgattttcaagaaaagctgctgaacactctgaactaaaatgagaagttcaaccgcttttttactatgcttttttgtgaatcgcattctcgaatacatcaactgccgtttgctgcatca

SEQ ID NO: 26499 - DNA, 260 bp, Unknown
  Description of Unknown: RightRegion for integrase B500 sequence
cctgccatacataagggcgacacaggcagctatcaaggaacagcgccaataaaaagttgacgcagcagcgtaggtaaaacaactgatataaatacggtcacacagtccgttgggattgtgtgaccgttatttttgccatgcaaaagcatggcaaaaataagaaatgtgccatttcctcgcccctgtggggcaaccggaaatgatgcacaaaaacttcatgcgccggcatttgcgcatttccgtggtgcgatgctcaggca

SEQ ID NO: 26500 - DNA, 260 bp, Unknown
  Description of Unknown: RightRegion for integrase B501 sequence
gaatcgaacaggacggccgcccgcaggcggcaaaaaacaatcctgcggattgttttttagtccgcgggagatggacgcacaggtcaccaaaaagcactacttcatttgaggtagtgcttttttcttttatttacttttcaaggggaaatgggagatgccggtaggcttcggcagggtgagggcaccccgccctacgcacggtttttaagtggggttgtagggcggccagtcctctggccgccgtggaggcttgcggcggc

SEQ ID NO: 26501 - DNA, 190 bp, Unknown
  Description of Unknown: RightRegion for integrase B502 sequence
ttcaaaaacggtttacttcaccgtttcatttattcttcagttgacaagagccaggaataataacttcccggctctttttcgtatcaactattcagtttatttttggtgtcattctataaacatggcatctccaaacgagaaaaagcgatatttctcccgaaccgcttcctcgtaagccgccagcacatga

SEQ ID NO: 26502 - DNA, 260 bp, Unknown
  Description of Unknown: RightRegion for integrase B503 sequence
cggccggtggaaattaccttcaagaatgggctgacgcacaaattcttataccgtgattaaaacggcccgatctgtatcaaaaccgggctaaaacgtatcaaaaccggcatttttcggaacgaaaggccggtttttggtattttatgccgtattttcggaactatcgcttttattcttccggcgggcagcaggacaaagaaaaccccaacttgtaaatcattcttacaagttggggttttgaaaaatcctttatttatgcg

SEQ ID NO: 26503 - DNA, 260 bp, Unknown
  Description of Unknown: RightRegion for integrase B504 sequence
ttcaaaaacggtttacttcaccgtttcatttattcttcagttgacaagagccaggaataataacttcccggctcttttttcgtatcaactattcagtttatttttggtgtcattcgataaacatcgcgtccccaaaactgaagaaacgatatctttcttttactgcctcctcatacgctgccatcacatgctcttttccggctaatgcagaaacaagcatgatcagtgtagattccggcagatggaagttcgtgatcagc

SEQ ID NO: 26504 - DNA, 260 bp, Unknown
  Description of Unknown: RightRegion for integrase B505 sequence
cggcgtgcggacgacaaaaaatattctgaagcagaaaagcctgatcggctttgtgcctgatttctttggcgtttatgaaaacttaaacgtgatagagtatctggaattttttgccgcatcgtatggaatttacgggcgggcaggaaccgtccgtgcgcgggaagtgctggagatggtcgaactatcgggaaaagaggagcagatggtggattcgctctcaaggggcatacagcagcggctctgtctggcgcgcgcgatga

SEQ ID NO: 26505 - DNA, 179 bp, Unknown
  Description of Unknown: RightRegion for integrase B506 sequence
ttcaaaaacggtttacttcaccgtttcatctattcttcagttgacaagagccaggaataataacttcccggctctttttcgtatcaactattcagtttatttttggtgtcattgtataaacatcgcatcccctatgattacgggtgtgctgaaaaaataaactctttgttttatcatac

SEQ ID NO: 26506 - DNA, 260 bp, Unknown
  Description of Unknown: RightRegion for integrase B507 sequence
gaaatgtgtggtgcttatttattgtctgcttgccatgcaaagcagcttatgataagataaacttgtattctccttctttagagattcgcaagacacagaagcaaaaacgtcaggaggccgcatatgccctatatttttttatatctttttttagcagtgctttgtcttttaaatatgcagttctgtccaaccggtgccgatatcaaaaagaccatgaaccgtctgcatgagctgcgctttgtttttgcagtactgatcat

SEQ ID NO: 26507 - DNA, 260 bp, Unknown
  Description of Unknown: RightRegion for integrase B508 sequence
tcaggcataaaaaatggcatgtctttatatcttgtatatattgtatgcgttggattttgattagccacagtaatcaatatactagaaaagcgaacagttacttatctatagttttgagtaactgttcgctcactgttatgttatcaggttttacatatcaagactggctaatcccacatattgaagcacctttctaataattgtcattcaaaactgtgtcaattgcagaatcaagactacaattcttcttctccaccagc

SEQ ID NO: 26508 - DNA, 260 bp, Unknown
  Description of Unknown: RightRegion for integrase B509 sequence
cgaccgattgaattagtatttaaaaatggactatctcacaaattcttatatcgtgattgaatttacattcgtatttgggtatggtaaaatttaatgtgaaaggtggattcacattatgaaaaagaaaatattatacgaagtgtctatgtcaatacttgcgataaccgctgttatattagcccttttggatcttgcaaaagggcttctttcatggcaaatcattatagataatatcattttaatgatttttgtcttagatt

SEQ ID NO: 26509 - DNA, 260 bp, Unknown
  Description of Unknown: RightRegion for integrase B510 sequence
ttcaaaaacggtttacttcaccgtttcatctattcttcagttgaaaagagccaggaataataacttcccggctctttttcgtatcaaccattcagtttatttttggtgtcattgtataaacatcgcatccccaaaactgaaaaaccggtatctttcccgaacggcttcctcataggcatgcatgactttttcctttccggccagagcggatacgagcatcagcagtgtggattccggcagatgaaaattcgtaatcaggg

SEQ ID NO: 26510 - DNA, 260 bp, Unknown
  Description of Unknown: RightRegion for integrase B511 sequence
cgcgtgtccgaaatcacctttgcgaatggcctgacccatgtctttttatatcgcgattgagcgcttttgttccgtttccgtgcagtttttcccggaaaatgtacagtttttcccgaaatcgttccgaaaacccggcgtttcgttcaggaatgccgggttttctgcctgctgccgcgctgggctgttatttttctacggtctgaacttccaacggactgactgccgttgtatccgtcattctggctttcttgtcaatcagg

SEQ ID NO: 26511 - DNA, 135 bp, Unknown
  Description of Unknown: RightRegion for integrase B512 sequence
ttcaaaaacggtttgcttcaccgtttcatctattcttcagttgacaagagccaggaataataacttccaggctctttttcgtatcaactattcagtttatttttggtgtcattgtataaacatcgcatccccaaa

SEQ ID NO: 26512 - DNA, 109 bp, Unknown
  Description of Unknown: RightRegion for integrase B513 sequence
ttcaaaaacggtttacttcaccgtttcatctattcttcagttgacaagagccaggaataatgacttcccggctctttttcgtatcaactattcagtttatttttggtgt

SEQ ID NO: 26513 - DNA, 109 bp, Unknown
  Description of Unknown: RightRegion for integrase B514 sequence
atctctatccgtttcaaaaacggtatcgaacacaaatttttgtataaaacgcaggaataagaaaaagccgaaaaccccagtaatactaaggttttcggctctctttttt

SEQ ID NO: 26514 - DNA, 260 bp, Unknown
  Description of Unknown: RightRegion for integrase B515 sequence
ttcaaaaacggtttacttcaccgtttcatttattcttcagttgacaagagccaggaataataacttcccggctctttttcgtatcaactattcagtttatttttggtgtcattctataaacattgcgtccccaaagctgaagaaccgatatcgctccttcacagcttcctcataggctgccagaacgtgttcccggcctgccagagccgataccagcatgacgagagtggactccggaagatggaaattcgtgatcagac

SEQ ID NO: 26515 - DNA, 260 bp, Unknown
  Description of Unknown: RightRegion for integrase B516 sequence
gaagcagaagaaagaagaaataacatttcaataagcaagcccaaaagcaagcccgattaatttcgggctttttttatgttatataatgaaatatttttatctttgtggtgtgacgggagaaatcgtcacacgttagacgtttaacaaagtggatagataaaactgacaattttaaactatttgaaccacagactgttaagcgtccgtgctcattgtatatacttgatgtatgcgataatgggtgcggacttgctttcatt

SEQ ID NO: 26516 - DNA, 260 bp, Unknown
  Description of Unknown: RightRegion for integrase B517 sequence
aatcaagaccgtcctttcaatgcctcaccctttgggagaggtggcattgcgaagcaatgacggagagggtcagtagttcagaccgaacccgctgcggtaatagttgccgtcggcgtcgcagtaagcgtagctgccgccgcgcaccccggcaaggatggccgggtcgatgtacgggtccttatcgtagccgggcacatcgttgggcgaagcgcagatctcacgcaccacaccgtcgatctcctgctcggtgatggcgatga

SEQ ID NO: 26517 - DNA, 109 bp, Unknown; identical to SEQ ID NO: 26513
  Description of Unknown: RightRegion for integrase B518 sequence

SEQ ID NO: 26518 - DNA, 260 bp, Unknown
  Description of Unknown: RightRegion for integrase B519 sequence
cttctcccggcgggaacggtcgggccgtgcgctgccttctcctcgaggagaaggtgctgagcgcagcgaggcggatgaggtggaaaggtcacgaccgcctccagtgccgccggtagtgcctccaaatccaacaacacttcatccgtcgcggcgtaccgccgcgccgccttcccctcaaggggaaggcttgcaagcccctctctggctccaccgctgctcagacgctttgggagaagccgtctatacgccccctcacaccc

SEQ ID NO: 26519 - DNA, 260 bp, Unknown
  Description of Unknown: RightRegion for integrase B520 sequence
atgtttgcaggccggtttttcagcaggctgctgcatcatccccttcaatgtacggcgtaaggtcgaacttgaaagtaatgttgagctgatacccacgataaacataaactaaaaaatccgccgaggactcctcccgaaaaaacgggaagaatcctcggcggatttcgtttatcgtgttggctctttttcggctgtgtcttttttctctgcaaaaaacatctctacatttttctgagctttcatcaactcctgcatctcat

SEQ ID NO: 26520 - DNA, 260 bp, Unknown
  Description of Unknown: RightRegion for integrase B521 sequence
gaaagttcgaccgagaagcgtttggtccgagtggcgagaatcgaactcacggcctcttgaaccccattgtgcttctctcgaaaacacaatgtacaatccgatactgcctagactcagtatcgttaaatttcaaatgcattataccattctgtttcattggatgtcaagacgtttcattccttttgtggtcaaattgtggtcaaacgaccccgacaaatgacctttctcccccagctaagttacatcgcgcaatttcgatt

SEQ ID NO: 26521 - DNA, 260 bp, Unknown
  Description of Unknown: RightRegion for integrase B522 sequence
gtttggatacacaggaaaggatttgtcgaaggtacgctcaagagtgggctgcctgattgaggcaccgggtgtatatcccaacatgacggcaaaggaaaatatcgagatgaagtgccgtctcttcggcatcagtaaaaagggctatgcagagggcatacttgataaggtaggtctgttaaatgtgggaaagaaaaaaacaaagaatttctcacttggtatgaagcagaggcttggaatcggcatggcgctggttggagagc

SEQ ID NO: 26522 - DNA, 260 bp, Unknown
  Description of Unknown: RightRegion for integrase B523 sequence
ctggaattgcagtttttctacaaacccgccgagacagcaaaaagcccggaaaccttctgatttccgggcttttctgttacttcgacttttcgtcgtctttcatgtttccgataaacatagcatcgccaaacgagaagaagcggtaccgttcctccaccgcctgctgataggccgccagcacgtgctctcgtcccgccaatgccgataccagcatgatgagtgtggactccggcagatgaaagtttgttaccagtgcgtcc

SEQ ID NO: 26523 - DNA, 260 bp, Unknown
  Description of Unknown: RightRegion for integrase B524 sequence
gtttggatacgctggaaaggatttgtcaaaggtacgctcaagagtgggctgcctgattgaggcaccgggtgtatatccaaacatgacggcgaaggaaaatatcgagatgaagtgccgtctcttcggcatcagtaaaaagagctatgcagagggcatactggataaggtaggtctgttaaatgtgggaaagaaaaagacaaagaatttttcacttggtatgaagcagaggcttggaatcggcatggcgctggttggagagc

SEQ ID NO: 26524 - DNA, 109 bp, Unknown
  Description of Unknown: RightRegion for integrase B525 sequence
cgttcctacagaactgagggagatagacggctgaagttgatgaagcaaacgaggatttgagggtacagcgcttgacagcaccccaagtccggcgtatgcttgtaacaat

SEQ ID NO: 26525 - DNA, 260 bp, Unknown
  Description of Unknown: RightRegion for integrase B526 sequence
gtttggatacgctggaaaggatttgtcaaaggtacgctcaagagtgggctgcctgattgaggcaccgggtgtatatccaaacatgacggcgaaggaaaatatcgagatgaagtgccgtctcttcggcatcagtaaaaagggctatgcagagggcatactggataaggtaggtctgttaaatgtgggaaagaaaaagacaaagaatttctcactcggtatgaagcagaggcttggaatcggcatggcgctggttggagagc

SEQ ID NO: 26526 - DNA, 260 bp, Unknown
  Description of Unknown: RightRegion for integrase B527 sequence
gtttggatacgctggaaaggatttgtcaaaggtacgctcaagagtgggctgcctgattgaggcaccgggtgtatatccgaacatgacggcgaaggaaaatatcgagatgaagtgccgtctcttcggcatcagtaaaaagggctatgcagagggcatacttgatagggtaggtctgttaaatgtgggaaagaaaaaaacaaagaatttctcacttggtatgaagcagaggcttggaatcggcatggcgctggttggagagc

SEQ ID NO: 26527 - DNA, 260 bp, Unknown
  Description of Unknown: RightRegion for integrase B528 sequence
gtttggatacgctggaaaggatttgtcaaaggtacgctcaagagtgggctgcctgattgaggcaccgggtgtatatccaaacatgacggcgaaggaaaatatcgagatgaagtgccgtctcttcggcatcagtaaaaagggatatgcagagggcatactggatagggtaggtctgttaaatgtgggaaagaaaaagacaaagaatttttcacttggtatgaagcaaaggcttggaatcggcatggcgctggttggagagc

SEQ ID NO: 26528 - DNA, 260 bp, Unknown
  Description of Unknown: RightRegion for integrase B529 sequence
atgtttgccgcccgttttttcagcaggctgctgcatcatccccttcaatgtacggcgtaaggtcgaagttgaaggtaatgttgagctgatacccacgataaacatctaccctgcggataagctgattgacaatcattttctttgcttcaaaactggcactgtcgtagagatcagaaaaagaaatcagttcttcgtacagttttgatacgttgtccatcagttcggcagttttttctgtttctgcataggaagattcataa

SEQ ID NO: 26529 - DNA, 260 bp, Unknown
  Description of Unknown: RightRegion for integrase B530 sequence
gtttggatacgctggaaaggatttgtcaaaggtacgctcaagagtgggctgcctgattgaggcaccgggtgtatatccaaacatgacggcgaaggaaaatatcgagatgaagtgtcgtctcttcggcatcagtaaaaagggctatgcagagtgcatacttgataaggtaggtctgttaaatgtgggaaagaaaaaaacaaagaatttctcacttggtatgaagcagaggcttggaatcggcatggcgctggttggagagc

SEQ ID NO: 26530 - DNA, 260 bp, Unknown
  Description of Unknown: RightRegion for integrase B531 sequence
gtttggatacgctggaaaggatttgtcaaaggtacgctcaagagtaggctgcctgattgaggcaccgggtgtatatccaaacatgacggcgaaggaaaatatcgagatgaagtgccgtctcttcggcatcagtaaaaagggctatgcagagggcatacttgataaggtaggtttgttaaatgtgggaaagaaaaaaacaaagaatttctcacttggtatgaagcagaggcttggaatcggcatggcgctggttggagagc

SEQ ID NO: 26531 - DNA, 260 bp, Unknown
  Description of Unknown: RightRegion for integrase B532 sequence
cattgtgttaaccagtataaaaggttttcaatagaattttctctctttgtaagattttaaactaacaaaagatgaaaaaagggcagaacctaccaaataaaattgccacggtgaagaacaagttcatcgtggcttttattataagatattctaatgcttaagtcaatattgcaaaaaataattgtctgaatttttcagaattgtttttttcggaatactaattggaatttttttgatacccccctgggtcttgttttcta

SEQ ID NO: 26532 - DNA, 260 bp, Unknown
  Description of Unknown: RightRegion for integrase B533 sequence
gtttggatacgctggaaaggatttgtcaaaggtacgctcaagagtgggctgtctgattgaggcaccgggtgtatatccaaacatgacggcgaaggaaaatatcgagatgaagtgccgtctcttcggcatcagtaaaaagggctatgcagagggcatactggataaggtaggtctgttaaatgtgggaaagaaaaagacaaagaatttttcacttggtatgaagcagaggcttggaatcggcatggcgctggttggagagc

SEQ ID NO: 26533 - DNA, 260 bp, Unknown
  Description of Unknown: RightRegion for integrase B534 sequence
ctggaattgcagtttttctacaaacccgccgagacagcaaaaagcccggaaaccttctgatttccgggcttttctgttacttcgacttttcgtcgtctttcatgtttccgataaacatagcatcgccgaaggaaaagaaccggtatcgctcctccaccgcctgccgataggcgttcagtatatgctcccgtccggccagcgccgaaacaagcatgatcagcgtggactccggcaggtgaaaattggtaataagcgcgtcc

SEQ ID NO: 26534 - DNA, 260 bp, Unknown
  Description of Unknown: RightRegion for integrase B535 sequence
atgtttgtagcccggctgttcagcagacagctgcatcatccccctcaatgtaccgcgtaagatcaaagttgccttttcgggcataatctttgtcaggctcaggagctgaactgctcctcttccatctacggtgcgctcagcgggggcgcaccgttcttctttcctccagctttttgatggcccacgcacccagccaaccgcaggcagtgcccagcaccgcgccgcccagaatatccgtcggaaagtggacgcagaggtac

SEQ ID NO: 26535 - DNA, 260 bp, Unknown
  Description of Unknown: RightRegion for integrase B536 sequence
gtttggatacgctggaaaggatttgtcaaaggtacgctcaagagtgggctgcctgattgaggcaccgggtgtatatccaaacatgacggcgaaggaaaatatcgagatgaagtgccgtctcttcggcatcagtaaaaagggctatgcagagggcatactggataaggtaggtctgttaaatgtgggaaagaaaaagacaaagaatttctcacttggtatgaagcagaggcttggaatcggcatggcgctggttggagagc

SEQ ID NO: 26536 - DNA, 260 bp, Unknown
  Description of Unknown: RightRegion for integrase B537 sequence
gtttggatacgctggaaaggatttgtcaaaggtacgctcaagagtgggctgcctgattgaggcaccgggtgtatatccaaacatgacggcgaaggaaaatatcgagatgaagtgccgtctcttcggcatcagtaaaaagggctatgcagagggcatactggataaggtaggtctgttaaatgtgggaaagaaaaaaacaaagaatttttcacttggtatgaagcagaggcttggaatcggcatggcgctggttggagagc

SEQ ID NO: 26537 - DNA, 260 bp, Unknown
  Description of Unknown: RightRegion for integrase B538 sequence
atgtttgcaggccggtttttcagcaggctgctgcatcatccccttcaatgtacggcgtaaggtcgaagttgaaggtaatgttgagctgataacccctcttctttgaagatctttctgatccgttctccaacaagggatgctagttcggctggttcagattcaggctgatctttcgcttttttcacagagaacacctcatttgcgggcaatcatcagatgccacgaaacgtaaaggtgaactccacgggcttggtcacatc

SEQ ID NO: 26538 - DNA, 260 bp, Unknown
  Description of Unknown: RightRegion for integrase B539 sequence
cattgtgtgaaccagtataaaagattttcaatagaattttctctctttgtaagattttaaactaacaaaagatgaaaaaagggcagaacctaccaaataaaattgccacggtgaagaacaagttcatcgtggctttgattataagctattctaatgtttaagtcaatattgcaagaaataattgtctgaatttttcagaattgtttttttcggaatactaattggaaattttttgataccccccctgggtctggttttct

SEQ ID NO: 26539 - DNA, 260 bp, Unknown
  Description of Unknown: RightRegion for integrase B540 sequence
gttcgccagcttcaaagcgcccaccagcagctcttcaaccgcctgatggcgctcgtttaaggagggatggccatgaataacgatcagcagattatggaaaacctgcttttgacgacaaagggcgtctgcgatttgtatctgcacggcgccatcgagtccgccacgccggacgtgcatcaggcgtttgacggcgcactgggcgaaagtctggacatgcagtcggatatctatgccgaaatgtccagccgcggctggtatca

SEQ ID NO: 26540 - DNA, 260 bp, Unknown
  Description of Unknown: RightRegion for integrase B541 sequence
gtttggatactctggaaaggatttgtcaaaggtacgctcaagagtgggctgcctgattgaggcaccgggtgtatatccaaacatgacggcgaaggaaaatatcgagatgaagtgccgtctcttcggcatcagtaaaaagggctatgcagagggcatacttgataaggtaggtctgttaaatgtgggaaagaaaaagacaaagaatttttcacttggtatgaagcagaggcttggaatcggcatggcgctggttggagagc

SEQ ID NO: 26541 - DNA, 260 bp, Unknown
  Description of Unknown: RightRegion for integrase B542 sequence
atgttttccgcccgttttttcagcaggctgttgtatcatccccttcaatgtacggcgtaaggtcgaagttgaaggtaatgttgagctgatacccacgataaacatctaccctgcggataagctgattgacgatcattttctttgcttcaaaactggcactgtcgtagagatcagaaaaagaaatcagttcttcgtacagttttgatacgttgtccatcagttcggcagttttttctgtttctgcataggaagattcataa

SEQ ID NO: 26542 - DNA, 260 bp, Unknown
  Description of Unknown: RightRegion for integrase B543 sequence
cattgtgtgaaccagtataaaagattttcaatagaattttctctctttgtaagattttaaactaacaaaagatgaaaaaagggcagaacctaccaaataaaattgccacggtgaagaacaagttcatcgtggctttgattataagctattctaatgtttaagtcaatattgcaagaaataattgtctgaatttttcagaattgtttttttcggaatactaattggaaattttttgatacccccccctgggtctggttttc

SEQ ID NO: 26543 - DNA, 260 bp, Unknown
  Description of Unknown: RightRegion for integrase B544 sequence
gatatgagacatatagggcattgtcgcaaaataacctttactgttcaaacgggcatatgatgacaaggaacagactcacatcaggtttgttcttttttatccgataatccaaaaaacactcgacaaaatcatccaaaaggtgtataatataaatactataaaacgaggggttgaaactatggcaaaatatgatgtacattttagctgcggacacacggagaccatacagttatttaaaaaagaaactgagcgaaaaagaa

SEQ ID NO: 26544 - DNA, 260 bp, Unknown
  Description of Unknown: RightRegion for integrase B545 sequence
gaaagttcgaccgagaagcgtttggtccgagtggcgagaatcgaactcacggcctcttgaaccccattgtgcttctatcgagaacacaatgtacgatccgatactgtctggactcagcatcgttaaattttaaatgcattataccattctgtttcattggatgtcaagacgtttcattccttttgtggtcaaattgtggtcaaacgaccctgacaaatgacctttctcccccggctaagttacatcgcgcaatttcgatt

SEQ ID NO: 26545 - DNA, 260 bp, Unknown
  Description of Unknown: RightRegion for integrase B546 sequence
gttcggatacaagggaaaggatttgcaaaaagttcgatcacggataggatgtctgattgaggcaccgggactttatggagatatgactgcatatgaaaatctgaatatcaaatgcaagctgtttggaataaagaaaaaaagttatattgaagaaatattgagaattatcggtctggaggatgtgggaaagaaaaaaacaaaacatttttcacttggaatgaaacagcgtttgggaattggtcttgctttggttggagaac

SEQ ID NO: 26546 - DNA, 260 bp, Unknown
  Description of Unknown: RightRegion for integrase B547 sequence
cattgtgtgaaccagtataaaagattttcaatagaattttctctctttgtaagattttaaactaacaaaagatgaaaaaggacagaacctaccaaataaaattgccaaggtgaagaacaagttcatcgtggcttttattataagatattctaatgtttaagtcaatattgcgagaaataattgtctgaattttttgaaattgttttttcggaatactaattggaaattttttgatacccccctgggtctggttttctact

SEQ ID NO: 26547 - DNA, 260 bp, Unknown
  Description of Unknown: RightRegion for integrase B548 sequence
gtttggatacgctggaaaggatttgtcaaaggtacgctcaagagtgggctgcctgattgaggcaccgggtgtatatccaaacatgacggcgaaggaaaatatcgagatgaagtgccgtctcttcggcatcagtaaaaagggatatgcagaggacatactggatagggtaggtctgttaaatgtgggaaagaaaaagacaaagaatttttcacttggtatgaagcaaaggcttggaatcggcatggcgctggttggagagc

SEQ ID NO: 26548 - DNA, 260 bp, Unknown; identical to SEQ ID NO: 26527
  Description of Unknown: RightRegion for integrase B549 sequence

SEQ ID NO: 26549 - DNA, 109 bp, Unknown
  Description of Unknown: RightRegion for integrase B550 sequence
caagaattaagactaattcaggtatcattggctatttttttcggcacaaccctgctataatgtttccacacaacaatgcgtctttaggagaacagagcaaatggaaagc

SEQ ID NO: 26550 - DNA, 109 bp, Unknown
  Description of Unknown: RightRegion for integrase B551 sequence
gcttcatcagttcatggcagcaaacaaagcttgatgctgctcacgtgcaccgctaaatgatgccttgaccccggcgcgcggtaagccgggcaagacagctgcctttaat

SEQ ID NO: 26551 - DNA, 254 bp, Unknown
  Description of Unknown: RightRegion for integrase B552 sequence
gtcttcaaaaacggtctgcgccaccggttcatttacaaagaaaatgcgccaaacggataagccgctggcgctcttttttcattttctaattgtgaactttttgtgaatttgcatgatttcttttgttttctgaaaataacagctttttactatctgtttttactattcagcagaatcttgtcatatacgataattcttacatatacttgtaaactactcagttgattttaggtcgtctgttatgaacatggcat

SEQ ID NO: 26552 - DNA, 260 bp, Unknown
  Description of Unknown: RightRegion for integrase B553 sequence
tatcggacagaccgtgaaaatgggatactatgcacaggaaatagcctcagaaaaaaatgaggatgcacaggagatcgatctgtcctatatggacccggcaaaacgggtgatcgattatgtaaaagatacggcagaatatattcggactgtggatggagtcatatccgcaacagtcttattggagcgttttttatttccaccggaaaaacagtacagtccgatcggaaagctgtccggtggagaaaagaaaagattaaatc

SEQ ID NO: 26553 - DNA, 260 bp, Unknown
  Description of Unknown: RightRegion for integrase B554 sequence
gttgccatcacgtttaagaacggactgactcacaaattcgcataccggctcctggaataattccggacaacaaaaaaactggtaaggacttttatgtccctaccagttttattatttttatacagccatgccattttcccagatttcctcacaagccaaatccagctcgtcattccatcctaccgcatatccaccaccgataacatttacgcttttgaacaactccgggttgtctcttatttcctggaataccggtatct

SEQ ID NO: 26554 - DNA, 260 bp, Unknown
  Description of Unknown: RightRegion for integrase B555 sequence
cctgtgatttccgagcctgttgttgcgaaatctacctctggacgcagaaaaacggcgtgaccattacggtcacaccgttctctgccccctcgcaaagctaaatagtaccttatcactattaagccttgaagttccagggtttttcatggttgcgggggatgaatttgaaccaccgacctccgggttatgagctgctaccggcagttcaatcctttgatttcaagtgctttccgacccttttcgttccagaaaactaccaa

SEQ ID NO: 26555 - DNA, 260 bp, Unknown
  Description of Unknown: RightRegion for integrase B556 sequence
ttttgtttttgcaacaacacactttataaccacttttgcccggatgcgggacaagggtgaatgatcggcacacagggcagcacacaagtaccatcgtaaatcggcataatgcccaattgtaagccccgctctgatggggtataatagcagcacaggaaggtggagcggatgaacaacgaagaattgattttgcagatgttgggcaaaatttcggacaagttagaggaacacgataagcactttgaatctattgacaatca

SEQ ID NO: 26556 - DNA, 260 bp, Unknown
  Description of Unknown: RightRegion for integrase B557 sequence
acggaagataggagccaggcaaatgagcatttgggacgcattcggcaaaggacggtataagggcttctcccgggaggcggggcagctgctggataaggcggtggagctggccggagggctgggctgcaaaaaggcagacaccggccacctgctgtgggcgatgctgcaagcggacggcggcccggcggctcgttttctggccgggaagaacatcacggagctggaagtgcggcgtcagctgtccgccgggcgggatggtt

SEQ ID NO: 26557 - DNA, 260 bp, Unknown
  Description of Unknown: RightRegion for integrase B558 sequence
cggattatcaaaattatcttcaaaaacggtgtttccatcacatttcaatacgcaaaataaaaaagtacccaatcatcatacgcgcgatgattgggtattgcctatttataatggtgctacttcttgatacattacgcattccccatgctcgtcagctcgtatcttctggtccgtatggaaggcagaatcgaaaagctgagtgccaatatcgacaccttaacccgtgtgctgcaggaaagacttgtaatgcaatttccata

SEQ ID NO: 26558 - DNA, 260 bp, Unknown
  Description of Unknown: RightRegion for integrase B559 sequence
cggattatcaaaattattttcaaaaacggtgtttccatcacattgcaatatgaaaaataaaaaaatacccaatcatcatacgtgcgatgattgggtattgcctgtttataagggtgctacttcttgatacactacgcattccccatgctcgtcagctcgtatcttctggtccgtatggaaggcagaatcgaaaagctgagtgccaatatcgacaccttaacccgtgtgctgcaggaaagacttgtgatgcaatttccata

SEQ ID NO: 26559 - DNA, 109 bp, Unknown
  Description of Unknown: RightRegion for integrase B560 sequence
cggattatcaaaattattttcaaaaacggtgtttccatcacattgcaatacgaaaaataaaaaagatacccaatcatcatacgtgcgatgattgggtattgcctgttta

SEQ ID NO: 26560 - DNA, 109 bp, Unknown
  Description of Unknown: RightRegion for integrase B561 sequence
cggattatcaaaattattttcaaaaacggtgtttccatcacattgcaatacgaaaaataaaaaaatacccaatcatcatacgtgcgatgattgggtattgcctgtttat

SEQ ID NO: 26561 - DNA, 260 bp, Unknown
  Description of Unknown: RightRegion for integrase B562 sequence
cggattatcaaaatcattttcaaaaatggtgttccgattacatttcaatatgcaaaataaaaaaagatacccagtcttaaagcgcattatgactgggtatcgcctgtttatatgtgtgctgcttcttgatgcattacgcattccccatgctcgtcagctcgtatcttctggtccgtatggaaggcagaattgaaaagctgagtgccaatatcgataccttaacccgcgttctgcaggaaagacttgtgatgcaatttcca

SEQ ID NO: 26562 - DNA, 260 bp, Unknown
  Description of Unknown: RightRegion for integrase B563 sequence
cggattatcaaaattattttcaaaaacggtgtttccatcacattgcaatacgaaaaataaaaaatacccaatcatcatacgtgcgatgattgggtattacctgtttataagggtgctactttttgatacactatggtttccccatgctcgtcagctcgtatcttctggtccgtatggaaggcagaatagaaaagctgagtgccaatatcgacaccttaacccgtgttctgcaggaaagacttgtgatgcaatttccatat

SEQ ID NO: 26563 - DNA, 109 bp, Unknown
  Description of Unknown: RightRegion for integrase B564 sequence
cgtgtcatgtcgatacgcttcagaaacggtattgagcacaattttttgtacaaaacatgacaagataaaaaacgccggaagcccttgatacattagggtttccggctta

SEQ ID NO: 26564 - DNA, 193 bp, Unknown
  Description of Unknown: RightRegion for integrase B565 sequence
cggattatcaaaattattttcaaaaacggtgtttccatcacattgcaatacgaaaaataaaaaaatacccaatcatcatacgtgcgatgattgggtattgcctgtttataagggtgctacttcttgatacactatgcgttccccatgctcgtcagctcgtatcttctggtccgtatggaaggcagaattgaaa

SEQ ID NO: 26565 - DNA, 260 bp, Unknown
  Description of Unknown: RightRegion for integrase B566 sequence
ctttgcgggatcaagttcgctttgtgcgaacttggtcgtccaccctatatggcgcattgagggctaatcgctgcgtacgtccgtacatggccggtacgcacgtacgcagaaaaaaaggaaagttctgacatataggggtgttctttcagctggtagtatggtatactcggctcaacaaatcggaagttaacggtatgtaaaagacctttgacacacggaaaacacagatgtcaatgtcctttgattgcgaaaatacaatc

SEQ ID NO: 26566 - DNA, 260 bp, Unknown
  Description of Unknown: RightRegion for integrase B567 sequence
cggattatcaaaattattttcaaaaacggtgtttccattacattgcaatacgaaaaataaaaaaatacccaatcatcatacgtgcgatgattgggtattgcctgtttataagggtgctacttcttgatacactatgcgttccccatgctcgtcagctcgtatcttctggtccgtatggaaggcagaatcgaaaagctgagtgccaatatcgacaccttaacccgcgtattgcaggaaagacttgtgatgcaatttccata

SEQ ID NO: 26567 - DNA, 260 bp, Unknown
  Description of Unknown: RightRegion for integrase B568 sequence
cggattatcaaaattattttcaaaaacggtgtttccatcacattgcaatacgaaaaataaaaaatacccaatcatcatacgtgcgatgattgggtattgcctgtttataagggtgctactttttgatacactatgcgttccctatgctcgtcagctcgtatcttctggtccgtatggaaggcagaattgaaaagctgagtgccaatatcgacactctaacccgcgtattgcaggaaagacttgtgatgcaatttccatat

SEQ ID NO: 26568 - DNA, 109 bp, Unknown; identical to SEQ ID NO: 26563
  Description of Unknown: RightRegion for integrase B569 sequence

SEQ ID NO: 26569 - DNA, 212 bp, Unknown
  Description of Unknown: RightRegion for integrase B570 sequence
cggattatcaaaattattttcaaaaacggtgtttccatcacattgcaatatgaaaaataaaaaaatacccaatcatcatacgtgcgatgattgggtattgcctgtttataagggtgctacttcttgatacactacgcattccccatgctcgtcagctcgtatcttctggtccgtatggaaggcagaattgaaaagctgagtgccaatatcga

SEQ ID NO: 26570 - DNA, 109 bp, Unknown; identical to SEQ ID NO: 26560
  Description of Unknown: RightRegion for integrase B571 sequence

SEQ ID NO: 26571 - DNA, 260 bp, Unknown
  Description of Unknown: RightRegion for integrase B572 sequence
tcgtttgtcagccagcgggctgaatcatcttacaggatgctgatgcggccggcaccgtaggggttctcgtagtccagcaggtagccggggtactctgccagcacactgttggcgctggaaaggtgcggcagaccctctgcgtccacaccgccaaaggtcatggcgtaggtggacatgacaaggtaatcttccgacacatagtccttgatgagctcggccccgtcaaacatggcaaagccatcgcccagattgcgcagggt

SEQ ID NO: 26572 - DNA, 109 bp, Unknown
  Description of Unknown: RightRegion for integrase B573 sequence
tggattaccacttcttattcttccaagttcaattgccattggagatataatttcatatgaaaatgaacaatctaaaactagagatggaagaaaggtaagatatactttt

SEQ ID NO: 26573 - DNA, 109 bp, Unknown; identical to SEQ ID NO: 26560
  Description of Unknown: RightRegion for integrase B574 sequence

SEQ ID NO: 26574 - DNA, 109 bp, Unknown; identical to SEQ ID NO: 26559
  Description of Unknown: RightRegion for integrase B575 sequence

SEQ ID NO: 26575 - DNA, 260 bp, Unknown
  Description of Unknown: RightRegion for integrase B576 sequence
agaattatcaaaattattttcaaaaacggtgtttccatcacattgcaatacgaaaaataaaaaaaatacccaatcatcatacgtgcgatgattgggtattgcctgtttataagggtgctacttcttgatacactatgcattccccatgctcgtcagctcgtatcttctggtccgtatggaaggcagaatcgaaaagctgagtgccaatatcgacaccctaacccgcgtactgcaggaaagacttgtgatgcaatttccat

SEQ ID NO: 26576 - DNA, 260 bp, Unknown
  Description of Unknown: RightRegion for integrase B577 sequence
cggattatcaaaatcattttcaaaaatggtgttccgattacatttcaatatgcaaaataaaaaaagatacccagtcttaaagcgcattatgactgggtatcgcctgtttatatgtgtgctgctttttgatgcattacgcattccccatgctcgtcagctcgtatcttctggtccgtatggaaggcagaattgaaaagctgagtgccaatatcgacaccctaacccgtgtgctgcaggaaagacttgtgatgcaatttcca

SEQ ID NO: 26577 - DNA, 260 bp, Unknown
  Description of Unknown: RightRegion for integrase B578 sequence
gagacagccaataaaaaagataaaaatgttgtcagcagattaggtttgcaatttctttaatagtaacaatacttgatatattaaatggatttttacatacagataaagaaaagataaaaatggtaaaaacatttaatgcaaataaaattcaagtattaactaaaattgtaattccatcaaatataccaacattttttaatacattaaaagtaaatatagggctttctttagtaggtgtaatttcaggagaatttctagtt

SEQ ID NO: 26578 - DNA, 109 bp, Unknown; identical to SEQ ID NO: 26563
  Description of Unknown: RightRegion for integrase B579 sequence

SEQ ID NO: 26579 - DNA, 260 bp, Unknown
  Description of Unknown: RightRegion for integrase B580 sequence
gatatacattggagctttgccccggaagccgccgaggttatcccggggcgctccgcataaaaaataaaggccgtccgtgcggggcggccttttcgcttaaattgctgaatcgctgaatttacgcgcacttttcgctgacttttcgcaaatcgcgcgaataacgcgattttgttgacgccgacaaaatcggcaggttatttgtctactctgatataactactgcaaacctccacatgacctgcccctattgcggaacaacc

SEQ ID NO: 26580 - DNA, 109 bp, Unknown
  Description of Unknown: RightRegion for integrase B581 sequence
cggattatcaaaattattttcaaaaacggtgtttccatcacattgcaatacgcaaaataaaaaagatacccaatcatcatacgcgcgatgattgggtattgcctgttta

SEQ ID NO: 26581 - DNA, 109 bp, Unknown
  Description of Unknown: RightRegion for integrase B582 sequence
cggattatcaaaattattttcaaaaacggtgtttccatcacattgcaatacgaaaaataaaaaaaatacccaatcatcatacgcgcgatgattgggtattgcctgttta

SEQ ID NO: 26582 - DNA, 260 bp, Unknown
  Description of Unknown: RightRegion for integrase B583 sequence
gggatcaaggtcgctttgtgcgaacttgatcgtccccctatatggcgcgtttgggggtaatcgctgcgtacgtgcgtaccgggagcctgtacacctctgacaatgtgtaacacactagactttgttccaaagtccgtgtgctaaggggcaggccccttagaattcctgtggagtgtgtacgcacgtacgcaggaaaacggcaaaatttcactatatcagggtgttctttcattggagagtatgatatactcggcttagtt

SEQ ID NO: 26583 - DNA, 260 bp, Unknown
  Description of Unknown: RightRegion for integrase B584 sequence
tttgatagggaaagtatgccgcagcaccatgtcccaatttgtattccaagacatgattaacaagcaaggtctcaccgaccaattttatattgattccgcggcaacaagccgcgaggaaatcggcaacggtccacattacggaacggtaaacaagatgcgggaagtagggattccggtacttccgcatcgcgctgtacagatgacaaaaaaagactatgagaaatatgattatctcataggaatggacgaagcgaacattc

SEQ ID NO: 26584 - DNA, 260 bp, Unknown
  Description of Unknown: RightRegion for integrase B585 sequence
cgatcaagaaacgcggcggcagtatctaagtcccagcccaacgccgccaaagcgctataaacatcaccggcgtatttaaccctcttgacgagagtgatctttctgtccggcagccgccgagcctcaaagcgccatttcttcgcatcgtcaccgatcttctggtgtagcctcgcctcggccaaaaacggcgtgtcctcacagatgtcaaactgccatacggccttctctctgttccagatgccatatttcgcgccgcgctt

SEQ ID NO: 26585 - DNA, 260 bp, Unknown
  Description of Unknown: RightRegion for integrase B586 sequence
cggattatcaaaattattttcaaaaacagtgtttccatcacattgcaatacgaaaaataaaaaaatacccaatcatcatacgtgcgatgattgggtattgcctgtttataagggtgctacttcttgatacactatgcgtttcccatgctcgtcagctcgtaccttctggtccgtatggaaggcagaatcgaaaagctgagtgctaatatcgaaagcctcactcatgtgctgcaagacagactcgtcatgcagttcccata

SEQ ID NO: 26586 - DNA, 109 bp, Unknown; identical to SEQ ID NO: 26563
  Description of Unknown: RightRegion for integrase B587 sequence

SEQ ID NO: 26587 - DNA, 193 bp, Unknown
  Description of Unknown: RightRegion for integrase B588 sequence
cggattatcaaaattattttcaaaaacggtgtttccatcacattgcaatacgaaaaataaaaaaatacccaatcatcatacgtgcgatgattgggtattgcctgtttataagggtgctacttcttgatacactatgcgttccccatgctcgtcagctcgtatcttctggtccgtatggaaggcagaatcgaaa

SEQ ID NO: 26588 - DNA, 260 bp, Unknown
  Description of Unknown: RightRegion for integrase B589 sequence
ggcattgatcgtgccgatggtcagcgtgcgataggcgatgagctggttcttcgtcgataaatagacggcgccaaactgctcttgcggcaaaaagcgcagattttccatgacatagccggcaatggcctggggcgtactgaagtcaggcgccgcttcctttacgtgctgccgggaaatacgccgtcccagctcgacggcggcacagaccgtgacggccttatccgtcccgatgccgggaatctgacagaggtcgccgatgc

SEQ ID NO: 26589 - DNA, 260 bp, Unknown
  Description of Unknown: RightRegion for integrase B590 sequence
cggattatcaaaattattttcaaaaacggtgtttccatcacattgcaatacgaaaaataaaaaatacccaatcatcatacgtgcgatgattgggtattgcctgtttataagggtgctactttttgatacactatgcgttccccatgctcgtcagctcgtatcttctggtccgtatggaaggcagaattgaaaagctgagtgccaatatcgacaccttaacccgtgttctgcaggaaagacttgtgatgcaatttccatat

SEQ ID NO: 26590 - DNA, 109 bp, Unknown
  Description of Unknown: RightRegion for integrase B591 sequence
cggattatcaaaatcattttcaagaatggtgtttccatcacattgcaatatgaaaaataaaaaaatacccaatcatcatatatgcgatgattgggtattgcctgtttat

SEQ ID NO: 26591 - DNA, 109 bp, Unknown
  Description of Unknown: RightRegion for integrase B592 sequence
cggattatcaaaattattttcaaaaacggtgtttccatcacattgcaatacgaaaaataaaaaaatacccaatcatcatacgtgagatgattgggtattgcctgtttat

SEQ ID NO: 26592 - DNA, 260 bp, Unknown
  Description of Unknown: RightRegion for integrase B593 sequence
cgtgtcatgtcgatacgcttcagaaacggtattgagcacaattttttgtacaaaacatgacaagataaaaaaagccggaagcccttgatacattagggtttccggcttaaatttttaatcgactacatcctgcttagaataagcatcgcatcgccaaaactgaaaaatctatatttttcccgaaaaacaattttatacgtattaatagtgttttcatatccgcagaaggcggagacgagcattataagcgtgctctcggg

SEQ ID NO: 26593 - DNA, 260 bp, Unknown
  Description of Unknown: RightRegion for integrase B594 sequence
ggactacttgtccgggtgaagaatggcctccagcccttcctcgatggcatcgtcatatagacgttcgtcctcgcggaaaatgtgctggtatgtggtcttgagcatgttgggcgtggcatgccccatacgcttggtgctgtacttgtccggtatcttcgcttccagcatgacggaggcgttcacatggcgcaggtcatggaaccgataatgcggaacacccgccttttcacagatacgggaaaagccgcaatatatcgcgt

SEQ ID NO: 26594 - DNA, 109 bp, Unknown
  Description of Unknown: RightRegion for integrase B595 sequence
cggattatcaaaattattttcaaaaacggtgtttccatcacattgcaatatgaaaaataaaaaaatacccaatcatcatacgtgcgatgattgggtattgcctgtttat

SEQ ID NO: 26595 - DNA, 260 bp, Unknown
  Description of Unknown: RightRegion for integrase B596 sequence
cctgacggcgctcgtttgctgggtttgtgcggggtacgcggaagaaacgcgggtcggtgatacggtcatgttcgggcaatatgaacaggatggaaatctggacaacggcagtgagcccattgcgtggcaggtgctggatgtgcagggcggcaaagcgctgctgatgagccgctatgcgctggactgcctgccgttccatgacgaaaaaaccgatgccgcgtggaatcaaagcgcgctgaatgcgtggcttcaggcggact

SEQ ID NO: 26596 - DNA, 109 bp, Unknown; identical to SEQ ID NO: 26591
  Description of Unknown: RightRegion for integrase B597 sequence

SEQ ID NO: 26597 - DNA, 260 bp, Unknown
  Description of Unknown: RightRegion for integrase B598 sequence
cgtgtgaccgaaattatattcgcgaatggtctttcccataaatttatataccgtgattaaaaatgcaacggaacgggcgacattatggaatacgaaaaataaaaatatcccaactttaggaattttcctattgttgggatattttaaaatcctttatttatgggcttttttacatcacggaaaccgcgttcatctgacatccgaatgttgtcacacaaaacgtcaatggtctttgcagttcatctgatatctgtttcaca

SEQ ID NO: 26598 - DNA, 260 bp, Unknown
  Description of Unknown: RightRegion for integrase B599 sequence
ccgcttctctggtctgaccagcgcaagctctatggctttgaagaaaggaaacaacaatgaacaataccaatcaatctgcccgctgccgttttgatgccgattttgctgtcagtgccagaattcggcaaatgcgtaatctgcttggacgctcgcaaatggatgttgccgcagccctcggactcacgtttcagcagctccaaaagtatgagaaagcgcaaaaccgaatatcagccggacggctccaccagcttgccgttgaa

SEQ ID NO: 26599 - DNA, 260 bp, Unknown
  Description of Unknown: RightRegion for integrase B600 sequence
cgtgtgtcctccatcgtgttccggaacggtctgacccataaattcaaatacaaatcgtgaccgacataaattccggtagcaaaaaccggcaggaacatttcgctcttgccggtttctttatcgctatacggttatgccattatcccacagttcctcacttgccagatccagtgtatcatcccacactaccccgtagccgcaacagcttacttccgctctgcagaacagttctggattgtctctcattttctcaaactccg

SEQ ID NO: 26600 - DNA, 260 bp, Unknown
  Description of Unknown: RightRegion for integrase B601 sequence
tgcgtgacggaaatcgtgttcgcgaatggtctttcccataaatttatataccgcgattaaaaatgcaacggaacgggcgttataaggtcccgcgctttcagtgtggattttgtgaagtggtacagaaacaagcggtttaattctcccacgacgcccggttcacattaaacccggccggaacttgtcaaacaacattacaacgccccgttgcaacccgtcagcatttacaagggcttcggaccttcacaatctcccgcggg

SEQ ID NO: 26601 - DNA, 260 bp, Unknown
  Description of Unknown: RightRegion for integrase B602 sequence
cgcgtgacggaaatcgtgttcgcgaatggtctttcccataaatttatataccgcgattaaaaatgcaacggaacgggcgttataaggtcccgcgctttcagtgtggattttgtgaagtggtacagaaacaagcggtttaattctcccacgacgcccggttcacattaaacccggccggaacttgtcaaacaacattacaacgccccgttgcaacccgtcagcatttacaagggcttcggaccttcacaatctcccgcggg

SEQ ID NO: 26602 - DNA, 109 bp, Unknown
  Description of Unknown: RightRegion for integrase B603 sequence
attactgctattacattcaaaaatgggctaactcatagattcatatacaaagacaagtaattggttctaaatgccaaaagccgggaaatcgctcccggctttctatgtt

SEQ ID NO: 26603 - DNA, 102 bp, Unknown
  Description of Unknown: RightRegion for integrase B604 sequence
cgtataacggaaatcgttttcgcgaatggtctttcgcataaatttgtatatcgtgattaaaaatgcaacggaacgggcgttataaggtcccgcactttcagt

SEQ ID NO: 26604 - DNA, 109 bp, Unknown
  Description of Unknown: RightRegion for integrase B605 sequence
attactgctattacattcaaaaatgggctaactcatagattcatatataaagacaagtaattggttctaaatgccaaaagccgggaaatcgctcccggctttctatgtt

SEQ ID NO: 26605 - DNA, 109 bp, Unknown; identical to SEQ ID NO: 26604
  Description of Unknown: RightRegion for integrase B606 sequence

SEQ ID NO: 26606 - DNA, 109 bp, Unknown
  Description of Unknown: RightRegion for integrase B607 sequence
attactgctattacattcaagaatgggctaactcatagattcatatataaagacaagtaattggttctaaatgccaaaagccgggaaatcactcccggctttctatgtt

SEQ ID NO: 26607 - DNA, 260 bp, Unknown
  Description of Unknown: RightRegion for integrase B608 sequence
cgtgtgtcctccatcgtgttccgcaacggtctgacccacaaattcaaatacaaatcgtgaccggcgtaaattccggcagtaaaaaaccggcaggaacatttcgctcttgccggtttctttatcgctatacggttatgccattatcccacagttcctcacttgccagatccagcgtatcatcccagactacgccgtagccgcaacagcctacttccgctctgcagaacagttctggattgtctctcattttctcaaactcc

SEQ ID NO: 26608 - DNA, 109 bp, Unknown; identical to SEQ ID NO: 26604
  Description of Unknown: RightRegion for integrase B609 sequence

SEQ ID NO: 26609 - DNA, 260 bp, Unknown
  Description of Unknown: RightRegion for integrase B610 sequence
cgcgtgacggaaatcgtgttcgcgaatggtctttcccataaatttatataccgtgattaaagatgcaacgaaacgggcgttataaggtcccgcgctttcagtgtggattttgtgaagtggtacagaaacaaacggtttaattctcccacgacgcccggttcacattaaacccggccggaacttgtcaaacaacattacaacgccccgttgcaacccgtcagcatttacaagggcttcggaccttcacaatctcccgcggg

SEQ ID NO: 26610 - DNA, 109 bp, Unknown; identical to SEQ ID NO: 26604
  Description of Unknown: RightRegion for integrase B611 sequence

SEQ ID NO: 26611 - DNA, 260 bp, Unknown
  Description of Unknown: RightRegion for integrase B612 sequence
cgtgtgtcctccatcgtgttccggaacggtctgacccacaaattcaaatacaaatcatgaccggcgtaaattccggcatcaaaaaaccggcaggaacatttcgctcttgccggtttctttatcgctatacggttatgccattatcccacagttcctcacttgccagatccagcgtatcatcccagactacgccgtagccgcaacagcttacttccgctctgcagaacagctctggattgtctctcattttctcaaactcc

SEQ ID NO: 26612 - DNA, 260 bp, Unknown; identical to SEQ ID NO: 26607
  Description of Unknown: RightRegion for integrase B613 sequence

SEQ ID NO: 26613 - DNA, 109 bp, Unknown; identical to SEQ ID NO: 26604
  Description of Unknown: RightRegion for integrase B614 sequence

SEQ ID NO: 26614 - DNA, 260 bp, Unknown
  Description of Unknown: RightRegion for integrase B615 sequence
cgtgtgtcctccatcgtgttccggaacggtctgacccacaaattcaaatacaaatcgtgaccggcgtaaattccggcagcaaaaaaccggcaggaacatttcgctcttgccggtttctttatcgctatacggttatgccattatcccacagttcctcacttgccagatccagcgtatcatcccagactacgccgtagccgcaacagcttacttccgctctgcagaacagttctggattgtctctcattttctcaaactcc

SEQ ID NO: 26615 - DNA, 260 bp, Unknown
  Description of Unknown: RightRegion for integrase B616 sequence
ggacgagggagtcatgaaattcccatccagatcaatatatgtttcttttcactgaattagaaaattcaaaatggaagaatagcctcgcgtcaagaacatatgctataatagaggagatagaatacgtctcgagagatcatgaaagcatggtctcttatttttatatctaaaaaaggaggaatgctcatgagtattacaccggagcagcttatcgaaaagtttcaatatgctctcgacaataattggggatacattcttgg

SEQ ID NO: 26616 - DNA, 260 bp, Unknown
  Description of Unknown: RightRegion for integrase B617 sequence
attactgctattacattcaaaaatgggctaactcatagattcatatataaagacaagtaattggttctaaatgccaaaagccgggaaatcgctcccggctttctatgttttatggtatctaacaaatgttagaaaacggtgtcatatcagaatcatggcatctccaaaagagaaaaatctgtacttttcctgcactgcagtctcataggcatgcatgatattctccttgcctgccagcgcagacaccaacatcacaagtg

SEQ ID NO: 26617 - DNA, 260 bp, Unknown
  Description of Unknown: RightRegion for integrase B618 sequence
tgcgtgacggaaatcgtgttcgcgaatggtctttcccataaatttatataccgcgattaaaaatgcaacggaacgggcgttataaggtcccgcgctttcagtgtggattttgtgaagtggtacagaaacaagcggtttaattctcccacgacgcccggttcgcattaaacccggccggaacttgtcaaacaacattacaacgccccgttgcaacccgtcagcatttacaagggcttcggaccttcacaatctcccgcggg

SEQ ID NO: 26618 - DNA, 260 bp, Unknown; identical to SEQ ID NO: 26611
  Description of Unknown: RightRegion for integrase B619 sequence

SEQ ID NO: 26619 - DNA, 260 bp, Unknown; identical to SEQ ID NO: 26600
  Description of Unknown: RightRegion for integrase B620 sequence

SEQ ID NO: 26620 - DNA, 260 bp, Unknown
  Description of Unknown: RightRegion for integrase B621 sequence
cgtgtgtcctccatcgtgttccggaacggtctgacccataaattcaaatacaaatcatgaccggcgtaaattccggcagcaaaaaaccggcgggaacatttcgctcttgccggtttctttattgctatacggttatgccattatcccacagttcctcacttgccagatccagcgtatcatcccagactacgccgtagccacaacagcttacttccgctctgcagaacagttctggattgtctctcattttctcaaactcc

SEQ ID NO: 26621 - DNA, 260 bp, Unknown
  Description of Unknown: RightRegion for integrase B622 sequence
cgcgtgacggaaatcgtgttcgcgaatggtctttcacataaatttatataccgtgattaaagatgcaacgaaacgggcgttataaggtcccgcgctttcagtgtggattttgtgaagtggtacagaaacaaacggtttaattctcccacgacgcccggttcacattaaacccggccggaacttgtcaaataacattacaacgccccgttgcaacccgtcagcatttataagggcttcggaccttcacaatctcccgcggg

SEQ ID NO: 26622 - DNA, 260 bp, Unknown; identical to SEQ ID NO: 26607
  Description of Unknown: RightRegion for integrase B623 sequence

SEQ ID NO: 26623 - DNA, 253 bp, Unknown
  Description of Unknown: RightRegion for integrase B624 sequence
attactgctattacattcaaaaatgggctaactcatagattcatatataaagacaagtaattggttctaaatgccaaaagccgggaaatcgctcccggcttttatgttttatggtatctaacaaatgttagaaaacggtgtcatatcagaatcatggcatctccaaaagagaaaaatctgtacttttcctgcactgcagtctcatagctgtctcttatacacatctccgagcccacgagaccgtactagatct

SEQ ID NO: 26624 - DNA, 260 bp, Unknown
  Description of Unknown: RightRegion for integrase B625 sequence
attactgctattacattcaaaaatgggctaactcatagattcatatataaagacaagtaattggttctaaatgccaaaagccgggaaatcgctcccggctttctatgttttatggtatctaacaaatgttagaaaacggtgtcatatcagaatcattgcatctccaaaagagaaaaatctatatctttcctgtactgccgtctcataggcacgcatgatattctccttgcctgccagtgcagataccagcatcagaagtg

SEQ ID NO: 26625 - DNA, 260 bp, Unknown
  Description of Unknown: RightRegion for integrase B626 sequence
aacaggattatcaaaattattttcaaaaacggtgttccgattacatttcaatatgcataatataaaaagatacccagtcataaaacgctttatgactgggtatcgcctgtttatatgtgtgctacttcttgatacactatgcattccccatgctcgtcagctcgtatcttctggtccgtatggaaggcagaatcgaaaagctgagtgccaatatcgacaccttaacccgtgtgctgcaggaaagacttgtgatgcaattt

SEQ ID NO: 26626 - DNA, 260 bp, Unknown
  Description of Unknown: RightRegion for integrase B627 sequence
gcgagtgcaaaagcggaaaactgcttatggcagataatgatgcacatatcgcagaggtagttgccggggaaaacaaagtatatgttgataccgggattttcccaacagcagaacgaaggcatatggcagacagggtacaaggaaacgaggcagagagggaaggtaaaaataattttgatgaccataccatatcggcaattataaaaagtgccgatatggtataatagaaaaacaaaagttattacagggaggagaatgga

SEQ ID NO: 26627 - DNA, 260 bp, Unknown; identical to SEQ ID NO: 26614
  Description of Unknown: RightRegion for integrase B628 sequence

SEQ ID NO: 26628 - DNA, 260 bp, Unknown
  Description of Unknown: RightRegion for integrase B629 sequence
cgtgtgtcctccatcgtgttccggaacggtctgacccacaaattcaaatacaaatcgtgaccggcgtaaattccggcagcaaaaaaaccggcaggaacatttcgctcttgccggtttctttatcgctatacggttatgccattatcccacagttcctcacttgccagatccagcgtatcatcccagactacgccgtagccgcaacagcttacttccgctctgcagaacagttctggattgtctctcattttctcaaactc

SEQ ID NO: 26629 - DNA, 260 bp, Unknown
  Description of Unknown: RightRegion for integrase B630 sequence
cgtgtgtcctccatcgtgttccggaacggtctgacccacaaattcaaatacaaatcgtgaccggcgtaaattccggcagcaaaaaaccggcaggaacatttcgatcttgccggtttctttatcgctatacggttatgccattatcccacagttcctcacttgccagatccagtgtatcatcccacactaccccgtaaccgcaacagcttacttccgctctgcagaacagttctggattgtttctcattttctcaaactcc

SEQ ID NO: 26630 - DNA, 260 bp, Unknown
  Description of Unknown: RightRegion for integrase B631 sequence
attactgctattacattcaaaaatgggctaactcatagattcatatacaaagacaagtaattggttctaaatgccaaaagccgggaaatcgctcccggctttctatgttttatggtatctaacaaatgttagaaaacggtgtcatatcagaatcatggcatctccaaaagagaaaaatctgtacttttcctgcactgcagtctcataggcatgcatgatattctccttgcctgccagcgcagacaccaacatcacaagtg

SEQ ID NO: 26631 - DNA, 260 bp, Unknown; identical to SEQ ID NO: 26611
  Description of Unknown: RightRegion for integrase B632 sequence

SEQ ID NO: 26632 - DNA, 260 bp, Unknown
  Description of Unknown: RightRegion for integrase B633 sequence
cgcgtgacggaaatcgtgttcgcgaatggtctttcacataaatttatataccgtgattaaagatgcaacgaaacgggcgttataaggtcccgcgctttcagtgtggattttgtgaagtggtacagaaacaaacggtttaattctcccacgacgcccggttcacattaaacccggccggaacttgtcaaacaacattacaacgccccgttgcaacccgtcagcatttacaagggcttcggaccttcacaatctcccgtggg

SEQ ID NO: 26633 - DNA, 260 bp, Unknown
  Description of Unknown: RightRegion for integrase B634 sequence
tgcgtgacggaaatcgtgttcgcgaatggtctttcccataaatttatataccgcgattaaaaatgcaacggaacgggcgttataaggtcccgcgctttcagtgtggattttgtgaagtggtacagaaacaagcggtttaattctcccacgacgcccggttcgcattaaacccggccggaacttgtcaaacagcattacaacgccccgttgcaacccgtcagcatttacaagggcttcggaccttcacaatctcccgcggg

SEQ ID NO: 26634 - DNA, 260 bp, Unknown
  Description of Unknown: RightRegion for integrase B635 sequence
ggacgagggagtcatgaaattcccatccagatcaatatatgtttcttttcactgaattagaaaattcaaaatggaagaaatagcctcgcgtcaagaacatatgctataatagaggagatagaatacgtctcgagagatcatgaaagcatggtctcttatttttatatctaaaaaaggaggaatgctcatgagtattacaccggagcagcttatcgaaaagtttcaatatgctctcgacaataattggggatacattcttg

SEQ ID NO: 26635 - DNA, 260 bp, Unknown
  Description of Unknown: RightRegion for integrase B636 sequence
attactgctattacattcaaaaatgggctaactcatagattcatatataaagacaagtaattggttctaaatgccaaaagccgggaaatcgctcccggctttctatgttttatggtatctaacaaatgttagaaaacggtgtcatatcaaaatcatggcatctccaaaagagaaaaatctgtacttttcctgcactgcagtctcataggcatgcatgatgttctccttgcctgccagcgcagacaccaacatcacaagtg

SEQ ID NO: 26636 - DNA, 260 bp, Unknown; identical to SEQ ID NO: 26597
  Description of Unknown: RightRegion for integrase B637 sequence

SEQ ID NO: 26637 - DNA, 260 bp, Unknown
  Description of Unknown: RightRegion for integrase B638 sequence
ggacgagggagtcatgaaattcccatccagatcaatatatgtttcttttcactgaattagaaaattcaaaatggaagaatcgcctcgcgtcaagaacatatgctataatagaggagatagaatacgtctcgagagatcatgaaagcatggtctcttatttttatatctaaaaaggaggaatgctcatgagtattacaccggagaagcttatcgaaaagtttcaatatgctctcgacaataattggggatacattcttgga

SEQ ID NO: 26638 - DNA, 260 bp, Unknown
  Description of Unknown: RightRegion for integrase B639 sequence
cgcgtgactgaaattgtattcgcgaatggtctttcccataaatttatataccgtgattaaagatgcagcggaacgggcgttataaggtcccgcgctttggcgtttgaaatcgacgacgcgtgaaagatcattcttgataaatctgatatccgaaattaaaaataagcgcatcaaacactttttttgtatttgatgcgcttattttttatagcagttctgcgtatgatatttctattgtgatgttgaattgattttccagt

SEQ ID NO: 26639 - DNA, 260 bp, Unknown
  Description of Unknown: RightRegion for integrase B640 sequence
cgcgtaacggaaatcgtgttcgcgaatggtctttcacataaatttatataccgtgattaaagatgcaacggaacgggcgacattatggaatatgaaaaatagaaaaatcccaactttaggaaatttcctattgttgggattttttagaagcctttatttacgggcttttttacatcacggaaaccgcgttcatctgacacccgaaggtctttaaaaacaaggttagtggtcttcccagttcttcggactttttcttgaca

SEQ ID NO: 26640 - DNA, 260 bp, Unknown
  Description of Unknown: RightRegion for integrase B641 sequence
cgcgtgacggaaattgtgttcgcgaatggtctttcacataaatttatataccgtgattaaagatgcaacgaaacgggcgttataaggtcccgcgctttcagtgtggattttgtgaagtggtacagaaacaaacggtttaattctcccacgacgcccggttcacattaaacccggccggaacttgtcaaacagcattacaacgccccgttgcaacccgtcagcatttacaagggcttcggaccttcacaatctcccgcggg

SEQ ID NO: 26641 - DNA, 109 bp, Unknown
  Description of Unknown: RightRegion for integrase B642 sequence
cgtgtgtcctccatcgtgttccggaacggtctgacccacaaattcaaatacaaatcgtgaccgacataaattccggtagcaaaaaccggcaggaacatttcgctcttgc

SEQ ID NO: 26642 - DNA, 260 bp, Unknown
  Description of Unknown: RightRegion for integrase B643 sequence
cgtgtgtcctccatcgtgttccggaacggtctgacccataaattcaaatacaaatcatgaccggcgtaaattccggcagcaaaaaaccggcaggaacatttcgctcttgccggtttctttatcgctatacggttatgccattatcccacagttcctcacttgccagatccagcgtatcatcccagactacgccgtagccgcaacagcttacttccgctctgcagaacagttctggattgtctctcattttctcaaactcc

SEQ ID NO: 26643 - DNA, 260 bp, Unknown
  Description of Unknown: RightRegion for integrase B644 sequence
cgcgtgacggaaatcgtgttcgcgaatggtctttcgcataaatttatataccgtgattaaagatgcaacgaaacgggcgttataaggtcccgcgctttcagtgtggattttgtgaagtggtacagaaacaaacggtttaattctcccacgacgcccggttcacattaaacccggccggaacttgtcaaacaacattacaacgccccgttgcaacccgtcagcatttacaagggcttcggaccttcacaatctcccgcggg

SEQ ID NO: 26644 - DNA, 260 bp, Unknown
  Description of Unknown: RightRegion for integrase B645 sequence
cgtgtgtcctccatcgtgttccggaacggtctgacccacaaattcaaatacaaatcgtgaccgacataaattccggtagcaaaaaccggcaggaacatttcgctcttgccggtttctttatcgctatacggttatgccattatcccacagttcctcacttgccagatccagtgtatcatcccacactaccccgtagccgcaacagcttacttccgctctgcagaacagttctggattgtctctcattttctcaaaccccg

SEQ ID NO: 26645 - DNA, 260 bp, Unknown
  Description of Unknown: RightRegion for integrase B646 sequence
cgtgtgtcctccatcgtgttccggaacggtctgacccacaaattcaaatacaaatcgtgaccggcgtaaattccggtagcaaaaaccggcaggaacatttcgctcttgccggtttctttatcgctatacggttatgccattatcccacagttcctcacttgccagatccagtgtatcatcccacactaccccgtagccgcaacagcttacttccgctctgcagaacagttctggattgtctctcattttctcaaactccg

SEQ ID NO: 26646 - DNA, 260 bp, Unknown
  Description of Unknown: RightRegion for integrase B647 sequence
cgcgtaacggaaatcgtgttcgcgaatggtctttcccataaatttatataccgcgattaaaaatgcaacggaacgggcgttataaggtcccgcactttcagtgtggattttgtgaagtggtacagaaacaagcggtttaattctcccacgacgcccggttcacattaaacccggccggaacttgtcaaacaacattacaacgccccgttgcaacccgtcagcatttacaagggcttcggaccttcacaatctcccgcggg

SEQ ID NO: 26647 - DNA, 260 bp, Unknown
  Description of Unknown: RightRegion for integrase B648 sequence
attactgctattacattcaaaaatgggctaactcatagattcatatataaagacaagtaattggttctaaatgccaaaagccgggaaatcgctcccggctttctatgttttatggtatctaacaaatgttagaaaacggtgtcatatcagaatcatggcatcccgcatgttaatggcaggtaaccagaatctaacatttgttaaatatatataaggaagcatttaatcttccttatattctataacatcctctatcttgc

SEQ ID NO: 26648 - DNA, 109 bp, Unknown; identical to SEQ ID NO: 26604
  Description of Unknown: RightRegion for integrase B649 sequence

SEQ ID NO: 26649 - DNA, 260 bp, Unknown
  Description of Unknown: RightRegion for integrase B650 sequence
agggcacatattgacgtcgcaaaagactattttgttgttgtgaccctatttggcaaataatggatatatgcttgctattttatagggttacccctataatagtaagcgtcaaccggataacccgagagggggtgaaagaaatgcaagattttttacgggatttggccgtcacaatccttggagtcatagctgcaaaggcgcttgatgaggggattgaggccataaaaagaaagacctctccacagcccggaaagcacgcg

SEQ ID NO: 26650 - DNA, 109 bp, Unknown
  Description of Unknown: RightRegion for integrase B651 sequence
cgtgtggagtatattgagtttcagagtgggttgaggcatacgtttatatataaggactgagatataaaacagcaccagccggagaattgcttccccggctggtgcttta

SEQ ID NO: 26651 - DNA, 109 bp, Unknown
  Description of Unknown: RightRegion for integrase B652 sequence
acctccgttctcttcaaaaatgggctcgaaatacgattctcttacaaacaggccgaataaagaaaaagcccagaaaccgcacagtttctgggcttttaagctacttcgt

SEQ ID NO: 26652 - DNA, 260 bp, Unknown
  Description of Unknown: RightRegion for integrase B653 sequence
cgtgtgtcctccatcgtgttccggaacggtctgacccacaaattcaaatacaaatcgtgaccggcgtaaattccggtagcaaaaaccggcaggaacatttcgctcttgccggtttctttatcgctatacggttatgccattatcccacagttcctcacttgccagatccagtgtatcatcccacactaccccgtagccgcaacagcttacttccgctctgcagaacagttctggattgtctctcattctctcaaactccg

SEQ ID NO: 26653 - DNA, 260 bp, Unknown
  Description of Unknown: RightRegion for integrase B654 sequence
cgcgtgacggaaatcgtgttcgcgaatggtctttcccataaatttatataccgtgattaaagatgcaacgaaacgggcgttataaggtcccgcgctttcagtgtggattttgtgaagtggtacagaaacaaacggtttaattctcccacgacgcccggttcacattaaacccggccggaacttgtcgaacaacattacaacgccccgttgcaacccgtcagcatttacaagggcttcggaccttcacaatctcccgcggg

SEQ ID NO: 26654 - DNA, 260 bp, Unknown
  Description of Unknown: RightRegion for integrase B655 sequence
attactgctattacattcaaaaatgggctaactcatagattcatatataaagacaagtaattggttctaaatgccaaaagccgggaaatcgctcccggctttctatgttttatggtatctaacaaatgttagaaaacggtgtcatatcagaatcatggcatctccaaaagagaaaaatctatatctttcctgtactgccgtctcataggcacgcatgatattctccttgcctgccagtgcagataccagcatcagaagtg

SEQ ID NO: 26655 - DNA, 260 bp, Unknown
  Description of Unknown: RightRegion for integrase B656 sequence
cgcgtgacggaaatcgtgttcgcgaatggtctttcccataaatttatataccgcgattaaaaatgcaacggaacgggcgttataaggtcccgcgctttcagtgtggattttgtgaagtggtacagaaacaagcggtttaattctcccacggcgcccggttcacattaaacccggccggaacttgtcaaacagcattacaacgccccgttgcaacccgtcagcatttacaagggcttcggaccttcacaatctcccgcggg

SEQ ID NO: 26656 - DNA, 260 bp, Unknown; identical to SEQ ID NO: 26629
  Description of Unknown: RightRegion for integrase B657 sequence

SEQ ID NO: 26657 - DNA, 260 bp, Unknown
  Description of Unknown: RightRegion for integrase B658 sequence
cgcgtgacggaaatcgtgttctcgaatggtctttctcataaatttatataccgcgattaaaaatgcaacggaacgggcgttataaggttccgcgctttcagtgtggattttgtgaagtggtacagaaacaagcggtttaattctcccacaacgcccggttcacattaaacccggccggaacttgtcaaacaacattacaacgccccgttgcaacccgtcagcatttacaagggcttcggaccttcacaatctcccgcggg

SEQ ID NO: 26658 - DNA, 260 bp, Unknown
  Description of Unknown: RightRegion for integrase B659 sequence
cgcgtgacggaaatcgtgttcgcgaatggtctttcccataaatttatataccgcgattaaaaatgcaacggaacgggcgttataaggtcccgcgctttcagtgtgtattttgtgaagtggtacagaaacaagcggtttaattctcccacgacgccctgttcacattaaacccggccggaacttgtcaaacaacattacaacgccccgttgcaacccgtcagcatttacaagggcttcggaccttcacaatctcccgcggg

SEQ ID NO: 26659 - DNA, 260 bp, Unknown
  Description of Unknown: RightRegion for integrase B660 sequence
cgtataatagaagtcgtgtttgcgaacggactttctcacaaattcatataccgtgaatgatgcatacaaaagcaaaaaaatcccaactttaggaaagttcctattgttgggattttttaagaatcctttatttacgggctttttcacatcggggaaatcgcattcatctgacaaccaaaggttgtgacactcgagattaatggtcggccgagttcttccgacattttctttacaagtgcacgtgccttctttatgaaata

SEQ ID NO: 26660 - DNA, 260 bp, Unknown; identical to SEQ ID NO: 26655
  Description of Unknown: RightRegion for integrase B661 sequence

SEQ ID NO: 26661 - DNA, 260 bp, Unknown
  Description of Unknown: RightRegion for integrase B662 sequence
cgcgtgacggaaattgtgttcgcgaatggtctttcccataaatttatataccgtgattaaaaatgcaacggaacgggcgttataagatcccgcgctttcagtgtggattttgtgaagtggtacagaaacaagcggtttaattctcccacgacgcccggttcacattaaacccggccggaacttgtcaaacaacattacaacgccccgttgcaacccgtcagcatttacaagggcttcggaccttcacaatctcccgcggg

SEQ ID NO: 26662 - DNA, 260 bp, Unknown
  Description of Unknown: RightRegion for integrase B663 sequence
cacaccgcccggcgggctttttcacgcaagccgaaaccaagctgcgtattttccgtctgaatgtgcaagacgctgtacctgggagcggcggcaagaattaagactaattcaggtatcattggctgtttttttctgcacaaccctgctataatgtttccacacaacaatgcgtctttaggagaacagagcaaatggcaagcacagaaccatcaatgaccgaacagcatacatgcagcgcggcggctctgccggagagagcc

SEQ ID NO: 26663 - DNA, 260 bp, Unknown; identical to SEQ ID NO: 26600
  Description of Unknown: RightRegion for integrase B664 sequence

SEQ ID NO: 26664 - DNA, 260 bp, Unknown
  Description of Unknown: RightRegion for integrase B665 sequence
cgcgtgacggaaatcgtgttcgcgaatggtctttcacataaatttatataccgtgattaaaaatgcaacgaaacgggcgttataaggtcccgcgctttcagtgtggattttgtgaagtggtacagaaacaaacggtttaattctcccacgacgcccggttcacattaaacccggccggaacttgtcaaacaacattacaacgccccgttgcaacccgtcagcatttacaagggcttcggaccttcacaatctcccgcggg

SEQ ID NO: 26665 - DNA, 260 bp, Unknown
  Description of Unknown: RightRegion for integrase B666 sequence
cgtgtgtcctccatcgtgttccggaacggtctgacccacaaattcaaatacaaatcgtgaccgacataaattccggtagcaaaaaccggcaggaacatttcgctcttgccggtttctttatcgctatacggttatgccattatcccacagttcctcacttgccagatccagtgtatcatcccacactaccccgtagccgcaacagcttacttccgctctgcagaacagttctggattgtctctcattttctcaaactccg

SEQ ID NO: 26666 - DNA, 109 bp, Unknown; identical to SEQ ID NO: 26604
  Description of Unknown: RightRegion for integrase B667 sequence

SEQ ID NO: 26667 - DNA, 260 bp, Unknown
  Description of Unknown: RightRegion for integrase B668 sequence
cacaccgcccggtgggctttttcgcgcaaggcgaaaccatgctgcgtattttccgtctgaatgtgcaggactctgtacctgggagcggtggcaagaattaagactaattcaagtatcattggctatttttttcggcataaccctgctataatgtttccacacaacaatgcgtctttaggagaacagagcaaatggcaagcacagaaccatcaatgaccgaacagcatgcatgcagcgcagcggctctgccggagggagcc

SEQ ID NO: 26668 - DNA, 212 bp, Unknown
  Description of Unknown: RightRegion for integrase B669 sequence
attactgctattacattcaaaaatgggctaactcatagattcatatataaagacaagtaattggttctaaatgccaaaagccgggaaatcgctcccggctttctgtgttttatggtatctaacaaatgttagaaaacggtgtcatatcagaatcatggcatctccaaaagagaaaaatctgtacttttcctgcactgcagtctcataggcat

SEQ ID NO: 26669 - DNA, 260 bp, Unknown
  Description of Unknown: RightRegion for integrase B670 sequence
cgcgtgacggaaatcgtgttcgcgaatggtctttcacataaatttatataccgtggttaaagatgcaacgaaacgggcgttataaggtcccgcgctttcagtgtggattttgtgaagtggtacagaaacaaacggtttaattctcccacgacgcccggttcacattaaacccggccggaacttgtcaaacaacattacaacgccccgttgcaacccgtcagcatttacaagggcttcggaccttcacaatctcccgcggg

SEQ ID NO: 26670 - DNA, 233 bp, Unknown
  Description of Unknown: RightRegion for integrase B671 sequence
attactgctattacattcaaaaatgggctaactcatagattcatatataaagacaagtaattggttctaaatgccaaaagccgggaaatcgctcccggctttctatgttttatggtatctaacaaatgttagaaaacggtgtcatatcagaatcatggcatctccaaaagagaaaaatctgtacttttcctgcactgcagtctcataggcatgcatgatattctccttgcctg

SEQ ID NO: 26671 - DNA, 260 bp, Unknown
  Description of Unknown: RightRegion for integrase B672 sequence
cgcgtggtggaaatcatgttcgcgaatggtctttcacataaatttatataccgtgattaaagatgcaacgaaacgggcgttataaggtcccgcgctttcagtgtggattttgtgaagtggtacagaaacaaacggtttaattctcccacgacgcccggttcacattaaacccggccggaacttgtcaaacaacattacaacgccccgttgcaacccgtcagcatttacaagggcttcggaccttcacaatctcccgcggg

SEQ ID NO: 26672 - DNA, 260 bp, Unknown
  Description of Unknown: RightRegion for integrase B673 sequence
tgttcgatgcccgactgttttgcaggcagacgtatcactccccctcaatgtaaggagtgagatcgaagttgaacgagatgttgatctgatacccacgataaacatctaccctgcggataagctgattgacaatcattttctttgcttcaaaactggcactgtcgtacaggtcagcataggaaatcagctcatcatacaagtgcctgtcgttatgcgatttttttcatcgttcagcatttcttcaaactgtgccatatatg

SEQ ID NO: 26673 - DNA, 260 bp, Unknown
  Description of Unknown: RightRegion for integrase B674 sequence
cgtgtgtcctccatcgtgttccggaacggtctgacccacaaattcaaatacaaatcgtgaccggcgtaaattccggcagcaaaaaaccggcaggaacatttcgctcttgccggtttctttatcgctatacggttatgccattatcccacagttcctcgcttgccagatccagcgtatcatcccagactacgccgtagccacaacagcttacttccgctctgcagaacagttctggattgtctctcattttctcaaactcc

SEQ ID NO: 26674 - DNA, 242 bp, Unknown
  Description of Unknown: RightRegion for integrase B675 sequence
attactgctattacattcaaaaatgggctaactcatagattcatatataaagacaagtaattggttctaaatgccaaaagccgggaaatcgctcccggctttctatgttttatggtatctaacaaatgttaggaaacggtgtcatatcagaatcatggcatctccaaaggagaagaaacgatatttctcctgcactgcagtctcataggcatgcatgatattctccttgcctgccagcgcag

SEQ ID NO: 26675 - DNA, 260 bp, Unknown
  Description of Unknown: RightRegion for integrase B676 sequence
ggcacaggcggagttgaggaaacatgggattggaaaaacggtatatacaaacttttctgaaaaacgagcaaggcaggtaacaaaagaagattacagatattatgattatctgctctgtgcagatgcaaacaacatcaaaaacaccatacgcatcacgggaccggatgtcgatggcaagataaaactgcttttggaccttgctacggatcccaaaagaaaaggaaaatccatttcagatccatggtattccggcaggtttg

SEQ ID NO: 26676 - DNA, 260 bp, Unknown
  Description of Unknown: RightRegion for integrase B677 sequence
cgcgtgacggaaatcgtgttcgcgaatggtctttcacataaatttatataccgtgattgaaaatgcaactatatgggcgttataaggtcccgcgctttcagtattgattttatgatgtggtacagaaacaagcggtttaattctcccacaacgcccggttcgcattaaacccggccgaaacttgtcaaacaacattacaacgccccgttgcaacccgtcagcatttataagggcttcggaccttcacaatcgcccgcggg

SEQ ID NO: 26677 - DNA, 260 bp, Unknown; identical to SEQ ID NO: 26655
  Description of Unknown: RightRegion for integrase B678 sequence

SEQ ID NO: 26678 - DNA, 260 bp, Unknown
  Description of Unknown: RightRegion for integrase B679 sequence
cgcgtgacggaaatcgtgttcgcgaatggtctttcccataaatttatataccgcgattaaaaatgcaacggaacgggcgttataagatcccgcgctttcagtgtggattttgtgaagtggtacagaaacaagcggtttaattctcccacgacgcccggttcacattaaacccggccggaacttgtcaaacaacattacaacgccccgttgcaacccgtcagcatttacaagggcttcggaccttcacaatctcccgcggg

SEQ ID NO: 26679 - DNA, 260 bp, Unknown; identical to SEQ ID NO: 26616
  Description of Unknown: RightRegion for integrase B680 sequence

SEQ ID NO: 26680 - DNA, 260 bp, Unknown
  Description of Unknown: RightRegion for integrase B681 sequence
ccgcttctctggtctgaccagcgcaagctctatggctttgaagaaaggaaacaacaatgaacaataccaatcaatctgcccgccgccgttttgatgccgattttgctgtcagtgccagaattcggcaaatgcgtaatctgcttggacgctcgcaaatggatgttgccgctgccctcggactcacgtttcagcaacttcaaaagtatgagaaagcgcaaaaccgaatatctgccggtcggctccaccagcttgccgttgaa

SEQ ID NO: 26681 - DNA, 109 bp, Unknown; identical to SEQ ID NO: 26606
  Description of Unknown: RightRegion for integrase B682 sequence

SEQ ID NO: 26682 - DNA, 260 bp, Unknown
  Description of Unknown: RightRegion for integrase B683 sequence
tttttttcgacaaattacgcatttggtgcttgcattcaaccattgcgtgaagtaaaataaaaaaagaataagcgtcattccgggcgggggcttatgctgtttttccattgcatggcctccgcccttacgttatattacattgctctatcccccaccttttatcggacggaggtttccgcatgaacaagcacctgtcacaggaagagaaaaatgcgctggcatcggaatttgcctatcatggtcaaaaatccggcatcatc

SEQ ID NO: 26683 - DNA, 238 bp, Unknown
  Description of Unknown: RightRegion for integrase B684 sequence
catgtaagctccattgtcttcaagaatggacttacgcacaaattcatctataaaaattgacaccgacataaatgtcaggcgcaaaaataaccaggaagcgtttatacctcctggttattctcatattcgctatattttcccttacccaacaaatgttagaaatagatgttaaatgataatcatcgcgtcgccgaaggagaaaaagcgatacttctggcgtactgcttcctcataagct

SEQ ID NO: 26684 - DNA, 260 bp, Unknown; identical to SEQ ID NO: 26682
  Description of Unknown: RightRegion for integrase B685 sequence

SEQ ID NO: 26685 - DNA, 260 bp, Unknown
  Description of Unknown: RightRegion for integrase B686 sequence
cgtataagttccattgtctttaaaaatggtcttacgcacaaattcatttataaaaattgacaccgacataaatgtcgggcacaaaaataaccaggaagtattcgtacctcctggttattcttatattttctgtgttttttctccatccaacaaatgttagaaatggatgttaaatgataagcatggcatccccaaaggagaaaaagcggtaacgttcttttactgcttcttcgtaagctgccatgatatattcttttcct

SEQ ID NO: 26686 - DNA, 260 bp, Unknown
  Description of Unknown: RightRegion for integrase B687 sequence
gtcaagtccattgtcttccgaaatggtcttgctgcaacatttgaatattccagtatataaaaacgcccgacaggtgtatgcctgccgggcgttttttgtggccgacataaatttcggtcagttacatttgtaagaatttggtctacaaaatgatcatcgcatccggcatgattctttttacaatcaaaaacttacttatataaggtaggttctcgatcaaaaaatatcggctcaatgccgatgcgcattaaaattccctg

SEQ ID NO: 26687 - DNA, 260 bp, Unknown
  Description of Unknown: RightRegion for integrase B688 sequence
gtcaagtccattgtcttccgaaatggtcttgctgcaacatttgaatattccagtatataaaaacacccggcaggcatacacctgtcgggtattttttgtggccgacatttatgacggtcagttacatttgtaagaatttggtctacaaaatgatcatcgcatccggcatgattctttttacaatcaaaaacttacttatataaggtaggttctcgatcaaaaaatatcggcttaatgccgatgcctattaaaaatccctg

SEQ ID NO: 26688 - DNA, 109 bp, Unknown
  Description of Unknown: RightRegion for integrase B689 sequence
ggttcttttgctgatggggaggggcacaccatcccttttccgggcagcctgcgtcggtgagctgcccggacagctctaattcaaaatgtacatcgttatatacacaagg

SEQ ID NO: 26689 - DNA, 260 bp, Unknown
  Description of Unknown: RightRegion for integrase B690 sequence
cgtataagttccattgtctttaaaaatggtcttacgcacaaattcatctataaaaattgacaccgacataaatgtcgggcacaaaaataaccaggaagtattcgtacctcctggttattcttatattttctgtgttttttctccatccaacaaatgttagaaatggatgttaaatgataagcatggcatcccggatatttatgaattgtaaccagaatccaacatttgttgggtatttatataggaagtaatttgatttt

SEQ ID NO: 26690 - DNA, 260 bp, Unknown
  Description of Unknown: RightRegion for integrase B691 sequence
ggtccttttgctgatgaggaggggcacaccatcccttttccgggcagcctgcgtcggtgagctgcccggacagctctaattcaaaatgtacatcgttatatacacaaggtatgtacggcgcaggctgccatcaaaaatccccgcaagtgattgcgtgagcgcttgaaaaagcacaaataaagcaaacgaaccgccccggtttccgcaatggaagccggggcggtttttgtgttgcaacgtacaggaaaagcagaaaatat

SEQ ID NO: 26691 - DNA, 260 bp, Unknown
  Description of Unknown: RightRegion for integrase B692 sequence
ataccgctgctctggtctgaccagcgtaagctctatggttttgaagaaaggaaacaataatgaacaataccaatcaatctgcccgccgccgttttgacgccgattttaccgtcggtgccagaattcgacaaatgcgtaatctgctcggacgctcacaaatggatgttgccgcagctctcggtctcacgtttcagcaacttcaaaagtatgagaaagcgcaaaaccgaatatcagccggacggctccaccagcttgccgtt

SEQ ID NO: 26692 - DNA, 260 bp, Unknown
  Description of Unknown: RightRegion for integrase B693 sequence
cttgtcatagaccgtaagccaataacaagatttggagggtatgattatgaagtacgatgaaagagcctgcaaattcaacatggacaccggatgtgtggaactgctgctccgggatgggtgcaagatctctatcgactgcaccggggtcgaggatgcgctggatattaccatggcgcagcagacagaactggactaccttatttacaacgacccacttggttatgcagatttgattctgaatggcaatccagaagaatact

SEQ ID NO: 26693 - DNA, 260 bp, Unknown
  Description of Unknown: RightRegion for integrase B694 sequence
ataccgctgctctggtctgaccagcgtaagctctatggttttgaagaaaggaaacaataatgaacaataccaatcaatctgcccgccgccgttttgatgccgattttaccgtcggtgccagaattcgacaaatgcgtaatctgctcggacgctcgcaaatggatgttgccagagctctcggactcacgtttcagcaacttcaaaagtatgagaaagcgcaaaaccgaatatcagccggacggcttcaccagcttgccgtt

SEQ ID NO: 26694 - DNA, 260 bp, Unknown
  Description of Unknown: RightRegion for integrase B695 sequence
cgtataagttccattgtctttaaaaatggtcttacgcacaaattcatctacaaaaattgacaccgacataaatgtcgggcacaaaaataaccaggaagtattcgtatctcctggttattcttacattttctgtgttttttctccatccaacaaatgttagaaattggtgttaaatgataagcatggcatcccggatatttatgaattgtaaccagaatccaacatttgtttggtatttatataggaaataatttgatttt

SEQ ID NO: 26695 - DNA, 260 bp, Unknown
  Description of Unknown: RightRegion for integrase B696 sequence
atgtggaatattatgaaaaagtatgggtatattaagaagatagatggagatagtaattaaacaaacaatccccagcccaccaattaaggcaagctggggtttataattaaaatttaggcagaaatcttagaccacctaccatttaccaaggcaaatctttgagccttatttgaagggatcataataaccttcttatagtagttaccgttatcggctgctgtagtagtcggacagtacttataatctatagtaccaaagtt

SEQ ID NO: 26696 - DNA, 260 bp, Unknown
  Description of Unknown: RightRegion for integrase B697 sequence
catgtaagctccatagtctttaagaatggccttacacacaaatttatctataaaaattgacaccgacataaatgtcgggcacaaaaataaccaggaagcgttcgtacctcctggttattcttatattttctgtgttttttctccatccaacaaatgttagaaatggatgttaaatgataagcatggcatccccaaaggagaaaaagcggtaacgttcttttactgcttcttcgtaagctgccatgatatattcttttcct

SEQ ID NO: 26697 - DNA, 260 bp, Unknown
  Description of Unknown: RightRegion for integrase B698 sequence
ggcacagtgacaaaaatcaccttcaaaaacaatatcgtacatacctttatctacaaataaaacccatgaaaaaaccctgattccgaccacagaatcagggtatattttttgcataaatttagcaaatatgcagttgcataacgcagaatctttataagccttgggttcgtattccgccataagaggtattttcaccttttttttgcagtttcctgacacgttttccaagcggcgaaaacccctgaaattaagcctttttc

SEQ ID NO: 26698 - DNA, 109 bp, Unknown
  Description of Unknown: RightRegion for integrase B699 sequence
catgtcagtgccattgtgtttaaaaatggtcttacacagaaattcatctacaaaaaataaagccaatataaatatcaaaaaataaccaggaagcattatacctcctggt

SEQ ID NO: 26699 - DNA, 260 bp, Unknown
  Description of Unknown: RightRegion for integrase B700 sequence
catgtaacctccatcgtctttaagaatggtcttacccacaaattcatctataaaaattgacaccggtatgaatgccgtacacaaaaataaccaggaagcttttatacctcctggttgttttttatgtcttctgtattttcttatacctaacaaatgttggaaaatggtgttattcgataaacatggcatcaccaaaactgaagaaacggtatctctccttcaccgcctcctcataggcagccataatatgctcttttcct

SEQ ID NO: 26700 - DNA, 109 bp, Unknown
  Description of Unknown: RightRegion for integrase B701 sequence
acctcaattctcttcaaaaacggcctcgaaatacaattttcctacaaatccacagaatgagaaaaaagccccgaaaccgcttggtttcagggcttttcagctacttctt

SEQ ID NO: 26701 - DNA, 138 bp, Unknown
  Description of Unknown: RightRegion for integrase B702 sequence
gtcatctttcgaaatggactctctcaaacctttatatacaaagaaaagccagggaaatagccccctggcttctttttcagtcctctttagacacccaacaaatgttagatttggagtctattcaattatcatggcatc

SEQ ID NO: 26702 - DNA, 260 bp, Unknown
  Description of Unknown: RightRegion for integrase B703 sequence
aacggaaaagttcagcggattgttttcagaaatggattatcacaaacatttgttcgataagtaaaagcaccagaattttagaactggtgcttttattttgtctgcattttgtcctctggactgtccacggacattatacggatattttacagacattccatagattttctacagactgtccatgcaaattacgttttattttttaaatcagcagcaatttgcactccctcaatatacctctgatagtctctttgatctcc

SEQ ID NO: 26703 - DNA, 260 bp, Unknown
  Description of Unknown: RightRegion for integrase B704 sequence
ttacaaccaacaccactgattacgttgacgccggtattaaactgcaatacacgccgatagtaagcagcgacggtatgataacatcagttgtgcatacggaagtcagtacccccacgcttatttccgaactgaaaaactacaaaataaccagccgcacagccgatactaccgtcaggatgcgcgacggagaaacgcttgtaataggcggtttaatcaatgaagaagaacaaaaacggctgcaaaaagtaccgtttttatca

SEQ ID NO: 26704 - DNA, 260 bp, Unknown
  Description of Unknown: RightRegion for integrase B705 sequence
attgaatacattgagttcaagagcggacttaggcatacattcatctataaagataaataattaatttacataccaaaacagccggagagcaattctccggctgttactctattcatacactttcgtgatatgaattacaggaattcgttatgaatgcctgtgtaaattatccaacatgaattttttctcttaaagcttcctggagtgtttgagaaaaattaatatttctttctaccgctgccgcattaagccacgcaggt

SEQ ID NO: 26705 - DNA, 260 bp, Unknown
  Description of Unknown: RightRegion for integrase B706 sequence
ttacaaccaacactaccgattacgttgacgccggtattaaactgcaatacacgccgatagtaagcagcgacggtatgataacctcggttgtgcatacggaagtcagtacccccacgcttatttccgaactaaaaaattacaaaataaccagccgcacagccgatactaccgtcaggatgcgcgacggtgaaactcttgtaataggcggtttaatcaatgaagaagaacaaaaacggctgcaaaaagtaccgttcttatca

SEQ ID NO: 26706 - DNA, 251 bp, Unknown
  Description of Unknown: RightRegion for integrase B707 sequence
cgtgtttcctccatcgtgtttagaaatggtcttactcatactttcatataccaaaaatgataccggcatgaatgtcgggaacaaaataacccagaagccgcatagctcctgggtttcattttatcccattattcaattatttttcagatgtgggattccttacttttgtaagaaaacggtgttattctataaacatggcatccccaaaactaaagaaacggtatttttcttctactgctttcttataggca

SEQ ID NO: 26707 - DNA, 260 bp, Unknown
  Description of Unknown: RightRegion for integrase B708 sequence
caagaaagaaaaacaaagtttgaaaaaaacaaatttactatattagaaattgaggtataaattagtacttcaatttttttaatttaaagaatataagggggttatataaatgaattatttttttaaatatctactaccacaattaatggagtattttaacaatgacaaagagactataaaggaattcttaccaaaagttattgaagaaaaatgttcaactttattgttggaaaatgacaaagaaattaataataaaaatg

SEQ ID NO: 26708 - DNA, 260 bp, Unknown
  Description of Unknown: RightRegion for integrase B709 sequence
cgtgtttcctccatcatattcaagaacggccttacccatacttttatatacaaaaaatgatgtcggtataactgcctggaataaaacaacccagaagcctcaacgctcctgggttttattttatcccattattcagttatttttcaggtatgggatttccttacaaaagtaagaaaacggtgttattcgataaacatcgcatccccaaagctaaagaaacgatatttctcctgcacggcaatttcatatgcgtttaacac

SEQ ID NO: 26709 - DNA, 260 bp, Unknown
  Description of Unknown: RightRegion for integrase B710 sequence
ttttcttgtttcgcagctgatttacggctgttcttgctagatggatttcctcactggtgaaaactgtttttttaccggccgagagagaatccactttcagtatcagctatctcgtttcacgccagtctgtgttcacagctctttgcaggtagtagtaatcacccaatgctttcagcaggataatcttgttggcgcgggtcagcttgatttttctcataatccaatcgcctttcccaacttttcctgcgccttgcgtttgt

SEQ ID NO: 26710 - DNA, 260 bp, Unknown
  Description of Unknown: RightRegion for integrase B711 sequence
gcaaagaccgcaggcttcaccgcccgtggcctttcggtcctgcaaatactcgtactgtaacaacaccctagcagaaatatcgcacttcctccccctaacgcaggtgggcaattgccctgaaacgatgtccgcctccgaaccgaaaagcgccccgattaacgttctctgttaaaatcaagaggtcgttccaaacgtagaatcaaacaaaccttgcaagtttatttgacttttactgtttcaaagaacagcaaaaagtccac

SEQ ID NO: 26711 - DNA, 260 bp, Unknown
  Description of Unknown: RightRegion for integrase B712 sequence
ttaggttctcaatcatcacttactcaaccgcttataatactgccggtactgctgcggtgaaagtcccgtggcgtccttaaatacacggcggaagtgtgctgttgtcaaaaagcctgtcttttcggagatgtccgagatgctctcgttggtcttttcaatcaggttttgcgcagccttgatccgcacgccgttgatatactcgatcaagctcaggttgatggactttttaaacagccggctcaggtagtacgggctgatgt

SEQ ID NO: 26712 - DNA, 260 bp, Unknown
  Description of Unknown: RightRegion for integrase B713 sequence
gtcatctttcgaaacgggctctctcaaacctttatatacaaagaaaagccagggaaataactccctggcttcttttttcagccctttttcaaaaccaacaaaagttagatttggagtctattcaattatcatggcatcgccgaaggagaaaaagcggtatttttctcttacagcctcttcataagctgccataatatgctcttttccagccagtgccgataccagcatcaccagtgtggactccggcagatggaaattgg

SEQ ID NO: 26713 - DNA, 260 bp, Unknown
  Description of Unknown: RightRegion for integrase B714 sequence
aatggaaaggttcagcggatcgtttttagaaacggactttctcaaacctttatcaggtaaataaaaagcaccagaaattttgaactggtgcttttattttgtcctcgtttggtcctctggactgtctgcggacattatatggatattttacggacattccatagattttatacggactgtccatgcaaattacattttattttttaggtcaatagcaatttgcactgcctgattgaacccctcaatataccactgatagt

SEQ ID NO: 26714 - DNA, 260 bp, Unknown
  Description of Unknown: RightRegion for integrase B715 sequence
aatggaaaggttcagcgaattgttttcagaaatggattgtctcaaacctttatcaggtaaataaaaagcaccagaaattttgaactggtgctttttattttgtctgcatagtgtccacggacattccataggacaaaatgcagatatttcacggacattccatagattttacacggactgtccaagcaaattacgttttattttttatgtcaatagcaatttgcactgcctgattgaacccctcaatatacccatgatag

SEQ ID NO: 26715 - DNA, 260 bp, Unknown
  Description of Unknown: RightRegion for integrase B716 sequence
cgtgtttcctccatcatctttaagaatggcctttcccatacttttgtataccagaattgacgttgagataaatgttgagaacaaaacaacccagaagcctcaaagctcctgggttttattttatcccattattcagttgtttttccggtatgggatttccttacaaaagtaagaaaacggtgttattcgataaacatggcatctccaaaggaaaagaaacgatatctttcctgtactgcttcttcatatgccgccaatac

SEQ ID NO: 26716 - DNA, 260 bp, Unknown
  Description of Unknown: RightRegion for integrase B717 sequence
aatggaaaggttcagcggatcgtttttagaaacggactttctcaaacctttatcaggtaaataaaaagcaccagaaattttgaactggtgcttttattttgtcctcgtttggtcctctggactgtctgcggacattatatggatattttacggacattccatagattttatacggactgtccatgcaaattacattttattttttaggtcaatagcaatttgcactgcctgattgaacccctctatatacccctgatagt

SEQ ID NO: 26717 - DNA, 260 bp, Unknown; identical to SEQ ID NO: 26709
  Description of Unknown: RightRegion for integrase B718 sequence

SEQ ID NO: 26718 - DNA, 260 bp, Unknown
  Description of Unknown: RightRegion for integrase B719 sequence
aatggaaaggttcagcgaattgttttcagaaatggattgtctcaaacctttatcaggtaaataaaaagcaccagaaattttgaactggtgctttttattttgtctgcatagtgtccacggacattccataggacaaaatgcagatatttcacggacattccatagattttacacggactgtccaagcaaattacgttttattttttatgtcaatagcaatttgcactgcctgattgaacccctctatatacccctgatag

SEQ ID NO: 26719 - DNA, 260 bp, Unknown
  Description of Unknown: RightRegion for integrase B720 sequence
aacggaaaggttcagcggatcgtttttagaaacggactttctcaaacctttatcaggtaaaaataaaagcaccagaatttttgaactggtgcttttattttgtctgcattttgtcctctggactgtccacggacattatacggatattttacggacgttccatagattttacacggactgtccaagcaaattacgttttattttttatgtcaatagcaatttgtaccgcctgattgggcccctcaatatacccctgatag

SEQ ID NO: 26720 - DNA, 260 bp, Unknown
  Description of Unknown: RightRegion for integrase B721 sequence
aatggaaaggttcagcgaattgttttcagaaatggattgtctcaaacctttatcaggtaaataaaaagcaccagaaattttgaactggtgctttttattttgtctgcatagtgtccacggacattccataggacaaaatgcagatatttcacggacattccatagattttacacggactgtccaagcaaattacgttttattttttatgtcaatagcaatttgcactgcctgtttgaacccctctatatacccctgatag

SEQ ID NO: 26721 - DNA, 260 bp, Unknown
  Description of Unknown: RightRegion for integrase B722 sequence
ttacaaccaacaccactgattacgttgacgccggtattaaactgcaatacacgccgatagttagcagcgacggtatgataacctcggttgtacatacggaagtcagtacccccacgcttatttccgaactgaaaaattacaaaataaccagccgaagtgccaccaccaccgtaagaatgcgcgacggagaaactcttgtaataggcggtttaatcaatgaagaagaacagaaacggctgcaaaaagtaccgttcttatca

SEQ ID NO: 26722 - DNA, 260 bp, Unknown
  Description of Unknown: RightRegion for integrase B723 sequence
gtcatctttcgaaatggactctctcaaacctttatatacaaagaaaagccagggaaatagccccctggcttctttttcagtcctctttagacacccaacaaatgttagatttggagtctattcaattatcatggcatcgccgaaggagaaaaagcggtatttttctcttacagcctcttcataagctgccataatatgctcttttccagccagtgccgataccagcatcaccagtgtggactccggcagatggaaattgg

SEQ ID NO: 26723 - DNA, 260 bp, Unknown
  Description of Unknown: RightRegion for integrase B724 sequence
ttacaaccaacactactgattacgttgacgccggtattaaactgcaatacacgccgatagtaagcagcgacggtatgataacatcggttgtacatacggaagtcagtacccccacacttatttccgaactgaaaaactacaaaataaccagccgaagtgccaccactaccgtcaggatgcgcgatggtgaaactcttgtaataggcggtttaatcaatgaagaagaacaaaaacgtctgcaaaaaataccgttcttatca

SEQ ID NO: 26724 - DNA, 260 bp, Unknown
  Description of Unknown: RightRegion for integrase B725 sequence
tcccatatcgcagacgaggtaaaagatgtgtgttcctatgttagtgacaatacacgttgagacagtggcgttaatttgccgtaaataagcgggtttccgggattgaaactgtaaagttcagtggatttgccacccatttgccacccacaaaattaaaataacgaattaataaggaaaacggttgaactctctgaaccaactagagttgctcaaccgttttttgtatttattgaactgcctgttcaaaaatatcaacagcg

SEQ ID NO: 26725 - DNA, 260 bp, Unknown
  Description of Unknown: RightRegion for integrase B726 sequence
ttacaaccaacaccactgattacgttgacgccggtattaaactgcaatacacgccgatagtaagcagcgacggtatgataacttcggttgtacatacggaagtcagtacccccacacttatttccgaactgaaaaactacaaaataaccagccgaagtgccactactaccgtaagaatgcgcaacggtgaaactcttgtaataggcggtttaattaatgaagaagaacaaaaacgtctgcaaaaagtaccgttcttatca

SEQ ID NO: 26726 - DNA, 260 bp, Unknown
  Description of Unknown: RightRegion for integrase B727 sequence
gtcatctttcgaaatggactctctcaaacctttatatacaaagaaaagccagggaaatagccccctggcttctttttcagtcctctttagacacccaacaaatgttagatttggagtctattcaattatcatggcatccccaaaggagaaaaagcggtatttttctctcacagcctcttcataagctgccataatatgctcttttccagccagtgccgataccagcatcaccagtgtggactccggcagatggaaattgg

SEQ ID NO: 26727 - DNA, 260 bp, Unknown
  Description of Unknown: RightRegion for integrase B728 sequence
aatggaaaggttcagaggatcgtttttagaaacggactttctcaaacctttatcaggtaaaaataaagcaccagaatttttgaactggtgcttttattttgtcctcgtttggtcctctggactgtctgcggacattatatggatattttacggacattccatagattttatacggactgtccatgcaaattacattttattttttaggtcaatagcaatttgcactgcctgattgaaccactcaatatacccctgatagt

SEQ ID NO: 26728 - DNA, 260 bp, Unknown
  Description of Unknown: RightRegion for integrase B729 sequence
attgctcaaatcagcttccaaaacggtatttcactaaaatttttgtatgcagctaaataaaacgaaaagaccgcaaaccattgaacttgcggtcttttctattacttttcgtcttcatcgtccgtcctgtctacaataagcattgcatcaccaaagctaaaaaatctgtacttctcttcaaccgctatcttataagcgttcatagtgttctcgtatcccataaatgcagaaacaagcattataagcgtgctttcaggcag

SEQ ID NO: 26729 - DNA, 109 bp, Unknown
  Description of Unknown: RightRegion for integrase B730 sequence
acctcgattttgctaaaaaacggcattgaactacgattttcatacaaaacatcagagtagcaaaaaagtccagaaacccgcatggtttctggactttttcattactttt

SEQ ID NO: 26730 - DNA, 109 bp, Unknown
  Description of Unknown: RightRegion for integrase B731 sequence
acctcaattttgctcaaaaacggcattgaactacgattttcgtacaaaaccgccgaataagaaaaaagtccagaaacccgcatggcttctggactttttcgttactttt

SEQ ID NO: 26731 - DNA, 260 bp, Unknown
  Description of Unknown: RightRegion for integrase B732 sequence
cgcgtggtggaaatcgtcttttccaatggcctctcccaccgcttcatataccgggaataaataacaaaagcccagtttcaggcatcatcctgttactgggctttcttaaaaaatcctttatttatgcgggtttggaacatctctcatttcaagttcatctgacatccgaatgtattgacgcagaacgtcatctttctgcctgtttctttctccatctgtgccaccagcatacgtgcctttgcgatgaaataatactgacg

SEQ ID NO: 26732 - DNA, 260 bp, Unknown
  Description of Unknown: RightRegion for integrase B733 sequence
acctcgattttgctcaaaaacggcattgaactacgattttcgtacaaaaccgcagaataagaaaaaagtccagaaacccgcatggcttctggactttttcattactttttatcttccgggtcgttcccgcctcgtataaacatcgcatcaccgaaactgaagaagcggtatttctcttccacggccaccttgtaggcatgcatggtcttgtcgtagccatacagtgcggcaatgagcatgatcaaggtgctctccggcag

SEQ ID NO: 26733 - DNA, 260 bp, Unknown
  Description of Unknown: RightRegion for integrase B734 sequence
acctcaattctcttcaaaaacggcctcgaaatacaattttcctacaaatccacagaatgagaaaaaagccccgaaaccgcttggtttcagggcttttcagctacttcttatcgtccagttctttcatgcttccaataaacatcgcatctccaaaggaaaaaaagcgatagcgttcccggaccgcttcctcataggccgctaaaatgggttcccgtccagccaatgcggaaaccagcataatgagggtggattccggcaga

SEQ ID NO: 26734 - DNA, 260 bp, Unknown
  Description of Unknown: RightRegion for integrase B735 sequence
cgcgtggtggaaatcgtcttttccaatggtctctcccaccgcttcatctaccgggaataaacaacaaaagcccagtttcaggcatcatcctgttactgggctttcttaaaaaatcctttatttatgcgggtttggaacatctctcatttcaagttcatctgacaaccgaatgtattgacgcagaacgtcatctttctgcctgtttctttctccatctgtgccaccagcatacgtgcctttgcgatgaaataatactgacg

SEQ ID NO: 26735 - DNA, 109 bp, Unknown
  Description of Unknown: RightRegion for integrase B736 sequence
acctcaattttgctcaaaaacggcattgaactacgattttcgtacaaaaccgccgaataagaaaaaagtccagaaacccgcatggcttctggactttttcattactttt

SEQ ID NO: 26736 - DNA, 260 bp, Unknown
  Description of Unknown: RightRegion for integrase B737 sequence
acctcaattttgctcaaaaacggcattgaactacgattttcgtacaaaaccgccgaataagaaaaaagtccagaaacccgcatggcttctggactttttcattactttttatcttccgggtcgttcccgcctcgtataaacatcgcatcgccaaaggagaagaaacggtacttctctgccacagctacctcataggcgtgcatggtcttttcgtagccgtacagggcggacaccaacatgatcagggtgctctccggcag

SEQ ID NO: 26737 - DNA, 260 bp, Unknown
  Description of Unknown: RightRegion for integrase B738 sequence
cgcgtggtggaaatcgtttttttcaacggtctctcccaccgtttcatataccgcgaataaacaacaaaagcccagcttcaggcatcatcctgttactgggctttcttaaaaaatcctttatttatgcgggtttggaacatctctcatttcaagttcatctgacaaccaaatgtattaacgcagaacgtcatctttctgcctgcttctttctccatctgcgtcaccagcgtacgtgcctttgcgatgaaataatactggcg

SEQ ID NO: 26738 - DNA, 260 bp, Unknown; identical to SEQ ID NO: 26714
  Description of Unknown: RightRegion for integrase B739 sequence

SEQ ID NO: 26739 - DNA, 260 bp, Unknown; identical to SEQ ID NO: 26718
  Description of Unknown: RightRegion for integrase B740 sequence

SEQ ID NO: 26740 - DNA, 109 bp, Unknown
  Description of Unknown: RightRegion for integrase B741 sequence
acctcgattttgctcaaaaacggcattgaactacgattttcgtacaaaaccgcagaataagaaaaaagtccagaaacccgcatggcttctggactttttcattactttt

SEQ ID NO: 26741 - DNA, 260 bp, Unknown
  Description of Unknown: RightRegion for integrase B742 sequence
acctcaattttgctcaaaaacggcattgaactacgattttcgtacaaaaccgccgaataagaaaaaagtccagaaacccgcatggcttctggactttttcgttactttttatcttccgggtcgttcccgcctcgtataaacatcgcatcgccaaagctgaagaaccgatatttctgctcgacagccaccttataggcggccatcgtcttttcgtagccgtacagcgccgacaccagcatgatgagggtgctttcgggcag

SEQ ID NO: 26742 - DNA, 109 bp, Unknown
  Description of Unknown: RightRegion for integrase B743 sequence
acctcaattttgctcaaaaacggcattgaactacgcttttcgtacaaaaccgccgaataagaaaaaagtccagaaacccgcatggcttctggactttttcatcactttt

SEQ ID NO: 26743 - DNA, 109 bp, Unknown
  Description of Unknown: RightRegion for integrase B744 sequence
acctcgattttgctcaaaaacggcattgaactacgattttcgtacaaaaccgccgaataagaaaaaagtccagaaacccgcatggcttctggactttttcatcactttt

SEQ ID NO: 26744 - DNA, 260 bp, Unknown
  Description of Unknown: RightRegion for integrase B745 sequence
tgcgattcagccagaactttttttgcacattgcccagtttcgcatgaaaactccagatgaaatcatcgatggacaaaatgtgtggtcatatagttgtccaaggcgctggagagtgcagtcaggtgtgatagccgctctgatgtaatgacaggcgttaaatagagaacgcccccctcgcgctgaaaagccggtatatgctgtcacattggtcaggagttttgacgaggcatatcgcacagtactacataatttttactctc

SEQ ID NO: 26745 - DNA, 260 bp, Unknown
  Description of Unknown: RightRegion for integrase B746 sequence
acctcaattttgctcaaaaacggcattgaactacgattttcgtacaaaaccgccgaataagaaaaaagtccagaaacccgcatagcttctggactttttcattactttttatctcccgggtcgttcccgcctcgtataaacatcgcatcgccaaagctgaagaaccgatatttctgatcgacagccaccttgtaggcggccatcgtcttttcgtagccatacagcgccgacaccagcatgatgagggtgctttcgggcag

SEQ ID NO: 26746 - DNA, 260 bp, Unknown
  Description of Unknown: RightRegion for integrase B747 sequence
acctcaattttgctcaaaaacggcattgaactacgcttttcgtacaaaaccgccgaataagaaaaaagtccagaaacccgcatggcttctggactttttcatcactttttatcttccgggtcgttcccgcctcgtataaacatcgcatcgccaaaactaaagaaacgatatttctcttctacggccactttataggccgccatggtcttttcgtagccgtacagcgcggacaccagcatgatgagggtgctctccggcag

SEQ ID NO: 26747 - DNA, 260 bp, Unknown
  Description of Unknown: RightRegion for integrase B748 sequence
acctcgattttgctcaaaaacggcattgaattacgattttcgtacaaaaccgcagaataagaaaaaagtccagaaacccgcatggcttctggactttttcattactttttatcttccgggtcgttcccgcctcgtataaacatcgcatcaccgaaactgaagaagcggtatttctcttccacggccaccttgtaggcatgcatggtcttgtcgtagccatacagtgcggcaatgagcatgatcaaggtgctctccggcag

SEQ ID NO: 26748 - DNA, 260 bp, Unknown
  Description of Unknown: RightRegion for integrase B749 sequence
acctcaattttgctcaaaaacggcattgaactacgattttcgtacaaaaccgccgaataagaaaaaagtccagaaacccgcatggcttctggactttttcgttactttttatcttccgggtcgttcccgcctcgtataaacatcgcatcgccaaagctgaagaaccgatatttctgctcgacagccaccttataggcggccatcgtcttttcgtagccatacagcgccgacaccagcatgatgagggtgctttcgggcag

SEQ ID NO: 26749 - DNA, 109 bp, Unknown
  Description of Unknown: RightRegion for integrase B750 sequence
acctcaattttgctcaaaaacggcattgaactacgattttcgtacaaaaccgccgaataagaaaaaagtccagaaacccgcatggcttctggactttttcgtcactttt

SEQ ID NO: 26750 - DNA, 260 bp, Unknown
  Description of Unknown: RightRegion for integrase B751 sequence
acctcaattttgctcaaaaacggcattgaactacgattttcgtacaaaaccgccgaataagaaaaaagtccagaaacccgcatggcttctggactttttcattactttttatcttccgggtcgttcccgcctcgtataaacatcgcatcgccaacgtgtcggaaacgtacagaatctctgcattctgcgatttcttttacgctgaaaaagtaaggtcgagtcgtcctatacattttactacgaaaaagtaatcctttcaa

SEQ ID NO: 26751 - DNA, 260 bp, Unknown
  Description of Unknown: RightRegion for integrase B752 sequence
acctcaattttgctcaaaaacggcattgaactacgcttttcgtacaaaaccgccgaataagaaaaaagtccagaaacccgcatggcttctggactttttcatcactttttatcttccgggtcgttcccgcctcgtataaacatcgcatccccaaaggagatacaggaatttttccagagggcggctgatttcttaatcaggcgggtagggaaagaaaatatcgtgtcggcggtggtacacatggacgagaaaacgcccca

SEQ ID NO: 26752 - DNA, 109 bp, Unknown; identical to SEQ ID NO: 26742
  Description of Unknown: RightRegion for integrase B753 sequence

SEQ ID NO: 26753 - DNA, 260 bp, Unknown
  Description of Unknown: RightRegion for integrase B754 sequence
aacggaaaggttcagcgaattgttttcagaaatggattatcgcaaacattcgttcgataagtaaaagcaccagaattttagaactggtgcttttttgtcctctggactgtccacggacattatacagacattccatagattttctacagactgtccatgcaaattacgttttatttttttggtcaatagcaatttgcaccgcctgattgaacccctcaatatacccctgatagtctctttgatctccatactcgcatatc

SEQ ID NO: 26754 - DNA, 260 bp, Unknown
  Description of Unknown: RightRegion for integrase B755 sequence
acctcgattttgctcaaaaacggcattgaactacgattttcgtacaaaaccgcagaatgagaaaaaagtccagaaacccgcatggcttctggactttttcattactttttatcttccgggtcgttcccgcctcgtataaacatcgcatcaccgaaactgaagaagcggtatttctcttccacggccaccttgtaggcatgcatggtcttgtcgtagccatacagtgcggcaatgagcatgatcaaggtgctctccggcag

SEQ ID NO: 26755 - DNA, 260 bp, Unknown
  Description of Unknown: RightRegion for integrase B756 sequence
acctcaattttgctcaaaaacggcattgagctacgattttcgtacaaaaccgccgaataagaaaaaagtccagaaacccgcatggcttctggactttttcatcactttttatcttccgggtcgttcccgcctcgtataaacatcgcatcgccaaaagagaagaatctataacgttcctccacagccaccttataggctgccatggtcttctcgtagccatacagggccgacaccagcatgataagggtgctttccggcag

SEQ ID NO: 26756 - DNA, 260 bp, Unknown
  Description of Unknown: RightRegion for integrase B757 sequence
tctttcattcaggcattctgtcagcttatctgcaaggctttgctttctggaagtgtctaaatgcccatagatattggcagtcgtttgaatgtcgctgtgtcccatccattcctgcacatctttcagaccgcagccgttgttcagcagcagactggcacagctatgacgaagctcatggaagcgaatgtgcggcattccgtaccgttcaagcatttttgaaaaatgatgcgtcacatagtccggagcaaatgtgcgcccat

SEQ ID NO: 26757 - DNA, 109 bp, Unknown
  Description of Unknown: RightRegion for integrase B758 sequence
acctcaattttgctcaaaaacggcattgaactacgattttcgtacaaaaccgccgaataagaaaaaagtccagaaacccgcatggattctggactttttcgttactttt

SEQ ID NO: 26758 - DNA, 109 bp, Unknown
  Description of Unknown: RightRegion for integrase B759 sequence
acctcaattttgctcaaaaacggcattgaactacgattttcgtacaaaactgccgaataagaaaaaagtccagaaacccgcatggcttctggactttttcattactttt

SEQ ID NO: 26759 - DNA, 260 bp, Unknown
  Description of Unknown: RightRegion for integrase B760 sequence
acctcaattttgctcaaaaacggcattgaactacgattttcgtacaaaactgccgaataagaaaaaagtccagaaacccgcatggcttctggactttttcattactttttatcttccgggtcgttcccgcctcgtataaacatcgcatcgccaaagctgaagaaacgatatttctgctcgacagccaccttgtaggcggccatcgtcttttcgtagccatacagcgccgacaccagcatgatgagggtactttcgggcag

SEQ ID NO: 26760 - DNA, 109 bp, Unknown; identical to SEQ ID NO: 26730
  Description of Unknown: RightRegion for integrase B761 sequence

SEQ ID NO: 26761 - DNA, 109 bp, Unknown; identical to SEQ ID NO: 26735
  Description of Unknown: RightRegion for integrase B762 sequence

SEQ ID NO: 26762 - DNA, 109 bp, Unknown; identical to SEQ ID NO: 26735
  Description of Unknown: RightRegion for integrase B763 sequence

SEQ ID NO: 26763 - DNA, 260 bp, Unknown
  Description of Unknown: RightRegion for integrase B764 sequence
acctcaattttgctcaaaaacggcattgaactacgattttcgtacaaaaccgccgaataagaaaaaagtccagaaacccgcatggcttctggactttttcgttactttttatcttccgggtcgttcccgcctcgtataaacatcgcatcgccaaaagagaagaatctataacgttcctccacagccaccttataggccgccatggtcttttcgtagccatacagcgccgacaccagcatgataagggtgctttccggcag

SEQ ID NO: 26764 - DNA, 260 bp, Unknown
  Description of Unknown: RightRegion for integrase B765 sequence
acctcaattttgctcaaaaacggcattgaactacgattttcgtacaaaaccgccgaataagaaaaaggtccagaaacccgcatggcttctggactttttcattactttttatcttccgggtcgttcccgcctcgtataaacatcgcatccccaaagctgaagaaccgatatttctgctcgacagccaccttgtaggcggccatcgtcttttcgtagccgtacagcgccgacaccagcatgatgagggtgctttcgggcag

SEQ ID NO: 26765 - DNA, 260 bp, Unknown
  Description of Unknown: RightRegion for integrase B766 sequence
acctcaattttgctcaaaaacggcattgaactacgattttcgtacaaaactgccgaataagaaaaaagtccagaaacccgcatggcttctggactttttcattactttttatcttccgggtcgttcccgcctcgtataaacatcgcatcgccaaagctgaagaaccgatatttctgctcgacagccaccttgtaggcagccatcgtcttttcgtagccatacagcgccgacaccagcatgatgagggtgctttcgggcag

SEQ ID NO: 26766 - DNA, 260 bp, Unknown
  Description of Unknown: RightRegion for integrase B767 sequence
acctcgattttgctcaaaaacggcattgaactacgattttcgtacaaaaccgcagaataagaaaaaggtccagaaacccgcatggcttctggactttttcattactttttatcttccgggtcgttcccgcctcgtataaacatcgcatcaccgaaactgaagaagcggtatttctcttccacggccaccttgtaggcatgcatggtcttgtcgtagccatacagtgcggcaataagcatgatcaaggtgctctccggcag

SEQ ID NO: 26767 - DNA, 260 bp, Unknown
  Description of Unknown: RightRegion for integrase B768 sequence
acctcaattttgctcaaaaacggcattgaactacgattttcgtacaaaaccgccgaataagaaaaaagtccagaaacccgcatggcttctggactttttcattactttttatcttccgggtcgttcccgcctcgtataaacatcgcatcgccaaaagagaagaatctataacgttcctccacagccaccttataggctgccatggtcttttcgtagccatacagggccgacaccagcatgataagggtgctttccggcag

SEQ ID NO: 26768 - DNA, 260 bp, Unknown
  Description of Unknown: RightRegion for integrase B769 sequence
acctcaattttgctcaaaaacggcattgaactacgcttttcgtacaaaaccgctgaataagaaaaaggtccagaaacccgcatggcttctggactttttcattactttttatcctccgggtcgttcccgcctcgtataaacatcgcatcgccaaagctgaagaaccgatatttctgctcgacagccaccttataggcggccatcgtcttttcgtagccgtacagcgccgacaccagcatgatgagggtgctttcgggcag

SEQ ID NO: 26769 - DNA, 260 bp, Unknown
  Description of Unknown: RightRegion for integrase B770 sequence
acctcaattttgctcaaaaacggcattgaactacgattttcgtacaaaactgccgaataagaaaaaagtccagaaacccgcatggcttctggactttttcattactttttatcttccgggtcgttcccgcctcgtataaacatcgcatccactaatctaaagaagaaaatctaaagcaaaataataaaactaactcccatgatttataagcacttgcctgcctgcaaaccatgggagttctctttatatcatcttaaaat

SEQ ID NO: 26770 - DNA, 109 bp, Unknown
  Description of Unknown: RightRegion for integrase B771 sequence
acctcaattttgctcaaaaacggcattgaactacgattttcgtacaaaaccgccgaataagaaaaaagtccagaaacccgcatggtttctggactttttcattactttt

SEQ ID NO: 26771 - DNA, 260 bp, Unknown; identical to SEQ ID NO: 26747
  Description of Unknown: RightRegion for integrase B772 sequence

SEQ ID NO: 26772 - DNA, 109 bp, Unknown
  Description of Unknown: RightRegion for integrase B773 sequence
agtaaagttacttcaattgttttcaagaacgggctcactcataactttatatacaaataacaaaaacagccgagggttatatattccttggctgttttcattttatatt

SEQ ID NO: 26773 - DNA, 260 bp, Unknown
  Description of Unknown: RightRegion for integrase B774 sequence
acctcaattttgctcaaaaacggcattgaactacggttttcgtacaaaaccgccgaataagaaaaaagtccagaaacccgcatggcttctggactttttcattactttttatcttccgggtcgttcccgcctcgtataaacatcgcatcgccaaaagagaagaatctataacgttcctccacagccaccttataggctgccatggtcttttcgtagccatacagggccgacaccagcatgataagggtgctttccggcag

SEQ ID NO: 26774 - DNA, 260 bp, Unknown
  Description of Unknown: RightRegion for integrase B775 sequence
gagaagttgataaaacaaaatgttgaagctaaaagaagaagaaagagcaagcccgaataaatttcgggcttttttatgttatgtaaggaaatatttttatctttgtggcgttcgggaaacatcgaacattcgttataagacatttaacgctgatttgtagttaaaaacagccaattttgaactatatgaatcaaagatgcgttgattgtctgcatctgtgtttatacgtatgtattagatataggtgcagacttactgca

SEQ ID NO: 26775 - DNA, 109 bp, Unknown
  Description of Unknown: RightRegion for integrase B776 sequence
acctcgattttgctcaaaaacggcattgaactacgattttcgtacaaaaccgccgaataagaaaaaagtccagaaacccgcatggcttctggactttttcattactttt

SEQ ID NO: 26776 - DNA, 260 bp, Unknown
  Description of Unknown: RightRegion for integrase B777 sequence
acctcaattttgctcaaaaacggcattgaactacgattttcgtacaaaaccgccgaataagaaaaaagtccagaaacccgcatggcttctggactttttcattactttttatcttccgtgtcgttcccgcctcgtataaacatcgcatcgccaaagctgaagaaccgatatttctgctcgacagccaccttataggcggccatcgtcttttcgtagccgtacagcgccgacaccagcatgatgagggtactttcgggcag

SEQ ID NO: 26777 - DNA, 109 bp, Unknown; identical to SEQ ID NO: 26729
  Description of Unknown: RightRegion for integrase B778 sequence

SEQ ID NO: 26778 - DNA, 260 bp, Unknown
  Description of Unknown: RightRegion for integrase B779 sequence
acctcaattttgctcaaaaacggcattgaactacgattttcgtacaaaactgccgaataagaaagaagtccagaaacccgcatggcttctggactttttcattactttttatcttccgggtcgttcccgcctcgtataaacatcgcatccccaaagctgaagaagcggtatttctcttccacagctaccttatacgcggccatggtcttctcatagccgtagaaggcggaaatgagcatgatgagggtgctttcgggcag

SEQ ID NO: 26779 - DNA, 260 bp, Unknown
  Description of Unknown: RightRegion for integrase B780 sequence
tacagtattatagattttgtaaattatctagatattgaggaaaacagaagatactactaacaaagaaagtcctgttggcataataaactggcaggactttttttgtcttgtaaactttacctatctttgcaccaacttctaaagttcaaggagttgaacctcttagaagggacatagttaattaagagcgtttgaaatattatcctattgtggaatctggacaattctatagtgcaaggataatagacagtaatcgctca

SEQ ID NO: 26780 - DNA, 109 bp, Unknown
  Description of Unknown: RightRegion for integrase B781 sequence
acctcaattttgctcaaaaacggcattgagctacgattttcgtacaaaaccaccgaataagaaaaaagtccagaaacccgcatggcttctggactttttcattactttt

SEQ ID NO: 26781 - DNA, 260 bp, Unknown
  Description of Unknown: RightRegion for integrase B782 sequence
cgcgtggtggaaatcgtcttttccaatggtctctcccaccgcttcatctaccgggaataaacaacaaaagcccagtttcaggcatcatcctgttactgggctttcttaaaaaatcctttatttatgcgggtttggaacatctctcatttcaagttcatctgacatccgaatgtattgacgcagaacgtcatctttctgcctgtttctttctccatctgtgccaccagcatacgtgcctttgcgatgaaataatactgacg

SEQ ID NO: 26782 - DNA, 260 bp, Unknown
  Description of Unknown: RightRegion for integrase B783 sequence
acctcaattttgctcaaaaacggcattgaactacgattttcgtacaaaactgccgaataagaaaaaagtccagaaacccgcatggcttctggactttttcattactttttatcttccgggtcgttcccgcctcgtataaacatcgcatcgccaaagctgaagaaccgatatttctgatcgacagccaccttgtaggcggccatcgtcttttcgtagccatacagcgccgacaccagcatgatgagggtgctttcgggcag

SEQ ID NO: 26783 - DNA, 260 bp, Unknown
  Description of Unknown: RightRegion for integrase B784 sequence
aacggaaaagttcagcggatcgttttcagaaatggactttctcaaacctttatcagataaaaataaagcaccagaatttttgaactggtgcttttattttgtcctctggactgtccaaggacattatacggatattttacagacattccatagattttctacagactgtccatgcaaattacattttattttttaaatcagcagcaatttgcactccctcaatatacctctgatagtctctttgatctccatactcgcat

SEQ ID NO: 26784 - DNA, 260 bp, Unknown
  Description of Unknown: RightRegion for integrase B785 sequence
acctcaattttgctcaaaaacggcattgaactacgattttcgtacaaaaccgccgaataagaaaaaagtccagaaacccgcatggcttctggactttttcattactttttatcttccgggtcgttcccgcctcgtataaacatcgcatcgccaaaagagaagaatctataacgttcctccacagccaccttataggctgccatggtcttttcgtagccatacagggccgacaccagcatgattagggtgctttccggcag

SEQ ID NO: 26785 - DNA, 109 bp, Unknown
  Description of Unknown: RightRegion for integrase B786 sequence
acctcaattttgctcaaaaacggcattgaactacggttttcgtacaaaaccgccgaataagaaaaaagtccagaaacccgcatggcttctggactttttcattactttt

SEQ ID NO: 26786 - DNA, 195 bp, Unknown
  Description of Unknown: RightRegion for integrase B787 sequence
acctcgattttgctcaaaaacggcattgaactacgattttcgtacaaaaccgccgaataagaaaaaagtccagaaacccgcatggcttctggactttttcattactttttatcttccgggtcgttcccgcctcgtataaacatcgcatcgccaaagctgaagaaccgatatttctgctcgacagccaccttatag

SEQ ID NO: 26787 - DNA, 195 bp, Unknown
  Description of Unknown: RightRegion for integrase B788 sequence
acctcaattttgctcaaaaacggcattgaactacgattttcgtacaaaaccgccgaataagaaaaaagtccagaaacccgcatggcttctggactttttcattactttttatcttccgggtcgttcccgcctcgtataaacatcgcatcgccaaaagagaagaatctataacgttcctccacagccaccttatag

SEQ ID NO: 26788 - DNA, 260 bp, Unknown
  Description of Unknown: RightRegion for integrase B789 sequence
acctcgattttgctcaaaaacggaatagaactacgattttcgtgcaaaactaccgaataagaaaaaagtccagaaacccgcatggcttctggactttttcattactttttatcttccgggtcgttcccgcctcgtataaacatcgcatcaccgaaactgaagaagcggtatttctcttccacggccaccttgtaggcatgcatggtcttgtcgtagccatacagtgcagcaatgagcatgatcaaggtgctctccggcag

SEQ ID NO: 26789 - DNA, 260 bp, Unknown
  Description of Unknown: RightRegion for integrase B790 sequence
cgcgtggtagaaatcgtcttttccaatggtctctcccaccgcttcatctaccgggaataaacaacaaaagcccagtttcaggcatcatcctgttactgggctttcttaaaaaatcctttatttatgcgggtttggaacatctctcatttcaagttcatctgacatccgaatgtattgacgcagaacgtcatctttctgcctgtttctttctccatctgtgccaccagcatacgtgcctttgcgatgaaataatactgacg

SEQ ID NO: 26790 - DNA, 260 bp, Unknown
  Description of Unknown: RightRegion for integrase B791 sequence
acctcaattttgctcaaaaacggcattgaactacgattttcgtacaaaaccgccgaataagaaaaaagtccagaaacccgcatggcttctggactttttcattactttttatcttccgggtcgttcccgcctcgtataaacatcgcatcgccgaaggaaaagaagcggtacttttcctctacggcaactttataggcagccatggtcttttcgtagccgtagagggcagagaccagcatgatgagggtgctttccggcag

SEQ ID NO: 26791 - DNA, 260 bp, Unknown
  Description of Unknown: RightRegion for integrase B792 sequence
agtaaagttacttcgattgttttcaagaacgggctcactcataactttatatacaaataacaaaaacagccgagggttatattccttggctgttttcattttgcatctatctaacatttgttagaaaatgatgttattcgatgaacatcgcatctccaaaagagaagaagcgatatctttccttcactgcctcctcatacgctgccataatatgctctttccctgccagtgcagatacaagcattaacaaagtagattct

SEQ ID NO: 26792 - DNA, 109 bp, Unknown
  Description of Unknown: RightRegion for integrase B793 sequence
ctcaagcccgcccatggcgggcttgatggggtttgcgcccaggtgagcgaggaagtctgattttcagacgcgcaaaccggggttcagattcccgataccgcgtccaaag

SEQ ID NO: 26793 - DNA, 260 bp, Unknown
  Description of Unknown: RightRegion for integrase B794 sequence
acctcgattttgctcaaaaacggcattgaactacgattttcgtacaaagccgcagaataagaaaaaagtccagaaacccgcatggcttctggactttttcattactttttatcttccgggtcgttcccgcctcgtataaacatcgcatcaccgaaactgaagaagcggtatttctcttccacggccaccttgtaggcatgcatggtcttgtcgtagccatacagtgcggcaatgagcatgatcaaggtactctccggcag

SEQ ID NO: 26794 - DNA, 260 bp, Unknown
  Description of Unknown: RightRegion for integrase B795 sequence
acctcaattttgctcaaaaacggcattgaactacgattttcgtacaaaactgccgaataagaaaaaagtccagaaacccgcatggcttctggactttttcattactttttatcttccgggtcgttcccgcctcgtataaacatcgcatcgccaaagctgaagaaccgatatttctgctcgacagccaccttataggcggccatcgtcttttcgtagccatacagcgccgacaccagcatgatgagggtgctttcgggcag

SEQ ID NO: 26795 - DNA, 260 bp, Unknown
  Description of Unknown: RightRegion for integrase B796 sequence
cgcgtagtagaaatcgtcttttccaacggtctctcccaccgcttcatatatcgcgaataaacaacaaaagcccagtttcaggcatcatcctgttactgggctttcttaaaaaatcctttatttatgcgggtttggaacatctctcatttcaagttcatctgacatccgaatgtattgacgcagaacgtcatctttctgcctgtttctttctccatctgtgccaccagcatacgtgcctttgcgatgaaataatactgacg

SEQ ID NO: 26796 - DNA, 109 bp, Unknown; identical to SEQ ID NO: 26740
  Description of Unknown: RightRegion for integrase B797 sequence

SEQ ID NO: 26797 - DNA, 195 bp, Unknown
  Description of Unknown: RightRegion for integrase B798 sequence
acctcaattttgctcaaaaacggcattgaactacgattttcgtacaaaaccgccgaataagaaaaaagtccagaaacccgcatggcttctggactttttcatcactttttattttccgggtcgttcccgcctcgtataaacatcgcatccccaaagctgaagaagcggtatttctcttccacagctaccttatac

SEQ ID NO: 26798 - DNA, 260 bp, Unknown
  Description of Unknown: RightRegion for integrase B799 sequence
acctcaattttgctcaaaaacggcattgaactacgattttcgtacaaaaccgccgaataagaaaaaagtccagaaacccgcatggcttctggactttttcattactttttatcttccgggtcgttcccgcctcgtataaacatcgcatcaccgaaactgaagaagcggtatttctcttccacggccaccttgtaggcatgcatggtcttgtcgtagccatacagtgcggcaatgagcatgatcaaggtgctctccggcag

SEQ ID NO: 26799 - DNA, 109 bp, Unknown; identical to SEQ ID NO: 26758
  Description of Unknown: RightRegion for integrase B800 sequence

SEQ ID NO: 26800 - DNA, 260 bp, Unknown
  Description of Unknown: RightRegion for integrase B801 sequence
cgcgtggtggaaatcgtcttttccaatggtctctcccaccgcttcatctaccgggaataaacaacaaaagcccagtttcaggcatcatcctgttactgggctttcttaaaaaatcctttatttatgcgggtttggaacatctctcatttcaagttcatctgacaaccaaaggtttcgacatgagagaaaagtggtctgcctaacttcgcggaaatttctgtgatatatttccgtgcctttgcaataaaataatactgtct

SEQ ID NO: 26801 - DNA, 260 bp, Unknown; identical to SEQ ID NO: 26732
  Description of Unknown: RightRegion for integrase B802 sequence

SEQ ID NO: 26802 - DNA, 109 bp, Unknown
  Description of Unknown: RightRegion for integrase B803 sequence
acctcaattttgctcaaaaacggcattgaactacgattttcgtacaaaaccgccgaataagaaaaaagtccagaaacccgcatagcttctggactttttcgttactttt

SEQ ID NO: 26803 - DNA, 260 bp, Unknown
  Description of Unknown: RightRegion for integrase B804 sequence
acctcaattttgctcaaaaacggcattgaactacgattttcgtacaaaactgccgaataagaaaaaagtccagaaacccgcatggcttctggactttttcattactttttatcttccgggtcgttcccgcctcgtataaacatcgcatcgccaaaagagaagaatctataacgttcctccacagccaccttataggctgccatggtcttttcgtagccatacagggccgacaccagcatgataagggtgctttccggcag

SEQ ID NO: 26804 - DNA, 260 bp, Unknown
  Description of Unknown: RightRegion for integrase B805 sequence
acctcaattttgctcaaaaacggcattgaactacgattttcgtacaaaaccgccgaataagaaaaaagtccagaaacccgcatggcttctggactttttcattactttttatcttccgggtcgttcccgcctcgtataaacatcgcatcgccaaagctgaagaaccgatatttctgctcgacagccaccttataggcggccatcgtcttttcgtagccatacagcgccgacaccagcatgatgagggtgctttcgggcag

SEQ ID NO: 26805 - DNA, 260 bp, Unknown
  Description of Unknown: RightRegion for integrase B806 sequence
cgcgtggtggaaatcgtcttttccaatggtctctcccaccgcttcatataccgcgaataaacaacaaaagcccagtttcaggcatcatcctgttactgggctttcttaaagaatcctttatttatgcgggtttggaacatctctcatttcaagttcatctgacaaccaaaggtattcacgcagaacgtcatctttctgcctgcttctttctccatttgagccaccaaagtccgagcctttgctataaaataatactgacg

SEQ ID NO: 26806 - DNA, 260 bp, Unknown; identical to SEQ ID NO: 26732
  Description of Unknown: RightRegion for integrase B807 sequence

SEQ ID NO: 26807 - DNA, 109 bp, Unknown; identical to SEQ ID NO: 26743
  Description of Unknown: RightRegion for integrase B808 sequence

SEQ ID NO: 26808 - DNA, 260 bp, Unknown
  Description of Unknown: RightRegion for integrase B809 sequence
cgcgtggtggaaatcgtcttttccaatggtctctcccaccgcttcatttaccgggaataaataacaaaagcccagtttcaggtgtcatcctgttactgggctttcttaaagaatcctttatttatgcgggtttggaacatctctcatttcaagttcatctgacaaccaaaggtattcacgcagaacgtcatctttctacctgcttctttctccatttgagccaccaaagtccgagcctttgctataaaataatactgacg

SEQ ID NO: 26809 - DNA, 109 bp, Unknown
  Description of Unknown: RightRegion for integrase B810 sequence
acctcgattttgctcagaaacggcattgaactacgattttcgtacaaaaccgcagaataagaaaaaagtccagaaacccgcatggcttctggactttttcattactttt

SEQ ID NO: 26810 - DNA, 109 bp, Unknown; identical to SEQ ID NO: 26735
  Description of Unknown: RightRegion for integrase B811 sequence

SEQ ID NO: 26811 - DNA, 260 bp, Unknown
  Description of Unknown: RightRegion for integrase B812 sequence
acctcgattttgctcaaaaacggcattgaactacgattttcgtacaaaactgcagaataagaaaaaagtccagaaatccgcatggcttctggactttttcattactttttatcttccgggtcgttcccgcctcgtataaacatcgcatcaccgaaactgaagaagcggtatttctcttccacggccaccttgtaggcatgcatggtcttgtcgtagccatacagtgcggcaatgagcatgatcaaggtgctctccggcag

SEQ ID NO: 26812 - DNA, 260 bp, Unknown; identical to SEQ ID NO: 26798
  Description of Unknown: RightRegion for integrase B813 sequence

SEQ ID NO: 26813 - DNA, 260 bp, Unknown
  Description of Unknown: RightRegion for integrase B814 sequence
acctcaattttgctcaaaaacggcattgaactacgattttcgtacaaaaccgccgaataagaaaaaagtccagaaacccgcatggcttctggactttttcattactttttatcttccgggtcgttcccgcctcgtataaacatcgcatcgccaaaggagaagaagcggtacttctctgccacggctacttcataggcgtgcatggtcttttcgtagccgtacagagcggacaccagcatgatcagggtgctctccggcag

SEQ ID NO: 26814 - DNA, 260 bp, Unknown
  Description of Unknown: RightRegion for integrase B815 sequence
acctcaattttgctcaaaaacggcattgaactacgattttcgtacaaaaccgccgaataagaaaaaagtccagaaacccgcatagcttctggactttttcattactttttatctcccgggtcgttcccgcctcgtataaacatcgcatcgccaaaagagaaaaatctataacgttcctccacagccaccttataggctgccatggtcttctcgtagccatacagggccgacaccagcatgataagggtgctttccggcag

SEQ ID NO: 26815 - DNA, 109 bp, Unknown
  Description of Unknown: RightRegion for integrase B816 sequence
acctcaattttgctcaaaaacggcattgaactacgcttttcgtacaaaaccgctgaataagaaaaaagtccagaaacccgcatggcttctggactttttcattactttt

SEQ ID NO: 26816 - DNA, 260 bp, Unknown
  Description of Unknown: RightRegion for integrase B817 sequence
acctcaattttgctcaaaaacggcattgaactacgattttcgtacaaaactgccgaataagaaaaaagtccagaaacccgcatggcttctggactttttcattactttttatcttccgggtcgttcccgcctcgtataaacatcgcatcaccgaaactgaagaagcggtatttctcttccacggccaccttgtaggcatgcatggtcttgtcgtagccatacagtgcggcaatgagcatgatcaaggtgctctccggcag

SEQ ID NO: 26817 - DNA, 109 bp, Unknown; identical to SEQ ID NO: 26730
  Description of Unknown: RightRegion for integrase B818 sequence

SEQ ID NO: 26818 - DNA, 109 bp, Unknown
  Description of Unknown: RightRegion for integrase B819 sequence
acctcgattttgctcaaaaacggcattgaactacgattttcgtacaaaactgcagaataagaaaaaagtccagaaacccgcatggcttctggactttttcattactttt

SEQ ID NO: 26819 - DNA, 258 bp, Unknown
  Description of Unknown: RightRegion for integrase B820 sequence
acctcaattttgctcaaaaacggcattgaactacgattttcgtacaaaaccgccgaataagaaaaaagtccagaaacccgcatagcttctggactttttcattactttttatctcccgggtcgttcccgcctcgtataaacatcgcatcgccaaaagagaagaagcggtacttttctgccacggctacctcataggcgtgcatagtcttttcgtagccgtacagagcggacaccagcatgatcagggtgctctccggc

SEQ ID NO: 26820 - DNA, 260 bp, Unknown; identical to SEQ ID NO: 26789
  Description of Unknown: RightRegion for integrase B821 sequence

SEQ ID NO: 26821 - DNA, 260 bp, Unknown
  Description of Unknown: RightRegion for integrase B822 sequence
acggaagataggagccaggcaaatgagcatttgggacgcattcggcaaaggacggtataagggcttctcccgggaggcggggcagctgctggataaggcggtggagctggccggagggctgggctgcaaaaaggcagacaccggccacctgctgtgggcgatgctgcaagcggacggcggcccggcggcccgctttctggccgggaagaacatctcggagctggaagtgcggcgtcagctgtccgccgggcgggatggtt

SEQ ID NO: 26822 - DNA, 109 bp, Unknown; identical to SEQ ID NO: 26735
  Description of Unknown: RightRegion for integrase B823 sequence

SEQ ID NO: 26823 - DNA, 260 bp, Unknown
  Description of Unknown: RightRegion for integrase B824 sequence
gaagtttttacgggtcacacgttcaagaagatgatcgagtcctacgagaagaacctgtaagcgtctgcgcagaaggaacttctctggaaaaaggaagagcggacggccgtccgctcttcctttttttcacaggatatgctataataccacgttacttacttgttctgatttccggcaaaagaaacggtccgggggagggattcgtatggaaaatatccatcagggacatcgtgaaaaaatgcggcagcgttttctgaaaa

SEQ ID NO: 26824 - DNA, 182 bp, Unknown
  Description of Unknown: RightRegion for integrase B825 sequence
acctcaattttgctcaaaaacggcattgaactacgcttttcgtacaaaaccgccgaataagaaaaaagtccagaaacccgcatggcttctggactttttcatcactttttatcttccgggtcgttcccgcctcgtataaacatcgcatcgccgaaggaaaagaagcggtacttttcctctac

SEQ ID NO: 26825 - DNA, 260 bp, Unknown
  Description of Unknown: RightRegion for integrase B826 sequence
acctcgattttgctcaaaaacggcattgaactacgattttcgtacaaaaccgccgaataagaataaagtccagaaacccgcatggcttctggactttttcgttactttttatcttccgggtcgttcccgcctcgtataaacatcgcatccccaaagctgaagaagcggtatttctcttccactgcgaccttatacgcggccatggtcttctcatagccgtagagggcggaaacgagcatgatgagggtgctttcgggcag

SEQ ID NO: 26826 - DNA, 260 bp, Unknown
  Description of Unknown: RightRegion for integrase B827 sequence
acctcgattttgctcaaaaacggcattgaactacgattttcgtacaaaaccgcagaataagaaaaaagtccagaaacccgcatggcttctggactttttcattactttttatcttccgggtcgttcccgcctcgtataaacatcgcatcaccgaaactgaagaagcggtatttctcttccacggccaccttgtaggcatgcatggtcttgtcgtagccatacagtgcagcaatgagcatgatcaaggtgctctccggcag

SEQ ID NO: 26827 - DNA, 260 bp, Unknown
  Description of Unknown: RightRegion for integrase B828 sequence
acctcgattttgctcaaaaacggcattgaactacgattttcgtacaaaaccgccgaataagaaaaaagtccagaaacccgcatggattctggactttttcatcactttttatcttccgggccgttcccgcctcgtataaacatcgcatcgccaacgtgtcggaaacgtacagaatctctacattctgcgatttcttttacgctgaaaaaataaggtcgagtcgtcctatacattttactacgaaaaagtaatcctttcaa

SEQ ID NO: 26828 - DNA, 260 bp, Unknown
  Description of Unknown: RightRegion for integrase B829 sequence
acggaagataggagccaggcaaatgagcatttgggacgcattcggcaaaggacggtataagggcttctcccgggaggcggggcagctgctggataaggcggtggagctggccggaggactgggctgcaaaaaggcagacaccggccacctgctgtgggcgatgctgcaagcggacggcggcccggcggcccgctttctggccgggaagaacatctcggagctggaagtgcggcgtcagctgtccgccgggcgggatggtt

SEQ ID NO: 26829 - DNA, 109 bp, Unknown
  Description of Unknown: RightRegion for integrase B830 sequence
acctcaattttgctcaaaaacggcattgaactacgattttcgtacaaaactgccgaataagaaaaaagtccagaaacccgcatggcttctggactttttcatcactttt

SEQ ID NO: 26830 - DNA, 260 bp, Unknown
  Description of Unknown: RightRegion for integrase B831 sequence
acctcaattttgctcaaaaacggcattgaactacgattttcgtacaaaaccgccgaataagaaaaaagtccagaaacccgcatggcttctggactttttcgttactttttatcttccgggtcgttcccgcctcgtataaacatcgcatcgccaacgtgtcggaaacgtacagaatctctacattctgcgatttcttttacgctgaaaaaataaggtcgagtcgtcctatacattctactacgaaaaagtaatcctttcaa

SEQ ID NO: 26831 - DNA, 260 bp, Unknown
  Description of Unknown: RightRegion for integrase B832 sequence
acctcaattttgctcaaaaacggcattgaactacgattttcgtacaaaaccgccgaataagaaaaaagtccagaaacccgcatggcttctggactttttcattactttttatcttccgggtcgttcccgcctcgtataaacatcgcatcgccaaagctgaagaaccgatatttctgctcgacagccaccttgtaggcggccatcgtcttttcgtagccatacagcgccgacaccagcatgatgagggtgctttcgggcag

SEQ ID NO: 26832 - DNA, 260 bp, Unknown; identical to SEQ ID NO: 26732
  Description of Unknown: RightRegion for integrase B833 sequence

SEQ ID NO: 26833 - DNA, 260 bp, Unknown
  Description of Unknown: RightRegion for integrase B834 sequence
acctcaattttgctcaaaaacggcattgaactacgattttcgtacaaaaccgccgaataagaaaaaagtccagaaacccgcatggcttctggactttttcgttactttttatcttccgggtcgttcccgcctcgtataaacatcgcatctcctatcggaaaaaagttcggattttgttgttgtggtgcacctccagggactcgaaccctgggcccactgattaagagagcaagccgccggttcgtctcaatttctggaag

SEQ ID NO: 26834 - DNA, 109 bp, Unknown
  Description of Unknown: RightRegion for integrase B835 sequence
acctcgattttgctcaaaaacggcattgaactacgattttcgtacaaaaccgccgaataagaaaaaagtccagaaacccgcatggattctggactttttcatcactttt

SEQ ID NO: 26835 - DNA, 260 bp, Unknown; identical to SEQ ID NO: 26747
  Description of Unknown: RightRegion for integrase B836 sequence

SEQ ID NO: 26836 - DNA, 260 bp, Unknown
  Description of Unknown: RightRegion for integrase B837 sequence
acctcaattttgctcaaaaacggcattgaactacgcttttcgtacaaaaccgctgaataagaaaaaagtccagaaacccgcatggcttctggactttttcattactttttatcttccgggtcgttcccgcctcgtataaacatcgcatcgccaaaagagaagaatctataacgttcctccacagccaccttataagcttccatggtcttttcgtagccatacagggccgacaccagcatgataagggtgctttccggcag

SEQ ID NO: 26837 - DNA, 109 bp, Unknown; identical to SEQ ID NO: 26740
  Description of Unknown: RightRegion for integrase B838 sequence

SEQ ID NO: 26838 - DNA, 260 bp, Unknown; identical to SEQ ID NO: 26747
  Description of Unknown: RightRegion for integrase B839 sequence

SEQ ID NO: 26839 - DNA, 260 bp, Unknown; identical to SEQ ID NO: 26781
  Description of Unknown: RightRegion for integrase B840 sequence

SEQ ID NO: 26840 - DNA, 109 bp, Unknown
  Description of Unknown: RightRegion for integrase B841 sequence
aaagaacctatcagaagccccgcgtcgcgcgcaagggtcgacggagagcaggaaacgtaaataatacgctcgggcaaagacgacaaaattgcggcgatgaccgagctat

SEQ ID NO: 26841 - DNA, 260 bp, Unknown; identical to SEQ ID NO: 26747
  Description of Unknown: RightRegion for integrase B842 sequence

SEQ ID NO: 26842 - DNA, 260 bp, Unknown; identical to SEQ ID NO: 26783
  Description of Unknown: RightRegion for integrase B843 sequence

SEQ ID NO: 26843 - DNA, 195 bp, Unknown
  Description of Unknown: RightRegion for integrase B844 sequence
acctcgattttgctcaaaaacggcattgaactacgattttcgtacaaaaccgcagaataaggaaaaagtccagaaacccgcatagcttctggactttttcattactttttatcttccgggtcgttcccgcctcgtataaacatcgcatcaccgaaactgaagaagcggtatttctcttccacggccaccttgtag

SEQ ID NO: 26844 - DNA, 260 bp, Unknown
  Description of Unknown: RightRegion for integrase B845 sequence
atcacattccgcaatggattgtctcacacgttcatctacagagaaaagccagaggtttaatcgcccctggctttcttcatatctccatattccgttgtatcgctattttgtagtgaatcgctctacaaaatcatcattgcatcccccatgtagagggcgtgccttcatttcactacttatgtaccgctactttgtagcttcttcttcctattataataaccgactttgcgccagttggcaagtcagtagtttacttttct

SEQ ID NO: 26845 - DNA, 109 bp, Unknown
  Description of Unknown: RightRegion for integrase B846 sequence
ttccgcaatggacttgcacatactttcttctacaaagacacagaaaaaccggaggcataaaacctccggtttctttcatcttttctagttacaaatgtacgatttgggt

SEQ ID NO: 26846 - DNA, 109 bp, Unknown
  Description of Unknown: RightRegion for integrase B847 sequence
atcacattccgcaacggattatctcacacattcatttacaaagaaaagccagaggtttaattgcccctggctttcttcatatctccatattctgttgtatcgctatttt

SEQ ID NO: 26847 - DNA, 149 bp, Unknown
  Description of Unknown: RightRegion for integrase B848 sequence
atcacattccgcaatggattgtctcacacgttcatctacagagaaaagccagaggtttaatcgcccctggctttcttcatatctccatattccgttgtatcgctattttgtagtgaatcgctctacaaaatcatcatcgcatccccaaa

SEQ ID NO: 26848 - DNA, 109 bp, Unknown
  Description of Unknown: RightRegion for integrase B849 sequence
atcacgttccgcaacggattgtctcacacgttcatctacaaagaaaagccagaggtttaatcgcccctggctttcttcatatctccatattccgttgtatcgctatttt

SEQ ID NO: 26849 - DNA, 260 bp, Unknown
  Description of Unknown: RightRegion for integrase B850 sequence
ttccgcaatggacttgcacatactttcttctacaaagacacagaaaaaccggaggcataaaacctccggtttctttcatcttttctagttacaaatgtacgatttgggtatcattctataaacatcgcatccccaaagctgaagaatcgatatctctctttaactgcttcttcatatgccgcaagcacatgctctcttccggcaagcgcacttaccagcatgatcagcgttgactccggtaaatggaagttcgtgatcag

SEQ ID NO: 26850 - DNA, 260 bp, Unknown
  Description of Unknown: RightRegion for integrase B851 sequence
atcacattccgcaatggattatctcacacgttcatttacaaagaaaagccagaggtttaatctcccctggctttcttcatatctccgtattctgttgtatcgctattttgtagtgaatcactctacaaaatcatcattgcatcccccatgtagagggcgtgccttcatttcactacttatgtaccgctactttgtagctccttcttcctattataataaccgactttacgccagttggcaagtcagtagtttacttttct

SEQ ID NO: 26851 - DNA, 260 bp, Unknown
  Description of Unknown: RightRegion for integrase B852 sequence
attacattccgcaacggattatctcatacgttcatctacaaagaaaagccagaggtttaatcacccctggctttcttcatatctccataatctgttgtatcgctattttgtagtgaatcactctacaaaatcatcatcgcatctccgaagctgaaaaaacgataccgttctttcactgcctcttcataggctgccatgacatgctcttttcccgccagtgcagataccagcatgatcagtgtagattccggcagatggaa

SEQ ID NO: 26852 - DNA, 260 bp, Unknown
  Description of Unknown: RightRegion for integrase B853 sequence
cacgccacggctccttccggacgttttccttccaccaatatgcttatcgttttgcattaatcttttaatgtttccaaaattttgttatgtttgcagaaaagatctatatgagaaagtatttcgaaatagactcaaaagagtttcctcccaaacttgtggatctggcttatgaagaggcgagggccgcactcaggaacgacttcgatgccatagccaagacccagcagcaggttcagacttttttgggatggtatctggct

SEQ ID NO: 26853 - DNA, 260 bp, Unknown
  Description of Unknown: RightRegion for integrase B854 sequence
ccgcggcacctttacgggcatgagacggaaattcgctatgattatcgcttagttatctaagtaaataaggggagcaggggcaaaatcaagtttaaaacagttctgattattcagacaacatggcagagaaaaatctctgtttttttgcgttttaggtagaattttcagacctaatatgctataattgttaaaaatatacaagtaaaaggggaggcactatgaaagacacaggagaagaaactaagaagtgtaaatactgt

SEQ ID NO: 26854 - DNA, 260 bp, Unknown
  Description of Unknown: RightRegion for integrase B855 sequence
ccgcggcacctttacgggcatgagacggaaattcgctatgattatcgcttagttatctaagtaaataaggggagcaggggcaaaatcaagtttaaaacagttctgattattcagacaacatggcagagaaaaatctctgtttttttgcgttttaggtagaattttcagacctaatatgctataattgttaaaaatgtacaagtaaaaggagaggcactatgaaagacacaggagaagaaactaagaagtgtaaatactgt

SEQ ID NO: 26855 - DNA, 109 bp, Unknown
  Description of Unknown: RightRegion for integrase B856 sequence
ttccgcaacgggcttgcacatactttttactacaaagacgcagaaaagccggaggcataaaacctccggttttctgttcttctatggttacaaatgtacgatttaggta

SEQ ID NO: 26856 - DNA, 109 bp, Unknown; identical to SEQ ID NO: 26848
  Description of Unknown: RightRegion for integrase B857 sequence

SEQ ID NO: 26857 - DNA, 260 bp, Unknown
  Description of Unknown: RightRegion for integrase B858 sequence
ccgcggcacctttacgggcatgagaccgaaattcgctatgattatcgcttagttatctaagtaaacaaggggagcaggggcaaaatcaagtttaaaacagttctgattattcagacaatggggcagagaaaaatctctgctttttttgcgtttaaaagtatgttttttaggggcgatgtgctataatgtatttagaaaatataagggggattattatggttgtattaattagtttgttaggatgcttgtcggtgatctgt

SEQ ID NO: 26858 - DNA, 109 bp, Unknown
  Description of Unknown: RightRegion for integrase B859 sequence
atcacattccgcaatggattatctcacacgttcatttacaaagaaaagccagaggtttaatcgcccctggctttcttcatatctccgtattctgttgtatcgctatttt

SEQ ID NO: 26859 - DNA, 260 bp, Unknown
  Description of Unknown: RightRegion for integrase B860 sequence
atcacattccgcaacggattatctcacacattcatttacaaagaaaagccagaggtttaattgcccctggctttcttcatatctccatattctgttgtatcgctattttgtagtgaatcgctctacaaaatcatcatggcatcaccaaagctgaaaaacctgtatctttcctctacagcctctttgtatgcattaaggacatgctctctgcctgctaatgctgacacaagcatgacaagtgtagactgtggcagatggaa

SEQ ID NO: 26860 - DNA, 109 bp, Unknown; identical to SEQ ID NO: 26848
  Description of Unknown: RightRegion for integrase B861 sequence

SEQ ID NO: 26861 - DNA, 260 bp, Unknown
  Description of Unknown: RightRegion for integrase B862 sequence
acctctgttttgttcaaaaatggtatagagctgcgattttgctacaaggcgcagcaataaaaaaacagcccagaaaaccgcatggcttctgggcttttctaatatttttgaatgttgttttacttcacgcttcggatgaacatcgcgtcgccgaaggaaaagaagcggtacttttcctctacggcaactttataggcagccatggtcttttcgtagccgtagagggcagagaccagcatgatgagggtgctttccggcag

SEQ ID NO: 26862 - DNA, 260 bp, Unknown; identical to SEQ ID NO: 26849
  Description of Unknown: RightRegion for integrase B863 sequence

SEQ ID NO: 26863 - DNA, 260 bp, Unknown
  Description of Unknown: RightRegion for integrase B864 sequence
cgcatcacagaaattacattccaaaatggacttacacacaagttcttgtaccgtgaataaatccataaatcaaaaaagaacacaagcttacttttacagttggcctgtgttctttttcattgtccgaattcgaaaagtgcagtgtttatgcgggtttaagccgtctcgagttcaggaaacatctgacagccaaaggtcaccgtgcacgcagtcagcggacgtcccagttcttctgctttctgtttcaggatggcacgggc

SEQ ID NO: 26864 - DNA, 260 bp, Unknown
  Description of Unknown: RightRegion for integrase B865 sequence
acctctgttttgttcaaaaatggtatagagctgcgattttgctacaaggcgcagcaataaaaaacagcccagaaaaccgcatggcttctgggcttttctaatatttttgaatgttgttttacttcacgcttcggatgaacatcgcgtcgccaaaactgaaaaagcggtacttctgttccacagcaaccttgtatgcagccatggtcttttcgtagccgtagagcgccgatatcagcatgatgagggtgctttcgggcagg

SEQ ID NO: 26865 - DNA, 109 bp, Unknown; identical to SEQ ID NO: 26858
  Description of Unknown: RightRegion for integrase B866 sequence

SEQ ID NO: 26866 - DNA, 260 bp, Unknown
  Description of Unknown: RightRegion for integrase B867 sequence
atcacattccgcaatggattgtctcacacgttcatctacagagaaaagccagaggtttaatcgcccctggctttcttcatatctccatattccgttgtatcgctattttgtagtgaatcgctctacaaaatcatcattgcatccccaaagctgaaaaacctgtatttttcctctacagcctctttgtatgcattgagtacatgctctctgcctgctaatgctgacacaagcatgacaagtgtagactgtggcagatggaa

SEQ ID NO: 26867 - DNA, 260 bp, Unknown; identical to SEQ ID NO: 26854
  Description of Unknown: RightRegion for integrase B868 sequence

SEQ ID NO: 26868 - DNA, 109 bp, Unknown
  Description of Unknown: RightRegion for integrase B869 sequence
ttccgcaatggacttgcgcacactttcttctacaaaggcgaagaaaaaccggaggcataaaacctccggtttctttcatcttttcttgttacaaatgtacgatttgggt

SEQ ID NO: 26869 - DNA, 260 bp, Unknown
  Description of Unknown: RightRegion for integrase B870 sequence
atcacattccgcaatggattgtctcacacgttcatctacagagaaaagccagaggtttaatcgcccctggctttcttcatatctccatattccgttgtatcgctattttgtagtgaatcgctctacaaaatcatcattgcatcccctatgtgtcgggttcgctttaatatctttcttttataagcatatttatcattttaccataggctgtcaagattaacaatcgttacatcataggtcattggaactatttgcactgt

SEQ ID NO: 26870 - DNA, 260 bp, Unknown
  Description of Unknown: RightRegion for integrase B871 sequence
atcacattccgcaatggattatctcacacgttcatttacaaagaaaagccagaggtttaatcgcccctggctttcttcacatctccgtattctgttgtatcgctattttgtagtgaatcactctacaaaatcatcattgcatcccgtatgattacgggtgtaccaccatttctaacatttgttagatttttactggttctcagaatgctcatatgtattctctccagtcatcattacggttccttttgattcttcgatgc

SEQ ID NO: 26871 - DNA, 260 bp, Unknown
  Description of Unknown: RightRegion for integrase B872 sequence
ccgaggcacctttacgggcatgagaccgaaattcgctatgattatcgcttagttatctaagtaaacaaggggagcaggggcaaaatcaagtttaaaacagttctgattattcagacaatggggcagagaaaaatctctgctttttttgcgtttaaaagtatgttttttaggggcgatgtgctatgatgtatttagaaaatataagggggattattatggttgtattaattagtttgttaggctgcttgtcggtgatctgt

SEQ ID NO: 26872 - DNA, 109 bp, Unknown
  Description of Unknown: RightRegion for integrase B873 sequence
atcacatttcgcaacggattatctcatacgttcatctacaaagaaaagccagaggtttaattgcccctggctttctctatatctccatattctgctgtatcgctatttt

SEQ ID NO: 26873 - DNA, 109 bp, Unknown; identical to SEQ ID NO: 26846
  Description of Unknown: RightRegion for integrase B874 sequence

SEQ ID NO: 26874 - DNA, 109 bp, Unknown; identical to SEQ ID NO: 26848
  Description of Unknown: RightRegion for integrase B875 sequence

SEQ ID NO: 26875 - DNA, 260 bp, Unknown
  Description of Unknown: RightRegion for integrase B876 sequence
atcacattccgcaacggattatctcacacattcatttacaaagaaaagccagaggtttaattgcccctggctttcttcatatctccatattctgttgtatcgctattttgtagtgaatcactctacaaaatcatcatggcatccccaaaactaaaaaacctgtaccgttcctgtactgccacttcatatgcatgcatgattttttctttccctgccagcgcagataccagcatcagtaacgtggactccggcagatggaa

SEQ ID NO: 26876 - DNA, 109 bp, Unknown
  Description of Unknown: RightRegion for integrase B877 sequence
atcgcattccgcaatggattatctcacacgttcatttacaaagaaaagccagaggtttaatcgcccctggctttcttcatatctccgtattctgttgtatcgctatttt

SEQ ID NO: 26877 - DNA, 260 bp, Unknown; identical to SEQ ID NO: 26541
  Description of Unknown: RightRegion for integrase B878 sequence

SEQ ID NO: 26878 - DNA, 260 bp, Unknown
  Description of Unknown: RightRegion for integrase B879 sequence
atcacattccgcaacggattatctcacacattcatttacaaagaaaagccagaggtttaattgcccctggctttcttcatatctccatattctgttgtatcgctattttgtagtgaatcgctctacaaaatcatcatggcatctccgaaggagaagaaacgatagcgttcttttacagcttcttcgtacgcagccataatgtactccttgccagccagtgcagacacaagcataagaagcgttgattccggaagatggaa

SEQ ID NO: 26879 - DNA, 260 bp, Unknown
  Description of Unknown: RightRegion for integrase B880 sequence
cgcatcacagaaattacatttcaaaatggacttacacacaagttcctgtaccgtgaataaattcataaatcaaaaaagaacacaagcttacttttacagttggcctgtgttctttttcattgtccgaattcgaaaagtgcagtgtttatgcgggtttaagccgtctcgagttcaggaaacatctgacagccaaaggtcaccgtgcacgcagtcagcggacgtcccagttcttctgctttctgtttcaggatggcacgggc

SEQ ID NO: 26880 - DNA, 260 bp, Unknown; identical to SEQ ID NO: 26851
  Description of Unknown: RightRegion for integrase B881 sequence

SEQ ID NO: 26881 - DNA, 109 bp, Unknown
  Description of Unknown: RightRegion for integrase B882 sequence
atcacattccgcaatggattatctcacacgttcatttacaaagaaaagccagaggtttaatcgcccctggctttcttcatatctccatattccgttgtatcgctatttt

SEQ ID NO: 26882 - DNA, 260 bp, Unknown
  Description of Unknown: RightRegion for integrase B883 sequence
ccgcggcacctttacgggcatgagaccgaaattcgctatgattatcgcttggttatctaagtaaacaaggggagcaggggcaaaatcaagtttaaaacagttctgattattcagacaattgggcagagaaaaatctctgctttttttgcgtttaaaagtatgttttttaggggcgatgtgctatgatgtatttagaaaatataagggggattattatggttgtattaattagtttgttaggatgcttgtcggtgatctgt

SEQ ID NO: 26883 - DNA, 260 bp, Unknown
  Description of Unknown: RightRegion for integrase B884 sequence
atcacattccgcaatggattatctcacacgttcatttacaaagaaaagccagaggtttaatcgcccctggctttcttcatatctccgtattctgttgtatcgctattttgtagtgaatcactctacaaaatcatcattgcatcgccgaaggagaaaaagcggtatttttctcttacagcctcttcataagctgccataatatgctcttttccagccagtgccgataccagcatcaccagtgtggactccggcagatggaa

SEQ ID NO: 26884 - DNA, 143 bp, Unknown
  Description of Unknown: RightRegion for integrase B885 sequence
atcacattccgcaatggattatctcacacgttcatttacaaagaaaagccagaggtttaatcgcccctggctttcttcatatctccgtattctgttgtatcgctattttgtagtgaatcactctacaaaatcatcattgcatc

SEQ ID NO: 26885 - DNA, 260 bp, Unknown
  Description of Unknown: RightRegion for integrase B886 sequence
ttacgcagctttccgggacacaaagagcccgtaaaatacacatatttctttgctttttgattaattactaaagagtaaattttaaggagcgaaaccgcagtaataatgattgaggaacgaagcatgaaagcattaggagatagtcataccgcatatgatgtaatgagagaatacatgattataggagcagaactggacggaaaatatcagataccgatgttagatagatatacagggcatccgggagaagatacggttga

SEQ ID NO: 26886 - DNA, 260 bp, Unknown
  Description of Unknown: RightRegion for integrase B887 sequence
atcacattccgcaacggattatctcacacattcatttacaaagaaaagccagaggtttaattgcccctggctttcttcatatctccatattctgttgtatcgctattttgtagtgaatcgctctacaaaatcatcatggcatccccgaacctttaggaatgtagtcgaaatgttacatttgtcagtatatcatatatataggaagtaatccagttctttttttctgtactattcctcataaataaatccgttgtctgtaa

SEQ ID NO: 26887 - DNA, 109 bp, Unknown; identical to SEQ ID NO: 26845
  Description of Unknown: RightRegion for integrase B888 sequence

SEQ ID NO: 26888 - DNA, 260 bp, Unknown
  Description of Unknown: RightRegion for integrase B889 sequence
ttacgtagctttccggggcacaaagagcccgtaaaatacacatatttctttgctttttgattaattactaaagagtaaattttaaggagcgaaaccgcagtaataatgattgaggaacgaagcatgaaagcattaggagatagtcataccgcatatgatgtaatgagagaatacatgattataggagcagaactggacggaaaatatcagataccgatgttagatagatacacagggcatccgggagaagatacggttga

SEQ ID NO: 26889 - DNA, 260 bp, Unknown
  Description of Unknown: RightRegion for integrase B890 sequence
ttacgcagctttccgggacacaaagagcccgtaaaatacacatatttctttgctttttgattaattactaaagagtaaatttcaaggagcgaaaccgcagtaataatgattgaggaacgaagcatgaaagcattaggagatagtcataccgcatatgatgtaatgagagaatacatgattataggagcagaactggacggaaaatatcagataccgatgttagatagatacacagggcatccgggagaagatacggttga

SEQ ID NO: 26890 - DNA, 109 bp, Unknown
  Description of Unknown: RightRegion for integrase B891 sequence
atcacattccgcaatggattgtctcacacgttcatctacaaagaaaagccagaggtttaatcgcccctggctttcttcatatctccatattccgttgtatcgctatttt

SEQ ID NO: 26891 - DNA, 260 bp, Unknown
  Description of Unknown: RightRegion for integrase B892 sequence
atcacattccgcaatggattatctcacacgttcatttacaaagaaaagccagaggtttaatcgtccctggctttcttcatatctccgtattctgttgtatcgctattttgtagtgaatcactctacaaaatcatcattgcatcaccaaaactgaagaatctgtatctttcttttacagcttcttcatatgccgcaagaacatgctcccttcctgccagtgccgataccagcattaccagagttgattccggcagatggaa

SEQ ID NO: 26892 - DNA, 109 bp, Unknown
  Description of Unknown: RightRegion for integrase B893 sequence
atcacattccgcaatggattgtctcacacgttcatctacagagaaaagccagaggtttaatcgcccctggctttcttcatatctccatattccgttgtatcgctatttt

SEQ ID NO: 26893 - DNA, 109 bp, Unknown; identical to SEQ ID NO: 26848
  Description of Unknown: RightRegion for integrase B894 sequence

SEQ ID NO: 26894 - DNA, 260 bp, Unknown
  Description of Unknown: RightRegion for integrase B895 sequence
gcggcctgtaactgctggaattgctcaaaggatacattgaactcaacctccagcgtgtagtcacgatagacatggatggacttgatgaactgcgatacgatcattttcttagccgcgaagttgcagttatcataaaggtctgcccatgttttcagcttgtcatattcctgctgttctgtctccatgtctgcggtacggctctcaagttcctgccgtgccgcttccgctgtctgtggcagagcttctacgtcggtctgcgt

SEQ ID NO: 26895 - DNA, 260 bp, Unknown
  Description of Unknown: RightRegion for integrase B896 sequence
atgaatttctccatcttggctgccgcgttttgcgacatatggttgctgacgtgtccgtaggtgtcgagcgtgaaggcgacggttgcatgtccgagtgacaaggaaagcgtcttgaagtcaatttcgctttgaatagcgagggtggcgtaggtgtggtgaatgtcgtggaagcgaacctccggacggttgagcctgctgaccagtgccttgaagtggacatacagcgtcttgaaacggatgaacatgccgttgtcacaagt

SEQ ID NO: 26896 - DNA, 260 bp, Unknown
  Description of Unknown: RightRegion for integrase B897 sequence
atcacattccgcaatggattgtctcacacgttcatctacagagaaaagccagaggtttaatcgcccctggctttcttcatatctccatattccgttgtatcgctattttgtagtgaatcgctctacaaaatcatcatcgcatccccaaaactgaagaaacgatatctttcttttactgcctcctcatacgctgccatcacatgctcttttccggctaatgcagaaacaagcatgatcagtgtagattccggcagatggaa

SEQ ID NO: 26897 - DNA, 260 bp, Unknown
  Description of Unknown: RightRegion for integrase B898 sequence
caaacgatcgtctttcggaacggactatgccatacgttcacttataaaaataattcttgatacaaaaatacccaggagcatttaaactcctgggttacttttatcccaacatttacattttcggattttgggataatttgcttttattcattctcccggtactcataagtatctgcaccagtcatcatgacgattccttttgattcttcaatacactcctcatcgtccagtgtgccgtaggttgctactgccggtgtact

SEQ ID NO: 26898 - DNA, 260 bp, Unknown
  Description of Unknown: RightRegion for integrase B899 sequence
ccgcggcacctttacgggcatgagacggaaattcgctatgattatcgcttagttatctaagtaaacaaggggagcaggggcaaaatcaagtttaaaacagttctgattattcagacaatgggacagagaaaaatttctgcttttttgcgtttaaaagtatgttttttaggggcgatgtgctatgatgtatttagaaaatataagggggatattattatggttgtattaattggtttgttagtattcttgtcggtgatctg

SEQ ID NO: 26899 - DNA, 109 bp, Unknown; identical to SEQ ID NO: 26858
  Description of Unknown: RightRegion for integrase B900 sequence

SEQ ID NO: 26900 - DNA, 260 bp, Unknown
  Description of Unknown: RightRegion for integrase B901 sequence
tcttttaccatctggccgccgatagagcctgcctgctttgcagtgagctcgccgttatagccattggagttcagcggaacgcctacctcgctggctgcctgcatcttcatggaattgagtgcgctcttggtctgcttattagaagccataatcttgttctcctttaataaaaccttttttattatacggaacttccgctccgtatcttttacaggagcggaagcgttttcacttcgcccttgcagttatattattttcac

SEQ ID NO: 26901 - DNA, 260 bp, Unknown
  Description of Unknown: RightRegion for integrase B902 sequence
attacattccgcaacggattatctcatacgttcatctacaaagaaaagccagaggtttaatcacccctggctttcttcatatctccataatctgttgtatcgctattttgtagtgaatcactctacaaaatcatcatcgcatcaccaaaactgaagaatctgtatctttcttttacagcttcttcatatgccgcaagaacatgctcccttcctgccagtgccgataccagcattaccagagttgattccggcagatggaa

SEQ ID NO: 26902 - DNA, 260 bp, Unknown
  Description of Unknown: RightRegion for integrase B903 sequence
atcacgttccgcaacggattgtctcacacgttcatctacaaagaaaagccagaggtttaatcgcccctggctttcttcatatctccatattccgttgtatcgctattttgtagtgaatcgttctacaaaatcatcatcgcatcccccatgtagagggtgtgccttcatttcactacttatgtaccgctactttgtagctccttcttcctattataataaccgactttacgccagttggcaagtcagtagtttacttttct

SEQ ID NO: 26903 - DNA, 174 bp, Unknown
  Description of Unknown: RightRegion for integrase B904 sequence
ttccgcaatggacttgcacatactttcttctacaaggacgcagaaaaaccggaggcataaaacctccggtttctttcatctttttcagttacaaatgtacgatttgggtatcattctataaacatcgcatcaccaaaactgaagaatctgtatctttcttttacagcttcttca

SEQ ID NO: 26904 - DNA, 260 bp, Unknown
  Description of Unknown: RightRegion for integrase B905 sequence
ccgaggcacctttacgggcatgagacgggaattcgctatgattatcgcttagttatctaagtaaataaggggagcaggggcaaaatcaagtttaaaacagttctgattattcagacaacatggcagagaaaaatctctgtttttttgcgttttaggtagaattttcagacctaatatgctacaattgttaaaaatgtacaagtaaaaggagaggcactatgaaagacacaggagaagaaactaagaagtgtaaatactgt

SEQ ID NO: 26905 - DNA, 109 bp, Unknown
  Description of Unknown: RightRegion for integrase B906 sequence
attacattccgcaacggattatctcatacgttcatctacaaagaaaagccagaggtttaatcacccctggctttcttcatatctccataatctgttgtatcgctatttt

SEQ ID NO: 26906 - DNA, 109 bp, Unknown; identical to SEQ ID NO: 26892
  Description of Unknown: RightRegion for integrase B907 sequence

SEQ ID NO: 26907 - DNA, 109 bp, Unknown
  Description of Unknown: RightRegion for integrase B908 sequence
ttccgcaatggacttgcacatactttcttctacaaaggcacagaaaaaccggaggcataaaacctccggtttctttcatcttttctagttacaaatgtacgatttgggt

SEQ ID NO: 26908 - DNA, 109 bp, Unknown
  Description of Unknown: RightRegion for integrase B909 sequence
acctctgttttgttcaaaaatggtatagagctgcgattttgctacaaggcgcagcaataaaaaaatagcccagaaaaccgcatggcttctgggcttttctaatattttt

SEQ ID NO: 26909 - DNA, 260 bp, Unknown
  Description of Unknown: RightRegion for integrase B910 sequence
atcacattccgcaacggattatctcacacattcatttacaaagaaaagccagaggtttaattgcccctggctttcttcatatctccatattctgttgtatcgctattttgtagtgaatcgctctacaaaatcatcatggcatcaccaaagctgaaaaacctgtatctttcctctacagcctctttgtatgcattgaggacatgctctctgcctgctaatgctgacacaagcatgacaagtgtagactgtggcagatggaa

SEQ ID NO: 26910 - DNA, 142 bp, Unknown
  Description of Unknown: RightRegion for integrase B911 sequence
atcacattccgcaacggattatctcacacattcatttacaaagaaaagccagaggtttaattgcccctggctttcttcatatctccatattctgttgtatcgctattttgtagtgaatcgctctacaaaatcatcatggcat

SEQ ID NO: 26911 - DNA, 260 bp, Unknown
  Description of Unknown: RightRegion for integrase B912 sequence
ttccgaaatggacttgctcacactttcttctacaaagacgaagaaaaaccggaggcataaaacctccggtttctttcatcttttctggttacaaatgtacgatttgggtatcattctataaacatcgcatctccaaaggaaaagaaacgatatttttcctttaccgcttcttcataagcatgcataatattttctttccctgccagtgcagaaaccagcatcagtaaggtagattccggaagatggaaatttgtaatcag

SEQ ID NO: 26912 - DNA, 260 bp, Unknown
  Description of Unknown: RightRegion for integrase B913 sequence
ccgaggcacctttacgggcatgagacggaaattcgctatgattatcgcttagttatctaagtaaataaggggagcaggggcaaaatcaagtttaaaacagttctgattattcagacaacatggcagagaaaaatctctgtttttttgcgttttaggtagaattttcagacctaatatgctacaattgttaaaaatgtacaagtaaaaggagaggcactatgaaagacacaggagaagaaactaagaagtgtaaatactgt

SEQ ID NO: 26913 - DNA, 260 bp, Unknown
  Description of Unknown: RightRegion for integrase B914 sequence
atcacgttccgcaacggattgtctcacacgttcatctacaaagaaaagccagaggtttaatcgcccctggctttcttcatatctccatattccgttgtatcgctattttgtagtgaatcgttctacaaaatcatcatcgcatcccccatgtagagggcgtgccttcatttcactacttatgtaccgctactttgtagctccttcttcctattataatagccgactttgcgccagttggcaagtcagtagtttacttttct

SEQ ID NO: 26914 - DNA, 260 bp, Unknown
  Description of Unknown: RightRegion for integrase B915 sequence
ggataccagatcaacatctcgttcaacttcgaccttactccgtacatcgagggagagtgatacgttcgcctgcaaaacagtcgggcatcgaaccagtattttcaaaaacaaccaaacagcaagaattgggggttgccgtccatgcgcctgcaaaatcaggcatttggctgattctcgatgcaacctctaagaaagcaaaaagaaaagcaccatacttcaaacgaagtacagtgcttttttggtggagctatcaggagtca

SEQ ID NO: 26915 - DNA, 260 bp, Unknown
  Description of Unknown: RightRegion for integrase B916 sequence
ttacgcagctttccgggacacaaagagcccgtaaaatacacatatttctttgctttttgattaattactaaagagtaaattttaaggagcgaaaccgcagtaataatgattgaggaacgaagcatgaaagcattaggagatagtcataccgcatatgatgtaatgagagaatacatgattataggagcagaactggacggaaaatatcagataccgatgttagatagatacacagggcatccgggagaagatacggttga

SEQ ID NO: 26916 - DNA, 260 bp, Unknown
  Description of Unknown: RightRegion for integrase B917 sequence
atcacattccgcaacggattatctcatacgttcatctacaaagaaaagccagaggtttaatcacccctggctttcttcatatctccataatctgttgtatcgctattttgtagtgaatcactctacaaaatcatcatcgcatcccgtatgattacgggtgtaccaccatttctaacatttgttagatttttactggttctcagaatgctcatatgtattctctccagtcatcattacggttccttttgattcttcgatgc

SEQ ID NO: 26917 - DNA, 260 bp, Unknown
  Description of Unknown: RightRegion for integrase B918 sequence
atcacattccgcaatggattatctcacacgttcatttacaaagaaaagccagaggtttaatctcccctggctttcttcatatctccgtattctgttgtatcgctattttgtagtgaatcactctacaaaatcatcattgcatctggtatcttaatcaacttccgtccatacagattatccccaaatacatatgccatataaatatttctaaaaatcccttctgcttgttcattgtggtaattcaagcattgaaaattcct

SEQ ID NO: 26918 - DNA, 109 bp, Unknown; identical to SEQ ID NO: 26846
  Description of Unknown: RightRegion for integrase B919 sequence

SEQ ID NO: 26919 - DNA, 109 bp, Unknown
  Description of Unknown: RightRegion for integrase B920 sequence
atcacgttccgcaacggattgtctcacacgttcatctacaaagaaaagccagaggtttaatcgcccctggctttcttcatatctccatattctgttgtatcgctatttt

SEQ ID NO: 26920 - DNA, 260 bp, Unknown
  Description of Unknown: RightRegion for integrase B921 sequence
gctatgaacattatgccgaaaagttcggcacacgtcactttgcgctgtcaagacgaatgatgcacgattttgcaaagaatggcaaaaagaagcgccgtatcgtttaacacgatacggcgctttatggactcgaagggagtcgaaccctcgacctttcggatgcgaaccgaacgctctcccaactgagctacgagcccatatttaagcccccaaaaaccgcttgggggcgcgtggtatataactccagattgtttaaggac

SEQ ID NO: 26921 - DNA, 260 bp, Unknown
  Description of Unknown: RightRegion for integrase B922 sequence
atcacattccgcaatggattgtctcacacgttcatctacaaagaaaagccagaggtttaatcgcccctggctttcttcatatctccatattccgttgtatcgctattttgtagtgaattgctctacacaatcatcatagcatccccaaagctaaaaaatctgtaccgttcctgtactgccacttcatatgcatgcatgattttttctttccctgccagcgcggacacaagcatcagtaatgtggactccggcagatggaa

SEQ ID NO: 26922 - DNA, 260 bp, Unknown
  Description of Unknown: RightRegion for integrase B923 sequence
atcacattccgcaatggattgtctcacacgttcatctacagagaaaagccagaggtttaatcgcccctggctttcttcatatctccatattccgttgtatcgctattttgtagtgaatcgctctacaaaatcatcattgcatctccgaaagaaaagaaacgatatctttcctgtactgcttcttcatatgctgccaatacgtgttctcttcctgccagtgctgatactaacataatcagtgttgactccggcagatggaa

SEQ ID NO: 26923 - DNA, 260 bp, Unknown; identical to SEQ ID NO: 26853
  Description of Unknown: RightRegion for integrase B924 sequence

SEQ ID NO: 26924 - DNA, 260 bp, Unknown
  Description of Unknown: RightRegion for integrase B925 sequence
atcacattccgcaacggattatctcacacattcatttacaaagaaaagccagaggtttaattgcccctggctttcttcatatctccatattctgttgtatcgctattttgtagtgaatcactctacaaaatcatcatggcatcaccaaagctgaaaaacctgtatctttcccctacagcctctttgtatgcattgaggacatgctctctgcctgctaatgctgacacaagcatgacaagtgtagactgtggcagatggaa

SEQ ID NO: 26925 - DNA, 260 bp, Unknown
  Description of Unknown: RightRegion for integrase B926 sequence
ttacgcagctttccgggacacaaagagcccgtaaaatacacatatttctttgctttttgattaattactaaagagtaaattttaaggagcgaaaccgcagtgataatgattgaggaacgaagcatgaaagcattaggagatagtcataccgcatatgatgtaatgagagaatacatgattataggagcagaactggacggaaaatatcagataccgatgttagatagatacacaggacatccgggagaagatacggttga

SEQ ID NO: 26926 - DNA, 260 bp, Unknown
  Description of Unknown: RightRegion for integrase B927 sequence
atcacattccgcaatggattgtctcacacgttcatctacaaagaaaagccagaggtttaatcgcccctggctttcttcatatctccatattccgttgtatcgctattttgtagtgaattgctctacaaaatcatcatggcatcccccatgtagagggcgtgccttcatttcactacttatgtaccgctactttgtagctccttcttcctattatagtaaccgactttgcgccagttggcaagtcagtagtttacttttct

SEQ ID NO: 26927 - DNA, 109 bp, Unknown
  Description of Unknown: RightRegion for integrase B928 sequence
tttaaaaacggactttcgcatatatttttttacaaagacaaaaaagaaccaggggcctaaagcccccggttttacttgattcttttgattacaaatgtacgatttgggt

SEQ ID NO: 26928 - DNA, 260 bp, Unknown
  Description of Unknown: RightRegion for integrase B929 sequence
atcacattccgcaacggattgtctcacacattcatctacaaagaaaagccagaggtttaatcgcccctggctttcttcatatctccacattctgttgtatcgctattttgtagtgaatcgctctacaaaatcatcatcgcatccccaaatgagaaaaagcgatatctttcttttactgcttcttcgtaagccgccatcacatgttcttttccggcaagtgcggacactaacataatcaatgttgattccggcagatggaa

SEQ ID NO: 26929 - DNA, 260 bp, Unknown
  Description of Unknown: RightRegion for integrase B930 sequence
gtgggaaaaaggtccactggacctttttctgattccacctcaccccatcttccgcgttaaaagagatgggctgcagagaaaacagcttgcccatataggataagtttggtaaaatataggtactatgggaaaagcgatatcttcaaaatttcataggatgcgtgcggaagatctgaagcgacaggtggaactcagtaaaagaaaagccgaatttaaaattccaccatttgttgtgaagcagtttgacattgacgagttgc

SEQ ID NO: 26930 - DNA, 260 bp, Unknown
  Description of Unknown: RightRegion for integrase B931 sequence
ttacgcagctttccgggacacaaagagcccgtaaaatacacatatttctttgctttttaattaattactaaagagtaaattttaaggagcgaaaccgcagtaataatgattgaggaacgaagcatgaaagcattaggagatagtcataccgcatatgatgtaatgagagaatacatgattataggagcagaactggacggaaaatatcagataccgatgttagatagatacacagggcatccgggagaagatacggttga

SEQ ID NO: 26931 - DNA, 109 bp, Unknown
  Description of Unknown: RightRegion for integrase B932 sequence
tcttttaccatctggccgccgatagagcctgcctgctttgcagtgagctcgccgttatagccattggagttcagcggaacgcctacctcgctggctgcctgcatcttca

SEQ ID NO: 26932 - DNA, 260 bp, Unknown
  Description of Unknown: RightRegion for integrase B933 sequence
atcacattccgcaacggattatctcacacattcatttacaaagaaaagccagaggtttaattgcccctggctttctttatatctccatattctgttgtatcgctattttgtagtgaatcgctctacaaaatcatcatggcatcaccaaagctgaaaaacctatatctttcctctacagcctctttgtatgcattgaggacatgctctctgcctgctaatgctgacacaagcatgacaagtgtagactgtggcagatggaa

SEQ ID NO: 26933 - DNA, 260 bp, Unknown
  Description of Unknown: RightRegion for integrase B934 sequence
acctctgttttgttcaaaaatggtatagagctgcgattttgctacaaggcgcagcaataaaaaaatagcccagaaaaccgcatggcttctgggcttttctaatatttttgaatgttgttttacttcacgcttcggatgaacatcgcgtcgccaaagctgaagaaacgatatttctgctcgacagccaccttgtaggcggccatcgtcttttcgtagccatacagcgccgacaccagcatgatgagggtactttcgggcag

SEQ ID NO: 26934 - DNA, 260 bp, Unknown
  Description of Unknown: RightRegion for integrase B935 sequence
ccgaggcacctttacgggcatgagaccgaaattcgctatgattatcgcttagttatctaagtaaacaaggggagcaggggcaaaatcaagtttaaaacagttctgattattcagacaatggggcagagaaaaatatctgcttttttgtggcttttagtgaaaaattattataaattttagctcatttattgtaatcttgcaaccatcgtgatatattaaaaatataaaaataaaggaggcaatttctatgaaaaaaatga

SEQ ID NO: 26935 - DNA, 260 bp, Unknown
  Description of Unknown: RightRegion for integrase B936 sequence
attcgtaaaaatgagtggcatgacctcacggtagccgtgggtatccgcacaaaagcttgaccgtaaagtactgtgtcagttgtgccggatgtgtcagaattttcgagaaacctttattatatattatctattctcttttatcctatcgctttatctaagagaaaaaatagagtagaagggataaaaataaagaaatatatagagagtttcataaaaacctgacacatttgacacacccgacacaagacgaagcgtatctg

SEQ ID NO: 26936 - DNA, 260 bp, Unknown
  Description of Unknown: RightRegion for integrase B937 sequence
ttacgcagctttccgggacacaaagagcccgtaaaatacacatatttctttgctttttgattaattactaaagagtaaattttaaggagcgaaaccgcagtaataatgattgaggaacgaagcatgaaagcattaggagatagtcataccgcatatgatgtaatgagagaatacatgattataggagcagaactggacggaaaatatcagataccgatgttagatagatacacaggacatccgggagaagatacgattga

SEQ ID NO: 26937 - DNA, 109 bp, Unknown
  Description of Unknown: RightRegion for integrase B938 sequence
atcacattccgcaacggattatctcacacattcatttacaaagaaaagccagaggtttaattgcccctggctttctttatatctccatattctgttgtatcgctatttt

SEQ ID NO: 26938 - DNA, 260 bp, Unknown; identical to SEQ ID NO: 26909
  Description of Unknown: RightRegion for integrase B939 sequence

SEQ ID NO: 26939 - DNA, 260 bp, Unknown
  Description of Unknown: RightRegion for integrase B940 sequence
atcacgttccgcaacggattgtctcacacgttcatctacaaagaaaagccagaggtttaatcgcccctggctttcttcatatctccatattccgttgtatcgctattttgtagtgaatcgttctacaaaatcatcatcgcatccccaaaactaaaaaacctgtaccgttcctgtactgccacttcatatgcatgcatgattttttctttccctgccagcgcagataccagcatcagtaacgtggactccggcagatggaa

SEQ ID NO: 26940 - DNA, 260 bp, Unknown
  Description of Unknown: RightRegion for integrase B941 sequence
acctctgttttgctcaaaaatggtatagagctgcgattttgctacaaggcgcagcaataaaaaaatagcccagaaaaccgcatggcttctgggcttttctaatatttttgaatgttgttttacttcacgcttcggatgaacatcgcgtcaccaaaggaaaaaaagcggtatttttctgccacagcaacctcataggcgtgcatggtcttttcgtagccatacagagcggacaccagcatgatcagggtgctctccggcag

SEQ ID NO: 26941 - DNA, 260 bp, Unknown
  Description of Unknown: RightRegion for integrase B942 sequence
ttccgcaatggacttgcacatactttcttctacaaaggcacagaaaaaccggaggcataaaacctccggtttctttcatcttttctagttacaaatgtacgatttgggtatcattctataaacatcgcatccccaaagctgaagaatcgatatctctctttaactgcttcttcatatgccgcaagcacatgctctcttccggcaagcgcacttaccagcatgatcagcgttgactccggtaaatggaagttcgtgatcag

SEQ ID NO: 26942 - DNA, 260 bp, Unknown
  Description of Unknown: RightRegion for integrase B943 sequence
ttacgcagctttccgggacacaaagagcccgtaaaatacacatatttctttgctttttgattaattactaaagagtaaattttaaggagcgaaaccgcagtaataatgattgaggaacgaagcatgaaagcattaggagatagtcataccgcatatgatgtaatgagagaatacatgattataggagcagaactggacggaaaatatcagatgccgatgttagatagatatacagggcatccgggagaagatacggttga

SEQ ID NO: 26943 - DNA, 260 bp, Unknown
  Description of Unknown: RightRegion for integrase B944 sequence
cgcatcacggaaattatattccaaaatggacttacacacaaattcctgtaccgtgaataaatccataaatcaaaaagaacacaagcttacttttacagttggcctgtgttctttttcattgtccgaattcgaaaagtgcagtgtttatgcgggtttaagccgtctcgagttcaggaaacatctgacagccaaaggtcaccgtgcacgcagtcagcggacgtcccagttcttctgctttctgtttcaggatggcacgggct

SEQ ID NO: 26944 - DNA, 260 bp, Unknown
  Description of Unknown: RightRegion for integrase B945 sequence
atcacattccgcaatggattgtctcacacgttcatctacagagaaaagccagaggtttaatcgcccctggctttcttcatatctccatattccgttgtatcgctattttgtagtgaatcgctctacaaaatcatcattgcatcaccaaagctgaaaaacctgtatttttcctctacagcctctttgtatgcattgagtacatgctctctgcctgctaatgctgacacaagcatgacaagtgtagactgtggcagatggaa

SEQ ID NO: 26945 - DNA, 260 bp, Unknown
  Description of Unknown: RightRegion for integrase B946 sequence
ttacgcagctttccggggcacaaagaacccgtaaaatacacatatttctttgctttttgattaattactaaagagtaaattttaaggagcgaaaccgcagtaataatgattgaggaacgaagcatgaaagcattaggagatagtcataccgcatatgatgtaatgagagaatacatgattataggagcagaactggacggaaaatatcagataccgatgttagatagatacataggacatccgggagaagatacggttga

SEQ ID NO: 26946 - DNA, 109 bp, Unknown; identical to SEQ ID NO: 26931
  Description of Unknown: RightRegion for integrase B947 sequence

SEQ ID NO: 26947 - DNA, 260 bp, Unknown
  Description of Unknown: RightRegion for integrase B948 sequence
atcacattccgcaatggattgtctcacacgttcatctacaaagaaaagccagaggtttaatcgcccctggctttcttcatatctccatattccgttgtatcgctattttgtagtgaattgctctacaaaatcagcatcgcatcaccaaagctgaaaaacctgtatctttcctctacagcctctttgtatgcattgaggacatgctctctgcctgctaatgctgacacaagcatgacaagtgtagactgcggcagatggaa

SEQ ID NO: 26948 - DNA, 109 bp, Unknown; identical to SEQ ID NO: 26908
  Description of Unknown: RightRegion for integrase B949 sequence

SEQ ID NO: 26949 - DNA, 109 bp, Unknown; identical to SEQ ID NO: 26846
  Description of Unknown: RightRegion for integrase B950 sequence

SEQ ID NO: 26950 - DNA, 260 bp, Unknown
  Description of Unknown: RightRegion for integrase B951 sequence
atcacattccgcaatggattatctcacacgttcatttacaaagaaaagccagaggtttaatctcccctggctttcttcatatctccgtattctgttgtatcgctattttgtagtgaatcactctacaaaatcatcattgcatccccaaacgaaaagaaccgatacctctcctccaccgcttcctcataagccctcataatattctctttcccagccaaagccgagacgagcatcagcagtgtagattccggcagatggaa

SEQ ID NO: 26951 - DNA, 109 bp, Unknown; identical to SEQ ID NO: 26890
  Description of Unknown: RightRegion for integrase B952 sequence

SEQ ID NO: 26952 - DNA, 260 bp, Unknown
  Description of Unknown: RightRegion for integrase B953 sequence
ttacgcagctttccgggacacaaagagcccgtaaaatacacatatttctttgctttttgattaattactaaagagtaaattttaaggagcgaaaccgcagtaataatgattgaggaacgaagcatgaaagcattaggagatagccataccgcatatgatataatgagagaatacatgattataggagcagaactggacggcaaatatcagataccgatgttagacagatacacagggcatccgggagaagatacggttga

SEQ ID NO: 26953 - DNA, 260 bp, Unknown; identical to SEQ ID NO: 26885
  Description of Unknown: RightRegion for integrase B954 sequence

SEQ ID NO: 26954 - DNA, 260 bp, Unknown
  Description of Unknown: RightRegion for integrase B955 sequence
atcaggtctataaccttcaaaaacggcataattcacgagttcgtgtataaagacgactaaacagcaaaaagcccagaaaccgcttgatttctgggcttttcctgtgtttttgctcgcctgagctatgatgctattgaatgaacatcgcgtcaccaaagctgaaaaagcgatacctttcctcaacggctgtcctataagcattcatgatattatcataccctgcgaacgccgaaacaagcataataagggtgctttcggga

SEQ ID NO: 26955 - DNA, 260 bp, Unknown
  Description of Unknown: RightRegion for integrase B956 sequence
attacattccgcaacggattatctcatacgttcatctacaaagaaaagccagaggtttaatcacccctggctttcttcatatctccataatctgttgtatcgctattttgtagtgaatcactctacaaaatcatcatcgcatccccaaagctgaagaatcgatatctctctttaactgcttcttcatatgccgcaagcacatgctctcttccggcaagcgcacttaccagcatgatcagcgttgactccggtaaatggaa

SEQ ID NO: 26956 - DNA, 109 bp, Unknown; identical to SEQ ID NO: 26881
  Description of Unknown: RightRegion for integrase B957 sequence

SEQ ID NO: 26957 - DNA, 260 bp, Unknown
  Description of Unknown: RightRegion for integrase B958 sequence
ctggctacaccggaagtctccctctccgcagcggcgataggtcccctggaagggatctaagcccagataaacaggccgcagctgttccggcgcctttggcacaaaaatcaccacaatgcggtttccctcgctgcgttcaatccgcacatcttccggccgcaataggttaacgctgacgcaagccggattttctacaatttcccagaactgtcttaccagttcttccggctccaggccagggacagagtacagtgacttgt

SEQ ID NO: 26958 - DNA, 260 bp, Unknown
  Description of Unknown: RightRegion for integrase B959 sequence
ccggaaacggttgtgttccgcaatgggctgtcccatacattcacttataaggattcttgatgcaaaatacccaggagcatttacactcctgggtttctctttgtcccattatttacttttcctgatttctgtgataacctcacatttgttagatttggaggctacacaatcatcatagcatcccgtatgattacgggtgtaccaccatttctaacatttgttagatttttactggttctcagaatgctcatatgtattct

SEQ ID NO: 26959 - DNA, 109 bp, Unknown
  Description of Unknown: RightRegion for integrase B960 sequence
ccggaaacggttgtgttccgcaatgggctgtcccatacattcacttataaggattcttgatgcaaaatacccaggagcatttacactcctgggtttctctttgtcccat

SEQ ID NO: 26960 - DNA, 260 bp, Unknown
  Description of Unknown: RightRegion for integrase B961 sequence
ccggaaacggttgtgttccgcaatgggctgtcccatacattcacttataaggattcttgatgcaaaaatacccaggagcatttacactcctgggtatctctttgtcccattatttactttttcctgatttctgggataacctcacatttgttagatttggaggctacacaatcatcatagcatcccgtatgattacgggtgtaccaccatttctaacatttgttagatttttactggttctcagaatgctcatatgtatt

SEQ ID NO: 26961 - DNA, 211 bp, Unknown
  Description of Unknown: RightRegion for integrase B962 sequence
gtgacattcagaaacggaatctctcatacattcacatataaaaataagccggaggattaaccccggcttaaatttccttgatattctaacatttgtgtgttttggtggttacttgataaacatagcatcaccaaagctgaaaaacctgtatctttcctctacagcctctttgtatgcattgaggacatgctctctgcctgctaatgctgac

SEQ ID NO: 26962 - DNA, 109 bp, Unknown
  Description of Unknown: RightRegion for integrase B963 sequence
cctgaaacggttgtattccgcaatgggctgtcccatacattcacttataaggattcttgatgcaaaaatacccaggagcatttacactcctgggtttctctttgtccca

SEQ ID NO: 26963 - DNA, 260 bp, Unknown
  Description of Unknown: RightRegion for integrase B964 sequence
aatttcataaaagtgcttgatgtccctaagaacaggcgttattatgagaaccagtcttaatatttgtgggaacggtaactgccaagaaagaatcgggcaatatgcctgcctttagaccaaattttactaaaatgggacagaatagttcagaccacaataaggataattattattacttttgtcccataattcaaacgattaaactttaaattcagattatgatagagaataccagcttggagttaaaactcgttgaaatt

SEQ ID NO: 26964 - DNA, 260 bp, Unknown
  Description of Unknown: RightRegion for integrase B965 sequence
tccgtttatctgcttgttcagaccatccgattggacggcaaaaaccggatcagctcttaacagtgaactttgcggaatcgagcagctggttgccgatgtagatggacagggtataatcgccgtcggtctgcggggtgcgcgggaagtagccgacgaacatattcttttcccacatatccttccagaccagcacggagctggacgaatcgacgatcttcccgtccgcgtcgcggacgacaaggttgaccatgaccgttccg

SEQ ID NO: 26965 - DNA, 260 bp, Unknown
  Description of Unknown: RightRegion for integrase B966 sequence
tcgtttatatttgtaaacggtgtgttcggaattgtcgtcgcccgcgagccgagcaactaaaaaagcccctcaccgtcgatatagacgagtggggggctttttctatgccttattattcagtttcgtcggccgcgctttcctcgccgcccgatttctgccgcaagacggcgaaagcgtctttcaacgccgggggcatgggaacgcccataatgccgagattttcgacgatgctcatgccgtcatttgcgcagaaaaagaga

SEQ ID NO: 26966 - DNA, 260 bp, Unknown
  Description of Unknown: RightRegion for integrase B967 sequence
ccggaaacggttgtgttccgcaatgggctgtcccatacattcacttataaggattcttgatgcaaaaatacccaggagcatttacactcctgggtttctctttgtcccattatttactttttcctgatctctgggataacctcacatttgttagatttggaggctacacaatcatcatagcatcccgtatgattacgggtgtaccaccatttctaacatttgttggtgttttactggttctcggaatactcatatgtgtc

SEQ ID NO: 26967 - DNA, 260 bp, Unknown
  Description of Unknown: RightRegion for integrase B968 sequence
ctctgcgatcatctgtgctactttttttgttgttccgcttgcactgaaaaatgccactaattttttactcataataaaaagcccctttctatacgtatttttcacaaaaaaatagatgtataagatttacattcatcttacacatctattttaagctctatcgcttcattatgtctaatgcttatattgaattttgttttatgcctgaaaagcattaatctcctcgatcattttacggactgccaaagaatatgggatat

SEQ ID NO: 26968 - DNA, 260 bp, Unknown
  Description of Unknown: RightRegion for integrase B969 sequence
tcatttatatttgtgaatggcgtgttcggtattgtcgtcgcccgcgagccgggcaactaaaaaaagcccctcaccgtcgatatagacgagtgaggggctttttctatgccttattattcagtttcatcggcggcagtttcctcgccgctcgatttctgccgcaagacggcgaaagcgtctttcaacgccgggggcatgggaacgcccataatgccgagattttcgacgatactcatgccgtcatttgcgcagaaaaagag

SEQ ID NO: 26969 - DNA, 260 bp, Unknown
  Description of Unknown: RightRegion for integrase B970 sequence
tccgtttatctgcttgttcagaccatccgattggacggcaaaaaccggatcagctcttaacggtgaactttgcggaatcgagcagctggttgccgatgtagatggacagggtataatcgccgtcggtctgcggggtgcgcgggaagtagccgacgaacatattcttttcccacatatccttccagaccagcacggagctggacgaatcgacgatcttcccgtccgcgtcgcggacgacaaggttgaccatgaccgttccg

SEQ ID NO: 26970 - DNA, 260 bp, Unknown
  Description of Unknown: RightRegion for integrase B971 sequence
ccggaaacggttgtattccgtaatgggctgtcccatacattcacttataaggattcttaatacaaaaatacccaggagcatttacactcctgggtttctctttgtcccattatttactttttcctgatttctggaataacctcacatttgttagatttggaggctacacgatcatcatagcatccccaaaagagaaaaatctgtatttctcctttaccgcctcttcatacgccttcaacacatggtctcttcctgcaaat

SEQ ID NO: 26971 - DNA, 260 bp, Unknown
  Description of Unknown: RightRegion for integrase B972 sequence
ccggaaacggttgtgttccgcaatgggctgtcccatacattcacttataaggattcttgatgcaaaaatacccaggagcatttacactcctgggtttctctttgtcccattatttactttttcctgatcctgatttctgggataacctcacatttgttagatttggaggctacacaatcatcatagcatccccaaaactgaagaaacgatatctttcttttactgcctcctcatacgctgccatcacatgctcttttccg

SEQ ID NO: 26972 - DNA, 109 bp, Unknown
  Description of Unknown: RightRegion for integrase B973 sequence
ccggaaacggttgtgttccgcaatgggctgtcccatacattcacttataaggattcttgatgcaaaaatacccaggagcatttacactcctgggtttctctttgtccca

SEQ ID NO: 26973 - DNA, 260 bp, Unknown
  Description of Unknown: RightRegion for integrase B974 sequence
ccggaaacgcttgtgttccgcaatgggctgtcccatacattcacttataaggattcttaatgcaaaaatacccaggagcatttacactcctgggtttctctttgtcccattatttacttttcctgatttctgggataacctcacatttgttagatttggaggctacacaatcatcatagcatccccgaagctgaagaaacgataacgctcctgaacagctgtctcgtaggcatgcataatatgctctttgcctgccagtg

SEQ ID NO: 26974 - DNA, 109 bp, Unknown
  Description of Unknown: RightRegion for integrase B975 sequence
ccggaaacggttgtgttccgcaatgggctgtcccatacattcacttataaggattcttgatgcaaaaatacccaggagcatttacactcctgggtttctccttgtccca

SEQ ID NO: 26975 - DNA, 178 bp, Unknown
  Description of Unknown: RightRegion for integrase B976 sequence
gtgacattcagaaacggaatctctcatacattcacatataaaaataagccggaggattaaccccggcttaaatttccctgatattctaacatttgtgtgttttggtggttacttgataaacatagcatccccaaagctgaaaaacctgtatctttcctctacagcctctttgtatgca

SEQ ID NO: 26976 - DNA, 260 bp, Unknown
  Description of Unknown: RightRegion for integrase B977 sequence
ccggaaacggttgtgttccgcaatgggctgtcccatacattcacttataaggattcttaatgcaaaaatacccaggagcatttgcgctcctgggtttctctttgtcccattatttactttttcctgatttctgggataacctcacatttgttagatttggaggctacacaatcatcatagcatcccgtatgattacgggtgtaccaccatttctaacatttgttagatttttactggttctcagaatgctcatatgtatt

SEQ ID NO: 26977 - DNA, 182 bp, Unknown
  Description of Unknown: RightRegion for integrase B978 sequence
ccggaaacggttgtgttccgcaatgggctgtcccatacattcacttataaggattcttgatgcaaaatacccaggagcatttacactcctgggtttctctttgtcccattatttacttttcctgatttctgggataacctcacatttgttagatttggaggctacacaatcatcatagcatc

SEQ ID NO: 26978 - DNA, 260 bp, Unknown
  Description of Unknown: RightRegion for integrase B979 sequence
tacaatggggtatcgaaacaaaggatacgattttacaattacttcatctacagcatatgatcagaaatggatttatggcagaaacatttttgaatcaattagtcttgttgtagataatatatttgatcaatatttatcaaggccagatgtaaggcagccaattcttacacagtattgtgatggaaaaagagtaacctgtccgaattggttaagccagtggggatcatgcaacttaggagagagagggtattctacaattg

SEQ ID NO: 26979 - DNA, 260 bp, Unknown
  Description of Unknown: RightRegion for integrase B980 sequence
gtgacattcagaaacggaatctctcatacattcacatataaaaataagccggagaattaaccccggcttaaatttccttgatattctaacatttgtgtgttttggtggttacttgataaacatagcatcaccaaagctgaaaaacctgtatctttcctctacagcctctttgtatgcattgaggacatgctctctgcctgctaatgctgacacaagcatgacaagtgtagactgtggcagatggaaatttgtaatcagac

SEQ ID NO: 26980 - DNA, 87 bp, Unknown
  Description of Unknown: RightRegion for integrase B981 sequence
aaaaataatgatgtgtcattatgtactaggaacgtgtccttgtttaattgcacctgctaatccgactttagttctttcagaacattt

SEQ ID NO: 26981 - DNA, 260 bp, Unknown
  Description of Unknown: RightRegion for integrase B982 sequence
ccggaaacggttgtgttccgcaatgggctgtcccatacattcacttataaggattcttgatacaaaaatacccaggagcatttacactcctgggtttctctttgtcccattatttactttttcctgatttctgggataacctcacatttgttagatttggaggctacacaatcatcatagcatcgccgaaggagaaaaagcggtatttttctctcacagcctcttcataagctgccataatatgctcttttccagccagt

SEQ ID NO: 26982 - DNA, 260 bp, Unknown
  Description of Unknown: RightRegion for integrase B983 sequence
accggggttcagaatccccggcgttccttatcatacgcgcgtgaggaaatatacccgtaagatgaagaacgggatgtccgaaagctgtgcggagtggaggctttcgtgtatagctcaatgacggcgtgtgccgtcttttttctttactaatgtgtactctgtatattggtgttcacttgccggcggtgtttgcgatttatgattatttgttctttttgcggctacgccgtgtcaccgtataatgcgataaatcgtgttga

SEQ ID NO: 26983 - DNA, 260 bp, Unknown; identical to SEQ ID NO: 26978
  Description of Unknown: RightRegion for integrase B984 sequence

SEQ ID NO: 26984 - DNA, 260 bp, Unknown
  Description of Unknown: RightRegion for integrase B985 sequence
ggacagttcgccagcctgcgggaaaatcccttcatccgcaccaaaatcctcgaacgttagttcggggattttttgctgcatatgaattgtggcgccaagcggcggggtgaaggcacccccgtcctgtaatttcacagtaaactgtccgcaccacgaatacacctatttcgctcataaaaacaaattttaatatttttttacatcgtcccatcgcaaaaaacgacgtgtttctctggctggtacaactgtccgtatcttgc

SEQ ID NO: 26985 - DNA, 109 bp, Unknown
  Description of Unknown: RightRegion for integrase B986 sequence
gtgatattcagaaacggaatctctcatacattcacatataaaaataagccggagaattaaccccggcttaaatttccttgatattctaacatttgtgtgttttggtggt

SEQ ID NO: 26986 - DNA, 260 bp, Unknown
  Description of Unknown: RightRegion for integrase B987 sequence
ccggaaacagttgtgttccgcaatgggttgtcccatacattcacttataaggattcttgacgcaaaaatacccaggagcatttacactcctgggtttctctttgccccattatttactttttcctgatttctgggataacctcacatttgttagatttggaggctacacaatcatcatagcatcccgtatgattacgggtgtaccaccatttctaacatttgttagatttttactggttctcagaatgctcatatgtatt

SEQ ID NO: 26987 - DNA, 109 bp, Unknown
  Description of Unknown: RightRegion for integrase B988 sequence
ccggaaacggttgtgttccgcaatgggctgtcccatacattcacttataaggattcttgatgcaaaaatacccaggagcatttacactcctgggtttctctttgtccta

SEQ ID NO: 26988 - DNA, 260 bp, Unknown
  Description of Unknown: RightRegion for integrase B989 sequence
ccggaaacggttgtgttccgcaatgggctgtcccatacattcacttataaggattcttgatgctaaaaatacccaggagtatttacactcctgggtttctctttgtcccattatttacttttcctgatttctgggataacctcacatttgttagatttggaggctacacaatcatcatagcatcaccaaagctgaaaaatctgtatctttcctctacagcctctttgtatgcattgaggacatgctctctgcctgctaat

SEQ ID NO: 26989 - DNA, 109 bp, Unknown; identical to SEQ ID NO: 26972
  Description of Unknown: RightRegion for integrase B990 sequence

SEQ ID NO: 26990 - DNA, 109 bp, Unknown; identical to SEQ ID NO: 26972
  Description of Unknown: RightRegion for integrase B991 sequence

SEQ ID NO: 26991 - DNA, 109 bp, Unknown
  Description of Unknown: RightRegion for integrase B992 sequence
gtgacattcagaaacggaatctctcatacattcacatataaaaataagccggaggattaaccccggcttaaatttccctgatattctaacatttgtgtgttttggtggt

SEQ ID NO: 26992 - DNA, 109 bp, Unknown
  Description of Unknown: RightRegion for integrase B993 sequence
ccggaaacggttgtgttccgcaatgggctgtcccatacattcacttataaggattcttgatacaaaaaatacccaggagcatttacactcctgggtttctctttgtccc

SEQ ID NO: 26993 - DNA, 109 bp, Unknown
  Description of Unknown: RightRegion for integrase B994 sequence
ccggaaacggttgtattccgtaatggactgtcccatacattcacttataaggattcttaatacaaaaatacccaggagcatttacactcctgggtttctctttgtccca

SEQ ID NO: 26994 - DNA, 260 bp, Unknown
  Description of Unknown: RightRegion for integrase B995 sequence
gcccttgggcgggatccttttctgagtcagcttatttggaaaatatttgaaatggagtgatcctatgaacgaaccgcggcccgccgccgaaaacaaaatgggcaccatgccggtccccaagctgctctttaccatgtcgatccccatggtcatctccatgctggtccaagcgctgtacaacgtggtggacagcgtgttcgtctcgcaggtcagcgagcaggcccttaccgccgtgacgctggccttcccggcccagaacc

SEQ ID NO: 26995 - DNA, 260 bp, Unknown
  Description of Unknown: RightRegion for integrase B996 sequence
cgaagccgctgcggtagtagttgccgtcggcatcgcagtaggcgtagctgccgcccttgacgttggcgaggatggcgggatcgatgtactgatccttatcgtagccgggcacatcgttgggagaggcgcagatctcgcgcaccacaccgtcgatctcctgctcggtgatggcaatgacggcggggtcagagaccatggtcaggctcagcttgccggtgggggcaaagtcgccgctgatgacatcgacctgagcgttcagg

SEQ ID NO: 26996 - DNA, 260 bp, Unknown
  Description of Unknown: RightRegion for integrase B997 sequence
gctgctatgatgaagaataagcagctgaagccagtagcaggtgtgaagaaggacaaataaaaacactatataaggctaaatcaaatgaaaaatcagatttacattctagcagatagaactgctatagactatatcctgaatggggatatagaggaactgaaggaatatctttcagaacctgatacctacatagacctttcagaacctattacctttgaaacggaagctgaagtagctgcttttggtgcagggttaggcta

SEQ ID NO: 26997 - DNA, 260 bp, Unknown
  Description of Unknown: RightRegion for integrase B998 sequence
gtgacattcagaaacggaatctctcatacattcacatataaaaataagccggaggattaaccccggcttaaatttccttgatattctaacatttgtgtgttttggtggttacttgataaacatagcatcccgtatgattacgggtgtaccaccatttctaacatttgttggtgttttactggttctcggaatactcatatgtgttctctccagtcatcattacggttccttttgattcctcgatgcactcctcattatcc

SEQ ID NO: 26998 - DNA, 260 bp, Unknown
  Description of Unknown: RightRegion for integrase B999 sequence
ctggccacgacatggacaggcgacgcttgtttgctacacagtccttcagatacagattgataagtgtctggtatgggatgcccacatcttcagactgcgccttgaaatagtcgatcgtattactgtcaatattgatcgtgatttgctttttcaaagcctttgcataggggtttttcttggcgttagagaaatcatattcaggaagcatagtacaaacctcactttccatagtatttagattcggtcttagtggcttttcg

SEQ ID NO: 26999 - DNA, 260 bp, Unknown
  Description of Unknown: RightRegion for integrase B1000 sequence
tgtccgcaggagaaggtggagtatattaaggatgcgttgaggtattttaaattgatttagtaaaattgatcgtgtgtcacggcaatatcaatagatactcccgcaaagcctgtaaataagccattccttagctgaaaaagtgctctactacacacttactatacgtttttagagaaatagctcggcatgattatattaaatggataattgacattatggtatatatgccatataatatttacaaaggtgattacatgaca

SEQ ID NO: 27000 - DNA, 260 bp, Unknown
  Description of Unknown: RightRegion for integrase B1001 sequence
aagagaacagaacatacaccaaatcaatttacttatgatgtttatgtagaaacattgtaagtattttttttgtgttatacttcatttataatatgaatctttagctgtgtcggaatggtaggaacgttcaaaattattactatgagtacagctattgaagaaaaagtaatagatatttataatgatcatttttatgactcaggaagtgttaagataaatggaacaagaataggttgttggaaatcaagtggacatgggga

SEQ ID NO: 27001 - DNA, 260 bp, Unknown
  Description of Unknown: RightRegion for integrase B1002 sequence
ccgggaactgtcgtgttccgcaacggactgtcccatacattcacttataaagattcttgatataaaaatacccaggagcatttctactcctgggtttctcattttcccattatctacttttccctggcttttgggatattctaacacttgttagatttcggggctacacaatcatcatagcatccccaaaactgaagaaacgatatctttcttttactgcctcctcatacgctgccatcacatgctcttttccggctaat

SEQ ID NO: 27002 - DNA, 260 bp, Unknown; identical to SEQ ID NO: 26978
  Description of Unknown: RightRegion for integrase B1003 sequence

SEQ ID NO: 27003 - DNA, 260 bp, Unknown; identical to SEQ ID NO: 26973
  Description of Unknown: RightRegion for integrase B1004 sequence

SEQ ID NO: 27004 - DNA, 200 bp, Unknown
  Description of Unknown: RightRegion for integrase B1005 sequence
gtgacattcagaaacggaatctctcatacattcacatataaaaataagccggagaattaaccccggcttaaatttccttgatattctaacatttgtgtgttttggtggttacttgataaacatagcatcaccaaagctgaaaaacctgtatctttcctctacagcctctttgtatgcattgaggacatgctctctgcctg

SEQ ID NO: 27005 - DNA, 90 bp, Unknown
  Description of Unknown: RightRegion for integrase B1006 sequence
gtcttccgcaatggacttgcacatactttcttctacgggagcatcccaaagtttgtgtaaacctccaaactgatgtaagataaaattact

SEQ ID NO: 27006 - DNA, 109 bp, Unknown; identical to SEQ ID NO: 26972
  Description of Unknown: RightRegion for integrase B1007 sequence

SEQ ID NO: 27007 - DNA, 109 bp, Unknown
  Description of Unknown: RightRegion for integrase B1008 sequence
ccggaaacggttgtattccgcaatgggctgtcccatacattcacttataaggattcttgatgcaaaaatacccaggagcatttacactcctgggtttctctttgtccca

SEQ ID NO: 27008 - DNA, 260 bp, Unknown; identical to SEQ ID NO: 26978
  Description of Unknown: RightRegion for integrase B1009 sequence

SEQ ID NO: 27009 - DNA, 109 bp, Unknown
  Description of Unknown: RightRegion for integrase B1010 sequence
gacggaagaattacatcaatacagtttaaaaacggtattgagcatgattttttatattaacagaatacaaagaaaatacccctgcattccatgaatacaggggtttctg

SEQ ID NO: 27010 - DNA, 260 bp, Unknown
  Description of Unknown: RightRegion for integrase B1011 sequence
accattcaaatggtcgggagcgtgttcgttctgtactgcgagataccaactcgccaataatggtaatccccggttctttcatgtttttggtgaaagagccggggattttttgttatttttacccgtttttcggaagaatttgccgaaagtagtagtttcctgccaaaatccagctaagccgatttgaaatcggtagaattttggataaaggagattggcttatgattaggattttactgtcaacgcgtctcggcgaaagg

SEQ ID NO: 27011 - DNA, 260 bp, Unknown
  Description of Unknown: RightRegion for integrase B1012 sequence
gtgcagcgtattacattcaaaaacggactgtcgcacactttcatcttcaaaaaatcataaatgcctccggcaacaaaaatatacccggtatgaagtttattactcctaccgggtatttctgtgtattcttatacagccaaacattctctgattttgctaatctcaatatcctctttaaatctactactgtcgtcattcattaaaagcacaaatcttattactgtatcattcatagcagcaccttcgatttccttgatcct

SEQ ID NO: 27012 - DNA, 109 bp, Unknown; identical to SEQ ID NO: 27009
  Description of Unknown: RightRegion for integrase B1013 sequence

SEQ ID NO: 27013 - DNA, 260 bp, Unknown; identical to SEQ ID NO: 27011
  Description of Unknown: RightRegion for integrase B1014 sequence

SEQ ID NO: 27014 - DNA, 260 bp, Unknown
  Description of Unknown: RightRegion for integrase B1015 sequence
gacggaagaattatatcaatacagtttaaaaacggtattgagcatgattttttatattaacagaatacaaagaaaatacccctgcattccatgaatacaggggttttctgatatttttatttctttttcggtctcacgtctcccacaagcatcgcatcgccaatgtttacgggaaacaatcattcttttaaggttacacaaatgtaatctcaatccttacagtgaaataaccgcccttgtacatataggacggttattgt

SEQ ID NO: 27015 - DNA, 260 bp, Unknown
  Description of Unknown: RightRegion for integrase B1016 sequence
acagattttattaatatgtttgatgttccagagaacagacattattatgagaatcagtaaatcactcatacctttgtagaattaaatagattacagacaatgaatccaatagacaagtttaccaatatagatgcagtttatcctacaactgacgcaagggaagaagatacaatattagattatgtttgggactttgctgtactgatacaccctgcaatgccaaagattatagacgaaaggtttgcattggaaggcagcca

SEQ ID NO: 27016 - DNA, 260 bp, Unknown
  Description of Unknown: RightRegion for integrase B1017 sequence
acagactttataaagatgtttgatattccaaagaacaggcgttattatgagaatcagtaaatcactcatacctttgtagaattaaatagattacatgcaatgaacccaatagacaaatttactaacatagatgcagtttaccctacaactgacgcaagggaggaagatataatattagattatgtttgggactttgccctgctgatacatcctgcagaacctaagattatagatgaaagatttgcattggagggcagtca

SEQ ID NO: 27017 - DNA, 260 bp, Unknown
  Description of Unknown: RightRegion for integrase B1018 sequence
cccgttatttccgagcctattgtcacacaaacaacctatgaacgcagaaaaacggcgtgaccttcgggtcacaccgttctctgcgacaaaatagttacttgtcactattaagccttgatttaacaggcttttttgtatatgcgataaatacttacatcaaatctgttgtctcacataagtaggctattttgtaatttttcaatcagtgatatatcagccggaagccaatcaacggtatataattcatctttattaagcca

SEQ ID NO: 27018 - DNA, 260 bp, Unknown
  Description of Unknown: RightRegion for integrase B1019 sequence
cccgttatttccgagcctattgtcacacaaacaacctatgaacgcagaaaaacggcgtgaccttcgggtcacaccgttctctgcgacaaaatagttacttgtcactattaagccttgattttaagggctttctaggtatcatttatgactatgtaaaatttatcgcatttatgcaaaacttgtccagcggtggcaaatcggtggcaatgccacccacgcggtatcggtataatcctaggtcaactacacacggagttttt

SEQ ID NO: 27019 - DNA, 260 bp, Unknown
  Description of Unknown: RightRegion for integrase B1020 sequence
acagattttattaatatgtttgatgttccagagaacagacattattatgagaatcagtaaatcactcatacctttatagaattaaatagattacagacaatgaatccaatagacaagtttaccaatatagatgcagtttaccctactattgacgcaagggaggaagatataatattagattatgtttgggacttcgccatgctgatacaccctgcagaaccaaaaattatagataaaaggtttgcattggagggtagttg

SEQ ID NO: 27020 - DNA, 260 bp, Unknown
  Description of Unknown: RightRegion for integrase B1021 sequence
aggctgccgtttgctccgacaacgcggtggcagggaatgatgatagagatcacattgtgaccgacagccccgcccacagcctgcgcagacatccgggaaaggccgcgctctgcggccagctgctttgccagtgcaccataggtcgtggtctggccgcaggggatgcggcgcagcagcgcccacacctcctgctgaaaggcagagccagcgggatggagcggcggggtaaagtccggctcctgcccgccgaaataaacatc

SEQ ID NO: 27021 - DNA, 260 bp, Unknown
  Description of Unknown: RightRegion for integrase B1022 sequence
aggctgccgtttgttccgacaacgcggtggcagggaatgatgatagagatcacattgtgaccgacagccccgcccacagcctgcgcagacattcgggaaaggccgcgctctgcagccagctgccttgccagtgccccataggtcgtggtctggccgcaggggatgcggcgcagcagcgcccacacctcctgctgaaaggcagagccagcgggatggagcggcggggtaaagtccggctcctgcccgccgaagtaaacatc

SEQ ID NO: 27022 - DNA, 260 bp, Unknown
  Description of Unknown: RightRegion for integrase B1023 sequence
cccgttatttccgagcctatcatcacgcaaacaacctatgaacacagaaaaacggcgtgaccttcgggtcacaccgttctctgcgacaaaatagttacttgtcactattaagccttgcaaaaaagtgttgacatccggcccggcgtatggtattatacttgagcgccaagcgctgagacaaaagaatgacttctgagtcccagctggaagtaaagcgaaaagaaccaatagacgtccgaaagttccggtcagcgccgaga

SEQ ID NO: 27023 - DNA, 68 bp, Unknown
  Description of Unknown: RightRegion for integrase B1024 sequence
tcattttgttcgccgcagcacaggcagctatcgctgagaagaatgcataattataaataatatataag

SEQ ID NO: 27024 - DNA, 260 bp, Unknown
  Description of Unknown: RightRegion for integrase B1025 sequence
ccagccagatgctggagaggttcagcttttaggcgaaaaagttaccagtcacagttatgaaatattcaaaaaggttggttctattattgagaatccatacttttacgataaaatgactgccagacaaaacttagagctgcactgtgagtatatgggatttcccaacaaggaacgaatcgatgaggttttgcatttggtggacttgcagaatgtcgagaaaaaacaagtttgtcattactcgttgggtatgaaacaacgac

SEQ ID NO: 27025 - DNA, 260 bp, Unknown
  Description of Unknown: RightRegion for integrase B1026 sequence
acagactttatcaatatgtttgacactccagagaacagacattattatgagaaccagtaaatcactcatacctttgtagaattaaatagttacatgcaatgaatccaatagacaagtttactaacatagatgcagtttaccctacaactgacgcaagggaagaagatataatattagattatgtttgggacttcgccctgctgatacacccagcagaacctaagattatagatgaaaggtttgcattggagggcactcat

SEQ ID NO: 27026 - DNA, 260 bp, Unknown
  Description of Unknown: RightRegion for integrase B1027 sequence
ccgcccattgaccaacctatgtatccgttgggagaggatagcgaatgtagtatggattgaagtaggcgtgagaaagaggctgtatatggatgaaaaaaagaggcgtaaaagggtatgcctgtgcgccctctgtgctggccggagcagcggtaatgggcgcattggcgacggcggtgcttattgtgctgtggtataacggatttcttacagacgttttgattcttatagtatttggcccgatggaagtggtcggatggatg

SEQ ID NO: 27027 - DNA, 109 bp, Unknown
  Description of Unknown: RightRegion for integrase B1028 sequence
cgaaggatctgtttctattttagggttagaccctcgaaagaaccgaaaagaactctttgagcaggttggcgtacaattccaggaagccagctactcggacaagattaag

SEQ ID NO: 27028 - DNA, 260 bp, Unknown
  Description of Unknown: RightRegion for integrase B1029 sequence
aactctatcacattccgcaatggattgtctcacacgttcatctatcgagtaggaggctaatcattaattagccgacctctcacaccaccgtgcataccgttcggtacacggcggttccttagttttcacaaaccactagataatagtcaagcatggatagatatccgagcttggctattattttcttggaaaagatttggttcaagactttcgccattctccaataaccttttctactacaggcaagttcctttgctttc

SEQ ID NO: 27029 - DNA, 260 bp, Unknown
  Description of Unknown: RightRegion for integrase B1030 sequence
acagactttataaagatgtttgatattccaaagaacagacattattatgagaaccactaaatcactcatacctttgtagaattaaatagttacatgcaatgaatccaatagacaagtttaccaacatagatgcagtttaccctacaactgacgcaagggaggaagatataatattagattatgtttgggattttgccctgctgatacatccagcagaacctaagattatagatgaaaggtttgcattggagggcactcat

SEQ ID NO: 27030 - DNA, 260 bp, Unknown
  Description of Unknown: RightRegion for integrase B1031 sequence
actgcctttgtaaagatgtttgacactcctaagaacaggcgttattatgagaatcaataaatcacttatatagttgttgaaccaaatagattacagaccatgaatccaatagataagtttaccaatatagatgcagtttatcctactactgatgcaagagaggaagatacaatattagattatgtttgggactttgccatgttgatacaccctgcaatgccaaaaattatagatgaaaggcttgcattggagggcagttg

SEQ ID NO: 27031 - DNA, 260 bp, Unknown; identical to SEQ ID NO: 27024
  Description of Unknown: RightRegion for integrase B1032 sequence

SEQ ID NO: 27032 - DNA, 260 bp, Unknown
  Description of Unknown: RightRegion for integrase B1033 sequence
atcaactatgtggatggatgcgaaaaggaatttaactacacttacgcatttgcaatctaaataatatacaaaagatgaacggaagagcagagatgtaattttttgacatttaagtgaatatctgatagtatgaaaacatactaatgacgacatcggttccaattcccggaacaagatgtctttttgtgtttttagggagtgttttttatgaatcataccgcatatgacgtaatgagagaatatatgatcgagggagcaga

SEQ ID NO: 27033 - DNA, 260 bp, Unknown
  Description of Unknown: RightRegion for integrase B1034 sequence
gtaaccattcaaatggtcgggagcgtgttcgttctgtactgcgagataccaactcgttaataatggtaagccccggttctttcatgtttttggtgaaagagccggggtatttttgttattttcacccgtttttcggaagaatttgccgaaagtagtagtttcctgccaaaatccagctaagccgatttgaaatcggtagaattttggataaaggagattggcttatgattaggattttactgtcaacgcgtctcggcgaa

SEQ ID NO: 27034 - DNA, 260 bp, Unknown
  Description of Unknown: RightRegion for integrase B1035 sequence
aaggtgcagcgtatcacattcaaaaacggactgtcacacgctttcattttcaaatcgtaatgtatgctcccgacacaaatgtcggggacaaaaaattacccggcaggtaatcttttttcgcctaccgggtatctctatgtattcttatactgccaagttctctctgatttttctaatctcaatgtcttccttgaatctgctgtcatcgctgttcatcagaagcacgaatctgattaccgtatcgttctgagcggcacctt

SEQ ID NO: 27035 - DNA, 260 bp, Unknown
  Description of Unknown: RightRegion for integrase B1036 sequence
gtggaaactttgacgttcaagaatggaatatctcataagttcacctatctcgcaatataaaaggcccggagccgctttcatgtggttctgggccttttgctgtattcgattcaaacgtcccggctgaccatgtgataggcgtaccagtggccccgccgctggaacaggcgataccagcttgtgaactcctgtcctgtgcagtcatagccggtttcatcctgccagtacttgaagatgcttttcccggttttcttgtgttc

SEQ ID NO: 27036 - DNA, 260 bp, Unknown
  Description of Unknown: RightRegion for integrase B1037 sequence
atcaactatgtggatggatgtgaaaaggaatttaactacacttacgcatttgcaatctaaataatatacaaaagatgaacggaggagcagagatgtaattttttgacatttaaccaaatatctgatagtgtcaactacccatcacttaaaggtaatgagcttgtaactgcccagtcgtagtaacggcttacgcctccgaccttttatccccaataggcattactgcctaaagtggcgttacatcatagggtggttgacag

SEQ ID NO: 27037 - DNA, 260 bp, Unknown
  Description of Unknown: RightRegion for integrase B1038 sequence
atcaactatgtggatggatgcgaaaaggaatttaactacacttacgcatttgcaatctaaataatatacaaaagatgaacggaagagcagagatgtaattttttgacatttaagtgaatatctgatagtatgaaaacatactaatgacgacatcggttccaattcccggaacaagatgtctttttgtatttttaaggggtgataaccatgaatcatactgcatatgacgtaatgagagaatatatgatcgagggagcaga

SEQ ID NO: 27038 - DNA, 260 bp, Unknown
  Description of Unknown: RightRegion for integrase B1039 sequence
atcaactatgtggatgggtgcgaaaaggaatttaattacacttacgcatttgcaatctaaataatatacaaaagatgaacggaagagcagagatgcaattttttgacatttaactaaatatctgatagtatgaaaacatactaatgacgacatcggttccaattcccggaacaggatgtctttttgcatttttagggagtgataagcatgaatcatactgcatacgatgtaatgagagaatatatgatcgagggagcaga

SEQ ID NO: 27039 - DNA, 260 bp, Unknown
  Description of Unknown: RightRegion for integrase B1040 sequence
atcaactatgtggatggatgcgaaaaggaatttaactacacttacgcatttgcaatctaaataatatacaaaagatgaacggaagagcagagatgtaattttttgacatttaactaaatatctgatagtatgaaaacatactaatgacgacatcggttccaattcccggaacaggatgtctttttgtgtttttaaggggtgataaccatgaatcataccgcatatgacgtaatgagagaatatatgatcgagggagcaga

SEQ ID NO: 27040 - DNA, 260 bp, Unknown
  Description of Unknown: RightRegion for integrase B1041 sequence
atcaactatgtggatggatgcgaaaaggaatttaactacacttacgcatttgcaatctaaataatatacaaaagatgaacggaagagcagagatacatttttttgacatttaattaaatatctggtagtatggaaacatactaatgatgacatcggttccaattcccggaacaggatgtctttttgtgtttttaaggggtgataaccatgaatcataccgcatatgacgtaatgagagaatatatgatcgagggagcaga

SEQ ID NO: 27041 - DNA, 260 bp, Unknown
  Description of Unknown: RightRegion for integrase B1042 sequence
atcaactacgtggagagatatgaaaaggaatttaactacacttacgcatttgcaatctaaataatatacaaaagatgaacggaagagcagagatgtaattttttgacatttaactaaatatctgatagtatggaaacatactaatgatgacatcggttccaattcccggaacaggatgtctttttgcgttttagaggtgataaccatgaatcataccgcatacgatgtaatgagagaatatatgatcgagggcgcagagt

SEQ ID NO: 27042 - DNA, 260 bp, Unknown
  Description of Unknown: RightRegion for integrase B1043 sequence
gtcattggtgcttcggcaggtcagaggatgccggttcagctgacgatttccagcatctgatcgaacacctcttccatctggcgcaccagtgtgaactgggtgcgggcgcggtcaaggttgtggtcggggcgggcggtgtggaaatagtgatcgccctccagatagtcggtcagaaagcggatgccgcactccagcgtcatcagcttggcaccccaggcaaggctctttttctccgcagggctcatggaagccccggcggt

SEQ ID NO: 27043 - DNA, 260 bp, Unknown
  Description of Unknown: RightRegion for integrase B1044 sequence
gtcattggtgcttcggcaggtcagaaggtgccggttcagctgacgatctccagcatctgatcgaacacctcttccatctgccgcaccagcgtgaactgggtgcgggcgcggtcaaggttgtggtcggggcgggcggtgtggaaatagtggtcgccctccagatagtcggtcagaaagcggatgccgcactccagcgtcatcagcttggcaccccaggcaaggctctttttctccgcagggctcatggaagccccggcggt

SEQ ID NO: 27044 - DNA, 260 bp, Unknown
  Description of Unknown: RightRegion for integrase B1045 sequence
gtggaaacgctgacgttcaagaacggaatatctcacaagtttacctatctcgcaatataaaaggcccggagccgctttcctgcggttctgggccttttgctgtattcggttcaaacgtcccgactgaccatgtgataggcgtaccagtggccccgccgctggaacaggtgataccagcttgtgaactcctgcccggtgcagtcataggggctgttgtaggcttccagatagcagttatcatcgaaccactcagcggcgtc

SEQ ID NO: 27045 - DNA, 260 bp, Unknown
  Description of Unknown: RightRegion for integrase B1046 sequence
gtcattggtgcttcggcaggtcagaaggtgccggttcagctgacgatctccagcatctgatcgaacacctcttccatctggcgcaccagcgtgaactgggtgcgggcgcggtcaaggttgtggccggggcgggcggtgtggaaatagtgatcgccctccagatagtcggtcagaaagcggatgccgcactccagcgtcatcagcttggcaccccaggcaaggctctttttctccgcagggctcatggaggccccggcagt

SEQ ID NO: 27046 - DNA, 260 bp, Unknown
  Description of Unknown: RightRegion for integrase B1047 sequence
aaagaagcattatcgcggcagcttttatctggacggaaccgatatcgcggaagatcatgagtggtcgatgaaccggatcggatttgtctctgaggagcggttgtttttgcggcagaagagtgcaagagagaatgcaaggatgctgggcagcttctatgatacctttgatatggatcagtttgctgcgctgatggagcagatggatcttaccacggcacggaccgtggagaagatgtcgcgcggtgagaatatgaagtttc

SEQ ID NO: 27047 - DNA, 260 bp, Unknown
  Description of Unknown: RightRegion for integrase B1048 sequence
gtcattggtgcttcggcaggtcagaaggtgccggttcagctgacgatctccagcatctgatcgaacacctcttccatctgccgcaccagcgtgaactgggtgcgggcgcggtcaaggttgtggccggggcgggcggtgtggaaatagtgatcgccctccagatagtcggtcagaaagcggatgccgcactccagcgtcatcagcttggcaccccaggcaaggctctttttctccgcagggctcatggaagccccggcggt

SEQ ID NO: 27048 - DNA, 260 bp, Unknown
  Description of Unknown: RightRegion for integrase B1049 sequence
gtggaaatgctgacgttcaagaatggaatttctcacaagttcacttataaggcaatataaaaggcccggagccgctttcctgcggttctgggccttttgctgtattcggttcaaacgtcccgactgaccatgtgataggcgtaccagtggccccgccgctggaacaggtgataccagcttgtgaactcctgcccggtgcagtcataggggctgttgcaggcttccagatagcagttatcatcgaaccactcagcggcgtc

SEQ ID NO: 27049 - DNA, 260 bp, Unknown
  Description of Unknown: RightRegion for integrase B1050 sequence
atcaactatgtagatggatgcgaaaaggagtttaattacacttacgcatttgcaatctaaataatatacaaaagatgaacggaagagcagagatgtaattttttgacatttaatcaaatatctgatagtatgaaaacatactaatgacgacatcggttccaattcccggaacaggatgtctttttgcgtttttagggagtgtttttatgaatcatactgcatatgacgtaatgagagaatatatgatcgagggagcagaa

SEQ ID NO: 27050 - DNA, 260 bp, Unknown
  Description of Unknown: RightRegion for integrase B1051 sequence
gtggaaactttgacgttcaagaacggaatatctcataagttcacctatctcgcaatataaaaggcccggagccgctttcatgtggttctgggccttttgctgtattcgattcaaacgtcccggctgaccatgtgataggcgtaccagtggccccgccgctggaacaggcgatgccagcttgtgaactcctgtcctgtgcagtcataggggctgttgcaggcttccagatagcagttatcatcgaaccactcagcggcgtc

SEQ ID NO: 27051 - DNA, 260 bp, Unknown
  Description of Unknown: RightRegion for integrase B1052 sequence
gacgaaggtctgcacgaggcgcttctgacactccctgtccttaacgtccagatcccgtagccgcaagaggaagtactcgatatgttctcgcgtgatgcggatgccggaggtcagctccaaatcggccagagaagcggtcagggcggctttctgcgcgtccagttcatccatgcgggactttgtagcggcgttgaagatacccgcctctatggcccgcacaaggttgtttatggctttgtctatttctgcaagctgtgctt

SEQ ID NO: 27052 - DNA, 260 bp, Unknown; identical to SEQ ID NO: 27040
  Description of Unknown: RightRegion for integrase B1053 sequence

SEQ ID NO: 27053 - DNA, 260 bp, Unknown; identical to SEQ ID NO: 27048
  Description of Unknown: RightRegion for integrase B1054 sequence

SEQ ID NO: 27054 - DNA, 260 bp, Unknown
  Description of Unknown: RightRegion for integrase B1055 sequence
gtagagattttgacgttcaagaacggaatttctcacacgtttacctataaggcaatataataagccccagagccgcgttcttgcggttctggggctttctttttattcgtccgtgtagtcgctggcgttgaaaagccctgcggaatagatgtgcccgattctgcggccgttactgtcgatcgcggtgcgccgcactgtttcctgaccgtacatattcggccccagctcatagaggtacttcttcgtgcggtactgcccgg

SEQ ID NO: 27055 - DNA, 260 bp, Unknown
  Description of Unknown: RightRegion for integrase B1056 sequence
atcaactatgtggatggatgcgaaaaggaatttaactacacttacgcatttgcaatctaaataatatacaaaagatgaacggaagagcagagatgtaattttttgacatttaactaaatatttgatagtatggaaacatactaatgatgacatcggttccaattcccggaacaggatgtctttttgtgtttttaaggggtgataaccatgaatcataccgcatatgacgtaatgagagaatatatgatcgagggagcaga

SEQ ID NO: 27056 - DNA, 260 bp, Unknown
  Description of Unknown: RightRegion for integrase B1057 sequence
atcaactatgtggatggatgcgaaaaggaatttaactacacttacgcatttgcaatctaaataatatacaaaagatgaacggaagagcagagatgtaattttttgacatttaactaaatatctgatagtatgaaaacatactaatgacgacatcggttccaattcccggaacaggatgtctttttgtgtttttagggagtgttttttatgaatcataccgcatatgacgtaatgagagaatatatgatcgagggagcaga

SEQ ID NO: 27057 - DNA, 260 bp, Unknown
  Description of Unknown: RightRegion for integrase B1058 sequence
atcaactatgtggatggatgcgaaaaggaatttaactacacttacgcatttgcaatctaaataatatacaaaagatgaacggaagagcagagatgtaattttttgacatttaactaaatatctgatagtatgaaaacatactaatgacgacatcggttccaattcccggaacaagatgtctttttgcgttttttagggagtgtttttatgaatcatactgcatatgacgtaatgagagaatatatgatcgagggagcaga

SEQ ID NO: 27058 - DNA, 260 bp, Unknown; identical to SEQ ID NO: 27044
  Description of Unknown: RightRegion for integrase B1059 sequence

SEQ ID NO: 27059 - DNA, 260 bp, Unknown
  Description of Unknown: RightRegion for integrase B1060 sequence
atcaactatgtggatggatgtgaaaaggaatttaactacacttacgcatttgcaatctaaataatatacaaaagatgaacggaagagcagagatacatttttttgacatttaattaaatatctggtagtatggaaacatactaatgatgacatcggttccaattcccggaacaggatgtctttttgtgtttttaaggggtgataaccatgaatcataccgcatatgacgtaatgagagaatatatgatcgagggagcaga

SEQ ID NO: 27060 - DNA, 260 bp, Unknown
  Description of Unknown: RightRegion for integrase B1061 sequence
gtcattggtgcttcggcaggtcagaggatgccggttcagctgacgatctccagcatctgatcgaacacctcttccatctggcgcaccagcgtgaactgggtgcgggcgcggtcaaggttgtggtcggggcgggcggtgtggaaatagtgatcgccctccagatagtcggtcagaaagcggatgccgcactccagcgtcatcagcttggcaccccaggcaaggctctttttctccgcagggctcatggaagccccggcggt

SEQ ID NO: 27061 - DNA, 260 bp, Unknown
  Description of Unknown: RightRegion for integrase B1062 sequence
atcaactatgtggatggatgcgaaaaggaatttaactacacttacgcatttgcaatctaaataatatacaaaagatgaacggaagagcagagatgtaattttttgacatttaaccaaatatctgatagtatgaaaacatactaatgacgacatcggttccaattcccggaacaggatgtctttttgtgtttttaaggggcgataaccatgaatcataccgcatacgacgtaatgagagaatatatgatcgagggagcaga

SEQ ID NO: 27062 - DNA, 260 bp, Unknown; identical to SEQ ID NO: 27037
  Description of Unknown: RightRegion for integrase B1063 sequence

SEQ ID NO: 27063 - DNA, 260 bp, Unknown
  Description of Unknown: RightRegion for integrase B1064 sequence
atcaactatgtggatggatgcgaaaaggaatttaactacacttacgcatttgcaatctaaataatatacaaaagatgaacggaagagcagagatgtaattttttgacatttaactaaatatctgatagtatgaaaacatactaatgacgacatcggttccaattcccggaacaggatgtctttttgtgtttttaaggggtgttttttatgaatcataccgcatatgacgtaatgagagaatatatgatcgagggagcaga

SEQ ID NO: 27064 - DNA, 260 bp, Unknown
  Description of Unknown: RightRegion for integrase B1065 sequence
atcaactatgtggatggatgcgaaaaggaatttaactacacttacgcatttgcaatctaaataatatacaaaagatgaacggaagagcagagatgtaattttttgacatttaactaaatatctgatagtatggaaacatactaatgatgacatcggttccaattcccggaacaggatgtctttttgtgcttttagggagtgataagcatgaatcatactgcatacgatgtaatgagagaatatatgattgagggcgcaga

SEQ ID NO: 27065 - DNA, 260 bp, Unknown
  Description of Unknown: RightRegion for integrase B1066 sequence
atcaactatgtggatggatgtgaaaaggaatttaactacacttacgcatttgcaatctaaataatatacaaaagatgaacggaagagcagagatgtaattttttgacatttaactaaatatctggtagtatgaaaacatactaatgacgacatcggttccaattcccggaacaggatgtctttttgtgtttttaaggggtgataaccatgaatcataccgcatatgacataatgagagaatatatgatcgagggagcaga

SEQ ID NO: 27066 - DNA, 260 bp, Unknown
  Description of Unknown: RightRegion for integrase B1067 sequence
ttagagaattataggtactggaataaagatatagggctgtatgtgcagttggtagcataattctatataggggttatctaaatataggagcctcctgtgattaagttatttataacgatcacaggaggttaattttatgataacagtagaaaagatagggcaaggtacttattttgaggatgcttttaagctctcttttaagtatgatcctgttacagtaagtaaggtaaaagagctggcacagcggagatatttaccag

SEQ ID NO: 27067 - DNA, 260 bp, Unknown; identical to SEQ ID NO: 27034
  Description of Unknown: RightRegion for integrase B1068 sequence

SEQ ID NO: 27068 - DNA, 260 bp, Unknown
  Description of Unknown: RightRegion for integrase B1069 sequence
atcaactatgtggatggatgcgaaaaggaatttaactacacttacgcatttgcaatctaaataatatacaaaagatgaacggaagagcagagatgtaattttttgacatttaactaaatatctggtagtatgaaaacatactaatgacgacatcggttccaattcccggaacaagatgtctttttgtgtttttagggagtgttttttatgaatcataccgcatatgacgtaatgagagaatatatgatcgagggagcaga

SEQ ID NO: 27069 - DNA, 260 bp, Unknown
  Description of Unknown: RightRegion for integrase B1070 sequence
gatttcgcacgatggagcaatctgctcttctatggaacggcggcttgtaaaaaatcatgatttatggtacgatattgccgatctaccacattcatcgcatggtggaagaaacaggtgctgttttcaatgaccagtcacatatcatctatgtgaactcgcagatcaaggatgaatctgcgcttggaaaactgatgcacgattttttctgtaccgatgcaaaggatatgttttatccggtgcttgcagagcgagtacaatac

SEQ ID NO: 27070 - DNA, 260 bp, Unknown
  Description of Unknown: RightRegion for integrase B1071 sequence
gatgggtgtgtacctcagtgcccggcccgactggggatcgtctggagctcgaagcggtagatctgcccggcgtccgggtatttttcgcggtcgaccgggctcagaaacatatccagcggccggacccagaggccgccgtcgccgtaaagcttgcggtagatcacgcagggctcgttcgtctcggaatcacgggcaagcgcctccaccagataataatctcccttgaaatggcggtagacccgccccggctgtacgtcacg

SEQ ID NO: 27071 - DNA, 260 bp, Unknown
  Description of Unknown: RightRegion for integrase B1072 sequence
atcaactatgtggatggatgcgaaaaggaatttaactacacttacgcatttgcaatctaaataatatacaaaagatgaacggaagagcagagatgtaattttttgacatttaagtgaatatctgatagtatgaaaacatactaatgacgacatcggttccaattcccggaacaagatgtctttttgcgtttttaaggggtgataaccatgaatcataccgcatatgatgtaatgagagaatatatgatcgagggagcaga

SEQ ID NO: 27072 - DNA, 260 bp, Unknown
  Description of Unknown: RightRegion for integrase B1073 sequence
atcaactatgtggatggatgcgaaaaggagtttaattacacttatgcatttgcaatctaaataatatacaaaagatgaacggaagagcagagatgtaattttttgacatttaactaaatatctggtagtatgaaaacatactaatgacgacatcggttccaattcccggaacaagatgtctttttgtttttttagggagtgttttttatgaatcataccgcatatgacgtaatgagagaatatatgatcgagggagcaga

SEQ ID NO: 27073 - DNA, 260 bp, Unknown
  Description of Unknown: RightRegion for integrase B1074 sequence
atcaactatgtggatggatgcgaaaaggaatttaactacacttacgcatttgcaatctaaataatatacaaaagatgaacggaagagcagagatacatttttttgacatttaattaaatatctggtagtatggaaacatactaatgatgacatcggttccaattcccggaacaggatgtctttttgtgtttttaaggggtgataactatgaatcataccgcatatgacgtgatgagagaatatatgatcgagggagcaga

SEQ ID NO: 27074 - DNA, 260 bp, Unknown; identical to SEQ ID NO: 27038
  Description of Unknown: RightRegion for integrase B1075 sequence

SEQ ID NO: 27075 - DNA, 260 bp, Unknown; identical to SEQ ID NO: 27040
  Description of Unknown: RightRegion for integrase B1076 sequence

SEQ ID NO: 27076 - DNA, 260 bp, Unknown
  Description of Unknown: RightRegion for integrase B1077 sequence
atcaactatgtggatggatgcgaaaaggaatttaactacacttacgcatttgcaatctaaataatatacaaaagatgaacggaagagcagagatgtaattttttgacatttaagtgaatatctgatagtatgaaaacatactaatgacgacatcggttccaattcccggaacaggatgtctttttgtgtttttagggagtgataatcatgaatcataccgcatatgatgtaatgagagagtacatgatcgagggagcaga

SEQ ID NO: 27077 - DNA, 260 bp, Unknown
  Description of Unknown: RightRegion for integrase B1078 sequence
agcgattgcggaaaagaggaaataggaatagacaatcatatatttacctctgtacgctaatggtaactaaagcagatgtgcaggcctttatggctgaacgttcagagtatacaaaagcgaacagatttgaagatattgaagtaaaagtctatatataaagttctgcgagggaaagcaacattgctttccctcgtttcatgtttgggaataaaccctaattatcagggtttgttcctttttttattttcattatacgagga

SEQ ID NO: 27078 - DNA, 260 bp, Unknown; identical to SEQ ID NO: 27044
  Description of Unknown: RightRegion for integrase B1079 sequence

SEQ ID NO: 27079 - DNA, 260 bp, Unknown
  Description of Unknown: RightRegion for integrase B1080 sequence
atcaactacgtggagggatatgaaaaggaatttaactacacttacgcatttgcaatctaaataatatacaaaagatgaacggaagagcagagatgtaattttttgacatttaactaaatatctgatagtatggaaacatactaatgatgacatcggttccaattcccggaacaggatgtctttttgcgttttagaggtgataaccatgaatcataccgcatacgatgtaatgagagaatatatgatcgagggcgcagagt

SEQ ID NO: 27080 - DNA, 260 bp, Unknown
  Description of Unknown: RightRegion for integrase B1081 sequence
gtagagattttgacgttcaagaacggaatttctcatacgttcacctataaggcaatataataagccccagagccgcgctcttgcggttctggggctttctttttattcgtccgtgtagtcgctggcgttaaaaagccctgcggaatagacgtgccctattctgcggccgttgctgtcgatcgcggtgcgccgcaccgtttcctgaccgtacatattcggccccagctcatagaggtacttcttcgtgcggtactgcccgg

SEQ ID NO: 27081 - DNA, 260 bp, Unknown
  Description of Unknown: RightRegion for integrase B1082 sequence
gtggaaatgctgacgttcaagaatggaatttctcacaagttcacttataaggcaatataaaaggcccggagccgctttcctgcggttctgggcctttttgctgtattcggtattaaacgtccctgctgactctgtgatatgcgtaccagtgaccccggcggcggaacagtttgtaatgggttgtaaattcttgcccggtgcagtcgtaggggctgtcgtaggcttccagatagcagttgtcccggaaccagtcggccgct

SEQ ID NO: 27082 - DNA, 260 bp, Unknown
  Description of Unknown: RightRegion for integrase B1083 sequence
gtggaaacgctgacattcaagaacggaatatctcacaagtttacctatctcgcaatataaaaggcccggagccgctttcctgcggttctgggccttttgctgtattcggttcaaacgtcccgactgaccatgtgataggcgtaccagtggccccgccgctggaacaggtgataccagcttgtgaactcctgcccggtgcagtcataggggctgttgtaggcttccagatagcagttatcatcgaaccactcagcggcgtc

SEQ ID NO: 27083 - DNA, 260 bp, Unknown; identical to SEQ ID NO: 27071
  Description of Unknown: RightRegion for integrase B1084 sequence

SEQ ID NO: 27084 - DNA, 260 bp, Unknown
  Description of Unknown: RightRegion for integrase B1085 sequence
gtggaaatgctgacgttcaagaatggaatttctcacaagttcacttataaggcaatataaaaggcccggagccgctttcctgcggttctgggccttttgctgtattcggttcaaacgtcccggctgaccatgtgataggcgtaccagtggccccgccgctggaacaggtgataccagcttgtgaactcctgcccggtgcagtcataggggctgttgcaggcttccagatagcagttatcatcgaaccactcagcggcgtc

SEQ ID NO: 27085 - DNA, 260 bp, Unknown
  Description of Unknown: RightRegion for integrase B1086 sequence
atcaactatgtggatggatgcgaaaaggaatttaactacacttacgcatttgcaatctaaataatatacaaaagatgaacggaagagcagagatgtaattttttgacatttaactaaatatttgatagtatggaaacatactaatgatgacatcggttccaattcccggaacaggatgtctttttgcatttttagggggtgataaccatgaaccataccgcatatgatgtaatgagagaatatatgatcgagggagcaga

SEQ ID NO: 27086 - DNA, 260 bp, Unknown; identical to SEQ ID NO: 27068
  Description of Unknown: RightRegion for integrase B1087 sequence

SEQ ID NO: 27087 - DNA, 260 bp, Unknown; identical to SEQ ID NO: 27085
  Description of Unknown: RightRegion for integrase B1088 sequence

SEQ ID NO: 27088 - DNA, 260 bp, Unknown
  Description of Unknown: RightRegion for integrase B1089 sequence
gtagagactttgacgttcaagaacggaatttctcatacgtttacctataaggcaatataataagccccagagccgcgctcttgcggttctggggctttctttttattcgtccgtgtagtcgctggcgttgaaaagccctgcggaatagacgtgcccgattctgcggccgttgctgtcgatcgcggtgcgccgcactgtttcctgaccgtacatattcggccccagctcatagaggtacttcttcgtgcggtactgcccgg

SEQ ID NO: 27089 - DNA, 260 bp, Unknown
  Description of Unknown: RightRegion for integrase B1090 sequence
gtagagactttgacgttcaagaacggaatttctcatacgtttacctataaggcaatataataagccccagagccgcgctcttgcggttctggggccttctttttattcgtccgtgtagtcactggcattaaaaagccctgcggaatagacgtgccctattctgcggccgttactgtcgatcgcggtgcgccgcaccgtttcctgaccgtacatattcggccccagctcatagaggtacttcttcgtgcggtactgcccgg

SEQ ID NO: 27090 - DNA, 260 bp, Unknown; identical to SEQ ID NO: 27059
  Description of Unknown: RightRegion for integrase B1091 sequence

SEQ ID NO: 27091 - DNA, 260 bp, Unknown
  Description of Unknown: RightRegion for integrase B1092 sequence
atcaactatgtggatggatgcgaaaaggaatttaactacacttacgcatttgcaatctaaataatatacaaaagatgaacggaagagcagagatgtaattttttgacatttaactaaatatttgatagtatggaaacatactaatgatgacatcggttccaattcccggaacaggatgtctttttgcatttttaggggggtgataaccatgaaccataccgcatatgatgtaatgagagaatatatgatcgagggagcag

SEQ ID NO: 27092 - DNA, 260 bp, Unknown
  Description of Unknown: RightRegion for integrase B1093 sequence
atcaactatgtggatggatgcgaaaaggaatttaactacacttacgcatttgcaatctaaataatatacaaaagatgaacggaagagcagagatgtaattttttgacatttaagtgaatatctgatagtatgaaaacatactaatgacgacatcggttccaattcccggaacaggatgtctttttgtgtttttaaggggtgataaccatgaatcataccgcatatgacgtaatgagagaatatatgatcgagggagcaga

SEQ ID NO: 27093 - DNA, 260 bp, Unknown
  Description of Unknown: RightRegion for integrase B1094 sequence
gtggaaatgctgacgttcaagaatggaatttctcacaagttcacttataaggcaatataaaaggcccggagccgctttcctgcggttctgggccttttgctgtattcggttcaaacgtcccgactgaccatgtgataggcgtaccagtggccccgccgctggaacaggtgataccagcttgtgagctcctgttcggtgcagtcataggggctgttgtaggcttccagatagcagttatcatcgaaccactcagcggcgtc

SEQ ID NO: 27094 - DNA, 260 bp, Unknown; identical to SEQ ID NO: 27033
  Description of Unknown: RightRegion for integrase B1095 sequence

SEQ ID NO: 27095 - DNA, 260 bp, Unknown; identical to SEQ ID NO: 27037
  Description of Unknown: RightRegion for integrase B1096 sequence

SEQ ID NO: 27096 - DNA, 260 bp, Unknown
  Description of Unknown: RightRegion for integrase B1097 sequence
gtaaccattcaaatggtcgggagcgtgttcgttctgtactgcgagataccaactcgttaataatggtaagccccggttctttcatgtttttggtgaaagagccggggtatttttgttatttttacccgtttttcggaagaatttgccgaaagtagtagtttcctgccaaaatccagctaagccgatttgaaatcggtagaattttggataaaggagattggcttatgattaggattttactgtcaacgcgtctcggcgaa

SEQ ID NO: 27097 - DNA, 260 bp, Unknown
  Description of Unknown: RightRegion for integrase B1098 sequence
atcaactatgtggatgggtgcgaaaaggaatttaattacacttacgcatttgcaatctaaataatatacaaaagatgaacggaagagcagagatgcaattttttgacatttaactaaatatctgatagaatgaaaacatactaatgacgacatcggttccaattcccggaacaggatgtctttttgcatttttagggagtgataagcatgaatcataccgcatacgatgtaatgagagaatatatgatcgagggcgcaga

SEQ ID NO: 27098 - DNA, 260 bp, Unknown
  Description of Unknown: RightRegion for integrase B1099 sequence
ggtctggtgtcaaatatcgtgttcaagaacggcttatgtcacacatttattttcaggtaagcaaaaaagcagggaattaacaccctgctttctttatttctgctatccttaaaaatataagatttcaagttacaaaattagcatagcatccgcaacttttaaaaatcctgcaatattcgcgcctgcaatgaggtttccatccatgccgtatttctttgccgcactgtcgatattgttaaaaatatttttcataatctttt

SEQ ID NO: 27099 - DNA, 109 bp, Unknown
  Description of Unknown: RightRegion for integrase B1100 sequence
ggccaggtgcaaaccatcgtgttcaagaacggcctctcacacactttcatcctgaaatgacaaaagacccgacggcataatcgccatcgggtctttacttttttctaca

SEQ ID NO: 27100 - DNA, 260 bp, Unknown
  Description of Unknown: RightRegion for integrase B1101 sequence
aatggaaaggttcagcggatcgtttttagaaacggactttctcaaacctttatcaggtaaaaataaagcaccagaatttttgaactggtgcttttattttgtcctcgtttggtcctctggactgtctgcggacattatatggatattttacggacattccatagattttatacggactgtccatgcaaattgcattttattttttaggtcagtagcaatttgcactgcctgattgaaccactcaatataccactgatagt

SEQ ID NO: 27101 - DNA, 260 bp, Unknown
  Description of Unknown: RightRegion for integrase B1102 sequence
gatgggtgtgtacctcagtgcccagcccggctggggatcgtctggagctcgaagcggtaggtctgcccggcgtccgggtatttttcgcggtcgaccgggctcaggaacatatccagcggccggacccagaggccgccgtcgccgtaaagcttgcggtagatcacgcagggctcgttcgtctcggaatcacgggcaagcgcctccaccagataataatcccccttgaaatggcggtagacctgccccagctgtacgtcacg

SEQ ID NO: 27102 - DNA, 260 bp, Unknown
  Description of Unknown: RightRegion for integrase B1103 sequence
caaagatattgccgcagcttttttctttgctgtatcgcacaaaatcggcaaaggcgatgaccgattttcaaagtgcgttttatagagatgtccaactgcttccgggcggttggattttttcaggctgtcgaaaaactcttgtaggggcgagcattgctcgcccgcgcccgtttgccttgcaagaaactatcccggaaaatgcgttgctgcggtaagttgacgggcgaccaatggtcgcccctacacacgcaatagagcaa

SEQ ID NO: 27103 - DNA, 260 bp, Unknown
  Description of Unknown: RightRegion for integrase B1104 sequence
tgggggaaaactatatcaaccatacatattaaaaagtatctcagaaaaagaaacgggtaacattattaagaagaatagcaagaaattcattcgtcaaactattagtaaagaaacttctaatacaatgcgcagagcattagaaaatgttgttgccaaaggtggaggaaaggctgcatatattgacggataccgtattggtggaaaaacaggaactgcacaaaaagtagaaaatggcgtttacctagtaaataattacatta

SEQ ID NO: 27104 - DNA, 260 bp, Unknown
  Description of Unknown: RightRegion for integrase B1105 sequence
ggtctggtgtcaaacattgtattcaagaacggcttatgtcacacattcattttcaggtaagcaaaaagcagggaactaagccctgcttttcttcttttccgttatccttataaatataagattttaagttacaaaattagcatagcgtctccaaaactgaagaatctgtatttctcctgcaccgcaacttcatatgcatgaagcacatgttctcttcctgcaagtgctgataccagcataacaagtgttgattctggaag

SEQ ID NO: 27105 - DNA, 114 bp, Unknown
  Description of Unknown: RightRegion for integrase B1106 sequence
gtttcctcattttgttcaccgcagcacaggcagctatcgctgagaagaatgcataattagcataaaatatagattcatgcgcgagcatgagagtgtccaaacgtaaaatggctc

SEQ ID NO: 27106 - DNA, 260 bp, Unknown
  Description of Unknown: RightRegion for integrase B1107 sequence
ggccgggtgcaaaccatcgtgttcaagaacggcctctcacacactttcatcctgaaatgacaaaagacccgacggcataatcgccatcgggtctttacttttttctacatacaaatatcgcaaaaagcgcgaattttgtatcaaactatcagcatagcatcgccaaaggaaaagaagcgatacttttcctccacagctacgcggtaagcttccatggtcttttcgtaaccatagaaagcggacaccagcatgatcagggt

SEQ ID NO: 27107 - DNA, 260 bp, Unknown
  Description of Unknown: RightRegion for integrase B1108 sequence
ggtctggtgtcaaatatcgtgttcaagaacggattatgtcacacatttattttcagataagcaaaaagcagggagctaagccctgcttttcttcttttccgttatccttataaatataagattttaagttacaaaattagcatagcgtctccaaagctgaagaatctgtatttttcctgcacagcaacctcataggcatgaagcacatgctctcttccagcaagtgctgataccagcataacaagtgttgattctggaag

SEQ ID NO: 27108 - DNA, 260 bp, Unknown
  Description of Unknown: RightRegion for integrase B1109 sequence
ggtctggtgtcaaatatcgtgttcaagaacggattatgtcacacatttattttcagataagcaaaaagcagggagctaagccctgcttttcttcttttccgttatccttataaatataagattttaagttacaaaattagcatagcgtctccaaatgagaagaatctgtacttctcctccaccgcaatcttatatgcttcaagaatcttctcgcggtcatacaatgcagaaaccagcatcaacaatgtggattccggcaa

SEQ ID NO: 27109 - DNA, 260 bp, Unknown
  Description of Unknown: RightRegion for integrase B1110 sequence
ccagctgggctgttgctgttttacatagcacgaccaaggcaaagagaccgcagatcgtagtctgcggtctcttcttttttttggtgcgggggattaatgctgtactacatagcagtagtacgccgcggccttgtcctcgacggcgtccttgtcatcgagccaagcgtgcgccatgtccgcgtaaaactcggcgttgccgccaagaccgtactttttcgcgacctcgcaaaaatcggagtacatcgcgcacattatcgcgt

SEQ ID NO: 27110 - DNA, 260 bp, Unknown
  Description of Unknown: RightRegion for integrase B1111 sequence
ggtctggtgtcaaatatcgtgttcaagaatggattatgtcacacatttattttcagataagcaaaaagcagggagctaagccctgcttttcttcttttcagttatccttataaatataagattttaagttacaaaattagcatagcgtcaccaaagctgaaaaacctatatctttcctctacagcctctttgtatgcattgaggacatgctctctgcctgctaatgctgacacaagcatgacaagtgtagactgtggcag

SEQ ID NO: 27111 - DNA, 260 bp, Unknown
  Description of Unknown: RightRegion for integrase B1112 sequence
ggtctggtgtcaaatatcgtgttcaaaaacggcttatgccatacatttattttcaggtaagcaaaaagcagggaactaagccctgcttttcttcttttccgttatccttacaaatataagattttaagttacaaaattagcatagcgtcaccaaagctgaaaaacctgtatctttcctctacagcctctttgtatgcattgaggacatgctctctgcctgctaatgctgacacaagcatgacaagtgtagactgtggcag

SEQ ID NO: 27112 - DNA, 201 bp, Unknown
  Description of Unknown: RightRegion for integrase B1113 sequence
ggtctggtgtcaaacattgtattcaagaacggcttatgtcacacattcattttcaggtaagcaaaaagcagggaactaagccctgcttttcttcttttccgttatccttataaatataagattttaagttacaaaattagcatagcgtcaccaaagctgaaaaacctgtatctttcctctacagcctctttgtatgcattg

SEQ ID NO: 27113 - DNA, 260 bp, Unknown
  Description of Unknown: RightRegion for integrase B1114 sequence
ggccgggtgcaaaccatcgtgttcaagaacggtctctcgcacaccttcatcctgaaatgacaaaagacccgacggcataatcgccatcgggtctttacttttttctacatacaaatatcgcaaaaagcgcgaattttgtatcagactatcagcatagcatcgccaaaggagaagaaacggtacttctctgccacagctacctcataggcgtgcatggtcttttcgtagccgtatagggcggacgccaacatgatcagggt

SEQ ID NO: 27114 - DNA, 198 bp, Unknown
  Description of Unknown: RightRegion for integrase B1115 sequence
ggccgggtgcaaaccatcgtgttcaagaacggcctctcacacactttcatcctgaaatgacaaaagacccgacggcataatcgccatcgggtctttacttttttctacatacaaatatcgcaaaaagcgcgaattttgtatcaaactatcagcatcgcatcgccaaaggagaagaaacggtacttctctgccacagct

SEQ ID NO: 27115 - DNA, 260 bp, Unknown; identical to SEQ ID NO: 27070
  Description of Unknown: RightRegion for integrase B1116 sequence

SEQ ID NO: 27116 - DNA, 260 bp, Unknown
  Description of Unknown: RightRegion for integrase B1117 sequence
agaaataatagccacaatggcacatcagcttatggaaaacgcttcaataaaagaacttgaagaagcaggtcttggtggacactatgtagaccataaaaaagcaacattttatacagatgctacaggtaatgctattgtttcctaactgcatagggatacagttagggatgataaaattctataaaaaaagtcttatcaacttcattatattttacagacttaacaatatttctaattaattgtcttttaacctttatatc

SEQ ID NO: 27117 - DNA, 260 bp, Unknown
  Description of Unknown: RightRegion for integrase B1118 sequence
gtttccgcattttgttcaccgcagcacaggcagctatcgctgagaagaatgcataattagcataaaatatagattcatgcgcgagcatgagagtgtccaaacgtaaaatggctcctggaactttagaaaaatctgaagctccaggagctttttgatgtattttgtagtgaaacgtggaataatcatttgtagaaagttttaattatgtgatctttgcatttatgatcaggagatttgatttcaaaactccggaatgcgag

SEQ ID NO: 27118 - DNA, 260 bp, Unknown
  Description of Unknown: RightRegion for integrase B1119 sequence
ggccgggtgcaaaccatcgtgttcaagaacggtctctcacacactttcatcctgaaatgacaaaagacccgacggcataatagccatcgggtctttacttttttctacatacaaatatcgcaaaaagcgcgaattttgtatcaaactatcagcatcgcatcgccgaaggaaaagaagcggtacttttcctctacagcaactttataggcagccatggtcttttcgtagccgtagagggcagagaccagcatgatgagggt

SEQ ID NO: 27119 - DNA, 260 bp, Unknown
  Description of Unknown: RightRegion for integrase B1120 sequence
gttaccttggaaaagtttccgacacttgagacggttgttcttttgtcccaactgaaataaaagccggatgattacattaatgtcacgattgaacttgatgatgtggatatttcttctggaaagtctgggtctagtggaacactacatttagaaaatccaatcgctattatactatatatggtatgatagcgattggatttttctttatagagtttttttccaatcattggtatatacgaaatgattgaaatcaggtataa

SEQ ID NO: 27120 - DNA, 260 bp, Unknown
  Description of Unknown: RightRegion for integrase B1121 sequence
ggtctggtgtcaaatatcgtgttcaagaacggattatgtcacacatttattttcagataagcaaaaagcagggagctaagccctgcttttcttcttttccgttatccttataaatataagattttaagttacaaaattagcatagcgtctccaaaactgaagaatctgtatttttcctgcacagcaacctcataggcatgaagcacatgctctcttccagcaagtgctgataccagcataacaagtgttgattctggaag

SEQ ID NO: 27121 - DNA, 109 bp, Unknown
  Description of Unknown: RightRegion for integrase B1122 sequence
gtttcctcattttgttcgccgcagcacaggcagctatcgcagagaagaatgcataattagcatattgttaaggggcaaagcgaaatatcctctaaagaggtaaaatagt

SEQ ID NO: 27122 - DNA, 260 bp, Unknown
  Description of Unknown: RightRegion for integrase B1123 sequence
acgaataagtttatatataaggccacaaagccccctaagaacgcttctacgaaaccgtgacatagcaatagccgcccgacgaatcgggcggctatttttatccatttttgcacttgcatccgcaatttctgcatgtctcggcggagacctcttttcccgtgcgcttgcagtagaaccgcgggccacttccctgccgtatgtgccggcagttcgggaatcctctttccatcaagacgcttttcttcggcttctctattttt

SEQ ID NO: 27123 - DNA, 260 bp, Unknown
  Description of Unknown: RightRegion for integrase B1124 sequence
cgcattgtagaaatcgtgttctccaatgggctttcacaccaattcatatatcgcaaataaataagtcccaacaataggatttgcccatatctcctatcgttgggattttgcaaatgctttatttacgggatttcttgcatctcggaaaccacgttcatctgacacccaaaggttgtgacgcagaaagtcatcggccttcctgcttcttctgcttcttttcttacgtattctttcgctttttctatgaaataatattgtct

SEQ ID NO: 27124 - DNA, 109 bp, Unknown
  Description of Unknown: RightRegion for integrase B1125 sequence
agggtggctgccatcaccttcaaaaacggaatagagcaccgcttcacctataaggcgtgaaaaagcccccggccgtgtggtcgggggcttcgctcttctcatgcgcaat

SEQ ID NO: 27125 - DNA, 109 bp, Unknown
  Description of Unknown: RightRegion for integrase B1126 sequence
ggccgggtgcaaaccatcgtgttcaagaacggtctctcacacactttcatcctgaaatgacaaaagacccgacggcataatcgccatcgggtctttacttttttctaca

SEQ ID NO: 27126 - DNA, 260 bp, Unknown
  Description of Unknown: RightRegion for integrase B1127 sequence
cggttcagaaatggcatagaacaccgcttcgtttacaagcaaatcgaaccggcagaataacgaaaaagccggacggcataaggatttcacccttgtcgtccggctttgtttggttacttgtttagtatcagcatggcatccccgaaagaaaaaaaccggtaacgttccttcaccgcctcacggtagacgcgcagcgcctcctcacgccccatcagggcggaaatgagcatcaaaagcgtgctctgcggcaggtggaagtt

SEQ ID NO: 27127 - DNA, 260 bp, Unknown
  Description of Unknown: RightRegion for integrase B1128 sequence
aatggaaaggttcagcggatcgtttttagaaacggactttctcaaacctttatcaggtaaaaataaagcaccagaatttttgaactggtgcttttattttgtctgcatagtgtccacggacattccataggacaaaatgcagatatttcacggacattccatagattttacacggactgtccaagcaaattacgttttattttttatgtcaatagcaatttgcactgcctgattgaacccctctatatacccctgatagt

SEQ ID NO: 27128 - DNA, 260 bp, Unknown
  Description of Unknown: RightRegion for integrase B1129 sequence
agtaacggcaccaaccaaaggaagcattggaatgaatggccgtgtggcatctatgcttgaagtaggaacgggatttcatccggaattaacgggacgtgaaaacatttatatgaatggggcaatattggggatgagccgtgcagaaatcggagaaaaactggatcagattatcgcattttccgaatgtggagagtttatcgatacgcctgtaaaacgatattccagtgggatgtatgttaaacttgcattttctgtggcag

SEQ ID NO: 27129 - DNA, 260 bp, Unknown
  Description of Unknown: RightRegion for integrase B1130 sequence
acgaataagtttatatataaggccacaaagccccctaagaacgcttctacgaagccgtgacatagcaatagccgcccgacgaatcgggcggctatttttatccatttttgcacttgcatccgcaatttctgcatgtctcggcggagacctcttttcccgtgcgcttgcagtagaaccgcgggccacttccctgccgtatgtgccggcagttcgggaatcctctttccatcaagacgcttttcttcggcttctctattttt

SEQ ID NO: 27130 - DNA, 260 bp, Unknown
  Description of Unknown: RightRegion for integrase B1131 sequence
ggccgggtgcaaaccatcgtgttcaagaacggcctctcacacactttcatcctgaaatgacaaaagacccgacggcataatcgccatcgggtctttacttttttctacatacaaatatcgcaaaaagcgcgaattttgtatcaaactatcagcatagcatcgccaacgtgtcggaaacgtacagaatctctacattctgcgatttcttttacgctgaaaaaataaggtcgagtcgtcctatacattctactacgaaaaag

SEQ ID NO: 27131 - DNA, 260 bp, Unknown
  Description of Unknown: RightRegion for integrase B1132 sequence
cttaacaaatccgacttccggggaggtcaaaatctggggaaaacccttgcaggggaatgaaaagaaattgctgccccgtatcggcagcttgattgagtcccccggtttttatcccaatctgaccggcacagagaacctgcgtatctttgctaccctgcggggcgtgccaaacaatcatgccatcaaagacgctctggatttggtgggactgccctacaaagataaaaagctcttttcacagtattctcttggtatgaagc

SEQ ID NO: 27132 - DNA, 260 bp, Unknown
  Description of Unknown: RightRegion for integrase B1133 sequence
cgcattgtggaaatcgtgttctccaatgggctttcacaccaattcatatatcgcaaataaataagtcccaacaataggatttgcccatgtctcctatcgttgggattttgtaaatgctttattttacgggatttcttacatctcggaaaccacgttcatctgacacccaaaggttgtgacgcagaaagtcatcggccttcctgcttcttctgcttcttttcttacgtattctttcgctttttctatgaaataatattgtc

SEQ ID NO: 27133 - DNA, 260 bp, Unknown
  Description of Unknown: RightRegion for integrase B1134 sequence
acgaataagtttatatataaggccacaaagccccctaagagcgcttctacgaagccgtgacatagcaatagccgcccgacgaatcgggcggctattttttatccatttttgcacttgcatccgcaatttctgcacgtctcggcggccacttctttccctgttcgcttgcagtagaaccgcgggccacttccctgccgtatgtgccggcagttcgggaatcctctttccatcaagacgcttttcttcggcttctctatttt

SEQ ID NO: 27134 - DNA, 260 bp, Unknown
  Description of Unknown: RightRegion for integrase B1135 sequence
ggccgggtgcaaaccatcgtgttcaagaacggcctctcacacactttcatcctgaaatgacaaaagacccgacggcataatagccatcgggtctttacttttttctacatacaaatatcgcaaaaagcgcgaattttgtattaaactatcagcatagcatcgccaaaactgaaaaagcggtacttctgttccacagcaaccttgtatgcagccatggtcttttcgtagccgtagagcgccgatatcagcatgatgagggt

SEQ ID NO: 27135 - DNA, 260 bp, Unknown
  Description of Unknown: RightRegion for integrase B1136 sequence
acaatgagtgtttccgttcactggccagaacaatatctcatgcgaaggattccagcatgacggagaaggcaaaacagaccccctgttttcagataattatgataatgcgtaagtagttgattttcaacggtcttgctttttccgacacaacttttcgcttatattcgttctatatataaaaagaaaaaacctgtcatattgtgaaggcagttaaaaaaaaggagaaaacaaaaatgctgaaaagacacgttgatggagaa

SEQ ID NO: 27136 - DNA, 260 bp, Unknown
  Description of Unknown: RightRegion for integrase B1137 sequence
gtttcctcattttgttcaccgcagcacaggcagctatcgctgagaagaatgcataattaacataaaatatagattcatgcgcgagcatgagagtgtccaaacgtaaaatggctcctggaactttagaaaaatctgaagctccaggagctttttgatgtatttgtagtgaaacgtggaataatcatttgtcagaaagttttaattatgtgatctttgcatttatgatcaggagatttgatttcaaaactccggaatgcgag

SEQ ID NO: 27137 - DNA, 260 bp, Unknown
  Description of Unknown: RightRegion for integrase B1138 sequence
aattgcatgacatcggggacgtcatacaggcggaaacagcccagaaggcacaatggctgaagctgagcgagcagaaccggctgtatgacaaaatcgagaccgtcacagcccgccagctggcacggatacaggaatatctgatcgcgctcaaggccacggacgatgtcgataccgcccgccggctgctgaagcagatcgtcattttgggaacctatatcaagcggcgcagcaaccttgtttttgtttgcgacaaggcggag

SEQ ID NO: 27138 - DNA, 260 bp, Unknown
  Description of Unknown: RightRegion for integrase B1139 sequence
ggtctggtgtcaaacattgtattcaagaacggcttatgtcacacattcattttcaggtaagcaaaaagcagggaactaagccctgcttttcttcttttccgttatccttataaatataagattttaagttacaaaattagcatagcgtccccaaaactaaagaaacggtatttttcttctactgctttcttataggcagccagaatatgttccctgcctgcaagagcagacaccaacatcacaagggtagactgtggcag

SEQ ID NO: 27139 - DNA, 109 bp, Unknown
  Description of Unknown: RightRegion for integrase B1140 sequence
cgtgtgacggccatcacattcaaaaacggcattgagcaccgcttcacctacaagacatgaggaaagcccccgaccacaaggccgggggcttcgtcatacattatattca

SEQ ID NO: 27140 - DNA, 260 bp, Unknown
  Description of Unknown: RightRegion for integrase B1141 sequence
ggccgggtgcaaaccatcgtgttcaagaacggcctctcacacactttcatcctgaaatgacaaaagacccgacggcataatcgccatcgggtctttacttttttctacatacaaatatcgcaaaaaacgcgaattttgtatcaaactatcagcatagcatccacgatactaccgggaagcgtgataccggagtggaaagtatcgaaaatacgcacgttatctttctttctgggcttaaaaaggcatcgtgttatcatctg

SEQ ID NO: 27141 - DNA, 260 bp, Unknown
  Description of Unknown: RightRegion for integrase B1142 sequence
ggtctggtgtcaaatatcgtgttcaaaaacggcttatgccatacatttattttcaggtaagcaaaaagcagggaactaagccctgcttttcttcttttccgttatccttataaatataagattttaagttacaaaattagcatagcatcaccaaagctgaaaaacctgtatctttcctctacagcctctttgtatgcattgaggacatgctctctgcctgctaatgctgacacaagcatgacaagtgtagactgcggcag

SEQ ID NO: 27142 - DNA, 260 bp, Unknown
  Description of Unknown: RightRegion for integrase B1143 sequence
gtaacctctattcaattcacaaatgagttaatcgttcggtttatatatgaccgaagataatcctaaaagcctatcaaaaatacccagtcctgaaatgtgcagaactgggtatttattcatttttcggctgttttgtgtggaaaattattcatttgcttcgaagcggttttatatacatcggctaataaattgaagaagcatgatccaaaaacagccaattttcttgtgttcaaagcatcagaacgcgccgaaaaagcctt

SEQ ID NO: 27143 - DNA, 260 bp, Unknown
  Description of Unknown: RightRegion for integrase B1144 sequence
ggtctggtgtcaaacattgtattcaagaacggcttatgtcacacattcattttcaggtaagcaaaaagcagggaactaagccctgcttttcttcttttccgttatccttataaatataagattttaagttacaaaattagcatagcatccccgaacctttaggaatgtagccgaaatgttacatttgtcagtatatcatatatataggaagtaatccagttctttttttctgtactattcctcataaataaatccgttgt

SEQ ID NO: 27144 - DNA, 109 bp, Unknown; identical to SEQ ID NO: 27125
  Description of Unknown: RightRegion for integrase B1145 sequence

SEQ ID NO: 27145 - DNA, 260 bp, Unknown
  Description of Unknown: RightRegion for integrase B1146 sequence
ggccgggtgcaaaccatcgtgttcaagaacggcctctcacacactttcatcctgaaatgacaaaagacccgacggcataatcgccatcgggtcttttactatgactaaatcacggaagcatttcttcgattttcaaaatgtcaacagggtcaagtgagccaatcttcacaataaaatcggatgctacgacatttaatcgttttccaatccgaacagttgtttccttatgcagtccagcctctcgccatttaacaagagtg

SEQ ID NO: 27146 - DNA, 260 bp, Unknown; identical to SEQ ID NO: 26718
  Description of Unknown: RightRegion for integrase B1147 sequence

SEQ ID NO: 27147 - DNA, 260 bp, Unknown
  Description of Unknown: RightRegion for integrase B1148 sequence
ggtctggtgtcaaatatcgtgttcaaaaacggcttatgccatacatttattttcaggtaagcaaaaagcagggaactaagccctgcttttcttcttttctgctgtccttataaatataagattttaagttacaaaattagcatagcgtccccaaaactaaagaatctgtaacgttcttttactgcaacttcataagcattaagaacattttctcttcctgcaagtgctgacacaagcattacaagagttgattctgggag

SEQ ID NO: 27148 - DNA, 109 bp, Unknown
  Description of Unknown: RightRegion for integrase B1149 sequence
ggtctggtgtcaaatatcgtgtttaagaacggcttatgtcacacatttattttcaggtaagcaaaaaagcagggaattaacaccctgctttctttatttctgctatcct

SEQ ID NO: 27149 - DNA, 109 bp, Unknown
  Description of Unknown: RightRegion for integrase B1150 sequence
ggtctggtgtcaaatatcgtgttcaagaatggattatgtcacacatttattttcagataagcaaaagcagggagctaagccctgcttttcttcttttcagttatcctta

SEQ ID NO: 27150 - DNA, 260 bp, Unknown
  Description of Unknown: RightRegion for integrase B1151 sequence
ggtctggtgtcaaacattgtattcaagaacggcttatgtcacacattcattttcaggtaagcaaaaagcagggaactaagccctgcttttcttcttttccgttatccttataaatataagattttaagttacaaaattagcatagcgtcaccaaaggagaagaaacgatatctctccttcacagcctcctcataagccgccatgatcttgtctctgcctgccagtgcagacaccagcatcatcagcgtggactccggcag

SEQ ID NO: 27151 - DNA, 260 bp, Unknown
  Description of Unknown: RightRegion for integrase B1152 sequence
ggccgggtgcaaaccatcgtgttcaagaacggtctctcgcacaccttcatcatgaaatgacaaaagacccgacggcataatcgccatcgggtctttacttttttctacatacaaatattgcaaaaagcgcgaattttgtatcaaactatcagcatagcatcgccaaaggagaagaaacggtacttctctgccacagctacctcataggcgtgcatggtcttttcgtagccgtacagggcggacaccaacatgatcagggt

SEQ ID NO: 27152 - DNA, 260 bp, Unknown
  Description of Unknown: RightRegion for integrase B1153 sequence
ggccgggtgcaaaccatcgtgttcaagaacggtctctcacacactttcatcctgaaatgacaaaagacccgacggcataatcgccatcgggtctttacttttttctacatacaaatatcgcaaaaagcgcgaattttgtatcaaactatcagcatagcatcgccgaaggaaaagaagcggtacttttcctctacggcaactttataggcagccatggtcttttcgtagccgtagagggcagagaccagcatgatgagggt

SEQ ID NO: 27153 - DNA, 260 bp, Unknown
  Description of Unknown: RightRegion for integrase B1154 sequence
cgcattgtggaaatcgtgttctccaatggtctttcacatcaattcatatatcgcaaataaataagtcccaacaataggatttgcccatgtctcctatcgttgggattttgtaaatgctttattttacgggatttcttacatctcggaaaccacgttcatttgacatccaaaggttgtgatatgcgcgaaaagtggacgtcctagtttttctgattctcttctgacatattctttcgctttttttataaaataatactgtc

SEQ ID NO: 27154 - DNA, 260 bp, Unknown
  Description of Unknown: RightRegion for integrase B1155 sequence
ttccgaaacggtcttactcatacattttactataaggacgtagaaaaaccagaggcataaacctctggttttattgtctgaattacattacaaatgtaagatgtaggtactattcgataaacatcgcatctccaaaggagaagaaacgatatttctcctgtactgcaacctcataggcatgcatgatattctccttacctgccagtgcagataccagcataacgagtgtagattccggcaggtggaagtttgtaatcagg

SEQ ID NO: 27155 - DNA, 109 bp, Unknown
  Description of Unknown: RightRegion for integrase B1156 sequence
gatgggtgtgtacctcagtgcccagcccggctggggatcgtctggagctcgaagcggtaggtctgcccggcgtccgggtatttttcgcggtcgaccgggctcaggaaca

SEQ ID NO: 27156 - DNA, 109 bp, Unknown
  Description of Unknown: RightRegion for integrase B1157 sequence
ggccgggtgcaaaccatcgtgttcaagaacggcctctcacacactttcatcctgaaatgacaaaagacccgacggcataatcgccatcgggtctttacttttttctaca

SEQ ID NO: 27157 - DNA, 260 bp, Unknown; identical to SEQ ID NO: 26718
  Description of Unknown: RightRegion for integrase B1158 sequence

SEQ ID NO: 27158 - DNA, 260 bp, Unknown
  Description of Unknown: RightRegion for integrase B1159 sequence
ctaagctcctataaatactggaataagaaaatagatctctatgtgaggttagtagcataatttttatatatggggtatctaaaattatatacctcctgtgattaagttaagtatcaaaatcacaggaggtatatttttatggtatcggttgaaaagctggataaaggtacctattttgaggatgcctttaaggtttcttttaagtacgatcctactacggtagctaagataaaaaagctggcggaaaggagatacttacc

SEQ ID NO: 27159 - DNA, 260 bp, Unknown
  Description of Unknown: RightRegion for integrase B1160 sequence
ggtctggtgtcaaatatcgtgttcaaaaacggcttatgccatacatttattttcaggtaagcaaaaagcagggaactaagccctgcttttcttcttttccgttatccttacaaatataagattttaagttacaaaattagcatagcgtcccctatgtgtcgggttcgctttaatatctttcttttataagcatatttatcattttaccataggctgtcaagattaacaatcgttacatcataggtcattggaactatttg

SEQ ID NO: 27160 - DNA, 260 bp, Unknown
  Description of Unknown: RightRegion for integrase B1161 sequence
gtttccgcattttgttcaccgcagcacaggcagctatcgcagagaagaatgcataattagcatattgttaaggggcaaagcgaaatatcctctaaagaggtaaaatagccaaccagccctaaagtgtccaaacgtaaaatttgaccttggagaattgtagaaatacagttcttcagggtcttttttgttacattacacagcggtattcttttgtttaacaaccgtagcaagaattccctcacctctataggaaggccact

SEQ ID NO: 27161 - DNA, 260 bp, Unknown
  Description of Unknown: RightRegion for integrase B1162 sequence
ggtctggtgtcaaatatcgtgttcaaaaacggcttatgccatacatttattttcaggtaagcaaaaagcagggaactaagccctgcttttcttcttttctgctgtccttataaatataagattttaagttacaaaattagcatagcgtcgccaaaactgaagaacctgtatttttcctgtacagcaacttcatatgcatgaagtacatgttctcttccagcaagtgctgatacaagcataacaagcgttgattctggaag

SEQ ID NO: 27162 - DNA, 260 bp, Unknown
  Description of Unknown: RightRegion for integrase B1163 sequence
ccagctgggctgttgctgttttacatagcacgaccaaggcaaagagaccgcagatcgtaatctgcggtctcttcttttttttggcgggggattaatgctgtactacatagcagtagtacaccgcggccttgtcatcgacggcgtccttgtcatcgagccaagcgtgcgccatgtccgcgtaaaactcggcgttgccgccgagaccgtacttttttgcgacctcgcaaaaatcggagtacatcgcgcacattatcgcgtgc

SEQ ID NO: 27163 - DNA, 260 bp, Unknown
  Description of Unknown: RightRegion for integrase B1164 sequence
ttccgaaacggtcttactcatacattttactataaggacgcagaaaaaccagaggcataaacctctggttttattgtctgaattacattacaaatgtaagatgtaggtactattcgataaacatcgcatcccggatatttatgaattgtaaccagaattcaacatttgttgggtatttatataggaagtaatttgatttttccttaatgaaatggtaatccttcatcatcagcgctcataaagccatcaggacttgtctg

SEQ ID NO: 27164 - DNA, 260 bp, Unknown
  Description of Unknown: RightRegion for integrase B1165 sequence
ggtctggtgtcaaacattgtattcaagaacggcttatgtcacacattcattttcaggtaagcaaaaagcagggaactaagccctgcttttcttcttttccgttatccttataaatataagattttaagttacaaaattagcatagcgtctccaaagctgaaaaatctgtatttttcatggattgcttcttcgtaggcgtgcaggatatgttctctacccgcaagtgccgataccagcattaccagagtagactccggcag

SEQ ID NO: 27165 - DNA, 260 bp, Unknown
  Description of Unknown: RightRegion for integrase B1166 sequence
ggcaaagtatcctcgattgagttcaaaaacggtatcacgttggaattcagctacgaatagcagctttttctattgttttttagtcgtaaatgacaaactgattggtgtgctgcaaagcctcattttccccaaaaaagttcagaaaacaacggcaaccagcctatacggttggttgccgttttcttgtaaaaagttcggttttctccttgcaacaacaggcacttttcatacacataggctacaaagtgtataaaattttt

SEQ ID NO: 27166 - DNA, 260 bp, Unknown
  Description of Unknown: RightRegion for integrase B1167 sequence
ggccgggtgcaaacaatcgtgttcaagaacggcctctcacacactttcatcctgaaatgacaaaagacccgacggcataatcgccatcgggtctttacttttttctacatacaaatatcgcaaaaagcgcgaattttgtatcaaactatcagcatagcatcgccgaaggaaaagaagcggtacttttcctctacggcaactttataggcagccatggtcttttcgtagccgtagagggcagagaccagcatgatgagggt

SEQ ID NO: 27167 - DNA, 260 bp, Unknown; identical to SEQ ID NO: 27129
  Description of Unknown: RightRegion for integrase B1168 sequence

SEQ ID NO: 27168 - DNA, 260 bp, Unknown
  Description of Unknown: RightRegion for integrase B1169 sequence
acgaataagtttatatataaggccacaaagccccctaagagcgcttctacgaagccgtgacatagcaatagccgcccgacgaatcgggcggctattttttatccatttttgcacttgcatccgcaatttctgcacgtctcggcggccacttctttccctgttcgcttgcagtagaaccgcgggccacttccctgccgtatgtgccggcagttcggaaatcctctttccatcaagacgcttttcttcggcttctctatttt

SEQ ID NO: 27169 - DNA, 260 bp, Unknown
  Description of Unknown: RightRegion for integrase B1170 sequence
cgcattgtggaaatcgtgttctccaatgggctttcacaccaattcatatatcgcaaataaataagtcccaacaataggatttgcccatgtctcctatcgttgggattttgtaaatgctttatttacgggatttcttacatctcggaaaccacgttcatctgacacccaaaggttgtgacgcagaaagtcatcggccttcctgcttcttctgcttcttttcttacgtattctttcgctttttctatgaaataatattgtct

SEQ ID NO: 27170 - DNA, 260 bp, Unknown
  Description of Unknown: RightRegion for integrase B1171 sequence
gtttcctcattttgttcaccgcagcacaggcagctatcgctgagaagaatgcataattagcataaaatatagattcatgcgcgagcatgagagtgtccaaacgtaaaatggctcctggaactttagaaaaatctgaagctccaggagctttttgatgtatttgtagtgaaacgtggaataatcatttgtcagaaagttttaattatgtgatctttgcatttatgatcaggagatttgatttcaaaactccggaatgcgag

SEQ ID NO: 27171 - DNA, 260 bp, Unknown
  Description of Unknown: RightRegion for integrase B1172 sequence
atgtggaacattatggataaatatggttacatacaagatcatcctaaagtaaaaaaatagtcaaaagcatctcatactcatattctagaaagttagaacaaactatcttgatataaaatatattatacaaatacttctagtcatttttttagtttgtggcaggaactttaagccagttccctagaaacttgctacttttgttcatgagaaataatctcgactgataacatagttgagaatattatattcagatagttata

SEQ ID NO: 27172 - DNA, 260 bp, Unknown
  Description of Unknown: RightRegion for integrase B1173 sequence
ggcttctatgctgctatgatgcagaacaaacagctgaagccagtagcagttaagaaatagaaactgaaggacataaggctgtggtttgaatgtagttagctgaccttcttcaatttaataggcaaatattccctgaatcataggggctatttgcctaattttttgtacctttgcagcctaatatacccttccaaatgaagcctatcattaaatataggggcggtaaatcgaaagaaatcccccagtttatagcctatata

SEQ ID NO: 27173 - DNA, 180 bp, Unknown
  Description of Unknown: RightRegion for integrase B1174 sequence
ttccgaaacggtcttactcatacattttactataaggacacagaaaaaccagaggcataaacctctggttttattgtctgaattacattacaaatgtaagatgtaggtactattcgataaacatcgcatctccaaaagagaaaaatctgtacttttcctgcactgcagtctcataggcat

SEQ ID NO: 27174 - DNA, 260 bp, Unknown
  Description of Unknown: RightRegion for integrase B1175 sequence
ttgtcgcactctgcggagtgctccaaacgctattttcacaggaggggccgcaatggttaaagagcagtctaaatcacaaaatgcagttgacctctacgaccccactggtgaaaaggggattcagaaaagcccacaggcttttctgaatcccgaataaaaaaaccgattccgctaattatgcgcagagcggagcggagcgcatttccaatcgttcgtacccgcacacacaaaaaccgggcagcccgcagactgcccggttt

SEQ ID NO: 27175 - DNA, 109 bp, Unknown
  Description of Unknown: RightRegion for integrase B1176 sequence
gatgggtgtgtacctcagtgctcagcccggctggggatcgtctggagctcgaagcggtaggtctgtccggcgtccgggtatttttcgcggtcgaccgggctcagaaaca

SEQ ID NO: 27176 - DNA, 260 bp, Unknown; identical to SEQ ID NO: 27129
  Description of Unknown: RightRegion for integrase B1177 sequence

SEQ ID NO: 27177 - DNA, 260 bp, Unknown
  Description of Unknown: RightRegion for integrase B1178 sequence
acgaataagtttatatataaggccacaaagccccctaagaacgcttctacgaagccgtgacatagcaatagccgcccgacgaatcgggcggctatttttatccatttttgcacttgcatccgcaatttctgcatgtctcggcggagacctcttttcccgtgcgcttgcagtagaaccgcaggccacttccctgccgtatgtgccggcagttcgggaatcctctttccatcaagacgcttttcttcggcttctctattttt

SEQ ID NO: 27178 - DNA, 260 bp, Unknown
  Description of Unknown: RightRegion for integrase B1179 sequence
aaagaactagaagctaattttaacccccaacaatgggatatacaaagccaaattctataaaacaattaaagctagctatcattgataactagctttatatttataaataccctctactttatatattaacatcttataaattacagttattactaggtaataatactactagtccatactaatagagctattagaagcaagtacatgggaatttactaaagtaaggtaggatatatggttatacaaagactttatatcct

SEQ ID NO: 27179 - DNA, 260 bp, Unknown
  Description of Unknown: RightRegion for integrase B1180 sequence
ttagaggattatatgtactgtactagaaaactggggctttatgtgcagttagtagcataaattatataggggttatctaaatatatttacctcctgtgattaagttatataaagactaaatcacaggaggtttatttttatgataacagtagaaaaactggaaaaaggtacttattttgatgatgcttttaagatctcatttagatacgatcccactactgtagctaaggtaaaagaactggcagagcggagatatttac

SEQ ID NO: 27180 - DNA, 260 bp, Unknown
  Description of Unknown: RightRegion for integrase B1181 sequence
cgcgtcatctccatcactttcaagaacggatcgacccacacgttcacctacaagacatgagaaaagccccggcctcatatactgaggtcggggccatcttatgcagtctatgcagcatcaccgcaacattatgcgccaaaaaagttgttcaattttataagcatcccctcaaagctaacgatgcgtgatgcttttcagttatccatgcggctttttctgctttttgcgccggttaagccgtttcccccgaaaacccttat

SEQ ID NO: 27181 - DNA, 260 bp, Unknown
  Description of Unknown: RightRegion for integrase B1182 sequence
cgcgtcacctccatcacattcaagaacggtgcgacccacacattcacctacaagacatgagaaaagccccggcctcatatactgaggtcggggccatcttatgcagtctatgcagtatcgccgcaacattatgcgccaaaaaagttgttcaattttataagcatcccctcaaagctaacgatgcgtgatgcttttcggttatccacgcggctttttcaggtttttacggcggttaaggcgttttccctgaaaacccttat

SEQ ID NO: 27182 - DNA, 260 bp, Unknown
  Description of Unknown: RightRegion for integrase B1183 sequence
cgcgtcatctccatcactttcaagaacggatcgacccacacgttcacctacaagacatgagaaaagccccggcctcatatactgaggtcggggccatcttatgcagtctatgcagtatcaccgcaacattatgcgtcaaaaaagttgttcaattttataagcatcccctcaaagctaacgatgcgtgatgcttttcagttgtccatgcggctttttctgctttttgcgccggttaagccgtttcccctgaaaacccttat

SEQ ID NO: 27183 - DNA, 260 bp, Unknown
  Description of Unknown: RightRegion for integrase B1184 sequence
cgcgtcatctccatcacgttcaagaacggatcgacccacacgttcacctacaagacatgagaaaagccccggcctcatatactgaggtcggggccatcttatgcagtctatgcagtatcgccgcaacattatgcgtcaaaaaagttgttcaattttataagcatcccctcaaagctaacgatgcgtgatgcttttcggttatccacgcggctttttcaggtttttgcggcggttaagtcgtttcccccgaaaacccttat

SEQ ID NO: 27184 - DNA, 260 bp, Unknown
  Description of Unknown: RightRegion for integrase B1185 sequence
ttagaggattatatgtactgtactagaaagctggggctttatgtgcaattagtggcataaattatataggggttatctaaatatatttacctcctgtgattaagttatataaagactaaatcacaggaggtttatttttatgataacagtagaaaaactggaaaaaggtacttattttgatgatgcttttaaaatctcatttagatacgatcccactactgtagctaaggtaaaagagctggcagagcggagatatttac

SEQ ID NO: 27185 - DNA, 260 bp, Unknown
  Description of Unknown: RightRegion for integrase B1186 sequence
ttagaggattatatgtactgtactagaaaactggggctttatgtgcagttagtagcataaattatataggggttatctaaatatatttacctcctgtgattaagttatataaagacttaacacaggaggtttatttttatgataacagtagaaaaactggaaaaaggtacttattttgatgatgcttttaagatctcatttagatatgatcccactactgtagctaaggtaaaagagctggcagagcggagatatttacc

SEQ ID NO: 27186 - DNA, 260 bp, Unknown
  Description of Unknown: RightRegion for integrase B1187 sequence
ttagaggattatatgtactgtactagaaagctggggctttatgtgcagttagtagcataaattatataggggttatctaaatatatttacctcctgtgattaagttatataaagactaaatcacaggaggtttatttttatgataacagtagaaaaactggaaaaaggtacttattttgatgatgcttttaaaatctcatttagatacgatcccactactgtagctaaggtaaaagagctggcagagcggagatacttac

SEQ ID NO: 27187 - DNA, 260 bp, Unknown
  Description of Unknown: RightRegion for integrase B1188 sequence
ttagaggattatatgtactgtactagaaagctggggctttatgtgcagttagtagcataaattatataggggttatctaaatatatttacctcctgtgattaagttatataaagactaaatcacaggaggtttatttttatgataacagtagaaaaactggaaaaaggtacttattttgatgatgcttttaaaatctcatttagatacgatcccactactgtagctaaggtaaaagagctggcagagcggagatatttac

SEQ ID NO: 27188 - DNA, 260 bp, Unknown
  Description of Unknown: RightRegion for integrase B1189 sequence
attgtattcaaaaacggacttcgaaaccgctttgtctatcaggacgacgccaccgtgtaaaatgccccgtctgcgctctcctgcgccccgtcctgcccgttttaaccctctgcccttatatttctaccctaaacaaaaaagccgcgtttaagcggctttttcaatctcgtgttcggtattcatttgacagccgaacgtcgtgacatgaaaggtcagcggactgcctttttttgcagagagctgttccacataatttttag

SEQ ID NO: 27189 - DNA, 260 bp, Unknown
  Description of Unknown: RightRegion for integrase B1190 sequence
cgcgtcatctccatcaccttcaagaacggatcgacccacacgttcacctacaagacatgagaaaagccccggcctcatatactgaggtcggggccatcttatgcagtctatgcagcatcgccgcaacattatgcgccaaaaaagttgttcaattttataagcatcccctcaaagctaacgatgcgtgatgcttttcgcttatccacgcggcttttcctgattttctcgtcggctaagccattttccccgaaaacccttat

SEQ ID NO: 27190 - DNA, 260 bp, Unknown
  Description of Unknown: RightRegion for integrase B1191 sequence
aaagaactagaagctaattttaacccccaacaatgggatatacaaagccaaattctataaaacaattaaagctagctatcattgataactagctttatatttataaacaccctctactttatatattaacatcttataaattacagttattactaggtaataatactactagtccatactaatagagctattagaagcaagtacatgggaatttactaaagtaaggtaggatattatacagagaatttatatcctacgtt

SEQ ID NO: 27191 - DNA, 260 bp, Unknown; identical to SEQ ID NO: 27187
  Description of Unknown: RightRegion for integrase B1192 sequence

SEQ ID NO: 27192 - DNA, 260 bp, Unknown; identical to SEQ ID NO: 27187
  Description of Unknown: RightRegion for integrase B1193 sequence

SEQ ID NO: 27193 - DNA, 109 bp, Unknown
  Description of Unknown: RightRegion for integrase B1194 sequence
cgcgtcatctccatcactttcaagaacggatcgacccacacgttcgcctacaagacatgagaaaagccccggcctcatatactgaggtcggggccatcttatgcagtct

SEQ ID NO: 27194 - DNA, 260 bp, Unknown; identical to SEQ ID NO: 27187
  Description of Unknown: RightRegion for integrase B1195 sequence

SEQ ID NO: 27195 - DNA, 260 bp, Unknown
  Description of Unknown: RightRegion for integrase B1196 sequence
ttagaggattatatgtactgtactagaaaactggggctttatgtgcagttagtagcataaattatataggggttatctaaatatatttacctcctgtgattaagttatataaagactaaatcacaggaggtttatttttatgataacagtagaaaaactggaaaaaggtacttattttgatgatgcttttaagatctcatttagatacgatcccactactgtagctaaggtaaaagagctggcagagcggagatacttac

SEQ ID NO: 27196 - DNA, 109 bp, Unknown
  Description of Unknown: RightRegion for integrase B1197 sequence
cgcgtcatctccatcactttcaagaacggatcgacccacacgttcacctacaaggcatgagaaaagccccggcctcatatactgaggtcggggccatcttatgcagtct

SEQ ID NO: 27197 - DNA, 260 bp, Unknown
  Description of Unknown: RightRegion for integrase B1198 sequence
cgcgtcacctccatcacattcaagaacggtgcgacccacacattcacctacaagacatgagaaaagccccggcctcatatactgaggtcggggccatcttatgcagtctatgcagtaccgccgcaacattatgcgccaaaaaagttgttcaattttataagcatcccctcaaagctaacgatgcgtgatgcttttcggttatccacgcggctttttcaggtttttgcggcggttaaggcattttccctgaaaacccttat

SEQ ID NO: 27198 - DNA, 260 bp, Unknown
  Description of Unknown: RightRegion for integrase B1199 sequence
cgcgtcatctccatcactttcaagaacggatcgacccacacgttcacctacaagacatgagaaaagccccggcctcatatactgaggtcggggccatcttatgcagtctatgcagcatcaccgcaacattatgcgccaaaaaagttgttcaattttataagcatcccctcaaagctaacgatgcgtgatgcttttcagttatccatgcggctttttctgctttttgcgccggttaagccgtttccccagaaaacccttat

SEQ ID NO: 27199 - DNA, 260 bp, Unknown
  Description of Unknown: RightRegion for integrase B1200 sequence
ttagaggattatatgtactgtactagaaagctggggctttatgtgcagttagtagcataaattatataggggttatctaaatatatttacctcctgtgattaagttatataaagacttaacacaggaggtttatttttatgataacagtagaaaaactggaaaaaggtacttattttgatgatgcttttaagatctcatttagatacgatcccactactgtagctaaggtaaaagagatggcagagcggaggtatttacc

SEQ ID NO: 27200 - DNA, 109 bp, Unknown
  Description of Unknown: RightRegion for integrase B1201 sequence
ctgataacatcaatttctttcaaaaacggaatgacgcacaggtttatctacaaggcataaaataacccagggctccatataagagccctgggttttattcagcagtatt

SEQ ID NO: 27201 - DNA, 260 bp, Unknown
  Description of Unknown: RightRegion for integrase B1202 sequence
ttagaggattatatgtactgtactagaaagcttgggctttatgtgcagttagtagcataaattatataggggttatctaaatatatttacctcctgtgattaagttatataaagactaaatcacaggaggtttatttttatgataacagtagaaaaactggaaaaaggtacttattttgatgatgcttttaagatctcatttagatacgatcccactactgtagctaaagtaaaagagctggcagagcggagatacttac

SEQ ID NO: 27202 - DNA, 109 bp, Unknown
  Description of Unknown: RightRegion for integrase B1203 sequence
cgcgtcacctccatcacattcaagaacggtgcgacccacacattcacctacaagacatgagaaaagccccggcctcatatactgaggtcggggccatcttatgcagtct

SEQ ID NO: 27203 - DNA, 260 bp, Unknown
  Description of Unknown: RightRegion for integrase B1204 sequence
cgcgtcacctccatcacattcaagaacggtgcgacccacacattcacctacaagacatgagaaaagccccggcctcatatactgaggtcggggccatcttatgcagtctatgcagtatcgccgcaacattatgcgtcaaaaaagttgttcaattttataagcatcccctcaaagctaacgatgcgtgatgcttttcagttatccatgcggctttttctgctttttgcgccggttaagccgtttcccacgaaaacccttat

SEQ ID NO: 27204 - DNA, 260 bp, Unknown
  Description of Unknown: RightRegion for integrase B1205 sequence
cgcgtcatctccatcactttcaagaacggatcgacccacacgttcacctacaaggcatgagaaaagccccggcctcatatactgaggtcggggccatcttatgcagtctatgcagtatcaccgcaacattatgcgtcaaaaaagttgttcaattttataagcatcccctcaaagctaacgatgcgtgatgcttttcagttatccatgcggctttttctgctttttgcgccggttaagccgtttcccccgaaaacccttat

SEQ ID NO: 27205 - DNA, 260 bp, Unknown
  Description of Unknown: RightRegion for integrase B1206 sequence
cgcgtcacctccatcacattcaagaacggtgcgacccacacattcacctacaagacatgagaaaagccccggcctcatatactgaggtcggggccatcttatgcagtctatgcagtatcgccgcaacattatgcgccaaaaaagttgttcaattttataagcatcccctcaaagctaacgatgcgtgatgcttttcggttatccacgcggctttttcaggtttttgcggcggttaaggcgttttcctcgaaaacccttat

SEQ ID NO: 27206 - DNA, 109 bp, Unknown
  Description of Unknown: RightRegion for integrase B1207 sequence
gcgggcgtggttatggaatatccgcgggccgggcggcgtaaaagtttaaccacacggtaaaattgaccggcacgcaaaaagagggccccgggagcaatcccgaggccct

SEQ ID NO: 27207 - DNA, 260 bp, Unknown
  Description of Unknown: RightRegion for integrase B1208 sequence
attgtattcaaaaacggacttcggaaccgctttgtctatcaggacgacgccaccgtgtaaaatgccccgtctgcgctcccctgcgccccgtcctgcccgttttaactctctgcccttatatttctaccctaaacagaaaaagccgcattttagcggctttttcaatctcgcgttcggtattcatttgacagcccatgcacaccgaacacgcatataacgggcgtcctaattcctccgacttcttttttacgatttcccgg

SEQ ID NO: 27208 - DNA, 260 bp, Unknown; identical to SEQ ID NO: 27184
  Description of Unknown: RightRegion for integrase B1209 sequence

SEQ ID NO: 27209 - DNA, 260 bp, Unknown
  Description of Unknown: RightRegion for integrase B1210 sequence
cgcgtcatctccatcactttcaagaacggatcgacccacacgttcacctacaagacatgagaaaagccccggcctcatatactgaggtcggggccatcttatgcagtctatgcagtatcaccgcaacattatgcgtcaaaaaagttgttcaattttataagcatcccctcaaagctaacgatgcgtgatgcttttcagttgtccatgcggctttttctgctttttgcgccggttaagccgtttcccccgaaaacccttat

SEQ ID NO: 27210 - DNA, 260 bp, Unknown
  Description of Unknown: RightRegion for integrase B1211 sequence
cgcgtcatctccatcaccttcaagaacggatcgacccacacgttcacctacaagacatgagaaaagccccggcctcatatactgaggtcggggccatcttgtgcagtctatgcagtatcgccgcaacattatgcgtcaaaaaagttgttcaattttataagcatcccctcaaagctaacgatgcgtgatgcttttcggttatccacgcggctttttctgctttttgtgccggttaagccgttttccccgaaaaccctaat

SEQ ID NO: 27211 - DNA, 260 bp, Unknown
  Description of Unknown: RightRegion for integrase B1212 sequence
cgcgtcatctccatcaccttcaagaacggatcgacccacacgttcacctacaagacatgagaaaagccccggcctcatatactgaggtcggggtcatcttatgcagtctatgcagcatcgccgcaacattatgcgccaaaaaagttgttcaattttataagcatcccctcaaagctaacgatgcgtgatgcttttcggttatccacgcggctttttctgctttttgtgccggttaagccgttttccccgaaaacccttat

SEQ ID NO: 27212 - DNA, 260 bp, Unknown
  Description of Unknown: RightRegion for integrase B1213 sequence
gagtatggagataattatacatggcgtactatggatctttatgtacagctagtagcctgatttatataggggttatctaaaagtataagcctcctgtgattaagttatttaagactttcacaggaggtaattttttatgataagagtacagcgactagaaaaaggtacttattttgataatgcctatatgatctcttttcggtatgatcctagaacagtggcaaaggtaaaagagctggctcagaggcggtacttgcctg

SEQ ID NO: 27213 - DNA, 260 bp, Unknown; identical to SEQ ID NO: 27187
  Description of Unknown: RightRegion for integrase B1214 sequence

SEQ ID NO: 27214 - DNA, 260 bp, Unknown
  Description of Unknown: RightRegion for integrase B1215 sequence
cgcgtcatctccatcaccttcaagaacggatcgacccacacgttcacctacaagacatgagaaaagccccggcctcatatactgaggtcggggccatcttatgcagtctatgcagcatcgccgcaacattatgcgccaaaaaagttgttcaattttataagcatcccctcaaagctaacgatgcgtgatgcttttcgcttatccactcggcttttcctgattttctcgtcggctaagccgttttccccgaaaacccttat

SEQ ID NO: 27215 - DNA, 260 bp, Unknown
  Description of Unknown: RightRegion for integrase B1216 sequence
ttagaggattatatgtactgtactagaaagctggggctttatgtgcagttagtagcataaattatataggggttatctaaatatatttacctcctgtgattaggttatataaagactaaatcacaggaggtttatttttatgataacagtagaaaaactggaaaaaggtacttattttgatgatgcttttaaaatctcatttagatacgatcccactactgtagctaaagtaaaagagctggcagagcggagatacttac

SEQ ID NO: 27216 - DNA, 260 bp, Unknown
  Description of Unknown: RightRegion for integrase B1217 sequence
ttagaggattatatgtactgtactagaaagctggggctttatgtgcagttagtagcataaattatataggggttatctaaatatatttacctcctgtgattaagttatataaagacttaacacaggaggtttatttttatgataacagtagaaaaactggaaaaaggtacttattttgatgatgcttttaaaatctcatttagatacgatcccactactgtagctaaggtaaaagagctggcagagcggagatatttacc

SEQ ID NO: 27217 - DNA, 260 bp, Unknown
  Description of Unknown: RightRegion for integrase B1218 sequence
cgcgtcacctccatcacattcaagaacggtgcgacccacacattcacctacaagacatgagaaaagccccagcctcatatactgaggttggggccatcttatgcagtctatgcagtatcgccgcaacattatgcgccaaaaaagttgttcaattttataagcatcccctcaaagctaacgatgcgtgatgcttttcggttatccacgcggctttttcaggtttttgcggcggttaaggcgttttccctgaaaacccttat

SEQ ID NO: 27218 - DNA, 260 bp, Unknown; identical to SEQ ID NO: 27187
  Description of Unknown: RightRegion for integrase B1219 sequence

SEQ ID NO: 27219 - DNA, 260 bp, Unknown; identical to SEQ ID NO: 27187
  Description of Unknown: RightRegion for integrase B1220 sequence

SEQ ID NO: 27220 - DNA, 260 bp, Unknown
  Description of Unknown: RightRegion for integrase B1221 sequence
cgcgtcacctccatcacattcaagaacggtgcgacccacacattcacctacaagacatgagaaaagccccggcctcatatactgaggtcggggccatcttatgcagtctatgcagtaccgccgcaacattatgcgccaaaaaagttgttcaattttataagcatcccctcaaagctaacgatgcgtgatgcttttcggttatccacgcggctttttcaggtttttgcggcggttaaggcgttttccctaaaaacccttat

SEQ ID NO: 27221 - DNA, 109 bp, Unknown; identical to SEQ ID NO: 27196
  Description of Unknown: RightRegion for integrase B1222 sequence

SEQ ID NO: 27222 - DNA, 260 bp, Unknown
  Description of Unknown: RightRegion for integrase B1223 sequence
cgcgtcacctccatcacattcaagaacggtgcgacccacacattcacctacaagacatgagaaaagccccggcctcatatactgaggtcggggccatcttatgcagtctatgcagtatcgccgcaacattatgcgtcaaaaaagttgttcaattttataagcatcccctcaaagctaacgatgcgtgatgctcttcggttatccacgcggctttttcaggtttttgcgtcggttaaggcgttttccctgaaaacccttat

SEQ ID NO: 27223 - DNA, 260 bp, Unknown
  Description of Unknown: RightRegion for integrase B1224 sequence
cgcgtcacctccatcacattcaagaacggtgcgacccacacattcacctacaagacatgagaaaagccccggcctcatatactgaggtcggggccatcttatgcagtctatgcagtatcgccgcaacattatgcgtcaaaaaagttgtttaattttataagcatcccctcaaagctaacgatgcgtgatgcttttcggttatccacgcggctttttcaggtttttacggcggttaaggcattttccctgaaaacccttat

SEQ ID NO: 27224 - DNA, 260 bp, Unknown; identical to SEQ ID NO: 27187
  Description of Unknown: RightRegion for integrase B1225 sequence

SEQ ID NO: 27225 - DNA, 260 bp, Unknown
  Description of Unknown: RightRegion for integrase B1226 sequence
cgcgtcacctccatcacattcaagaacggtgcgacccacacattcacctacaagacatgagaaaagccccggcctcatatactgaggtcggggccatcttatgcagtctatgcagtatcgccgcaacattatacgtcaaaaaagttgttcaattttataagcatcccctcaaagctaacgatgcgtgatgcttttcggttatccacgcggctttttcaggtttttgcgtcggttaaggcgttttccctgaaaacccttat

SEQ ID NO: 27226 - DNA, 260 bp, Unknown
  Description of Unknown: RightRegion for integrase B1227 sequence
cgcgtcgtctccatcacgttcaagaacggttcgacccacacgttcacctacaagacatgagaaaagccccggcctcatatactgaggtcggggccatcttatgcagtctatgcagcatcaccgcaacattatgcgccaaaaaagttgttcaattttataagcatcccctcaaagctaacgatgcgtgatgcttttcggttatccacgcggcttttcctgctttttgcgccggttaagctgttttccccgaaaacccttat

SEQ ID NO: 27227 - DNA, 260 bp, Unknown; identical to SEQ ID NO: 27214
  Description of Unknown: RightRegion for integrase B1228 sequence

SEQ ID NO: 27228 - DNA, 260 bp, Unknown
  Description of Unknown: RightRegion for integrase B1229 sequence
cgcgtcatctccatcacgttcaagaacggatcgacccacacgttcacctacaagacatgagaaaagccccggcctcatatactgaggtcggggccatcttatgcagtctatgcagtatcgccgcaacattatgcgtcaaaaaagttgttcaattttataagcatcccctcaaagctaacgatgcgtgatgcttttcagttgtccatgcggctttttctgctttttgcgccggttaagccgtttcccctggaaacccttat

SEQ ID NO: 27229 - DNA, 260 bp, Unknown
  Description of Unknown: RightRegion for integrase B1230 sequence
ttagaggattatatgtactgtactagaaagctggggctttatgtgcaattagtggcataaattatataggggttatctaaatatatttacctcctgtgattaagttatataaagactaaatcacaggaggtttatttttatgataacagtagaaaaactggaaaaaggtacttattttgatgatgcttttaaaatctcatttagatacgatcccactactgtagctaaagtaaaagagctggcagagcggagatatttac

SEQ ID NO: 27230 - DNA, 260 bp, Unknown
  Description of Unknown: RightRegion for integrase B1231 sequence
cgcgtcacctccatcacattcaagaacggtgcgacccacacattcacctacaagacatgagaaaagccccggcctcatatactgaggtcggggccatcttatgcagtctatgcagtatcgccgcaacattatgcgtcaaaaaagttgttcaattttataagcatcccctcaaagctaacgatgcgtgatgctttccggttatccacgcggctttttctgctttttgcgccggttaagccgttttcctcgaaaacctttat

SEQ ID NO: 27231 - DNA, 260 bp, Unknown
  Description of Unknown: RightRegion for integrase B1232 sequence
cgcgtcacctccatcacattcaagaacggtgcgacccacacattcacctacaagacatgagaaaagccccggcctcatatactgaggtcggggccatcttatgcagtctatgcagtatcgccgcaacattatgcgtcaaaaaagttgttcaattttataagcatcccatcaaagctaacgatgcgtgatgcttttcagttatccatgcggctttttctgctttttgcgccggttaagccgtttcccacgaaaacccttat

SEQ ID NO: 27232 - DNA, 260 bp, Unknown
  Description of Unknown: RightRegion for integrase B1233 sequence
gatgggtgtgtacctcagtgcccggcccggctggggatcgtctggagctcgaagcggtaggtctgcccggcgtccgggtatttttcgcggtcgaccgggctcaggaacatatccagcggccggacccagaggccgccgtcgccgtaaagcttgcggtagatcacgcagggctcgttcgtctcggaatcacgggcaagcgcctccaccagataataatcccccttgaaatggcggtagacctgccccagctgtacgtcacg

SEQ ID NO: 27233 - DNA, 109 bp, Unknown
  Description of Unknown: RightRegion for integrase B1234 sequence
cgcgtcatatccatcacattcaagaacggatcgacccacacattcacctacaagacatgagaaaagccccggcctcatatactgaggtcggggccatcttatgcagtct

SEQ ID NO: 27234 - DNA, 260 bp, Unknown
  Description of Unknown: RightRegion for integrase B1235 sequence
ttagaggattatatgtactgtactagaaagctagggctttatgtgcagttagtagcataaattatataggggttatctaaatatatttacctcctgtgattaagttatataaagactaaatcacaggaggtttatttttatgataacagtagaaaaactggaaaaaggtacttattttgatgatgcttttaaaatctcatttagatacgatcccactactgtagctaaggtaaaagagctggcagagcggagatatttac

SEQ ID NO: 27235 - DNA, 260 bp, Unknown
  Description of Unknown: RightRegion for integrase B1236 sequence
ttagaggattatatgtactgtactagaaaactggggctctatgtgcagttagtagcctaaattatataggggctatctaaatatatttacctcctgtgattaagttatataaagacttaacacaggaggtttatttttatgataacagtagaaaaactggaaaaaggtacttattttgatgatgcttttaagatctcatttagatacgatcccactactgtagctaaggtaaaagagctggcagagcggagatacttacc

SEQ ID NO: 27236 - DNA, 260 bp, Unknown
  Description of Unknown: RightRegion for integrase B1237 sequence
ttagaggattatatgtactgtactagaaagctggggctttatgtgcagttagtagcataaattatataggggttatctaaatatatttacctcctgtgattaagttatataaagacttaacacaggaggtttatttttatgataacagtagaaaaactggaaaaaggtacttattttgatgatgcttttaagatctcatttagatacgatcccactactgtagctaagataaaagagctggcagagcggagatacttacc

SEQ ID NO: 27237 - DNA, 260 bp, Unknown
  Description of Unknown: RightRegion for integrase B1238 sequence
ttagaggattatatgtactgtactagaaaactggggctttatgtgcagttagtagcataaattatataggggttatctaaatatatttacctcctgtgattaagttatataaagactaaatcacaggaggtttatttttatgataacagtagaaaaactggaaaaaggtacttattttgatgatgcttttaaaatctcatttagatacgatcccactactgtagctaaggtaaaagagctggcagagcggagatatttac

SEQ ID NO: 27238 - DNA, 260 bp, Unknown
  Description of Unknown: RightRegion for integrase B1239 sequence
cgcgtcatctccatcactttcaagaacggatcgacccacacgttcgcctacaagacatgagaaaagccccggcctcatatactgaggtcggggccatcttatgcagtctatgcagtatcgccgcaacattatgcgtcaaaaaagttgttcaattttataagcatcccctcaaagctaacgatgcgtgatgcttttcagttatccatgcggctttttctgctttttgcgccggttaagccgtttcccccgaaaacccttat

SEQ ID NO: 27239 - DNA, 260 bp, Unknown
  Description of Unknown: RightRegion for integrase B1240 sequence
cgcgtcatctccatcactttcaagaacggatcgacccacacgttcacctacaagacatgagaaaagccccggcctcatatactgaggtcggggccatcttatgcagtctatgcagtatcaccgcaacattatgcgtcaaaaaagttgttcaattttataagcatcccctcaaagctaacgatgcgtgatgcttttcagttatccatgcggctttttctgctttttgcgccggttaagccgtttcccccgaaaacccttat

SEQ ID NO: 27240 - DNA, 109 bp, Unknown
  Description of Unknown: RightRegion for integrase B1241 sequence
cgcgtcatctccatcaccttcaagaacggatcgacccacacgttcacctacaagacatgagaaaagccccggcctcatatactgaggtcggggccaacttatgcagtct

SEQ ID NO: 27241 - DNA, 260 bp, Unknown
  Description of Unknown: RightRegion for integrase B1242 sequence
cgcgtcacctccatcacattcaagaacggtgcgacccacacattcacctacaagacatgagaaaagccccggcctcatatactgaggtcggggccatcttatgcagtctatgcagtatcgccgcaacattatgcgccaaaaaagttgttcagttttataagcatcccctcaaagctaacgatgcgtgatgcttttcggttatccacgcggctttttcaggtttttacggcggttaaggcgttttccatgaaaacccttat

SEQ ID NO: 27242 - DNA, 260 bp, Unknown
  Description of Unknown: RightRegion for integrase B1243 sequence
ttagaggattatatgtactgtactagaaagctggggctttatgtgcagttagtagcataaattatataggggttatctaaatatatttacctcctgtgattaagttatataaagactaaatcacaggaggtttatttttatgataacagtagaaaaactggaaaaaggtacttattttgatgatgcttttaaaatctcttttagatacgatcccactactgtagctaaggtaaaagagctggcagagcggagatatttac

SEQ ID NO: 27243 - DNA, 260 bp, Unknown
  Description of Unknown: RightRegion for integrase B1244 sequence
gatgggggtgttcctcagtgcccggcccgactggggatcgtctggagctcgaagcggtaggtctgcccggcgtccgggtatttttcgcggtcgaccgggctcaggaacatatccagcggccggacccagaggccgccgtcgccgtaaagcttgcggtagatcacgcagggctcgttcgtctcggaatcacgggcaagcgcctccaccagataataatctcccttgaaatggcggtagacccgtcccggctgtacgtcacg

SEQ ID NO: 27244 - DNA, 109 bp, Unknown
  Description of Unknown: RightRegion for integrase B1245 sequence
cgcgttacctccatcacgttcaagaacggttcaacccacacgtttacctacaagacatgagaaaagccccggcctcatatactgaggtcggggccatcttatgcagtct

SEQ ID NO: 27245 - DNA, 260 bp, Unknown
  Description of Unknown: RightRegion for integrase B1246 sequence
cgcgtcacctccatcacattcaagaacggtgcgacccacacattcacctacaagacatgagaaaagccccggcctcatatactgaggtcggggccatcttatgcagtctatgcagtatcgccgcaacattatgcgtcaaaaaagttgttcaattttataagcatcccctcaaagctaacgatgcgtgatgcttttcggttatccacgcggctttttcaggtttttgcggcggttaaggcattttccctgaaaacccttat

SEQ ID NO: 27246 - DNA, 260 bp, Unknown
  Description of Unknown: RightRegion for integrase B1247 sequence
cgcgtcatctccatcaccttcaagaacggatcgacccacacgttcacctacaagatatgagaaaagccccggcctcatatactgaggtcggggccatcttatgcagtctatgcagcatcgccgcaacattatgcgccaaaaaagttgttcaattttataagcatcccctcaaagctaacgatgcgtgatgcttttcgcttatccactcggcttttcctgattttctcgtcggctaagccgttttccccgaaaacccttat

SEQ ID NO: 27247 - DNA, 260 bp, Unknown
  Description of Unknown: RightRegion for integrase B1248 sequence
ttagaggattatatgtactgtactagaaagctggggctttatgtgcagttagtagcataaattatataggggttatctaaatatatttacctcctgtgattaagttatataaagactaaatcacaggaggtttatttttatgataacagtagaaaaactggaaaaaggtacttattttgatgatgcttttaaaatctcatttagatatgatcccactactgtagctaaggtaaaagagctggcagagcggagatacttac

SEQ ID NO: 27248 - DNA, 260 bp, Unknown; identical to SEQ ID NO: 27197
  Description of Unknown: RightRegion for integrase B1249 sequence

SEQ ID NO: 27249 - DNA, 260 bp, Unknown
  Description of Unknown: RightRegion for integrase B1250 sequence
ttagaggattatatgtactgtactagaaagctggggctttatgtgcagttagtagcataaattatataggggttatctaaatatatttacctcctgtgattaggttatataaagactaaatcacaggaggtttatttttatgataatagtagaaaaactggaaaagggtacttattttgatgatgcttttaaaatctcatttagatacgatcccactactgtagctaaggtaaaagagctggcagagcggagatacttac

SEQ ID NO: 27250 - DNA, 260 bp, Unknown
  Description of Unknown: RightRegion for integrase B1251 sequence
tcagaaatcaccgcaatgaaagatcagcttgcgctaattcgtcaagaactggcggcataattttatttccctttcccgcctcaaatcaccgccagtaatcatggacctggtagtccggcggattattcagcttctctcgtactttttcaagtttttctctatacaaagtttcttcatcccttttccagtcataatagttttgcccacggtaatcatataaacatgccggatcgacacggttggccatatccggccgatat

SEQ ID NO: 27251 - DNA, 260 bp, Unknown
  Description of Unknown: RightRegion for integrase B1252 sequence
ttagaggattatatgtactgtactagaaagctggggctttatgtgcagttagtagcataaattatataggggttatctaaatatatttacctcctgtgattaagttatataaagactaaatcacaggaggtttatttttatgataacagtagaaaaactggaaaaaggtacttattttgatgatgcttttaaaatttcatttagatatgatcccactactgtagctaaggtaaaagagctggcagagcggagatatttac

SEQ ID NO: 27252 - DNA, 260 bp, Unknown; identical to SEQ ID NO: 27214
  Description of Unknown: RightRegion for integrase B1253 sequence

SEQ ID NO: 27253 - DNA, 260 bp, Unknown
  Description of Unknown: RightRegion for integrase B1254 sequence
cgcgtcacctccatcacattcaagaacggatcgacccacacgttcacctacaagacatgagaaaagccccggcctcatatactgaggtcggggccatcttatgcagtctatgcagtatcgccgcaacattatgcgtcaaaaaagttgttcaattttataagcatcccctcaaagctaacgatgcgtgatgcttttcagttatccatgcggctttttctgctttttgcgccggttaagccatttcccccgaaaacccttat

SEQ ID NO: 27254 - DNA, 109 bp, Unknown; identical to SEQ ID NO: 27200
  Description of Unknown: RightRegion for integrase B1255 sequence

SEQ ID NO: 27255 - DNA, 260 bp, Unknown; identical to SEQ ID NO: 27239
  Description of Unknown: RightRegion for integrase B1256 sequence

SEQ ID NO: 27256 - DNA, 260 bp, Unknown
  Description of Unknown: RightRegion for integrase B1257 sequence
ttagaggattatatgtactgtactagaaaactggggctttatgtacagttagtagcataagttatataggggctatctaaatatatttacctcctgtgattaagttatataaagacttaacacaggaggtttatttttatgataacagtagaaaaactggaaaaaggtacttattttgatgatgcttttaagatctcatttagatacgatcccactactgtagctaaggtaaaagagctggcagagcggagatacttacc

SEQ ID NO: 27257 - DNA, 260 bp, Unknown
  Description of Unknown: RightRegion for integrase B1258 sequence
gctgtcgctacggcaatagctgacagcagagaatacgaaaaaaagaaaaaggctgcgtaactgcgatgttacgcaaccttatcttcaaatcacataaactgctttatgtgcgccgccctaaagtgccgctttttttttgcaataagatctgcacaacgcaaaaaccgccgcagacgttaatctacggcgggtatttggcggagaaggagggagtaaaaacagccctgttctccccttttacgccacatcatgaacacgcc

SEQ ID NO: 27258 - DNA, 109 bp, Unknown
  Description of Unknown: RightRegion for integrase B1259 sequence
cgcgtcatctccatcaccttcaagaacggatcgacccacacattcacctacaagacatgagaaaagccccggcctcatatactgaggtcggggccatcttatgcagtct

SEQ ID NO: 27259 - DNA, 260 bp, Unknown; identical to SEQ ID NO: 27204
  Description of Unknown: RightRegion for integrase B1260 sequence

SEQ ID NO: 27260 - DNA, 260 bp, Unknown
  Description of Unknown: RightRegion for integrase B1261 sequence
attgtattcaagaacgggcttcgcaatcgctttatttatcaggacaacggcgacgcatagacgcccgtctgcgcgtcctgctgccccgtcctgcccctttgtttcctctgccctaaatttataccctgatagaaaaaagccgctatttaagcggctttacttatctcgtgttcggtattcacttgacacccgaatgtttgagcaaaaaaggtcatgggacgtcctaattcagcggacttccgcttcacgtagtccctggc

SEQ ID NO: 27261 - DNA, 260 bp, Unknown
  Description of Unknown: RightRegion for integrase B1262 sequence
cgcgtcacctccatcacattcaagaacggtgcgacccacacattcacctacaagacatgagaaaagccccggcctcatatactgaggtcggggccatcttatgcagtctatgcagtatcgccgcaacattatgcgtcaaaaagttgttcaattttataagcatcccctcaaagctaacgatgcgtgatgcttttcagttatccatgcggctttttctgctttttgcgccggttaagccgtttcccacgaaaacccttatt

SEQ ID NO: 27262 - DNA, 260 bp, Unknown
  Description of Unknown: RightRegion for integrase B1263 sequence
cgcgtcacctccatcacattcaagaacggtgcgacccacacattcacctacaagacatgagaaaagccccggcctcatatactgaggtcggggccatcttatgcagtctatgcagtatcgccgcaacattatgcgtcaaaaaagttgttcaattttataagcatcccctcaaagctaacgatgcgtgatgcttttcagttatccatgcggctttttctgctttttgcgccggttaagccgtttcccccgaaaacccttat

SEQ ID NO: 27263 - DNA, 260 bp, Unknown
  Description of Unknown: RightRegion for integrase B1264 sequence
atcgtattcaaaaacggacttcggaaccgctttgtctatcgggacgacgccgacgcatagaacgccccgtcctgcccgtttcttccctctgcccttatatttctaccctaaagaaaaaagccgcttaaacgcggcttttacaatctcgttttcggtattcatttgacagccgaacgtcgtgacatgaaaggtcagcggactgcctttttttgcagagagctgttccacataatttttagcaatgtccataaagtaatact

SEQ ID NO: 27264 - DNA, 109 bp, Unknown; identical to SEQ ID NO: 27202
  Description of Unknown: RightRegion for integrase B1265 sequence

SEQ ID NO: 27265 - DNA, 109 bp, Unknown; identical to SEQ ID NO: 27202
  Description of Unknown: RightRegion for integrase B1266 sequence

SEQ ID NO: 27266 - DNA, 260 bp, Unknown
  Description of Unknown: RightRegion for integrase B1267 sequence
ttagaggattatatgtactgtactagaaagctggggctttatgtgcagttagtagcataaattatataggggttatctaaatatatttacctcctgtgattaagttatataaagactaaatcacaggaggtttatttttatgataacagtagaaaaactggaaaaaggtacttattttgatgatgcttttaaaatctcatttagatacgatcctactactgtagctaaggtaaaagagctggcagagcggagatacttac

SEQ ID NO: 27267 - DNA, 109 bp, Unknown; identical to SEQ ID NO: 27202
  Description of Unknown: RightRegion for integrase B1268 sequence

SEQ ID NO: 27268 - DNA, 109 bp, Unknown; identical to SEQ ID NO: 27202
  Description of Unknown: RightRegion for integrase B1269 sequence

SEQ ID NO: 27269 - DNA, 260 bp, Unknown; identical to SEQ ID NO: 27203
  Description of Unknown: RightRegion for integrase B1270 sequence

SEQ ID NO: 27270 - DNA, 109 bp, Unknown
  Description of Unknown: RightRegion for integrase B1271 sequence
cgcgtcatctccatcactttcaagaacggatcgacccacacgttcacctacaagacatgagaaaagccccggcctcatatactgaggtcggggccatcttatgcagtct

SEQ ID NO: 27271 - DNA, 260 bp, Unknown
  Description of Unknown: RightRegion for integrase B1272 sequence
cgcgtcacctccatcacattcaagaacggtgcgacccacacattcacctacaagacatgagaaaagccccggcctcatatactgaggtcggggccatcttatgcagtctatgcagtatcgccgcaacattatgcgtcaaaaaagttgttcaattttataagcatcccctcaaagctaacgatgcgtgatgcttttcggttatccacgcggctttttcaggtttttgcgtcggttaaggcgttttccctgaaaacccttat

SEQ ID NO: 27272 - DNA, 260 bp, Unknown
  Description of Unknown: RightRegion for integrase B1273 sequence
cgcgtcatctccatcactttcaagaacggatcgacccacacgttcacctacaagacatgagaaaagccccggcctcatatactgaggtcggggccatcttatgcagtctatgcagtatcgccgcaacattatgcgtcaaaaaagttgttcaattttataagcatcccctcaaagctaacgatgcgtgatgcttttcagttatccatgcggctttttcaggtttttgcggcggttaaggcgttttccctgaaaacccttat

SEQ ID NO: 27273 - DNA, 260 bp, Unknown; identical to SEQ ID NO: 27187
  Description of Unknown: RightRegion for integrase B1274 sequence

SEQ ID NO: 27274 - DNA, 260 bp, Unknown
  Description of Unknown: RightRegion for integrase B1275 sequence
cgcgtcacctccatcacattcaagaacggtgcgacccacacattcacctacaagacatgagaaaagccccggcctcatatactgaggtcggggccatcttatgcagtctatgcagtatcgccgcaacattatgcgccaaaaaagttgttcaattttataagcatcccctcaaagctaacgatgcgtgatgcttttcggttatccacgcggctttttcaggtttttgcggcggttaaggcgttttccctgaaaacccttat

SEQ ID NO: 27275 - DNA, 260 bp, Unknown
  Description of Unknown: RightRegion for integrase B1276 sequence
cgcgtcatctccatcaccttcaagaacggatcgacccacacgttcacctacaagacatgagaaaagccccggcctcatatactgaggtcggggccatcttatgcagtctatgcagcatcaccgcaacattatgcgccaaaaaagttgttcaattttataagcatcccctcaaagctaacgatgcgtgatgcttttcggttatccacacggcttttcctgattttctcgtcggctaagccattttccccgaaaacccttat

SEQ ID NO: 27276 - DNA, 260 bp, Unknown
  Description of Unknown: RightRegion for integrase B1277 sequence
ttagaggattatatgtactgtactagaaagctagggctttatgtgcagttagtagcataaattatataagggttatctaaatatatttacctcctgtgattaagttatataaagactaaatcacaggaggtttatttttatgataacagtagaaaaactggaaaaaggtacttattttgatgatgcttttaaaatctcatttagatacgatcccactactgtagctaaagtaaaagagctggcagagcggagatatttac

SEQ ID NO: 27277 - DNA, 260 bp, Unknown
  Description of Unknown: RightRegion for integrase B1278 sequence
cgcgtcacctccatcacattcaagaacggtgcgacccacacattcacctacaagacatgagaaaagccccggcctcatatactgaggtcggggccatcttatgcagtctatgcagtatcgccgcaacattatgcgtcaaaaaagttgttcaattttataagcatcccctcaaagctaacgatgcgtgatgcttttcggttatccacgcggctttttcaggtttttacggcggttaagccgtttcccccgaaaacccttat

SEQ ID NO: 27278 - DNA, 109 bp, Unknown
  Description of Unknown: RightRegion for integrase B1279 sequence
cgcgtcatctccatcaccttcaagaacggatcgacccacacgttcacctacaagacatgagaaaagccccggcctcatatactgaggtcggggccatcttatgcagtct

SEQ ID NO: 27279 - DNA, 260 bp, Unknown
  Description of Unknown: RightRegion for integrase B1280 sequence
ttagaggattatatgtactgtactagaaagctggggctttatgtgcagttagtagcataaattatataggggttatctaaatatatttacctcctgtgattaagttatataaagactaaatcacaggaggtttatttttatgataacagtagaaaaactggaaaaaggtacttattttgatgatgcttttaagatctcatttagatacgatcccactactgtagctaaggtaaaagagctggcagagcggagatacttac

SEQ ID NO: 27280 - DNA, 109 bp, Unknown
  Description of Unknown: RightRegion for integrase B1281 sequence
gaggttctttttatcccgacgccgtccaaaggaggatctcatggtctacaccatcggtgaaatggcaaagatgctgggcgttccggcatccaccctgcgctactatgac

SEQ ID NO: 27281 - DNA, 260 bp, Unknown; identical to SEQ ID NO: 27277
  Description of Unknown: RightRegion for integrase B1282 sequence

SEQ ID NO: 27282 - DNA, 260 bp, Unknown
  Description of Unknown: RightRegion for integrase B1283 sequence
cggatcaccgccatcaccttccgaaacggcacagcccaccggttcaaatacaagacataaaacaagccccgaccacaccggccggggcttttccgtatccgcagttatgcgaggaatattcggtttttatgcagaaaaaagttggtcaatttcatacacataccctcgatgttgcggagtcgggacgtgcatttcattaccggtcggtttcgccattctcgccatccggtacggtcgcatcctccgaaacgcttgaaatt

SEQ ID NO: 27283 - DNA, 260 bp, Unknown
  Description of Unknown: RightRegion for integrase B1284 sequence
tataacggacaatttaaaagcggatcggggatgcgtctattacgatggagatccgattagtaaattgggaagtaaatatcgtgaaaaaataggatatatgccgcaacaacaggagatttatgacaattttaccggtgaagagtttctgtggtatatggcagctttaaagggattagaaaaaagtatgcaaaaaataagatagataaccttttgaaagtggtgaatttgacttctgagaaaaacaaaaaaataggttcgta

SEQ ID NO: 27284 - DNA, 260 bp, Unknown
  Description of Unknown: RightRegion for integrase B1285 sequence
acgtgcatttctggggcgagtgaaattgcatttaactatgaatatagaatggtaatctaatatgcaaagaggaatggagtcaatgaacaatatacataccgcatatgatgtaatgaaagaatacttaataaccgatgcagaacttgacggccagttccaggtgccgatgcttccaaaggtgaatctggtaccgaataggggaatagatttcgtatcctctaagtccagatcgctaaaagggcataaggacctgaccgtga

SEQ ID NO: 27285 - DNA, 260 bp, Unknown
  Description of Unknown: RightRegion for integrase B1286 sequence
gggcaagtaaaacaaatcatattcaaaaatggtctgtcacacactttcatattcaaataaaataagccggggcaattactgctccggctttcgttctgtattcactatgctgatacctgtactccgttttcaaaaatcgctgccacccagtatccgtatttctcatggcgagccttatttgagtctgtcttgatgactgctgttcttttcccattgctcatcacatatactggagcgttcttctgctcactgaacttctt

SEQ ID NO: 27286 - DNA, 109 bp, Unknown
  Description of Unknown: RightRegion for integrase B1287 sequence
attaaagaaatgcagcaattaatgttgcatttctgttctcatagcatgtccagtatctaataaaattatattttctgcaaattcttttaaagcatattgctgacaaacc

SEQ ID NO: 27287 - DNA, 260 bp, Unknown
  Description of Unknown: RightRegion for integrase B1288 sequence
tgttttttcatagccataacggatttcgttataatctaccaaaatccagcgagattctaaaatcgttgttagaatctaccgtaaaggagcatggctatgattaggattttactgtccacccggcttggcgagcggaggtggtcacaagctgaccttgcaagggcaacaggcattcgaccttcgacgatcaatgacctgtaccatgagatcgcagaaagggtaaacctggagcatctggatcttatttgtgaggcgctggg

SEQ ID NO: 27288 - DNA, 260 bp, Unknown
  Description of Unknown: RightRegion for integrase B1289 sequence
gggcaggtaaaacaaatcatattcaaaaacggtctgtcacacactttcatattcaaataaaatgagccggggcaattactgctccggctttcattctgtgttcattatgctgatacctgtactccattttcaaaaattgctgccacccagtatccgtatttctcgtgacgagccttatttgagtccgtcttgataactgctgttctttttccattgctcatcacatataccggagcgttcttctgctcactgaatttctt

SEQ ID NO: 27289 - DNA, 260 bp, Unknown
  Description of Unknown: RightRegion for integrase B1290 sequence
gggcaggtaaaacaaatcatattcaaaaacggtctgtcacacactttcatattcaaataaaatgagccggggcaattactgctccggctttcattctgtgttcattacgctgatacctgtactccattttcaaaaatcgctgccacccagtatccgtatttctcgtggcgagccttgtttgagtccgtcttgatgactgctgttctttttccattgctcatcacatataccggagtgttcttctgctcactgaatttctt

SEQ ID NO: 27290 - DNA, 260 bp, Unknown
  Description of Unknown: RightRegion for integrase B1291 sequence
aattgcattttgaatgcaagtgaaatcgcatttgattacacgtatgaagcagtaatctaaaatataaaatgtggaggaatggagtcatgacagtacataccgcatatgatgtgatgagagaatacatgattacaggagctgaactggatggtagataccagattccaatgatggatagatatgtggacgagataccacaagatacagtagattttaaagatagcttcagccgaaagataaagaatcatcgcgatttgtgc

SEQ ID NO: 27291 - DNA, 260 bp, Unknown; identical to SEQ ID NO: 27288
  Description of Unknown: RightRegion for integrase B1292 sequence

SEQ ID NO: 27292 - DNA, 260 bp, Unknown
  Description of Unknown: RightRegion for integrase B1293 sequence
cacttttgttcccagcccagagagaccataaacgaaagggtatcgcaatcagggctatgatttcacaattacatcttctacggcttttgatcacaaatggattccggaacgaaatgtttttgactccatttctacagtggtggacgaactgtttgcagattatctttccagaccgaatgtaaggcagccgattctgacacaatactgtgacggaagacaggttcagtgtccgaactggatgaccaaattgtcacaaccta

SEQ ID NO: 27293 - DNA, 260 bp, Unknown
  Description of Unknown: RightRegion for integrase B1294 sequence
caaagcacacacaggcgaaccgttggtaataatcaatggttcgcttttgttatcagttaagagaataaaataaaaaaccgccgccgataagagctccacagctcttaccgacggcgaattttttatcttacattgatttaataaatgcacccggataatcttttttcactgttttaaggtatgcctcagcattctcccgagacttgaaagccccgacctgcacatagaacatctgattgctttcgacagcaggcataaac

SEQ ID NO: 27294 - DNA, 260 bp, Unknown
  Description of Unknown: RightRegion for integrase B1295 sequence
aattgcattttgaatgcaagtgaaattgcatttgattacacgtatgaagcagtaatctaaaatataaaatgtggaggaatggagtcatgacagtacataccgcatatgatgtgatgagagaatacatgattacaggagctgaactggatggtagataccagattccaatgatggataggtacgtggatgagataccgcaagacacagtggattttaaagacagtttcagtcgcaagataaagaattatcgcgatttgtgc

SEQ ID NO: 27295 - DNA, 260 bp, Unknown
  Description of Unknown: RightRegion for integrase B1296 sequence
cggatcaccgccatcaccttccgaaacggcacagctcaccggttcaaatacaagacataaaacaagccccgaccacaccggtcggggcttttccgtatccgcagttatgcgaggaatattcggtttttatgcagaaaaaagttggtcaatttcatacacataccctcgatgttgcggagtcgggacgcgcatttcattaccggtcggttttgtcattctcgccatccggtacggtcgcatcctccgaaacgcttgaaatt

SEQ ID NO: 27296 - DNA, 260 bp, Unknown
  Description of Unknown: RightRegion for integrase B1297 sequence
cacttttgtccccaaccacgaatgaccgttaacgaaagggtatcgcaatcagggctatgatttcacaattacatcttctacggcttttgatcacaaatggattccggaacgaaatgtttttgactccatttctacagtggtggacgaactgtttgcagattatctttccagaccgaatgtaaggcagccgattctgacacaatactgtgacggaagacaggttcagtgtccgaactggatgaccaaattgccacaaccga

SEQ ID NO: 27297 - DNA, 109 bp, Unknown
  Description of Unknown: RightRegion for integrase B1298 sequence
aataagcactgctacattattgatatggctcactgcctgagccttactgaatcaatataaccgggcaaccgttccagctaccatcacttatttacgtgacgaattgttc

SEQ ID NO: 27298 - DNA, 260 bp, Unknown
  Description of Unknown: RightRegion for integrase B1299 sequence
acttgcatttctggagcgagcgaaattgcatttaactatgaatatagaatggtaatctaatatacaaagaggaatggagtcgatgaacaatatacatactgcatatgatgtaatgaaagaatacttaataaccgatgcagaacttgacggccagtttcaggtgccgatgttgtcaaaatcggatgtcgtgccgagtaagggaatagatttcgtatcttcgaagtccagaaccctgaaagggcataaggacctgaccgtga

SEQ ID NO: 27299 - DNA, 260 bp, Unknown
  Description of Unknown: RightRegion for integrase B1300 sequence
caatggaattctgcgtcccacctcaggagaagtgctgatcaacggagaagatatcaataaccgatctactgcaaaatggtctaaagaggtaggatatgtattccagaacccggatgatcagctgtttctggaatctgtccgcaaggagtttgagttcggacccaagcagatcggtatgccagaggacgagatccagaaaagaatcgaatgggtagcagagcttgtaggactgaaggacaagctggatatgcatccctttg

SEQ ID NO: 27300 - DNA, 260 bp, Unknown
  Description of Unknown: RightRegion for integrase B1301 sequence
gggcaagtaaagcaaatcatattcaaaaatggtctgtcacacactttcatattcaaataaaataagccggggcaattactgctccggctttcgttctgtattcactatgctgatacctgtactccgttttcaaaaatcgctgccacccagtatccgtatttctcatggcgagccttatttgagtctgtcttgatgactgctgttcttttcccattgctcatcacatataccggagcgttcttctgctcactgaacttctt

SEQ ID NO: 27301 - DNA, 260 bp, Unknown
  Description of Unknown: RightRegion for integrase B1302 sequence
tatcagcaattcttggaaatcacagaggaacagaaacttataccgctgattagtgcgtaaaagaaaattgaccagcgccacacaaaaacggtgctggtcaatgactttgtataggacatatttagtgattttgatcgttagaaaagtgctttttattacaacagcatacaccatgagtgtgagcaactaaggagagcaactgactcttaatcagtgggtcctgggttcgagtccccgatggtgcaccaaagaatgcctta

SEQ ID NO: 27302 - DNA, 260 bp, Unknown
  Description of Unknown: RightRegion for integrase B1303 sequence
ggacaagtaaaacaaatcatattcaaaaatggtctgtcacacactttcatattcaaataaaataagccggggcaattactgctccggctttcgttctgtattcactatgctgatacctgtactccgttttcaaaaatcgctgccacccagtatccgtatttctcatggcgagccttatttgagtctgtcttgatgactgctgttcttttcccattgctcatcacatataccggagcgttcttctgctcactgaacttctt

SEQ ID NO: 27303 - DNA, 260 bp, Unknown
  Description of Unknown: RightRegion for integrase B1304 sequence
aattgcattttgaatgcaagtgaaatcgcatttgattacacgtatgaagcagtaatctaaaatataaaatacggaggaatggagtcgtgacagtacataccgcatatgatgtgatgagagaatacatgattacaggagccgaactggatggtaaataccagattccaatgatggatagatatgtggacgagataccacaagatacagtagattttaaagatagcttcagccgaaagataaagaatcatcgcgaattgtgc

SEQ ID NO: 27304 - DNA, 260 bp, Unknown; identical to SEQ ID NO: 27298
  Description of Unknown: RightRegion for integrase B1305 sequence

SEQ ID NO: 27305 - DNA, 260 bp, Unknown
  Description of Unknown: RightRegion for integrase B1306 sequence
cggatcaccgccatcgccttccgaaacggcacagctcaccggttcaaatacaagacataaaacaagccccgaccacaccggtcggggcttttccgtgtccgcagttatgcgaggaatattcggtttttatgcagaaaaaagttggtcaatttcatacacataccctcgatgttgcggagtcgggacgcgcatttcattaccggtcggttttgtcattctcgccatccggtacggtcgcatcctccgaaacgcttgaaatt

SEQ ID NO: 27306 - DNA, 260 bp, Unknown
  Description of Unknown: RightRegion for integrase B1307 sequence
gtcaacaccagaaaaggtgtgttcgtgagctacacgaccgacgacagacccgctgtttgagcagaaaaaagcgagtgtcctcacagcttttcaaatgctgtaagaacactcgccatggtacgggtaacaggaatcgaacctgcacggttgcccaccagatcctaaatctggcgcgtctgccagttccgccatacccgcatatttcccatcgcaattatatagccgtcgccatacaacaagagatgcgaccatctcatacg

SEQ ID NO: 27307 - DNA, 260 bp, Unknown
  Description of Unknown: RightRegion for integrase B1308 sequence
gggcaagtaaaacaaatcatattcaaaaatggtctgtcacacactttcatattcaaataaaatgagccggggcaattaccgctccggctttcattctgtgttcattatgctgatacctgtactccattttcaaaaattgctgccacccagtatccgtatttctcgtgacgagccttatttgagtccgtcttgatgactgctgttctttttccattgctcatcacatataccggagcgttcttctgctcactgaatttctt

SEQ ID NO: 27308 - DNA, 260 bp, Unknown
  Description of Unknown: RightRegion for integrase B1309 sequence
gataaagctgttgatattattgagtttcagaatggtttagcattacattttaactattaatatcgtagttgcgtagaggtatctaaaaaatcgtagttgaggcaacatacggacagccaaatgtttgtataataaaagattttctttttccagtttttataaactcatcctcattctttctatgaagcatttctatatatttttcttgctcttctattttttccttggatatttctatctgttttctttccgacacttta

SEQ ID NO: 27309 - DNA, 260 bp, Unknown
  Description of Unknown: RightRegion for integrase B1310 sequence
ggaaaagtcacttcagtggtgtttaaaaacgcaatcacggttcgcttcaagtatgaataacaaaagcgcccagatccagtaatcagatcagggcgctttctattgccttgttcgtgaataatcacacacaagtcatcaataatcattcatttcttggggacgattgaaaaatttcctttttctggaatatcgtatacatcgggtacataaaatttgcaaagtcgtaaaaatcgctcaaaaacggtcattcatgcacaaaa

SEQ ID NO: 27310 - DNA, 260 bp, Unknown
  Description of Unknown: RightRegion for integrase B1311 sequence
cacttttgttcccagcccagagagaccataaacgaaagggtatcgcaatcagggctatgatttcacaattacatcttctacggcttttgatcacaaatggattccggaacgaaatgtttttgactccatttctacagtggtggacgaactgtttgcagattatctttccagaccgaatgtaaggcagccgattctgacacaatactgtgacggaagacaggttcagtgtccgaactggatgaccaaattgccacaaccta

SEQ ID NO: 27311 - DNA, 260 bp, Unknown
  Description of Unknown: RightRegion for integrase B1312 sequence
gggcaagtaaaacaaatcatattcaaaaatggtctgtcacacactttcatattcaaataaaatgagccggggcaattactgctccggctttcattctgtgttcattatgctgatacctgtactccattttcaaaaattgctgccacccagtatccgtatttctcgtgacgagccttatttgagtccgtcttgacgactgctgttctttttccattgctcatcacatataccggagcattcttctgctcactgaatttctt

SEQ ID NO: 27312 - DNA, 260 bp, Unknown
  Description of Unknown: RightRegion for integrase B1313 sequence
cacttttgtccccaacccagaatgaccaattacgatggggtaccggaaccagggctatgattttactattacatcttccactgcatttgaccataaatggattcctgaacggaatatttacgattctatttcaatcatcgtagatgaattatttgccgactatcttgcaagaccaaatgtaagacagccgatacttacacagtattgcgatggaagacaggttcaatgtccaaattggatgaccattttgtaaggacgta

SEQ ID NO: 27313 - DNA, 260 bp, Unknown; identical to SEQ ID NO: 27288
  Description of Unknown: RightRegion for integrase B1314 sequence

SEQ ID NO: 27314 - DNA, 260 bp, Unknown
  Description of Unknown: RightRegion for integrase B1315 sequence
tatcagcaattcctggaaatcacagaagaacaaaaacttataccgctgattagtgcgtaaaagaaaattgaccagcgccacacaaaaacggtgctggtcaatgactttgcataggatatatttagtgattttgatcgttagaaaagtgctttttattacaacagcatacaccatgagtgtgagcaactaaggagagcaactgactcttaatcagtgggtcctgggttcgagtccccgatggtgcaccaaaaaaagcctta

SEQ ID NO: 27315 - DNA, 260 bp, Unknown
  Description of Unknown: RightRegion for integrase B1316 sequence
gggcaggtaaaacaaatcatattcaaaaacggtctgtcacacactttcatattcaaataaaatgagccggggcaattactgctccggctttcattctgtgttcattccgctgatacctgtactccattttcaaaaatcgctgccacccagtatccgtatttctcgtggcgagccttgtttgagtccgtcttgatgactgctgttcttttcccattgctcatcacatataccggagcgttcttctgctcactgaatttctt

SEQ ID NO: 27316 - DNA, 260 bp, Unknown
  Description of Unknown: RightRegion for integrase B1317 sequence
gagctaaatttgccgcccatagggcagcttatgtgtccgtcaggagaggatagcgaatgaaattttgatgtactttcgcagtcggaagaaattacagggcgaggtgtcgctcaacgattcgctcgattccgacgccgacggcgagtcgctctacctcatggatgtcgtcggcgtcgaggacacgatgtatttggacattcaggaccgcgacgactgcctgcgcgtgcgaaggctcgtgcacgagtgcctgaccgagcggg

SEQ ID NO: 27317 - DNA, 260 bp, Unknown; identical to SEQ ID NO: 27298
  Description of Unknown: RightRegion for integrase B1318 sequence

SEQ ID NO: 27318 - DNA, 260 bp, Unknown
  Description of Unknown: RightRegion for integrase B1319 sequence
attaaagaaatgcagcaactaatgttgcatttctattctcatagcatgtccagtatctaaaagtattatattttctgcaaattcttttaaagcatattgttgacatactttagagctaagcttatcataattgatgtcttccttaggaacttctaaaataacacaacctgttctatctaactcttcaacaatttcctttgacaagctttctttagctaacttacatgaacctgaaattgctcctaatgtatcctgatctc

SEQ ID NO: 27319 - DNA, 260 bp, Unknown
  Description of Unknown: RightRegion for integrase B1320 sequence
gggcaggtaaaacaaatcatattcaaaaacggtctgtcacacactttcatattcaaataaaatgagccggggcaattactgctccggctttcattctgtgttcattatgctgatacctgtactccattttcaaaaatcgctgccacccagtatccgtatttctcgtggcgagccttgtttgagtctgtcttgatgactgctgttcttttcccattgctcatcacatataccggagcgttcttctgctcactgaacttctt

SEQ ID NO: 27320 - DNA, 260 bp, Unknown
  Description of Unknown: RightRegion for integrase B1321 sequence
cggatcaccgccatcaccttccgaaacggcacagcccaccggttcaaatacaagacataaaacaagccccgaccacaccggccggggcttttccgcatccacagttatgcgaggaatattcggtttttatgcagaaaaaagttggtcaatttcatacacataccctcgatgttgcggagtcgggacgcgcatttcattaccggtcggttttgtcattctcgccatccggtacggtcgcatcctccgaaacgcttgaaatt

SEQ ID NO: 27321 - DNA, 260 bp, Unknown
  Description of Unknown: RightRegion for integrase B1322 sequence
acttgcattaagacacaagatatggtatttttcaaatataagtaccttttagcactataagagaaaaaatgggagtggaatcaatgatacatacagcttatgacgtaatgaaagagtttttaatcacggatgcagaccttgatggtaagtacggaataccgaaaattccaaagacttttatccatccaggcaaagatactgtagactttgcagagagcttcagtagaaagataaagaaacaccgggaactggatgtaaac

SEQ ID NO: 27322 - DNA, 260 bp, Unknown
  Description of Unknown: RightRegion for integrase B1323 sequence
acttgcattaagacacaagatatggtatttttcaaatataagtaccttttagcactataagagaaaaaatgggagtggaatcaatgatacatacagcttatgacgtaatgaaagagtttttaatcacggatgcagaccttgatggtaagtacggaatcccgaaaattccaaagacttttatccatcctggcaaagatactgtagactttgcagagagcttcagtagaaagataaagaaacaccgggaactggatgtaaac

SEQ ID NO: 27323 - DNA, 260 bp, Unknown
  Description of Unknown: RightRegion for integrase B1324 sequence
acttgcattaagacacaagatatggtatttttcaaatataagtaccttttagcactataagagaaaaaatgggagtggaatcaatgatacatacagcttatgacgtaatgaaagagtttttaatcacggatgcagacctcgatggcaagtacggaattccgaaaattccaaagacttttatccatccagggaaagatactgtagactttgcggagagtttcagtagaaagataaagaaccaccgggaactggatgtaaat

SEQ ID NO: 27324 - DNA, 260 bp, Unknown
  Description of Unknown: RightRegion for integrase B1325 sequence
acttgcatcaagacacaacatatggtattttacaaatataagtaccttttagcactataagagaaaaaatgggagtggaatcaatgatacatacagcttatgacgtaatgaaagagtttctaataactggtgcggaactggatggcaagtacggaatcccgaaaatcccaaagacatttatccatcctggaaaagatactgtagactttgcggagagcttcagccggaggataaagaatcatcgggaattggatgtaaat

SEQ ID NO: 27325 - DNA, 260 bp, Unknown
  Description of Unknown: RightRegion for integrase B1326 sequence
acttgtatcaagacacaagatatggtattttacaaatataagtaccttttagcactataagagaaaaatgggagtggaatcaatgatacatacagcttatgacgcaatgaaagagtttttaatcacggatgcagaccttgatggtaagtacgaaatcccgaaaatcccaaagacttttatccatcctggaaaagatactgtagactttgcggagagctttagccggaagattaagaaccatcgggaacttgatgtaaatt

SEQ ID NO: 27326 - DNA, 260 bp, Unknown
  Description of Unknown: RightRegion for integrase B1327 sequence
acttgcattaagacacaagatatggtatttttcaaatataagtaccttttagcactataagagaaaaaatgggagtggaatcaatgatacatacagcttatgacgtaatgaaagagtttttaatcacggatgcagaccttgatggtaagtacggaataccgaaaattccaaagacatttatccatcctggaaaagatactgtagactttgcagagagcttcagcagaaagataaagaaccatcgggaactggatgtaaac

SEQ ID NO: 27327 - DNA, 260 bp, Unknown
  Description of Unknown: RightRegion for integrase B1328 sequence
acttgcattaagacacaagatatggtatttttcaaatataagtaccttttagcactataagagaaaaaatgggagtggaatcaatgatacatacagcttatgacgtaatgaaagagtttttaatcacggatgcagaccttgatggtaagtacgaaatcccgaaaattccaaagacttttatccatccagggaaagatactgtagactttgcggagagcttcagccggaagattaagaaccacaaggaacttgatgtgaat

SEQ ID NO: 27328 - DNA, 260 bp, Unknown
  Description of Unknown: RightRegion for integrase B1329 sequence
acttgcatcaagacacaacatatggtattttacaaatataagtaccttttagcgctataagagaaaaaatgggagtggaatcaatgatacatacagcttatgacgtaatgaaagagtttttaatcactgatgcagaccttgaaggaaagtacggaatcccgaaaattccaaagacttttatccatcctgggaaagatactgtagactttgcggagagtttcagtagaaagataaagaaccaccgggaactggatgtaaac

SEQ ID NO: 27329 - DNA, 260 bp, Unknown
  Description of Unknown: RightRegion for integrase B1330 sequence
acttgcattaagacacaagatatggtatttttcaaatataagtaccttttagcactataagagaaaaaatgggagtggaatcaatgatacatacagcttatgacgtaatgaaagggtttttaatcacggatgcagaccctggaagaggcggaagaggcagcgaacgagtatgacggagagtcctatataatgctttaaaaaaataaagcaatgccaaatttggctcgaaatggaagaagaggaggaataaaaaataaagc

SEQ ID NO: 27330 - DNA, 260 bp, Unknown
  Description of Unknown: RightRegion for integrase B1331 sequence
acttgcatcaagacacaacatatggtattttacaaatataagtaccttttagcactataagagaaaaaaatgggagtggaatcaatgatacatacagcttatgacgtaatgaaagagtttttaatcacggatgcagaccttgatggcaaatatggaatcccgaaaattccaaaaacttttatccatcctggcaaagatactgtagactttgcggaaagcttcagccggaagattaagaatcatcgggaactggatgtaaa

SEQ ID NO: 27331 - DNA, 260 bp, Unknown; identical to SEQ ID NO: 27323
  Description of Unknown: RightRegion for integrase B1332 sequence

SEQ ID NO: 27332 - DNA, 260 bp, Unknown
  Description of Unknown: RightRegion for integrase B1333 sequence
acttgcattaagacacaagatatggtatttttcaaatataagtaccttttagcactataagagaaaaaatgggagtggaatcaatgatacatacagcttatgacgtaatgaaagagtttttaatcacgaatgcagaccttgatggcaagtacggaatcccgaaaattccaaagacctttatccatccagggaaagatactgtagactttgcagagagcttcagtcgaaagattaagaaccatcgggaacttgatgtaaac

SEQ ID NO: 27333 - DNA, 260 bp, Unknown
  Description of Unknown: RightRegion for integrase B1334 sequence
acttgtatcaagacacaagatatggtattttacaaatataagtaccttttagcactataagagaaaaatgggagtggaatcaatgatacatacagcttatgacgcaatgaaagagtttttaatcacggatgcagaccttgatggtaagtacgaaatccagaaaatcccaaagacttttatccatcctggaaaagatactgtagactttgcggagagctttagccggaagattaagaaccatcgggaacttgatgtaaatt

SEQ ID NO: 27334 - DNA, 260 bp, Unknown
  Description of Unknown: RightRegion for integrase B1335 sequence
aagtacagacagtttctggaatgcacagcagaaacttacaatacagaaattggtgcataacagaaaaggcggactgttcacgcaggaaagtgaatagtccactttttgtgctatggacagcactattgcaaaaagtaaagaaacagcgtataataaaggcaaggaaaggaggcgcttatcccatgcagcaggaagaaaattatttggcgcagagtatatcccaagtggatgccgatgcccgctacgatgagggtgttaag

SEQ ID NO: 27335 - DNA, 260 bp, Unknown
  Description of Unknown: RightRegion for integrase B1336 sequence
ggtaagatctccagcatcgtattccgaaatggactttgccacaactttgtattcaaataatttttaactacgcagcaaaaaatctgctgtaatttaaaaaaaggtgccttatttttaacaaaggcaccttgtcttgtttaaaaatgatctatcttgcattaaaacaaggtggatcatgcttaatcctgatcgtggcttgaccagatcaactctcttttttgaggaagttcagctatttcttgaatcagcgtataacaagc

SEQ ID NO: 27336 - DNA, 260 bp, Unknown
  Description of Unknown: RightRegion for integrase B1337 sequence
acttgtattaagacacaacatatggtattttacaaatataagtaccttttagcactataagagaaaaaatgggagtggaatcaatgatacatacagcttacgacgtaatgaaagagtttttaatcacggatgcagaccttgacggcaagtatggaatcccgaaaattccaaagaattttatccatcctggcaaagatactgtagactttgcagagagcttcagcagaaagataaagaaccatcgggaactggatgtaaat

SEQ ID NO: 27337 - DNA, 260 bp, Unknown
  Description of Unknown: RightRegion for integrase B1338 sequence
acttgcattaagacacaagatatggtatttttcaaatataagtaccttttagcactataagagaaaaaaatgggagtggaatcaatgatacatacagcttatgacgtaatgaaagagtttttaatcacggatgcagagcttgttggacagtacggaatccctaaaattccaaagacttttatccatccagggaaaaatactgtagattttgcggagagctttagccggaagattaagaaccaccgggaactggatgtaaa

SEQ ID NO: 27338 - DNA, 260 bp, Unknown
  Description of Unknown: RightRegion for integrase B1339 sequence
acttgcattaagacacaagatatggtatttttcaaatataagtaccttttagcactataagagaaaaaatgggagtggaatcaatgatacatacagcttatgacgtaatgaaagagtttttaatcacggatgcagagcttgttggacagtacggaatccctaaaattccaaagacttttatccatccagggaaaaatactgtagattttgcggagagctttagccgaaaaattaagaaccaccgggaactagacgtaaat

SEQ ID NO: 27339 - DNA, 260 bp, Unknown; identical to SEQ ID NO: 27338
  Description of Unknown: RightRegion for integrase B1340 sequence

SEQ ID NO: 27340 - DNA, 260 bp, Unknown
  Description of Unknown: RightRegion for integrase B1341 sequence
actttcattaagacacaagatatggtatttttcaaatataagtaccttttagcactataagagaaaaaaatgggagtggaatcaatgatacatacagcttatgacgtaatgaaagagtttttaatcactgatgcagaccttgaaggaaagtacggaatcccgaaaattccaaagacttttatccatccagggaaagatactgtagactttgcggagagcttcagccgtaagattaagaaccaccgggaactggatgtaaa

SEQ ID NO: 27341 - DNA, 260 bp, Unknown; identical to SEQ ID NO: 27338
  Description of Unknown: RightRegion for integrase B1342 sequence

SEQ ID NO: 27342 - DNA, 260 bp, Unknown; identical to SEQ ID NO: 27328
  Description of Unknown: RightRegion for integrase B1343 sequence

SEQ ID NO: 27343 - DNA, 260 bp, Unknown
  Description of Unknown: RightRegion for integrase B1344 sequence
gcaaatggagcagccgcacagctatcagatcaggatccattctgccgcagaataccgtgaccgctgcctttgcttgccgtgatggaaaacatgatttttatgcctgcgtggatcagaaaaaccaccggattttccgctgccaaagaaattacccgctaaaaattcagataattttgctgtctgcgggcgaattggtgttgcatcggtcggaaaaaagctataagctattatggaatcatgtaagcaaatagcagcgaggg

SEQ ID NO: 27344 - DNA, 260 bp, Unknown
  Description of Unknown: RightRegion for integrase B1345 sequence
gatttgcggtgttctaaagcctacttccggcagtatctgtttgaacggaaagagcattgacgagttgggagaagattattatgctcacttgggctatatgccgcaggatttcggcttttacccggattttacagcccgtgagtttatgctctatatggcggcagtaaagggactggataggaaagaagcaacgacacggacgggggaattgttgaaattagttaatctgcatgaggtggcagacaaaaaaattaagtcct

SEQ ID NO: 27345 - DNA, 260 bp, Unknown
  Description of Unknown: RightRegion for integrase B1346 sequence
gatcacttcccttactcatgggaagatcaaagacgtgaactcggttttaacccagcataaaataataaacaaattgctctttttatatctatgtatgcgtgaaaaacatacatagatatttaattttataaatttttcaaccggttattgaaaaaaaactaaactaatgaatatatggccttttgtattaaacattaacaaaaggttaaaaatgaaatatttatttgatggactaccaccaaaggtaattacttatatca

SEQ ID NO: 27346 - DNA, 260 bp, Unknown
  Description of Unknown: RightRegion for integrase B1347 sequence
tataacggacaatttaaaagcggatcggggatgcgtctattacgatggagatccgattagtaaattgggaagtaaatatcgtgaaaaaataggatatatgccgcaacaacaggagatttatgacaattttaccggtgacgagtttctgtggtatatggcagctttaaagggattagaaaaaaagtatgcaaaaaataagatagataaccttttgaaagtggtgaatttgacttctgagaaaaacaaaaaaataggttcgt

SEQ ID NO: 27347 - DNA, 260 bp, Unknown
  Description of Unknown: RightRegion for integrase B1348 sequence
gacaaaggcaatagtgataaaaataatgaggtgtcattatgtactaggaatatgacttgacttaattgctccattaagtccaaatttagttctttccgatacaatttcaatttctaactgtgataatactgttagcattcttacaaagaatcttccgttagcagtagaagtattaacatcatctctatcacaaacaagataacaattatatttttctaactctaatataagttcttctaaatcacgaactgaacgagtaa

SEQ ID NO: 27348 - DNA, 260 bp, Unknown; identical to SEQ ID NO: 27323
  Description of Unknown: RightRegion for integrase B1349 sequence

SEQ ID NO: 27349 - DNA, 260 bp, Unknown
  Description of Unknown: RightRegion for integrase B1350 sequence
acttgcattaagacacaagatatggtatttttcaaatataagtattttttagcactataagagaaaaaaatgggagtggaatcaatgatacatacagcttatgacgtaatgaaagaatttttaatcacggatgcagaccttgatggtaagtacgaaatcccgaaaatcccaaagacttttatccatcctggaaaagatactgtagactttgcggagagctttagccggaagattaagaaccaccgggaactggatgtaaa

SEQ ID NO: 27350 - DNA, 260 bp, Unknown; identical to SEQ ID NO: 27337
  Description of Unknown: RightRegion for integrase B1351 sequence

SEQ ID NO: 27351 - DNA, 260 bp, Unknown; identical to SEQ ID NO: 27338
  Description of Unknown: RightRegion for integrase B1352 sequence

SEQ ID NO: 27352 - DNA, 260 bp, Unknown
  Description of Unknown: RightRegion for integrase B1353 sequence
gcaaatggagcagccgcacagctatcagatcaggatccattctgccgcagaataccgtgaccgctgcctttgcttgccgtgatggaaaacatgatttttatgcctgcgtggatcagaaaaaccaccggatttttccgctgccaaagaaattacccgctaaaaattcagataattttgctgtctgcgggcgaattggtgttgcatcggtcggaaaaaagctataagctattatggaatcatgtaagcaaatagcagcgagg

SEQ ID NO: 27353 - DNA, 260 bp, Unknown
  Description of Unknown: RightRegion for integrase B1354 sequence
acttgcattaagacacaagatatggtatttttcaaatataagtaccttttagcactataagagaaaaaaatgggagtggaatcaatgatacatacagcttatgacgtaatgaaagagtttttaatcactgatgcagaccttgaaggaaagtacggaatcccgaaaattccaaagacttttatccatccagggaaagatactgtagactttgcggagagcttcagccggaagattaagaaccaccgggaactggatgtaaa

SEQ ID NO: 27354 - DNA, 260 bp, Unknown
  Description of Unknown: RightRegion for integrase B1355 sequence
acttgcattaagacacaagatatggtatttttcaaatataagtaccttttagcactataagagaaaaaaatgggagtggaatcaatgatacatacagcttatgacgtaatgaaagagtttttaatcactgatgcagaccttgaaggaaagtacggaatcccgaaaattccaaagacttttatccatccagggaaagatactgtagactttgcggagagcttcagcagaaagattaagaaccacaaggaacttgatgtgaa

SEQ ID NO: 27355 - DNA, 260 bp, Unknown
  Description of Unknown: RightRegion for integrase B1356 sequence
aaaaggcattcaccgataggtgggtgcctttttttggctgccagcaggattccctgttagccgccagatgctgaaacttatcgaaaaagctcaagttgctttgccggcaggttttgatataataaaaatataaatttacttattttattcaggtggagattgcagtgaaaaatacaaaaacttgtcctaaatgtcactcttccgatatagtaatagtgaaaggtcaaaaaactaattatgcaaaaggtaatgttattttt

SEQ ID NO: 27356 - DNA, 260 bp, Unknown; identical to SEQ ID NO: 27323
  Description of Unknown: RightRegion for integrase B1357 sequence

SEQ ID NO: 27357 - DNA, 260 bp, Unknown
  Description of Unknown: RightRegion for integrase B1358 sequence
acttgcattaagacacaagatatggtatttttcaagtataagtaccttttagcactataagagaaaaaatgggagtggaatcaatgatacatacagcttatgacgtaatgaaagagtttttaatcacggatgcagaccttgaaggtaagtacggaatcccgaaaattcaaaagacttttattcatcccggcaaagatactgtagactttacggagagctttagccggaagattaagaaccaccgggaactggatgtaaac

SEQ ID NO: 27358 - DNA, 260 bp, Unknown; identical to SEQ ID NO: 27326
  Description of Unknown: RightRegion for integrase B1359 sequence

SEQ ID NO: 27359 - DNA, 260 bp, Unknown
  Description of Unknown: RightRegion for integrase B1360 sequence
acttgcattaagacacaagatatggtatttttcaaatataagtaccttttagcactataagagaaaaaatgggagtggaatcaatgatacatacagcttatgacgtaatgaaagaatttttaatcacggatgcagaccttgatggtaagtacgaaatcccgaaaatcccaaagacttttatccatcctggaaaagatactgtagactttgcggagagctttagccggaagattaagaaccaccgggaactggatgtaaat

SEQ ID NO: 27360 - DNA, 260 bp, Unknown
  Description of Unknown: RightRegion for integrase B1361 sequence
tgccgcctgcatatccggtcaggctgccgtttgttccgacaacgcggtggcagggaatgatgatagagatcacattgtgtccgacagccccgcccacagcctgcgcagacatccgggaaagaccgcgctctgcggcaagctgccttgccagtgccccataggtcgtggtctggccacaggggatgcggcgcagcagcgcccacacctcctgctgaaaggcagagccagcaggatggagcggcggggtaaagtccggctcc

SEQ ID NO: 27361 - DNA, 260 bp, Unknown
  Description of Unknown: RightRegion for integrase B1362 sequence
gggcgtgtgaagcaaattatcttcaaaaacggactctctcatatattcgtgtataaatagcagaaatagccctaagacaatgcaatcttagggctattatattaagctatgttatttgctatttcagaaacactaatgtcttccttgaaacgttctccatcagcagtacgtaacaaaacgaaacgaatagtagtatcattacagtgtggaccttcaatctctttgattcttgccgttccatccgcaacacttctgattgt

SEQ ID NO: 27362 - DNA, 260 bp, Unknown
  Description of Unknown: RightRegion for integrase B1363 sequence
acttgcattaagacacaaaatatggtatttttcaaatataagtaccttttagcactataagagaaaaatgggagtggaatcaatgatacatacagcttatgacgtaatgaaagagtttttaatcacggatgtagaccttgatggtaagtacggaataccgaaaattccaaagacttttattcatcccggcaaagatactgtagactttgcggagagcttcaaccggaagattaagaaccaccgggaactggatgtaaact

SEQ ID NO: 27363 - DNA, 260 bp, Unknown; identical to SEQ ID NO: 27338
  Description of Unknown: RightRegion for integrase B1364 sequence

SEQ ID NO: 27364 - DNA, 260 bp, Unknown
  Description of Unknown: RightRegion for integrase B1365 sequence
acttgcattaagacacaagatatggtatttttcaaatataagtaccttttagcactataagagaaaaaatgggagtggaatcaatgatacatacagcttatgacgtaatgaaagagtttttaatcacggatgcagacctcgatggcaagtacgaaatcccgaaaattccaaagacttttatccatcctggaaaagatactgtagactttgcggagagctttagccggaagattaagaaccaccgggaactggatgtaaat

SEQ ID NO: 27365 - DNA, 260 bp, Unknown
  Description of Unknown: RightRegion for integrase B1366 sequence
acttgcattaagacacaagatatggtatttttcaaatataagtaccttttagcactataagagaaaaaatgggagtggaatcaatgatacatacagcttatgacgtaatgaaagagtttttaatcacggatgcagaccttgatggtaagtacggaatcccgaaaattccaaagacttttatccatactggcaaagatactgtagactttgcagagagcttcagcagaaaaataaaaaaccatcgggaacttgatgtaaat

SEQ ID NO: 27366 - DNA, 260 bp, Unknown
  Description of Unknown: RightRegion for integrase B1367 sequence
tggtcgggtttttgcctttgcgtgggcttcgtggtcctcgtaatcgttgaaagagcgtaaatcgttgaattacaagggcaatcgttgttttagtggggtattcgttgaattacagagataatcgttgatttacagcattccctattgataaaaggtgtgggaatttataatgtggtctcgctcaagtcgctgcctttttcagaatctcaaaggctgccttgatttttgccgccatcaatttcctgcgctcaatcaggaag

SEQ ID NO: 27367 - DNA, 260 bp, Unknown
  Description of Unknown: RightRegion for integrase B1368 sequence
actttcattaagacacaagatatggtatttttcaaatataagtaccttttagcactataagagaaaaaaatgggagtggaatcaatgatacatacagcttatgacgtaatgaaagagtttttaatcactgatgcagaccttgaaggaaagtacggaatcccgaaaattccaaagacttttatccatccagggaaagatactgtagactttgcggagagcttcagccggaagattaagaaccaccgggaactggatgtaaa

SEQ ID NO: 27368 - DNA, 260 bp, Unknown
  Description of Unknown: RightRegion for integrase B1369 sequence
acttgcattaagacacaagatatggtatttttcaaatataagtaccttttagcactataagagaaaaaatgggagtggaatcaatgatacatacagcttatgacgtaatgaaagggtttttaatcacggatgcagagcttgttggacagtacggaatccctaaaattccaaagacttttatccatccagggaaaaatactgtagattttgcggagagctttagccgaaaaattaagaaccaccgggaactagacgtaaat

SEQ ID NO: 27369 - DNA, 260 bp, Unknown
  Description of Unknown: RightRegion for integrase B1370 sequence
acttgcatcaagacacaacatatggtattttacaaatataagtaccttttagcactataagagaaaaaatgggagtggaatcaatgatacatacagcttatgacgtaatgaaagagtttttaatcacggatgcagaccttgacggcaagtatggaatccctaaaatccaaaagacatttatccatcctggaaaagatactgtagactttgcggagagctttagccgaaagataaagaaccaccgggagctggatgtaaat

SEQ ID NO: 27370 - DNA, 260 bp, Unknown
  Description of Unknown: RightRegion for integrase B1371 sequence
acttgcattaagacacaagatatggtatttttcaaatataagtaccttttagcactataagagaaaaaatgggagtggaatcaatgatacatacagcttatgacgtaatgaaagagtttttaatcacggatgcagaccttgatggtaagtacggaatcccgaaaattccaaagacttttatccatactggcaaagatactgtagactttgcagagagcttcagcagaaaaattaagaaccaccgggaactggatgtaaac

SEQ ID NO: 27371 - DNA, 260 bp, Unknown
  Description of Unknown: RightRegion for integrase B1372 sequence
acttgcattaagacacaagatatggtatttttcaaatataagtaccttttagcactataagagaaaaaatgggagtggaatcaatgatacatacagcttatgacgtaatgaaagagtttttaatcacggatgcagaccttgatggtaagtacggaatcccgaaaattccaaagacttttatccatccaggcaaagatactgtagactttgcggagagcttcaacaggaagattaagaaccatctggaacttgatgtaaat

SEQ ID NO: 27372 - DNA, 260 bp, Unknown
  Description of Unknown: RightRegion for integrase B1373 sequence
acttgcattaagacacaagatatggtatttttcaaatataagtaccttttagcactataagagaaaaaatgggagtggaatcaatgatacatacagcttatgacgtaatgaaagagtttttaatcacgaatgcagaccttgatggcaagtacggaatcccgaaaattccaaagacctttatccatccagggaaagatactgtagactttgcagagagcttcagtcgaaagattaagaaccatcgggaacttgatgtaaat

SEQ ID NO: 27373 - DNA, 260 bp, Unknown
  Description of Unknown: RightRegion for integrase B1374 sequence
acttgcattaagacacaagatatggtatttttcaaatataagtaccttttagcactataagagaaaaaatgggagtggaatcaatgatacatacagcttatgacgtaatgaaagagtttttaatcacggatgcagaccttgatggtaagtacggaataccgaaaattccaaagacatttatccatcctggaaaagatactgtagactttgcggagagctttagccggaagattaagaaccaccgggaacttgatgtaaat

SEQ ID NO: 27374 - DNA, 260 bp, Unknown
  Description of Unknown: RightRegion for integrase B1375 sequence
acttgcattaagacacaagatatggtatttttcaaatataagtaccttttagcactataagagaaaaaaatgggagtggaatcaatgatacatacagcttatgacgtaatgaaagaatttttaatcacggatgcagaccttgatggtaagtacgaaatcccgaaaatcccaaagacttttatccatcctggaaaagatactgtagactttgcggagagctttagccggaagattaagaaccaccgggaactggatgtaaa

SEQ ID NO: 27375 - DNA, 260 bp, Unknown; identical to SEQ ID NO: 27371
  Description of Unknown: RightRegion for integrase B1376 sequence

SEQ ID NO: 27376 - DNA, 260 bp, Unknown
  Description of Unknown: RightRegion for integrase B1377 sequence
tacagtattatagattttgtaaattatctagatattgaggaaaacagaagatactactaacaaagaaagtcctgttggcataataaactggcaggactttttttgtcttgtaaactttacctacctttgcaccaacttctaaagttcaaggagttgagcctcttagaagggacatagttaataagagcgtttgaaatattatccttaatctggaatctggacaattctaaaacacagggataatagacagtaatcgctca

SEQ ID NO: 27377 - DNA, 260 bp, Unknown
  Description of Unknown: RightRegion for integrase B1378 sequence
tataacggacaatttaaaagcggatcggggatgcgtctattacgatggagatccgattagtaaattgggaagtaaatatcgtgaaaaaataggatatatgccgcaacaacaggagatttatgacaattttactggtgaagagtttctgtggtatatggcagctttaaagggattagaaaaaaagtatgcaaaaaataagatagataaccttttgaaagtggtgaatttgacttctgagaaaaacaaaaaaataggttcgt

SEQ ID NO: 27378 - DNA, 260 bp, Unknown
  Description of Unknown: RightRegion for integrase B1379 sequence
acttgcattaagacacaagatatggtatttttcaaatataagtaccttttagcactataagagaaaaaatgggagtggaatcaatgatacatacagcttatgatgtaatgaaagagtttttaatcacggatgcagacctcgatggcaagtacggaatcccgaaaattccaaagacttttattcatccaggcaaagatactgtagacttttcggagagcttcagccgaaagactaagaaccatcgggaacttgatgtaaac

SEQ ID NO: 27379 - DNA, 260 bp, Unknown
  Description of Unknown: RightRegion for integrase B1380 sequence
acttgcattaagacacaagatatggtatttttcaaatataagtaccttttagcactataagagaaaaaatgggagtggaatcaatgatacatacagcttatgacgtaatgaaagagtttttaatcacggatgcagaccttgatagcaagtacggaatcccgaaaattccaaagacttttatccatccagggaaagatactgtagacttttcagagagcttcagccggaagattaagaaccaccgggaactggatgtaaat

SEQ ID NO: 27380 - DNA, 260 bp, Unknown
  Description of Unknown: RightRegion for integrase B1381 sequence
gcaaatggagcagccgcacagctatcagatcaggatccattctgccgcagaataccgtgaccgctgcctttgcttgccgtgatggaaaacatgatttttatgcctgcgtgaatcagaaaaaccaccggattttccgctgccaaagaaattacccgctaaaaattcagataattttgctgtctgcgggcgaattggtgttgcatcggtcggaaaaaagctataagctattatggaatcatgtaagcaaatagcagcgaggg

SEQ ID NO: 27381 - DNA, 260 bp, Unknown
  Description of Unknown: RightRegion for integrase B1382 sequence
acttgcattaagacacaagatatggtatttttcaaatataagtaccttttagcgctataagagaaaaaatgggagtggaatcaatgatacatacagcttatgacgtaatgaaagagtttttgatcacggatgcagaccttgatggtaagtacggaataccgaaaattccaaagacttttatccatccaggaaaagatactgtagactttgcggagagcttcagtcgaaaaattaagaaccaccgggaactggatgtaaac

SEQ ID NO: 27382 - DNA, 260 bp, Unknown; identical to SEQ ID NO: 27361
  Description of Unknown: RightRegion for integrase B1383 sequence

SEQ ID NO: 27383 - DNA, 260 bp, Unknown
  Description of Unknown: RightRegion for integrase B1384 sequence
acttgcattaagacacaagatatggtatttttcaaatataagtaccttttagcactataagagaaaaaaatgggagtggaatcaatgatacatacagcttatgacgtaatgaaagagtttttaatcacggatgcagagcttgttggacagtacggaatccctaaaattccaaagacttttatccatccagggaaaaatactgtagattttgcggagagctttagccgaaaaattaagaaccaccgggagctagacgtaaa

SEQ ID NO: 27384 - DNA, 260 bp, Unknown
  Description of Unknown: RightRegion for integrase B1385 sequence
gaagaaaaaagacaatttgaaaagttgtctttttattcacacagcatgtccagtatctaataaaacaacattttctgcaaactccttaagagcatattgctgacaaacctttgtgtttaatttatcataattaacatcttcttttggaatcttaagaacaacacatcctttttcatcaagctcttttcttatttcctctgaaagagtttcttttgcaagtttacatgaaccactaaatgctcctagttcatctccaactc

SEQ ID NO: 27385 - DNA, 260 bp, Unknown
  Description of Unknown: RightRegion for integrase B1386 sequence
tatgtgtgggcagataaaaaaggacagcggaaaaatagtaatctgcggcaaagatactgagaaaaatttcaacagtgtttcatcggatatcggtgtagtttttcaaaactccgtacttgataaagcgctgtcggtaaaagataatctgcgcagtcgtgccgctctgtatggcataacgggcaaagaatttaaaaatcgtcttgatgggttatcggaacttctcggttttgaagatattcttaacagaaccgtcggaaaac

SEQ ID NO: 27386 - DNA, 260 bp, Unknown
  Description of Unknown: RightRegion for integrase B1387 sequence
acttgcattaagacacaagatatggtatttttcaaatataagtaccttttagcactataagagaaaaaatgggagtggaatcaatgatacatacagcttatgacgtaatgaaagagtttttaatcacggatgcagacctcgatggcaagtacggaattccgaaaattccaaagacttttatccatccaggcaaagatactgtagactttgcggagagcttcaacaggaagattaagaaccaccgggaactggatgtaaat

SEQ ID NO: 27387 - DNA, 260 bp, Unknown
  Description of Unknown: RightRegion for integrase B1388 sequence
acttgcattaagacacaagatatggtattttttaaatataagtaccttttagcactataagagaaaaaaatgggagtggaatcaatgatacatacagcttatgacgtaatgaaagagtttttaatcactgatgcagaccttgaaggaaagtacggaatcccgaaaattccaaagacttttatccatccagggaaagatactgtagactttgcggagagcttcagccggaagattaagaaccaccgggaactggatgtaaa

SEQ ID NO: 27388 - DNA, 260 bp, Unknown; identical to SEQ ID NO: 27338
  Description of Unknown: RightRegion for integrase B1389 sequence

SEQ ID NO: 27389 - DNA, 260 bp, Unknown
  Description of Unknown: RightRegion for integrase B1390 sequence
ggtaagatctccagcatcgtattccgaaatggactttgccacaactttgtattcaaataatttttaactacgcagcaaaaaatctgctgtaattaaaaaaaaggtgccttatttttaacaaaggcaccttgtcttgtttaaaaatgatctatcttgcattaatacaaggtggatcatgcttaatcctgatcgtggcttgaccagatcaactctcttttttgaggaagttcagctatttcttgaataagtgtataacatgc

SEQ ID NO: 27390 - DNA, 260 bp, Unknown
  Description of Unknown: RightRegion for integrase B1391 sequence
acttgcattaagacacaagatatggtatttttcaaatataagtaccttttagcactataagagaaaaaatgggagtggaatcaatgatacatacagcttatgacgtaatgaaagagtttttaatcacggatgcagaccttgatggtaagtacgaaatcccgaaaattccaaagacttttattcatccaggcaaagatactgtagactttgcggagagcttcagccggaagattaagaaccaccgggaactggatgtaaac

SEQ ID NO: 27391 - DNA, 260 bp, Unknown
  Description of Unknown: RightRegion for integrase B1392 sequence
acttgcattaagacacaagatatggtatttttcaaatataagtaccttttagcactataagagaaaaaatgggagtggaatcaatgatacacacagcttatgacgtaatgaaggagtttttaatcacggatgcagagcttgttggacagtacggaatccctaaaattccaaagacttttattcatccggggaaagatactgtagactttgcggagagtttcagtagaaagataaagaaccaccgggaactggatgtaaac

SEQ ID NO: 27392 - DNA, 260 bp, Unknown; identical to SEQ ID NO: 27357
  Description of Unknown: RightRegion for integrase B1393 sequence

SEQ ID NO: 27393 - DNA, 260 bp, Unknown; identical to SEQ ID NO: 27359
  Description of Unknown: RightRegion for integrase B1394 sequence

SEQ ID NO: 27394 - DNA, 260 bp, Unknown; identical to SEQ ID NO: 27338
  Description of Unknown: RightRegion for integrase B1395 sequence

SEQ ID NO: 27395 - DNA, 260 bp, Unknown; identical to SEQ ID NO: 27326
  Description of Unknown: RightRegion for integrase B1396 sequence

SEQ ID NO: 27396 - DNA, 260 bp, Unknown
  Description of Unknown: RightRegion for integrase B1397 sequence
acttgcattaagacacaagatatggtatttttcaaatataagtaccttttagcactataagagaaaaaatgggagtggaatcaatgatacatacagcttatgacgtaatgaaagagtttttaatcacggatgcagacctcgatggcaagtacggaattccgaaaattccaaagacttttattcatccggggaaagatactgtagattttgcggagagcttcaacaggaagattaagaatcatcgggaacttgatgtaaat

SEQ ID NO: 27397 - DNA, 260 bp, Unknown; identical to SEQ ID NO: 27353
  Description of Unknown: RightRegion for integrase B1398 sequence

SEQ ID NO: 27398 - DNA, 260 bp, Unknown; identical to SEQ ID NO: 27372
  Description of Unknown: RightRegion for integrase B1399 sequence

SEQ ID NO: 27399 - DNA, 260 bp, Unknown; identical to SEQ ID NO: 27325
  Description of Unknown: RightRegion for integrase B1400 sequence

SEQ ID NO: 27400 - DNA, 109 bp, Unknown
  Description of Unknown: RightRegion for integrase B1401 sequence
gaagaaaaaagacaatttgaaaagttgtctttttattcacacagcatgtccagtatctaataaaacaacattttctgcaaattccttaagagcatattgctgacaaacc

SEQ ID NO: 27401 - DNA, 260 bp, Unknown
  Description of Unknown: RightRegion for integrase B1402 sequence
tacagtattatagattttgtaaattatctagatattgaggaaaacagaagatactattaataaagaaagtcctgttggcataataaactggcaggactttttttgtcttgtaaactttacctatctttgcaccaacttctaaagttcaaggagttgaacctcttagaagggacatagttaattaagagcgtttgaaatattatcctattgtggaatctggacaattctatatactgggataatagacagtaatcgctcac

SEQ ID NO: 27402 - DNA, 260 bp, Unknown; identical to SEQ ID NO: 27325
  Description of Unknown: RightRegion for integrase B1403 sequence

SEQ ID NO: 27403 - DNA, 260 bp, Unknown
  Description of Unknown: RightRegion for integrase B1404 sequence
acttgcattaagacacaacatatggtattttacaaatataagtaccttttagcactataagataaaaaatgggagtggaatcaatgatacatacagcttatgacgtaatgaaagagtttttaatcacggatgcagagcttgacggacagtacggaatccccaaaattccaaagacttttatccatccggggaaagataccgtagattttgcagagagcttcagcagaaagattaagaaccacaaggagcttgatgtaaat

SEQ ID NO: 27404 - DNA, 260 bp, Unknown
  Description of Unknown: RightRegion for integrase B1405 sequence
acttgcatcaagacacaagatatggtatttttcaaatataagtaccttttagcactataagagaaaaaatgggagtggaatcaatgatacatacagcttatgacgtaatgaaagagtttttaatcacggatgcagaccttgatggtaagtacgaaatcccgaaaattccaaagacttttatccatccagggaaagatactgtagattttgcagagagcttcagcaggaagatcaagaatcacaaggaacttgatgtaaat

SEQ ID NO: 27405 - DNA, 109 bp, Unknown
  Description of Unknown: RightRegion for integrase B1406 sequence
gacggaaaggtatgctggattcgattccgcaacggcatcacacataaattcatgtactaatgttgcattaaaaatcggacagaattttacattctgtccgattttcatt

SEQ ID NO: 27406 - DNA, 260 bp, Unknown
  Description of Unknown: RightRegion for integrase B1407 sequence
tataacggacaatttaaaagcggatcggggatgcgtctattacgatggaaatccgattagtaaattgggaagtaaatatcgtgaaaaaataggatatatgccacaacaacaggagatttatgataattttaccggtgaagagtttctgtggtatatggcagctttaaagggattagaaaaaaagtatgcaaaaaataagatagagaaccttttgaaagtggtgaatttgacttctgagaaaaacaaaaaaataggttcgt

SEQ ID NO: 27407 - DNA, 260 bp, Unknown
  Description of Unknown: RightRegion for integrase B1408 sequence
acttgcattaatacacaagatatggtatttttcaaatataagtaccttttagcactataagagaaaaaaaatgggagtggaatcaatgatacatacagcttatgacgtaatgaaagagtttttaatcacggatgcagaactcgatggcaagtacggaattccgaaaattccaaagacttttatccatccagggaaagatactgtagactttgcggagagcttcagccggaagattaagaaccaccgggaacttgatgtaa

SEQ ID NO: 27408 - DNA, 260 bp, Unknown
  Description of Unknown: RightRegion for integrase B1409 sequence
tacagtattatagattttgtaaattatctagatattgaggaaaacagaagatactactaacaaagaaagtcctgttggcataataaactggcaggacttttttgtcttgtaaactttacctatctttgcatcaacttctaaagttcaaggagttgaacctcttagaagggacatagttaattaagagcgtttgaaatattatccttaatctggaatctggacaattctaaaacacagggataatagacagtaatcgctca

SEQ ID NO: 27409 - DNA, 260 bp, Unknown
  Description of Unknown: RightRegion for integrase B1410 sequence
acttgcataaagacacaacatatggtattttacaaatataagtaccttttagcactataagagaaagaatgggagtggaatcaatgatacacacagcttatgacgtaatgaaagagtttttaatcacggatgcagaccttgatggtaaatacggaatcccgaaaattccaaagacttttatccatcccgggaaagatactgtagactttgcagagagcttcagccgaaagattaagaaccaccgggaactattagacacc

SEQ ID NO: 27410 - DNA, 260 bp, Unknown; identical to SEQ ID NO: 27343
  Description of Unknown: RightRegion for integrase B1411 sequence

SEQ ID NO: 27411 - DNA, 260 bp, Unknown
  Description of Unknown: RightRegion for integrase B1412 sequence
aaagctcaacttcgcaagaggttgagcttttttctttttattgtacattgtaaggagtagaggagtacgggaatcgaacagcccgggccccgcgtccgcgtcccgcggggcaaaaacagccccgcgggctgtttttagggcgcgggagatggacgggagggtcaccaaaggggctgttgtacatcccctcgttttcttttgcctattcctccggcctgaccaccgttacggtacactgcgctgtaaaaccgccgcagtcg

SEQ ID NO: 27412 - DNA, 260 bp, Unknown
  Description of Unknown: RightRegion for integrase B1413 sequence
aggcatattacagagattgttttcaagaatggattaacccacacattattatacagatagcaaaaagccccggaaaatcaatgctttcggggctttttgtatgttcaatataaatgcttaataattctctattaccgggttcatctgacaaccaaaggttgtaacgcagaacgtcagcggacgaccaagttcttcggattcacgctgtacatatgcctttgccttttcgatgaaataatactgacgggcagtatcatccg

SEQ ID NO: 27413 - DNA, 260 bp, Unknown
  Description of Unknown: RightRegion for integrase B1414 sequence
aattgcattaagacacaagatattgtattgtataattatacgtacaaattagcactgtaaatgaattttgggagtggaatcaatgatacacacagcttatgacgtaatgaaagagtttttgataacagattcagagccggtggggcagtacggaatacctaaaatcccaaggacatatatcacacctggaactgatactgtagactttgctgaaagttttagcaagaagattaagaaccaccgggaactagatgtgaatt

SEQ ID NO: 27414 - DNA, 260 bp, Unknown
  Description of Unknown: RightRegion for integrase B1415 sequence
tttgatttggcacaatatcaggtagaaataccgaaagaagaactagaaagaaaaaactaaatagaagaatcgaaagcagttttgcagctgttttcgatttttcgtttctaattgtcgcacaagaatcggtggcgtggggtttcagcggcttcatgcttaaaatttaaccccatacccctataaacgaaaagaaggctaccaccgaagtgatagcccccttaaaatgcaaatataatattctatagatactttatttttct

SEQ ID NO: 27415 - DNA, 260 bp, Unknown
  Description of Unknown: RightRegion for integrase B1416 sequence
cgtaagattgtagaaattgtattcaccaatgggctttcccatacgttactctacaaataaaaacaccccccgtaagcactgagtttacgggggttattgattatgacgtcatacatatcaaattctttattaccgagtacatctgacacccaaaggttgtgacgcagaaagtcatcggccttcctgcttcttctgcttcttttcttacgtattctttcgctttttctatgaaataatattgtctttccggttccttatgc

SEQ ID NO: 27416 - DNA, 260 bp, Unknown
  Description of Unknown: RightRegion for integrase B1417 sequence
aattgcatcaagacgcaagatgttgtattgtataattatacgtacaaattagcactgtaaacaaaattttgggagtggaatcaatgatacacacagcttatgacgtaatgaaagagtttttgataacagattcagagccggcaggacagtacaatattcctaaaattccaaagacatacatcacacctggaatagatactgtagactttgccgaaagcttcagtaagaaagttaagaaccaccgggaactggatgtgaat

SEQ ID NO: 27417 - DNA, 109 bp, Unknown
  Description of Unknown: RightRegion for integrase B1418 sequence
aatagccttgtcacagcacctttgcatgacacccaaaaaactgaatatcagtctcagtagctcagctggatagagcacacgcctcctaagcgtggggtcggaggttcaa

SEQ ID NO: 27418 - DNA, 260 bp, Unknown
  Description of Unknown: RightRegion for integrase B1419 sequence
aggcatattacagagattgttttcaagaatggattaactcacacattattatacagatagcaaaaaagccccggaaaatcaatgctttcggggctttaagtgtgttcaatataaatgcttaataattctctattaccgggttcatctgacaaccaaaggttgtaacgcagaacgtcagcggacgaccaagttcttcggattcacgctgtacatatgcctttgccttttcgatgaaataatactgacgggcagtatcatcc

SEQ ID NO: 27419 - DNA, 260 bp, Unknown
  Description of Unknown: RightRegion for integrase B1420 sequence
atcatggaaacgagaaaaggcgtagcactcagctacgccccggaacaggttgcagtataaggaggtacgacacgatgaaagcctatttttattgccgggtcgctcacgacgatagcttttccttggaacagcaggtcgccaaacttcgccgttatgcggaacaggccgggtacaccatcgttggtgttgccgccgagcatggctctggattgacccttgaccgtccggctctgcaagagctgacggaggccgttcttgcc

SEQ ID NO: 27420 - DNA, 260 bp, Unknown
  Description of Unknown: RightRegion for integrase B1421 sequence
aggcatattacagagattgttttcaagaatggattaactcacacattattatacagatagcaaaaaagccccggaaaatcaatgctttcggggctttaagtgtgttcaatataaatgcttaataattctctattaccgggttcatctgacaaccaaaggttgtaacacagaacgtcagcggacgaccaagttcttcggattcacgctgtacatatgcctttgccttttcgatgaaataatactgacgggcagtatcatcc

SEQ ID NO: 27421 - DNA, 260 bp, Unknown
  Description of Unknown: RightRegion for integrase B1422 sequence
agagtcacttcaatctatttcaggaatggaatcgtaaacacgttcacatatgcagaataacagaaagcaccccgcatcaaacgatgtgaggtgctttttctttagtgacatgtaggtcggcttttacccaagaaatccatacactttcagatgagctatatgctattggatgacagcgagctaataccgcgaatttttattctgcttttatgtataaatactcaaaaataaattccacggattataagcatcgggttcaa

SEQ ID NO: 27422 - DNA, 260 bp, Unknown
  Description of Unknown: RightRegion for integrase B1423 sequence
tcggtgaatacaagaaaaggcgtagttgtcaactacgccccaggtcaactcgctgtatgaaaaaagcgagtgttcttaacagcctttcaaatgctgtaagaacactcgcgatggtgcggataacactaaatccttgaaaaataaggctttcagggcttgtttgttagttgtgcgtcagttgttaaatacagcttaaaatatcacaagtcatcttagcacactttgatattatagctgcatcgccgtttaagtcaatatct

SEQ ID NO: 27423 - DNA, 260 bp, Unknown
  Description of Unknown: RightRegion for integrase B1424 sequence
atcatggaaacgaggaaaggcgtagcactaagctacgccccggaacaggttgcggtataaggaggtacgacacgatgaaagcctatttttattgccgggtcgctcacgacgatagcttttctttggaacagcaggccgccaagctccgccgttatgcggaacaggctgggtacaccatcgttggtgttgccgccgaacatggctcaggattgacccttgaccgtccggctctgcaagagctgacggaggccgttcttgcc

SEQ ID NO: 27424 - DNA, 260 bp, Unknown
  Description of Unknown: RightRegion for integrase B1425 sequence
tactgcattacagattttgtaaattatctggatattgaagataatagaagatattactaataaaagtcctgccagtaattacgctagcaggactttcttattaaatattttccagaaaatcagattctgacataatttctatatctattccagatgcttttaaatcaatcgctttcttttgcttagaggacataccagaatccccaaccactctaaagtcctgtaatccaaccactaaaatgtcggttttcttggtaaca

SEQ ID NO: 27425 - DNA, 260 bp, Unknown
  Description of Unknown: RightRegion for integrase B1426 sequence
tccgtaaatacaagaaaaggcgtagtcgtcaactacgccccctgtgaactcgctgtataaaaagcgagtgttcttacagcttttcaaatgctgtaagaacactcgccatgtcatgcgtgaccaatttagatacacgctgaaaataggaaaaatcgagagctgaagcggctttgggctgtttcagccatatttttttgctttcaatttcccatgatagcggagaattgggtatttttaagagtgaccaaaatagatacagc

SEQ ID NO: 27426 - DNA, 260 bp, Unknown
  Description of Unknown: RightRegion for integrase B1427 sequence
aggcatattacagagattgttttcaagaatggattaacccacacattattatacagatagcaaaaaagccccggaaaatcaatgctttcggggcttttgtatgttcaatataaatgcttaataattctctattaccgggttcatctgacaaccaaaggttacggtagcaaagaaaagggggcgccccaatttttcagactcttcctttacatattttcttgcttttttgataaaataatactgtctttcggtatcatccg

SEQ ID NO: 27427 - DNA, 260 bp, Unknown
  Description of Unknown: RightRegion for integrase B1428 sequence
caattccgctttactttatgtaaggcggattttttgttgccgctcatcaattttatctaaaacccaaccattgtttctccgtgacgggcatttcccgtcaaggttttttgtaaacacacaaagtctccgctgtgataatttgtgtgtcacttttacaaattcagggggcgtgcccctgcacccgatccgctttactttatgtaaggcggttttttattgccgctcatggatcattatttataaacccaactttgttattt

SEQ ID NO: 27428 - DNA, 260 bp, Unknown
  Description of Unknown: RightRegion for integrase B1429 sequence
tttgatttggcacaatatcaggtagaaataccgaaagaagaactagaaagaaaaaactaaatagaagaatcgaaagcagttttgcagctgttttcgatttttcgtttctaattgtcgcacaagaatcggtagggctggggtttagcggcttcatgcttaaaatttaaccccatacccctataaacgaaaagaaggctaccaccgaagtgataaccctctctatgactatttgacgatagcgctgtatcggtaccaagcgt

SEQ ID NO: 27429 - DNA, 260 bp, Unknown
  Description of Unknown: RightRegion for integrase B1430 sequence
cgcaagattgtagaaattgtgttcgtcaatggactttctcacacattactctacaaataaaaacaaccccgtaagcactgagtttacgggggttattgattatgacgtcatacatatcaaattctttgttaccgagcgcatctgacacccaaaggttgtgacgcagaaagtcatcggccttcctgcttcttctgcttcttttcttacgtattctttcgctttttctatgaaataatattgtctttccggttccttatgcg

SEQ ID NO: 27430 - DNA, 260 bp, Unknown
  Description of Unknown: RightRegion for integrase B1431 sequence
tcggtaaatacaagaaaaggcgtagttgtcaactacgccccaggtcaactcgctgtatgaaaaagcgagtgttcttaacagcctttcaaatgctgtaagaacactcgccatggtgcggataacactaaatccttgaaaaataaggctttcggggcttgtttgttagttgtgcgtcagttgttaaatacaacctaaaatatcacaagtcatcttagcacactttgatattatagccgcatcgccgtttaagtcaatatctt

SEQ ID NO: 27431 - DNA, 260 bp, Unknown
  Description of Unknown: RightRegion for integrase B1432 sequence
acagtcaacactcgcagaggtgtctatgtcagttacgaaccggcgcaaaatagacaataaaaatgacgggtgttctcaaaggatcaaatcctataagaacactcgtcatggtacacctgacccgcccaaatacgaacccgggagggcgccgacgaaatcagacgtagccgcattttgcaccgctgagaacggcaccaaagccgctccggcgctgtctacgttgaatataattttcatataatcgtcgtaaacaaatacgg

SEQ ID NO: 27432 - DNA, 260 bp, Unknown
  Description of Unknown: RightRegion for integrase B1433 sequence
cgcaagattgtagaaattgtgttcgtcaatggactttctcacacattactctacaaataaaaacaaccccgtaagcactgagtttacggggtttattgattatgacgccatacagattaaattctttattaccgagtacatctgacacccaaaggttgtgacgcagaaagtcatcggccttcctgcttcttctgcttcttttcttacgtattctttcgctttttctatgaaataatattgtctttccggttccttatgcg

SEQ ID NO: 27433 - DNA, 74 bp, Unknown
  Description of Unknown: RightRegion for integrase B1434 sequence
tttaatttgtggattacaaaaagcaacagagggagatttttcgctatacggaataaataattactctaaagaga

SEQ ID NO: 27434 - DNA, 260 bp, Unknown
  Description of Unknown: RightRegion for integrase B1435 sequence
aggcatattacagagatcgtttttaagaatggattaacccacacattattatacagatagcaaaaaagccccggaaaatcaatgctttccggagctttaagtatgttcaatataaatgcttaataattctctattaccgggttcatctgacaaccaaaggttgtaacgcagaacgtcagcggacgaccaagttcttcggattcacgctgtacatatgcctttgccttttcgatgaaataatactgacgggcagtatcatc

SEQ ID NO: 27435 - DNA, 260 bp, Unknown
  Description of Unknown: RightRegion for integrase B1436 sequence
tcggtgaatacaagaaaaggcgtagttgtcaactacgccccaggtcaactcgctgtatgaaaaaagcgagtgttcttaacagcctttcaaatgctgtaagaacactcgccatggtgcgggtagcaggacttgaacctgcttctgtatacgtgaaaatcgttgatacatcaacatttttgcggaatgctgacttgcatttgacttgcatttttatttttatttcaaagctcgccccatattcgccccatatctcgcccgta

SEQ ID NO: 27436 - DNA, 260 bp, Unknown
  Description of Unknown: RightRegion for integrase B1437 sequence
cgcaagattgtagaaattgtattcatcaatggtctttcccatacgttactctacaaataaaaacaaccccgtaagcgctgagtttacggggtttattgattatgacgtcatacatatcaaattctttgttaccgagtgcatctgacacccaaaggttgtgacgcagaaagtcatcggccttcctgcttcttctgcttcttttcttacgtattctttcgctttttctatgaaataatattgtctttccggttccttatgcg

SEQ ID NO: 27437 - DNA, 260 bp, Unknown
  Description of Unknown: RightRegion for integrase B1438 sequence
aaagctcaacttcgcaagaggttgagcttttttctttttattgtacattgtaaggagtagaggagtacgggaatcgaacagcccgggccccgcgtccgcgtcccgcggggcaaaaacagccccgcgggctgtttttagggcgcgggagatggacgggagggtcaccaaaggggctgttgtacatccccttgttttcttttgcctattcctccggcctgaccaccgttacggtacactgcgctgtaaacccgccgcagtcg

SEQ ID NO: 27438 - DNA, 260 bp, Unknown
  Description of Unknown: RightRegion for integrase B1439 sequence
atcatggaaacgagaaaaggcgtagcactcagctacgccccagaacaggttgcggtataggaggtacgacacgatgaaagcctatttctattgccgcgtcgctcacgatgatagcttttctttggaacggcaggccgaggagcttcgccgctatgcggaacaagccgggtacaccatcgttggtgctgccgccgagcatggctctggaatgacccttgaccgtccggctctgcaagaggtgatggaggccgtccttgccg

SEQ ID NO: 27439 - DNA, 260 bp, Unknown
  Description of Unknown: RightRegion for integrase B1440 sequence
cgcaagattgtagaaattgtattcatcaatggtctttcccatacgttactctacaaataaaaacaaccccgtaagcactgagtttacggggtttattgattatgacgtcatacatatcaaattctttattaccgagtacatctgacacccaaaggttgtgacgcagaaagtcatcggccttcctgcttcttctgcttcttttcttacgtattctttcgctttttctatgaaataatattgtctttccggttccttatgcg

SEQ ID NO: 27440 - DNA, 260 bp, Unknown
  Description of Unknown: RightRegion for integrase B1441 sequence
atcatggaaacgagaaaaggcgtagcactcagctacgccccagaacaggttgcggtataggaggtacgacacgatgaaagcctatttctattgccgcgtcgctcacgatgatagcttttctttggaacggcaggccgaggagcttcgccgctatgcggaacaagccgggtacaccatcgttggtgctgctgccgagcatggctctggaatgacccttgaccgtccggctctgcaagaggtgatggaggacgtccttgccg

SEQ ID NO: 27441 - DNA, 260 bp, Unknown
  Description of Unknown: RightRegion for integrase B1442 sequence
aggcatattacagagattgttttcaagaatggattaacccacacattattatacagatagcaaaaaagccccggaaaatcaacatttccgaggctttaagtatgttcaatataaatgcttaataattctctattacagggttcatctgacaaccaaaggttgtaacgcagaacgtcagcggacgaccaagttcttcggattcacgctgtacatatgcctttgccttttcgatgaaataatactgacgggcagtatcatcc

SEQ ID NO: 27442 - DNA, 260 bp, Unknown
  Description of Unknown: RightRegion for integrase B1443 sequence
aattgcattaagacgcaagatgttgtattgtataattatacgtacaaattagcactgtaaacaaaattttgggagtggaatcaatgatacacacagcttatgacgtaatgaaagagtttttgataacagattcagagccggcaggacagtacaatattcctaaaattccaaagacatacatcacacctggaatagatactgtagactttgctgaaagcttcagtaagaaaattaagaaccaccgggaactggatgtgaat

SEQ ID NO: 27443 - DNA, 260 bp, Unknown
  Description of Unknown: RightRegion for integrase B1444 sequence
cgcaagattgtagaaattgtattcatcaatggtctttcccatacgttactctacaaataaaaacaaccccgtaagcactgagtttacggggtttattgattatgacgtcatacagattgaattctttgttaccgagtacatctgacacccaaaggttgtgacgcagaaagtcatcggccttcctgcttcttctgcttcttttcttacgtattctttcgctttttctatgaaataatattgtctttctggttccttatgag

SEQ ID NO: 27444 - DNA, 260 bp, Unknown
  Description of Unknown: RightRegion for integrase B1445 sequence
aggcatattacagagattgttttcaagaatggattaacccacacattattatacagatagcaaaaaagccccggaaaatcaacatttccgaggctttcagtatgttcattataaatgcttaacaattccctattaccgcgttcatctgacaaccaaaggttgtaacgcagaacgtcagcggacgaccaagttcttcggattcacgctgtacatatgcctttgccttttcgatgaaataatactgacgggcagtatcatcc

SEQ ID NO: 27445 - DNA, 260 bp, Unknown
  Description of Unknown: RightRegion for integrase B1446 sequence
aggcatattacagagattgttttcaagaatggattaacccacacattattatacagatagcaaaaagccccggaaaatcaatgctttcggggctttttgtatgttcaatataaatgcttaataattctctattaccgggttcatctgacaaccaaaggttacggtagcaaagaaaagaggacgtcccaatttttcagactcttcctttacatattttcttgcttttttgataaaataatactgtctttcggtatcatccg

SEQ ID NO: 27446 - DNA, 260 bp, Unknown
  Description of Unknown: RightRegion for integrase B1447 sequence
gaggcggatttgccgcccattgaccaacctatgtatccgttgggagtggatagcgaatgaaatcctcatgtccctgcgtgcggaaaagaagcagaacggcgaagtgtatttgatggagccaataggtacggacaacgacggcaacgagatttcgctttgcgacatactgggcacggatgcggaccatgtgcataacgaggcggagcgcagcatggaggcggagcggctttggcaggcgatagacgacgtgctcagcgtgc

SEQ ID NO: 27447 - DNA, 260 bp, Unknown
  Description of Unknown: RightRegion for integrase B1448 sequence
aattgcattaagacacaagatattgtattgtataattatacgtacaaattagcactgtaaacaaaattttgggagtggaatcaatgatacacacagcttatgacgtaatgaaagagtttttgataacagattcagagccggcaggacagtacaatattcctaaaattccaaagacatacatcacacctggaatagatactgtagactttgccgaaagcttcagtaagaaaattaagaaccaccgggaactagatgtgaat

SEQ ID NO: 27448 - DNA, 260 bp, Unknown
  Description of Unknown: RightRegion for integrase B1449 sequence
cgcaagattgtagaaattgtattcatcaatggtctttcccatacgttactctacaaataaaaacaaccccgtaagcactgagtttacgaggtttattgattatgacgtcatacatatcaaattctttgttaccgagtacatctgacacccaaaggttgtgacgcagaaagtcatcggccttcctgcttcttctgcttcttttcttacgtattctttcgctttttctatgaaataatattgtctttccggttccttatgcg

SEQ ID NO: 27449 - DNA, 260 bp, Unknown
  Description of Unknown: RightRegion for integrase B1450 sequence
aaagctcaacttcgcaagaggttgagcttttttctttttattatacatggtaaggagtagaggagtgcgggaatcgaaaagcccgggccccgcgtccagcgtaccgcggggcaaaaacagccccgcgggctgtttttagggcgcgggtgctttactttttacgcaccacagttgaaattgattcatatcccgcagttcctgcggcccgatgacatttacatagctgccttggctcagcagccacatcaaaattccttttc

SEQ ID NO: 27450 - DNA, 260 bp, Unknown
  Description of Unknown: RightRegion for integrase B1451 sequence
aggcatattacagaaattgttttcaagaatggattaacccacacattattatacagatagcaaaaaagccccggaaaatcaacatttccgaggctttcagtatgttcaatataaatgcttaataattctctattaccgggttcatctgacaaccaaaggttgtaacgcagaacgtcagcggacgaccaagttcttcggattcacgctgtacatatgcctttgccttttcgatgaaataatactgacgggcagtatcatcc

SEQ ID NO: 27451 - DNA, 260 bp, Unknown
  Description of Unknown: RightRegion for integrase B1452 sequence
cgcaagattgtagaaattgtgttcgtcaatggactttctcacacattactctacaaataaaaacaaccccgtaagcactgagtttacgggggtttattgattatgacgccatacagattaaattctttattaccgagtgcatctgacacccaaaggttacggtagcaaaggtcaatggtctaccagccttttctgattctcttctgacatattctttcgctttttttataaaataatactgtctctcaggctcagttgtt

SEQ ID NO: 27452 - DNA, 260 bp, Unknown
  Description of Unknown: RightRegion for integrase B1453 sequence
aattgcattaagacgcaagatgttgtattgtataattatacgtacaaattagcactgtaaacaaaattttgggagtggaatcaatgatacacacagcttatgacgtaatgaaagagtttttgataacagattcagaaccggcaggacagtacaatattcctaaaattccaaagacatacatcacacctggaatagatactgtagactttgccgaaagcttcagcaagagaattaagaaccaccgggaactagatgtgaat

SEQ ID NO: 27453 - DNA, 109 bp, Unknown
  Description of Unknown: RightRegion for integrase B1454 sequence
cgcaagattgtagaaattgtattcatcaatggtctttcccatacgttactctacaaataaaaacaaccccgtaagcactgagtttacggggtttattgattatgacgtc

SEQ ID NO: 27454 - DNA, 260 bp, Unknown
  Description of Unknown: RightRegion for integrase B1455 sequence
aggcatattacagagattgttttcaagaatggattaacccacacattattatacagatagcaaagaagccccgaaaaatcaatgctttcggggctttttgtatgttcaatataaatgcttaataattctctattaccgggttcatctgacaaccaaaggttgtaacgcagaacgtcagcggacgaccaagttcttcggattcacgctgtacatatgcctttgccttttcgatgaaataatactgacgggcagtatcatcc

SEQ ID NO: 27455 - DNA, 260 bp, Unknown
  Description of Unknown: RightRegion for integrase B1456 sequence
gaatatgatgaccggttatatcggagccacatcaggaaccgtaaaagtgtgtggacatgatatttttaaagaggcagaggcagcaaaacgggagattggttatttgccggaaattccacctctttatacagatatgacggtatatgaatatttaagcttttgtgcggaattaaaaggcattggaaaaaaagaacgcgatgatagcgtggtagaggttatggaaaaaacaggagtagctgaaatggagggacgcctgatac

SEQ ID NO: 27456 - DNA, 260 bp, Unknown
  Description of Unknown: RightRegion for integrase B1457 sequence
aaagccaacactcggaagggcgtagatgtggagtatattcccacagtgaaatccgcttaagacaaaaggtgagcaggcacaaaacctgctcaccacgtacaaaccggatgaaattgaataaaagaatgagtgtccataacataaatccgttatgaacactcatactggtgcgggcgacaggacttgaacctgcacatcggttgacactagaacctaaatctagcgcgtctgccaattccgccacgcccgcacgtgtgtat

SEQ ID NO: 27457 - DNA, 260 bp, Unknown
  Description of Unknown: RightRegion for integrase B1458 sequence
atatctgtaagcagcccggcaacttccctgtatggcatagaatatctttgcgagatgtaacgcatagaagcaccaagctcgccgtccggtccaccatacttcaataaggtatactgctgaaaaaccagcatatatgcgggtttgacaacttggtaaaaatatagtaagtaaaatgtttgctatttatttttgtaaaaagaagtatatctccagcttatcattttccttatcatacacacaatggtcaacaacacttctta

SEQ ID NO: 27458 - DNA, 260 bp, Unknown
  Description of Unknown: RightRegion for integrase B1459 sequence
attcgaggacacttcccttacatatgggaggatcagcggcgggagctcggttttaaataagacgagtaccttatttatacctatgtatgggttaaacctacataggtattttctgtatattggattttcaaccctgcattgaaagaatttgaacttattaatatatagccttttgtattaatcattaacaaaaggttaaaaaatgacacctagtttattcaatgggctaccgccaaaagtagtcacatatataaaagtac

SEQ ID NO: 27459 - DNA, 260 bp, Unknown
  Description of Unknown: RightRegion for integrase B1460 sequence
ctgcgtgaacggttcccttactcttgggaggaacaaaaacgcgaattaggctttatataattaagccatctccgttttatttaaattaaatttaatgcagatattctctgcatttcaaatttcaagtgcgcattgaaagaaattaaacttatgaatatatagccttttgtataaatcattaacaaaaggttaaaatatgacacaaaatttattcaatggactaccacccagggtagtaacatatatcaagattcatttgc

SEQ ID NO: 27460 - DNA, 260 bp, Unknown
  Description of Unknown: RightRegion for integrase B1461 sequence
tcaaaacgtaaagcccaaggggcaaggcacatagtaccttgccccttgggctttttataattgatggtaaagttgtgtctgcaggcataactttaccgcaatgtacgacgaactaatgctactaaaaaatatgataaaaggaaataaccaatgatactttccgtagcaatcagacataaaagcaaataattttctggaattaccaagagtggactatatcctaacccaataaatgcaaagcaagaattgatgatgctatc

SEQ ID NO: 27461 - DNA, 260 bp, Unknown
  Description of Unknown: RightRegion for integrase B1462 sequence
ctgcgtgaacgttttccttactcttgggaagaacaaaaacgcgaattaggctttatataattacgccttctcggctttatttaaattaaatttaatgcagatattctctgccttccaaatttcaagtgcgcattgaaagaaattaaacttatgaatatatagccttttgtataaatcattaacaaaaggttaaaatatggcacaaaatttattcaatggactaccacccagggtagtaacatatatcaagattcatttgc

SEQ ID NO: 27462 - DNA, 260 bp, Unknown
  Description of Unknown: RightRegion for integrase B1463 sequence
ttcagtgcagcccccgagtcattggtgtttcggcaggtcagaaggtgccggttcagctgacgatctccagcatctgatcgaacacctcttccatctgccgcaccagcgtgaactgggtgcgggcgcggtcaaggttgtggccggggcgggcggtgtggaaatagtgatcgccctccagatagtcggtcagaaagcggatgccgcactccagcgtcatcagcttggcaccccaggcaaggctctttttctccgcaggactc

SEQ ID NO: 27463 - DNA, 260 bp, Unknown
  Description of Unknown: RightRegion for integrase B1464 sequence
ttttttgcatgtattgatgggtgtgtacctcagtgcccggcccggctggggatcgtctgaagctcgaagcggtaggtctgtccggcgtccgggtatttttcgcggtcgaccgggctcagaaacatatccagcggccggacccagaggccgccgtcgccgtaaagcttgcggtagatcacgcagggctcgttcgtctcggaatcacgggcaagcgcctccaccagataataatcccccttgaaatggcggtagacccgccc

SEQ ID NO: 27464 - DNA, 260 bp, Unknown
  Description of Unknown: RightRegion for integrase B1465 sequence
ctgcgtgaacggtttccttactcttgggaggaacaaaaacgcgaattaggctttatataattacgccttctcggctttatttaaattaaatttaatggagatattctccgtcttccgaatttcaagtgctcattgcaagacattaaacttatgagtatatagccttttgtataaatcattaacaaaaggttaaaatatgacacaaaatttattcaatggactaccacctagggtggtaacatatatcaagattcatttgc

SEQ ID NO: 27465 - DNA, 260 bp, Unknown
  Description of Unknown: RightRegion for integrase B1466 sequence
cccgctcaaagcggaaaaatgaaaaaaggctaccgtttagggatttcccctattcggtagccttttttcatgttttgtaacctatttcgttatttcctaacaaaagcctgcgggattctaaaatgactgttagaatctaacgaaaaggagcatggctatgattaggattttactgtccacccggcttggcgagcggaggtggactcaggctgatctggcccgagcaactggaatcaggccgtccaccatcaacgacctgt

SEQ ID NO: 27466 - DNA, 260 bp, Unknown
  Description of Unknown: RightRegion for integrase B1467 sequence
ctgcgtgaacggtttccttactcttgggaggaacaaaaacgcgaattaggctttatataattaatccatctccgttttattgaaattaaatttaatgcagatattctctgcatttcaaatttcaagtgcgcattgaaagaaattaaacttatgaatatatagccttttgtataaatcattaacaaaaggttaaaatgtgacacagaatttattcaatggactaccacccagggtagtaacatatatcaagattcatttgc

SEQ ID NO: 27467 - DNA, 260 bp, Unknown
  Description of Unknown: RightRegion for integrase B1468 sequence
gagacggtggcatggcttgagcaatatcggtcagaggataccaatcatgacagtaattaaaaatatataagaaattgacaacgtatagtttttcactaaaatttaattcgaaataatctgaaaaatatatctaatttagggtaaaaagtttgtgattttatgtcacaaacttttttgataattatatatgatgcaaacgataataagtatcgtatgattttataaaaacaaactttatagtttactagacgtaaatgttg

SEQ ID NO: 27468 - DNA, 260 bp, Unknown
  Description of Unknown: RightRegion for integrase B1469 sequence
aaatctccaattcctgcctcgtggtcagagcagcgtactaaatatgggtttaactcttaataaatccacaacccatattagaaaaagtttggcccaatagaactatcatttgaaaatgtaagcctttctaacattttgaaaggtttacataaatgtatgacaaactttttgacggcataccagactatgtccgtattaccattttttcttgtgtaagaaaattatccacctttgcaaattttaataatcacgaagatatt

SEQ ID NO: 27469 - DNA, 260 bp, Unknown
  Description of Unknown: RightRegion for integrase B1470 sequence
aagcgcatcactgaaatagtattcaaaaacggactcacgcacaagctactctataaatagcaaaaagccctagaaattaacgtttccggggctttctttatgttcttacagattcggtgttgccagtaccatctgacaaccaaatgtttgaattgctgcgactaatgggcgtcccagttcctctgacattttagcaacatattcttttgctttttccataaaataatactgacgcgcaggttcttctaacggagcatccg

SEQ ID NO: 27470 - DNA, 260 bp, Unknown
  Description of Unknown: RightRegion for integrase B1471 sequence
aatgcgtatgctttgtacgattgttcaaccatcagaaggacaaatattatggaatggtaaagatatatggaaactaggaggtgaataccgagaagttctgggatatttaccacaggattttggatattatccagatttgaccgtatatgattatatgatgtacatttcttctataaaagggttaaaaatgccgtttgccagaaaaaaggtgaagcaattattaaatcaagtaggaatggaaaaatttagtaaaagaaaaa

SEQ ID NO: 27471 - DNA, 260 bp, Unknown
  Description of Unknown: RightRegion for integrase B1472 sequence
aagcgaatagtaaaaatagtttttaggaacggtttgtcgcacacactcttataccgataaaactcaagaaagcccgtaaattaaggctacggactttctgagggatgactgagacttataaattctcgcttacggcattcatctggcaaccaaaggttacggtactcgcggttaaaggacgtcccagcttttcagacatctcctttacatactttcgtgctttttcaataaaataatactgacgctccggctcagtggtc

SEQ ID NO: 27472 - DNA, 260 bp, Unknown
  Description of Unknown: RightRegion for integrase B1473 sequence
aaagccgaaacccgccggggcgttgccgtggagtacctgaccgagccgaaaacggcataacagaaatgcggtatcgggcataagcaaaaggagcagacttaaagcctgctccgtacataaaaccgtatcacaatatataaaaatcgagtgctcataggtcaaataccttatgaacactcgatatggtcggagtggcgggatttgaagaaacggcgacgataggctcaaacgcttatatatcaacggttacactgcttttt

SEQ ID NO: 27473 - DNA, 260 bp, Unknown
  Description of Unknown: RightRegion for integrase B1474 sequence
attgcggacacacgcaaaggtgttgccgtagagtatataaccgaacaattcacggcataaaaaagagcaaggtgttacccttgcccgtacataaaaattatatgataaaacaaaaagagtgttcataagtcaaatcccttatgaacactcgatatggtcgaggtgacaggacttgaacctgcggcatcttggtcccaaaccaagcactctaccaaactgagctacacctcgaaatgttgtttaataacaacagcttgatt

SEQ ID NO: 27474 - DNA, 260 bp, Unknown
  Description of Unknown: RightRegion for integrase B1475 sequence
aatgcgtatgctttgtacgattgttcaaccatcagaaggacaaatattatggaatggtaaagatatatggaaactaggaggtgaataccgagaagttctgggatatttaccacaggattttggatattatccagatttgaccgtatatgattacatgatgtacatttcttctataaaagggttaaaaataccgtttgccagaaaaaaagtgaagcaattattaaatcaagtaggaatggaaaaattcagtaaaagaaaaa

SEQ ID NO: 27475 - DNA, 260 bp, Unknown
  Description of Unknown: RightRegion for integrase B1476 sequence
gtaaagcaaataactttcagaaatggtttgtctcatatttttgtatacaaagagcattaaaaaatccgggagccgaacagttcccggattgcttatgtttgaaacatcatttttaattttcaccattcaccttaaaaagatatgcatgaagtttttcgtgttcttctgaaaaaggcatttcctctccattgatctcaaccattccagcaagtgtgcatccattctgttgaaaaagccacgcagtatctactgctccgctc

SEQ ID NO: 27476 - DNA, 260 bp, Unknown; identical to SEQ ID NO: 27473
  Description of Unknown: RightRegion for integrase B1477 sequence

SEQ ID NO: 27477 - DNA, 260 bp, Unknown
  Description of Unknown: RightRegion for integrase B1478 sequence
aagcgaatagtaaaaatagtttttaggaacggtttgtcgcacacactcttataccgataaaactcaagaaagcccgtaaattaaggctacggactttctgagggatgactgagacttataaattctcgcttacggcattcatctgacaaccgaaagtcgtaacacagaacgtcagtgtcctgtcggcttctttacatttttctgcaaaaatatcttttgctttttcaataaaataatactgacgatccggttcctgcagc

SEQ ID NO: 27478 - DNA, 260 bp, Unknown
  Description of Unknown: RightRegion for integrase B1479 sequence
aagcgcatcactgaaatagtattcaaaaacggactcacgcacaagctactctataaataacaaaaagccctagaaatcaacgtttccggggctttcttcctgtctttataaattctgtgttgccaataccatctgacaaccaaatgtcgtcacacacgcagttaatggatgccccagtttctcagacatttcagcaacatattcttttgctttttccataaaataatactggcgtgcaggttcttccaacggagcgttct

SEQ ID NO: 27479 - DNA, 260 bp, Unknown
  Description of Unknown: RightRegion for integrase B1480 sequence
aagcatatcactaaaatagtattcaaaaacggactcacgcataaactactctataaataacaaaaagccctagaaatcaacgtttccggggctttcttcctgtctttataaattctgtgttgccagtaccatctgacaaccaaatgtcgtcacacacgcagttaatggacgccccagtttctcagacatttcagcaacatattcttttgctttttccataaaataatactggcgtgcaggctcttccaacggagcattct

SEQ ID NO: 27480 - DNA, 260 bp, Unknown
  Description of Unknown: RightRegion for integrase B1481 sequence
aaagccaacacccgaaaaggcgtagacgtggagtatatcccaacagcaaaatcagcataagagaaaaggtgagcaggcacatcaacctgctcaccacgtacaaaccggatgaaattgaataaaaaatgagtgtccataacataaatccgttatgaacactcatactggtgcgggtgacaggacttgaacctgcacggggttaccactagaacctaaatctagcgcgtctgccaatttcgccacacccgcaaactattaat

SEQ ID NO: 27481 - DNA, 260 bp, Unknown
  Description of Unknown: RightRegion for integrase B1482 sequence
aagcatatcactgaaatagtattcaaaaacggactcacgcataaactactctataaataacaaaaagccctagaaatcaacgtttccggggctttcttcatgtctttataaattctgtgttgccaataccatctgacaaccaaatgtcgtcacacacgcagttaatggacgccccagtttctcagacatttcagcaacgtattcttttgctttttccataaaataatactgacgggcaggttcttccaacggtgcatttt

SEQ ID NO: 27482 - DNA, 260 bp, Unknown
  Description of Unknown: RightRegion for integrase B1483 sequence
cgcaaacggctcgggagggtcattcttgttgccatgcaccgcggcaatatgctatactaaagaaaaaacagaaggggaggcactgcggatgacccgcattgcaatcgtagaggatgaggccgccgtccgggagcagctggcggggtatgtgcagcgctacacgcggcagtatggcacccagtttgaggtgacaatgttcaccgacggcgtcgaaatccttgaggattaccgcccggtctacgacataatttttcttgatg

SEQ ID NO: 27483 - DNA, 260 bp, Unknown
  Description of Unknown: RightRegion for integrase B1484 sequence
attgcggatacacgcaaaggtgttgccgtagagtatataaccgaacaattcacggcataaaaaagagcaaggtattacccttgcccggacataaaaattatatgataaaacaaaaagagtgttcataagtcaaatcccttatgaacactcgatatggtcgaggtgacaggacttgaacctgcggcatcttggtcccaaaccaagcactctaccaaactgagctacacctcgaaatgttgcttaataacaacagcttgatt

SEQ ID NO: 27484 - DNA, 260 bp, Unknown
  Description of Unknown: RightRegion for integrase B1485 sequence
cccacacaaagccgtctgaaatcatcaaaggaaacacgaaattcaacctccaaacggtaatcccggtacacatagacggccttgataagctgcgatacaatcatcttcttcgcttcaaaggtgcagttgtcgtaaagatcagcccagctttccagtttctcaaattcggcctgttcctgcgcggcgctttccagttgatgctccatgtcggctttttgtgcgtctacctcctgtgaaagctctgcgatctcttctttgca

SEQ ID NO: 27485 - DNA, 260 bp, Unknown
  Description of Unknown: RightRegion for integrase B1486 sequence
aaacatattactgaaatagtattcaaaaacggactcacgcataaactactctataaataacaaaaagccctagaaatcaacgtttccggggctttcttcctgtctttataaattctgtgttgccaataccatctgacaaccaaatgtcgtcacacacgcagttaatggacgccccagtttctcagacatttcagcaacgtattcttttgctttttccataaaataatactgacgggcaggttcttccaacggtgcatttt

SEQ ID NO: 27486 - DNA, 260 bp, Unknown
  Description of Unknown: RightRegion for integrase B1487 sequence
aagcgcatcactgaaataatattcaaaaacggactcacgcataaactactctataaataacaaaaagccctagaaatcaacgtttccggggctttcttcctgtctttataaattctgtgttgccaataccatctgacaaccaaatgtcgtcacacacgcagttaatggacgccccagtttctcagacatttcagcaacatattcttttgctttttccataaaataatactggcgtgcaggctcttccaacggagcattct

SEQ ID NO: 27487 - DNA, 260 bp, Unknown
  Description of Unknown: RightRegion for integrase B1488 sequence
aagcgcatcactgaaatagtattcaaaaacggactcacgcacaagctactctataaataacaaaaagccctagaaatcaacgtttccggggctttcttcctgtctttatcaattctgtgttgccagtaccatctgacaaccaaatgtttgaattaccgcgactaatggacgccccagtttctcagacatttcagcaacgtattcttttgctttttccataaaataatactgacgggcaggttcttccaatggtgcatttt

SEQ ID NO: 27488 - DNA, 260 bp, Unknown
  Description of Unknown: RightRegion for integrase B1489 sequence
aagcatatcactgaaatagtattcaaaaacggactcacgcataaactactctataaataacaaaaagccctagaaatcaacgtttccggggctttcttcctgtctttatcaattctgtgttgccagtaccatctgacaaccaaatgtcgtcacacacgcagttaatggacgccccagtttctcagacatttcagcaacgtattcttttgctttttccataaaataatactgacgggcaggttcttccaacggtgcatttt

SEQ ID NO: 27489 - DNA, 260 bp, Unknown
  Description of Unknown: RightRegion for integrase B1490 sequence
aagcgaatagtaaaaatagtttttaggaacggtttgtcgcacacactcttataccgataaaactcaagaaagcccgtaaattaaggctacggactttctgagggatgactgagacttataaattctcgcttacggcattcatctggcaaccgaaagtcgtaacacagaacgtcagtgtcctgtcggcttctttacatttttctgcaaaaatatcttttgctttttcaataaaataatactgacgatccggttcctgcagc

SEQ ID NO: 27490 - DNA, 260 bp, Unknown
  Description of Unknown: RightRegion for integrase B1491 sequence
aagcatatcactgaaatagtattcaaaaacggactcacgcataaactactctataaataacaaaaagccctagaaatcaacgtttccggggctttcttcatgtctttataaattctgtgttgccaataccatctgacaaccaaatgtcgtcacacacgcagttaatggacgccccagtttctcagacatttcagcaacatattcttttgctttttccataaaataatactggcgtgcaggttcttccaacggagcgttct

SEQ ID NO: 27491 - DNA, 260 bp, Unknown
  Description of Unknown: RightRegion for integrase B1492 sequence
aggcatgtgaccgaaatcgtattcaaaaatggactcacacacaagctactctataaataacaaaaagccctagaaatcaatgtttccggggctttcttcatgttcttacagattatgtgttgccagtaccatctgacaaccaaatgtcgtcacacacgcagttaatggacgccccagtttctcagacattttagcaacgtattcttttgctttttccataaaataatactgacgggcaggctcttccaacggagcattct

SEQ ID NO: 27492 - DNA, 260 bp, Unknown; identical to SEQ ID NO: 27471
  Description of Unknown: RightRegion for integrase B1493 sequence

SEQ ID NO: 27493 - DNA, 260 bp, Unknown
  Description of Unknown: RightRegion for integrase B1494 sequence
aagcgcatcactgaaatagtattcaaaaacggactcacgcacaagctactctataaataacaaaaagccccagaaattaacgtttccggggctttcttcctgtctttatcaattctgtgttgccagtaccatctgacaaccaaatgtttgaattaccgcgactaatggacgccccagtttctcagacatttcagcaacatattcttttgctttttccataaaataatactggcgtgcaggctcttccaacggagcattct

SEQ ID NO: 27494 - DNA, 150 bp, Unknown
  Description of Unknown: RightRegion for integrase B1495 sequence
aagcgcatcactgaaatagtattcaaaaacggactcacgcataagctactctataaataacaaaaagccctagaaatcaacgtttccggggctttcttcctgtctttataaattctgtgttgccaataccatctgacaaccaaatgtcgt

SEQ ID NO: 27495 - DNA, 260 bp, Unknown
  Description of Unknown: RightRegion for integrase B1496 sequence
aagcgcatcactgaaatagtattcaaaaacggactcacgcacaagctactctataaataacaaaaagccctagaaatcaacgtttccggggctttcttcctgtctttatcaattctgtgttgccagtaccatctgacaaccaaatgtcgtcacacacgcagttaatggacgccccagtttctcagacatttcagcaacatattcttttgctttttccataaaataatactggcgtgcaggctcttccaacggagcattct

SEQ ID NO: 27496 - DNA, 260 bp, Unknown
  Description of Unknown: RightRegion for integrase B1497 sequence
tacaggcagctatcgctaacaagtaatacactgattagtgaaaagaatataattacttaaaataatgaactcctgtatactagaaatggtgtgcaggagttttttgacataaaattaagctgtgctacattctgctttagggaaggatgaaaaaggttatttaatggatacatgtctaacagcgcaagatagatataaggcatatttagactattttgaaataaagtatgaaaagaattgaaaggagagaacgatgaaag

SEQ ID NO: 27497 - DNA, 260 bp, Unknown
  Description of Unknown: RightRegion for integrase B1498 sequence
aagcgcatcactgaaatagtattcaaaaacggactcacgcataagctactctataaataacaaaaagccctagaaatcaacgtttccggggctttcttcctgtctttataaattctgtgttgccaataccatctgacaaccaaatgtcgtcacacacgcagttaatggatgccccagtttctcagacatttcagcaacatattcttttgctttttccataaaataatactggcgtgcaggttcttccaacggagcgttct

SEQ ID NO: 27498 - DNA, 260 bp, Unknown
  Description of Unknown: RightRegion for integrase B1499 sequence
aagcatatcactgaaatagtattcaaaaacggactcacgcataaactactctataaataacaaaaagccctggaaatcaacgtttcctgggctttcttcctgtctttataaattctgtgttgccagtaccatctgacaaccaaatgtcgtcacacacgcagttaatggacgccccagtttctcagacatttcagcaacatattcttttgctttttccataaaataatactggcgtgcaggttcttccaacggagcgttct

SEQ ID NO: 27499 - DNA, 260 bp, Unknown
  Description of Unknown: RightRegion for integrase B1500 sequence
aaacatattactgaaatagtattcaaaaacggactcacacacaagttactctataaataacaaaaagccctagaaatcaacgtttccggggctttctttatgttcttacagattcggtgttgccagtaccatctgacaaccaaatgtttgaattaccgcgactaatgggcgccccagctcctctgacattttagcaacatattcttttgctttttccataaaataatactgacgcgcaggttcttctaacggagcatctg

SEQ ID NO: 27500 - DNA, 260 bp, Unknown
  Description of Unknown: RightRegion for integrase B1501 sequence
agtggccaggaaggaagggtcactgattacgttgatgttaagcctgatagtgatgcctgaaacgccctttatagcgttctgaagactgttctaagagagattttatcactactattggctggattttcaagctgatcgcagagagcacaatgtcaaacacaatcaggaataaaagcacttggatcacagcatttttcagcttcgtagttgggtgtgttactggagccagcggatttttggatggtcttaacaagattcct

SEQ ID NO: 27501 - DNA, 260 bp, Unknown
  Description of Unknown: RightRegion for integrase B1502 sequence
cgcatcctatctatcgagttcaagaacggcgtcgtacatcgcttcttgtaccgtgaatgatccacaacatacttgcaatcgcccctacattcgtatatactatgtatatacggaggtgatagtaatgttagcaacgatttctaaatggggaaatgggcatggcatccgtctttctcgaaaattgatggaagaagccaatctttcgtcgtctgataagctggaggttatagtcaaagcagacaaatctatcatcctgcgcc

SEQ ID NO: 27502 - DNA, 260 bp, Unknown
  Description of Unknown: RightRegion for integrase B1503 sequence
gtaaagcaaataactttcagaaatggtttgtctcatatttttgtatacaaagagcattaaaaaatccgggagcctaacagttcccggattgcttatgtttgaaacatcatttttaattttcaccattcaccttaaaaagatatgcatgaagtttttcgtgttcttctgaaaaaggcatttcctctccattgatctcaaccattccagcaagtgtgcatccattctgttgaaaaagccacgcagtatctactgctccgctc

SEQ ID NO: 27503 - DNA, 260 bp, Unknown
  Description of Unknown: RightRegion for integrase B1504 sequence
aagcgcatcactgaaatagtattcaaaaacggactcacgcataaactactctataaataacaaaaagccctagaaatcaacgtttccggggctttcttcctgtctttataaattctgtgttgccaataccatctgacaaccaaatgtcttggtagcacataacaatggtctgcctagtttttcagacattgcttttacatatctcttcgcaacatccataaagtaatactgtcttgccggttcttccgtaggtgcattat

SEQ ID NO: 27504 - DNA, 260 bp, Unknown
  Description of Unknown: RightRegion for integrase B1505 sequence
attgcagacacacgcaaaggtgttgccgtagagtatataaccgagcaattcacggcataaaaaagagcaaggtgttacccttgctcgtacatacgaattatatgataaaacaaaaagagtgttcataagtcaaatcccttatgaacactcgatatggtcgaggtgacaggacttgaacctgcggcatcttggtcccaaaccacttaataaatgtgtgaaaaacttagtgtttatcggacttttcaagtttagttgcctaa

SEQ ID NO: 27505 - DNA, 260 bp, Unknown
  Description of Unknown: RightRegion for integrase B1506 sequence
aagcgcatcactgaaataatattcaaaaacggactcacgcataaactactctataaataacaaaaagccctagaaatcaacgtttccggggctttcttcctgtctttataaattctgtgttgccaataccatctgacaaccaaatgtcttggtagcacataacaatggcctgcctagtttttcagacattgcttttacatatctcttcgcaacatccataaagtaatactgtcttgccggttcttccgtaggtgcattat

SEQ ID NO: 27506 - DNA, 260 bp, Unknown
  Description of Unknown: RightRegion for integrase B1507 sequence
tttatcacgatgataggtaatgtgttcgttttgctttgtccgtttccgggcctgaaatagaaataaattaagtctaatttgtgaacaaatagaacatcattagagacccattacaacaaaataagcggcgggctacccctattttcaggggaaggcccgccgcttttgttatggattatttaacttgctgatcagttgtctttgcttgcctgcttgataacctgatccgcgccggtggcagccaggccggaaacaatgcc

SEQ ID NO: 27507 - DNA, 260 bp, Unknown
  Description of Unknown: RightRegion for integrase B1508 sequence
aagcgcatcactgaaatagtattcaaaaacggactcacgcacaagctactctataaataacaaaaagccctagaaatcaacgtttccggggctttcttcctgtctttataaattctgtgttgccaataccatctgacaaccaaatgtcgtcacacacgcagttaatggacgccccagtttctcagacatttcagcaacatattcttttgctttttccataaaataatactggcgtgcaggctcttccaacggagcattct

SEQ ID NO: 27508 - DNA, 260 bp, Unknown
  Description of Unknown: RightRegion for integrase B1509 sequence
gaaacggttatgattcttgattatggcttgattgccgcagagttatcaatcgcacgctaaacccaaaaagcactcagcgaatgctgggtgctttttttgcatacttttcaaattatttttgtaactctcttgacttatgcacccattgagtgtataatatagacaagataagaaccaaaggcaccaacacaacacaggaggaaaataaaatgactaacaacgaactgatttccatcgccaccaaaaccgctactgatatt

SEQ ID NO: 27509 - DNA, 260 bp, Unknown
  Description of Unknown: RightRegion for integrase B1510 sequence
cggcgctcccggtctgctacttatctctcccttgtggagaaatccgggcaggctggttgaaaatacgccccatcttcaagacaatcgacattttctcttttatccagtttctttcccggcaaacaaactacataataaaattctttttgctaaaagtgctttatttggtgtgcgtcacaaattagagaaagttgacttgaattatcagaaccatatactaattgtcggtcaggacatagaggaagtagtcgctttgatgt

SEQ ID NO: 27510 - DNA, 260 bp, Unknown
  Description of Unknown: RightRegion for integrase B1511 sequence
aggcagattaccgaaatagtgtttaaaaatggcttatcgcataaattattatacagataaaaagtccccggaaaggttgattttccggggtttctttatgaaataatatcaatttataaaacctctactaccgcgttcatctgacaaccgaaagtcgtcacgcaaaaagtcagatctcttccgatctcctgtgctttttcgcttacatacttccgcgctttggcaatgtaatagtactgtctctccggctcggtgaccgg

SEQ ID NO: 27511 - DNA, 260 bp, Unknown
  Description of Unknown: RightRegion for integrase B1512 sequence
aactatgaaaatgctgctaaacctcatagaaccgacatcaggttccatacgtatttttaatagagatataaggcttgaagagaaaaaaatattacctcgaataggatcactgattgaaagtcctggattttaccctaatttgacaggtacggaaaatcttagaatttttgcgaaattgagaggaatcccaagaactgatgctatcgaacaggcattaaaacttgttaatttaccatataaagataaaaagttatattcgc

SEQ ID NO: 27512 - DNA, 260 bp, Unknown
  Description of Unknown: RightRegion for integrase B1513 sequence
cttcggtcggtgcattaccatcgtccaccggacgatgtgcaccctgttatccgcacttgataaatccgtaaactgcacagtttgtttttgtgtagctataaatcttgaatctggtttcaagctctcctctccggtcggtgcatagcaccatgttatccgaccttgataaatccgtaaactgcacacttgttaagactataaaagaatttaaaggtatgaaggcaaacgatgttgtaaaatatattgaaggtgaaccatat

SEQ ID NO: 27513 - DNA, 179 bp, Unknown
  Description of Unknown: RightRegion for integrase B1514 sequence
aggcagattaccgaaatagtgtttaaaaatggcttatcgcataaattattatacagataaaaagtccccggaaaggttgattttccggggtttctttatgaaataatatcaatttataaaaaaccgagagtatgaaactttttctgtaaaataatgtttataaggttcttctatgatac

SEQ ID NO: 27514 - DNA, 72 bp, Unknown
  Description of Unknown: RightRegion for integrase B1515 sequence
cgaaaacacaggcaattaatcccagatagcttgatgacgctttttcaaaattatctttgatttcttttgaat

SEQ ID NO: 27515 - DNA, 260 bp, Unknown
  Description of Unknown: RightRegion for integrase B1516 sequence
atcattagtttaagtgaaagtaagccaacgcttgctagattaatctcccttgtagcatgatttcagcatagatgacatgaaagaaacatgagtttttgtggtgattgtggtctttgctttagctaacatgaattattgtgatttctaaaacacccacctcatctgctccatagaacgctaaaagccgagaaacatcggcttttttttcgctttctgaaagttggccaacatcttgaccaacaaatttcaggagcagatga

SEQ ID NO: 27516 - DNA, 260 bp, Unknown
  Description of Unknown: RightRegion for integrase B1517 sequence
ccagaagcactggaagtaccgcaaactcaggacacagagaagccccggcaggcatcgtaaacacgatgacctgccggggtatcccaggaatcacttgttacccctgtgaggggagaacatatgtttgaagctctttttctatgctttttacggtgttaagttttgtgatgtaatttgtgaaaaaccggtgtctaccacaagtgtctaccaaactcgcagcgcttcattttagtgttgattttagtgcaggttcagcacct

SEQ ID NO: 27517 - DNA, 260 bp, Unknown
  Description of Unknown: RightRegion for integrase B1518 sequence
attaatgagattgatttgtggtgttttgcagccaacggggggaagtatttattgcgataatattgagattgccagtatgggagcagagtatcgtaggttattgggctatttaccacaggagtttggatattatggtgattttactgcggaacgtttcctgcgatatatggcggcattgaaagcacttccggaagattatgccgatagtcgtattgacgaacttttagatatggtagagttgaaaaatgtgaaaaagaaaa

SEQ ID NO: 27518 - DNA, 260 bp, Unknown
  Description of Unknown: RightRegion for integrase B1519 sequence
gctcgcgctgtaattcaggagtgtacttgggacggggagcggctttttattacgctctaaacctcactatttcataatggtggggttccgcccgcaatataaaaaagtgaatgtaaaataaaggaggtgattcagcgtggcttgtaaaattaaaacgctcctgcagtgcaagcactgcaggcatgatcttgagtttgcgacagtgtgtggtaatcgtcgtgtgccgcttctctggtgtccggactgcgatattttatatc

SEQ ID NO: 27519 - DNA, 260 bp, Unknown
  Description of Unknown: RightRegion for integrase B1520 sequence
gaaacgattacagtccttgattacggcttgattgccgcagaactatcaatcgttcgctaaaaagtaaaagggccactaggcgcaatgcctagtggccctttttggcttacttgctcgcctgcttaatgatctgatccgcgccggtcgcagcaaggccggaaacaatgcccacggccagggcggtcaacggatcagtggcagggaagtccggcacgttgatgtacatggcggccagacccagcaggccgccaagcgcgccg

SEQ ID NO: 27520 - DNA, 99 bp, Unknown
  Description of Unknown: RightRegion for integrase B1521 sequence
atgtcaaaacagaaagcgagggtcaagattttatgccttgaccctcgcttttataattgaaatctcgctcatcgagcattttttcaaggttttcttttg

SEQ ID NO: 27521 - DNA, 260 bp, Unknown
  Description of Unknown: RightRegion for integrase B1522 sequence
aggcagattaccgaaatagtgtttaaaaatggcttatcgcacaaattattatacagataaaaagtccccggaacggttgattttccggggtttctttatgaaataatatcaattttatcaaacctctactaccgcgttcatctgacaaccgaaagtcgtcacgcaaaaagtcagatttcttccgatctcctgtgctttttcgcttacatacttccgcgctttggcaatgtaatagtactgtctctccggctcagtgaccg

SEQ ID NO: 27522 - DNA, 260 bp, Unknown
  Description of Unknown: RightRegion for integrase B1523 sequence
atacaaaagatgctgggcactcagagcgttcccccaagcaccccgcagatattatactgattactgctctacgtacatagaacgaaatctactgttgattattgaattttattttctccccaaagagcggcacaaattttgaataacaaagtaggggcagcaggcggcggtaatcctctgccgccgcgagactttcccttttctttttctctgacataaatgcagccccggttttgctgacgaaaccggggctgtactta

SEQ ID NO: 27523 - DNA, 260 bp, Unknown
  Description of Unknown: RightRegion for integrase B1524 sequence
tttgatttgacaaagtatcaggtagaaataccgaaagaagaattagaacaaaaattttaaatagaagaatcgaaggcagttttgcagctgttttcgatttttcgtttctaattgtcgcacaagaatcggtagggctggggtttagcggctttatcccttaaaatttaaccccataccccttatagcaaaaagaaggctaccacggaagtgataaccctctttaaagcaatataattgttatctactaattaattctagcc

SEQ ID NO: 27524 - DNA, 260 bp, Unknown
  Description of Unknown: RightRegion for integrase B1525 sequence
tcttcttttatgttgagaaatgttggaataagtatgctgaatttagatattgctatataaagaatagttaatgaaaataaaacaaaaaagataaaattttcaattgaaaaatggtaatatttaaaagataatataagtaataatgtaaaatatttcgaaaataagaattaaatgagggaggtataaaaaatgagtatttggttatttagagcaggggcaaatggagaatacgaaagtaagtttttgaaggatggaagagt

SEQ ID NO: 27525 - DNA, 260 bp, Unknown
  Description of Unknown: RightRegion for integrase B1526 sequence
tacctttttgcggatggcagccggtattttaaagccggacgaaggaagcattacggttgatgatgagacagtatttgagaatacaaaggtaaaggcacggtgcttttatatcccggatgagccgtatttcttaagcaatggaacggcggaagacatgaaagtattttatcaggggatttatccgaagtttgatgcagcccggtttgataaactgctaaagaattttgaactggaaagccggcggaaggtgcagacctttt

SEQ ID NO: 27526 - DNA, 260 bp, Unknown
  Description of Unknown: RightRegion for integrase B1527 sequence
tttgatttgacaaagtatcaggtagaaataccgaaagaagaattagaaagaaaagactaaatagaagaatcgaaggcagttttgcagctgttttcgatttttcgtttctaattgtcgcacaagaatcggtggcgtggggtttcagcggcttcatgcttaaaatttaaccccatacccctataaacgaaaaaaaaggctactctggttagaatagccttcatttcattagtagaagtattgattaattctgctgctgattc

SEQ ID NO: 27527 - DNA, 260 bp, Unknown
  Description of Unknown: RightRegion for integrase B1528 sequence
aggcagattaccgaaatagtgtttaaaaatggcttatcgcataaattattatacagataaaaagtccccggaaaggttgattttccggggtttctttatgaaataatatcaattttatcaaacctctactaccgcgttcatctgacaaccgaaagtcgtcacgcaaaaagtcagatttcttccgatctcctgtgctttttcgcttacatacttccgcgctttggcaatgtaatagtactgtctctccggctcagtgaccg

SEQ ID NO: 27528 - DNA, 260 bp, Unknown
  Description of Unknown: RightRegion for integrase B1529 sequence
tttgatttgacaaagtatcaggtagaaataccgaaagaagaattagaaagaaaagactaaatagaagaatcgaagacagttttgcagctgttttcgatttttcgtttctaaatgtcgcacaagaatcggtggcgtggggtttcagcggcttcatgcttaaaatttaaccccatacccctataaacgaaaaaaaggctactctggttagaatagccttcatttcattagtagaagtattgattaattctgctgctgattct

SEQ ID NO: 27529 - DNA, 260 bp, Unknown
  Description of Unknown: RightRegion for integrase B1530 sequence
gattttgtttttgaggcgattgatttgcggtgttcaagtaccgatttcgtgagcagatgagcctccgttgcctttcagcttttccatcaccagcgcatcaacctcctgctccaatctcaaaatttctttctgcaaagtcaaacagtgggcatcgaggactggtttcctcaatgcccactgtttttgcaactgtgtgaccttttttagttccgctgcatattgttcccgcagcttttctgtataatcccagacagctttat

SEQ ID NO: 27530 - DNA, 60 bp, Unknown
  Description of Unknown: RightRegion for integrase B1531 sequence
cactttgatgagggttcttacaactgttttaaaacaaacggaaggaatggtttcccttga

SEQ ID NO: 27531 - DNA, 260 bp, Unknown
  Description of Unknown: RightRegion for integrase B1532 sequence
gaaacgattacagtccttgattacggcttgattgccgcagaactatcaatcgttcgctaaaaagtaaaagggccactaggcgcaatgcctagtggccctttttggcttacttgctcgcctgcttaatgatctgatccgcgccggtcgcagccaggccggaaacaatgcccacggccagggcggtcaggggatcggcggccggaaagtccggcacgttgatgtacatggcggccaggcccagcaggccgccaagggcgccg

SEQ ID NO: 27532 - DNA, 260 bp, Unknown
  Description of Unknown: RightRegion for integrase B1533 sequence
aagcgtattacagagattgtttttaaaaacggattgacgcacacattattgtacagatagaaaaagccccggaaatccaatgtttccagggcttttgtatgttcgtaattaatgcttaataattcaaggataccgggttcatctgacaaccaaaggttgtaacgcagaacgtcagcggacgaccaagttcttcagattcacgctgtacatatgcctttgccttttcgatgaaataatactgacgggcagtatcatccgcc

SEQ ID NO: 27533 - DNA, 260 bp, Unknown
  Description of Unknown: RightRegion for integrase B1534 sequence
aggcagattaccgaaatagtgtttaaaaatggattatcgcacaaattattatacagataaaaagtccccggaacggttggcttaacagtgataaggaactaatttacttatcaactgttagctgacggtttccggggtgcatacggacaaatcccgtctgatttctaacaggaagtcagacgggattttcgctttatattacgaattatggaggacataccatgaaaaccttaatatcttgtgcctacaatatggataat

SEQ ID NO: 27534 - DNA, 260 bp, Unknown
  Description of Unknown: RightRegion for integrase B1535 sequence
ggaaaacatcaagaaaaacttcggttttggctgtatgcgcctgcccttgaaggatggtgagatcgatctggccgaaaccagccggatggtcgattattttctggagcagggcttcaactacttcgacacggcccacggttaccttcagggccggagcgagacggcgctgaaggcctgcctgaccagccgccacccccgcgacagctacatcctgaccaacaagctgaccggcactttcttcaaaactgaggctgacatcc

SEQ ID NO: 27535 - DNA, 260 bp, Unknown
  Description of Unknown: RightRegion for integrase B1536 sequence
aacaaagtaaccaaaataaaatttataaacggtatcgaacattcatttatttgtaaataaaaaaaacacccctattttgagtaatcaacttaaaataggggtgtttctatgttatttccaaatatttttttaatcgtgtaatgtgcttatttattggtcttttttaacttctgtcctactcacacactagggcagccaaaagtctgaatacacatagttttctttcttccctctgtttcttcaaacttttcatttatgct

SEQ ID NO: 27536 - DNA, 260 bp, Unknown
  Description of Unknown: RightRegion for integrase B1537 sequence
aggcagattaccgaaatagtgtttaaaaatggattatcgcacaaattattatacagataaaaagtccccggaacggttgattttccggggtttctttatgaaataatatcaatttataaaacatctactaccgcgttcatctgacaaccgaaagtcgtcacgcaaaaagtcagatctcttccgatctcctgtgctttttcacttacatacttccgcgctttggcaatgtaatagtactgtctctccggctcggtgaccgg

SEQ ID NO: 27537 - DNA, 260 bp, Unknown
  Description of Unknown: RightRegion for integrase B1538 sequence
tttgatttgacaaagtatcaggtagaaataccgaaagaagaattagaaagaaaagactaaatagaagaatcgaaggcagttttgcagctgttttcgatttttcgtttctaaatgtcgcacaagcatcggtggcgtggggtttcagcggcttcatgcttaaaatttaaccccatacccctataaacgaaaaaaaggctactctggttagaatagccttcatttcattagtagaagtattgattaattctgctgctgaatct

SEQ ID NO: 27538 - DNA, 260 bp, Unknown
  Description of Unknown: RightRegion for integrase B1539 sequence
aacaaagtaaccaaaataaaatttataaacggtatcgaacattcatttattcgtaaataaaaataacacccctattttgagtaatcaacttaaaatgggggtgtttttatgttattttcaaatatttttttaatcgtgtaatgtgcttatttattggtcttttttaacttctgtcctactcacacactagggcagccaaaagtctgaatgcacatagttttctttcttccctctgtttcttcaaacttttcatttatgct

SEQ ID NO: 27539 - DNA, 260 bp, Unknown
  Description of Unknown: RightRegion for integrase B1540 sequence
tacaactataagaattattatggatgtatttcatgccaattcaggagaaatatttcttgatggtaaaaaatttaatccaaaggagcatcttataggatatctgccggaagagagaggattatatcctaagaaaaaagtatcagaacagcttgtgtatcttggcaggttaagaggcttatctaaggctgaagctaagaagaatactgataaatggcttaaaagactgcaggtatcacaatatacagatgtgaagttagaga

SEQ ID NO: 27540 - DNA, 260 bp, Unknown
  Description of Unknown: RightRegion for integrase B1541 sequence
cactttgatgagagtgcttacaactgttttaaaacaaacggaaggaatggtttcccttgatggaattctgtataacgagggaaattatgagaaaatacagaaaaagattggttatcttccacaggaaatcgacttatatccgaatcttacggtgaaagaatgtcttgtatatatggggggactgtcaggagtagccagaaatgacctcgaacaaagaattacctattatctggaaaagacttctcttacagagcatcaga

SEQ ID NO: 27541 - DNA, 260 bp, Unknown
  Description of Unknown: RightRegion for integrase B1542 sequence
aagcgtattacagagatcgtttttaaaaacggattaacgcatacattattatacagatagaaaaagccccggaaatccaatgtttccagggcttttgtatgtttcgtatttaatgcttaataattcacggataccgggttcatctgacaaccgaatgttgtgacacagaatgtcagcggacgtcccagttcttcggattcgcgctgtacataagcttttgctttttcgataaaataatactgacgggcagtatcatccgc

SEQ ID NO: 27542 - DNA, 260 bp, Unknown
  Description of Unknown: RightRegion for integrase B1543 sequence
ttcaccgttgagcgcaaggaacagcttaatatccagcataaagacattaaaactgcataaatcaagattccgaggggcgaaatttcccctcggttgtaaaagaaatattttcttataataatgatattacgcagatgcaatgctgttcaacattctttcctatatgtccaacaagttattaggtgagggcaacaccgttgcatcaatagacgagctatatttgttcctttcaaatctcacagcaattgagtatatacgca

SEQ ID NO: 27543 - DNA, 260 bp, Unknown
  Description of Unknown: RightRegion for integrase B1544 sequence
aggcagattaccgaaatagtgtttaaaaatggcttatcgcataaattattatacagataaaaagtccccggaacgattgattttccggggtttctttatgaaataatatcaatttataaaacatctactaccgcgttcatctgacaaccgaaagtcgtcacgcaaaaagtcagatttcttccgatctcctgtgctttttcgcttacatacttccgcgctttggcaatgtaatagtactgtctctccggctcagtgaccgg

SEQ ID NO: 27544 - DNA, 260 bp, Unknown
  Description of Unknown: RightRegion for integrase B1545 sequence
aggcagattaccgaaatagtgtttaaaaatggcttatcgcacaaattattatacagataaaaagtccccggaacggttgattttccggggtttctttatgaaataatatcaattttatcaaacctctactaccgaggtcatctgacaaccgaaagtcgtcacgcaaaaagtcagatctcttccgatctcctgtgctttttcgcttacatacttccgcgctttggcaatgtaatagtactgtctctccggctcggtgaccg

SEQ ID NO: 27545 - DNA, 260 bp, Unknown
  Description of Unknown: RightRegion for integrase B1546 sequence
ggaaaacatcaagaaaaacttcggttttggctgtatgcgcctgcccttgaaggatggtgagatcgatctggctgagaccagccggatggtcgattattttctggagcagggcttcaactacttcgacacggcccacggctaccttcagggccggagcgaaacggcgctgaagacctgcctgaccagccgccacccccgcgacagctacatcctgaccgacaagctgaccggcagtttcttcaaaactgaggctgacatcc

SEQ ID NO: 27546 - DNA, 260 bp, Unknown
  Description of Unknown: RightRegion for integrase B1547 sequence
tacaactataagaattattatggatgtatttcatgccaattcaggagaaatatttcttgatggtaaaaaatttaatccaaaggagcatctgataggatatctgccggaagagagaggattatatcctaagaaaaaagtatcagaacagcttgtgtatcttggcaggttaagaggcttatctaaggctgaagctaagaagaatactgataaatggcttaaaagactgcaggtatcacagtatacagatgtgaagttagaga

SEQ ID NO: 27547 - DNA, 260 bp, Unknown
  Description of Unknown: RightRegion for integrase B1548 sequence
cactttgatgagggttcttacaactgttttaaaacaaacggaaggaatggtttcccttgatggaattctgtataacgagggaaattatgagaaaatacagaaaaagattggttatcttccacaggaaatcgacttatatccgaatcttacggtgaaagaatgtcttgtatatatggggggactgtcaggagtagccagaaatgacctcgaacaaagaattacctattatctggaaaagacttctcttacagagcatcaga

SEQ ID NO: 27548 - DNA, 76 bp, Unknown
  Description of Unknown: RightRegion for integrase B1549 sequence
taccacattgaaaatgttgactggtatgatgaaaccaactgcaggaaagatttactttgatggaaaacttttggat

SEQ ID NO: 27549 - DNA, 260 bp, Unknown
  Description of Unknown: RightRegion for integrase B1550 sequence
tcactacccacgtcgttgagtattccggctacttctctgtacggcatggaacagcgctgagaaaggtagcgcagcgaagctccgagctcgccgtgaggacctccatacttcaaatgcgtataattagaggcggaaataaatttttatagcagtattaggccgtgaaaatacgatactttcaacgatttcccccagagccgcccttttaatagcgtcttcagaatcggaggataaaaggtcgactatctcagcgaattgcc

SEQ ID NO: 27550 - DNA, 187 bp, Unknown
  Description of Unknown: RightRegion for integrase B1551 sequence
aggcagattaccgaaatagtgtttaaaaatggattatcgcacaaattattatacagataaaaagtccccggaacggttgattttccggggtttctttatgaaataatatcaatttataaaacatctactaccgcgttcatctgacaaccgaaagtcgtcacgcaaaaagtcagatttcttccgatct

SEQ ID NO: 27551 - DNA, 260 bp, Unknown
  Description of Unknown: RightRegion for integrase B1552 sequence
cgctcggggtatcagggcacgtatgaggtgcggtactgtgtgcggtggcaccttgggtagcagacgaaaaaacagcaaacctgcaaggtttgctgttttcttttttcaaaacttttcttttattatttcccgcttatcttgacagaaccgccatttcgcagtacgataaggccagaaatcaaaatcaccctaagtattacttcctttcgtttgatgagatacacatctcacaggcgcaggtatcccgtttggagaagggc

SEQ ID NO: 27552 - DNA, 260 bp, Unknown
  Description of Unknown: RightRegion for integrase B1553 sequence
cacaaccatgaaaatgctgttggggttgaccaatcccacaaaaggcagctttaccattgatgggaaacagtttccgcaggatcggattgccattctcaaagagatcggctctttcatcgaagcgccgtctttctacgcgaatctcaccgggcgggaaaatcttgacattatccgccgcattttgggactgctgaaagcggatgtggaagatgctctggaactggtagggctgaccgagtttggcgaccggctggcaaaac

SEQ ID NO: 27553 - DNA, 260 bp, Unknown
  Description of Unknown: RightRegion for integrase B1554 sequence
aaaaacgaccactatgaaaatgctacttggattgacaaagccaacttccggcgaagttaaaatatggggaaagtctttgcaggggaatgaaaagaaattgttgccccgtatcggtagtctgattgagtcgcccggtttttaccctaatttgactgctacggaaaacttacaaatttttgctaccttacggggagtaccaaaccgccacgcaatcaaagacgctttagatttggtgggattgccttataaagacaaaaaac

SEQ ID NO: 27554 - DNA, 260 bp, Unknown
  Description of Unknown: RightRegion for integrase B1555 sequence
aacccttatgagaatgattgcagatattatgacaccaaccagcggaaccatttactttgatggtactgatattcgtaaaatgggaaaaaactaccgcaatttgtttggatttttaccgcaagactttgggtataatcgagattttactgttaaggattatctcgaatatatggctgctttaaaggatgtccctgcaagagaaaccagcaggaaaatcaattatttgttggatattcttactctttcagatgtaaagcaca

SEQ ID NO: 27555 - DNA, 189 bp, Unknown
  Description of Unknown: RightRegion for integrase B1556 sequence
taccacattgaaaatgttgaccggtatgatgaaacccactgcaggaaagatttactttgatggaaaactttgggataggaaagatttatcaaaaataggagcgttaattgagaatccgcctatttatgaaaatctttccgccagagagaatttgaaggtaagacaattattgcttggtacagatgaaaa

SEQ ID NO: 27556 - DNA, 260 bp, Unknown
  Description of Unknown: RightRegion for integrase B1557 sequence
aaatttcaggctacttctaccattactatcagttcctcgctgctgtcaggatgccgctgaccgtgtttaccgcctggatctgggtgtctttggtgacgtgggcgtaggtgtccagcgtgaatccggcgctgtaatggcccatcattccagagactgttttcacgtttcccccgttctgccgggcgatacgccgctggatacggagcgtttttctctggaagtcaatgcctgtccattttaatcccaacagctctccccgc

SEQ ID NO: 27557 - DNA, 260 bp, Unknown
  Description of Unknown: RightRegion for integrase B1558 sequence
agctctgccggtggggcgccccgtaaaaagagctttaatatcaaacatcgagtgaagtgagccgctaacatgaaccttccgctaatagaaatctgctattagaacggtgattgcccgtttacgggctgtaggcaagtgacgtaagcggaataaagttccgtgcatcccctgggacgcttgtcagtaatagccccttatagagtctccttatctcccctccttagccggtgggggttgactcttttcagctttcgaacttc

SEQ ID NO: 27558 - DNA, 260 bp, Unknown
  Description of Unknown: RightRegion for integrase B1559 sequence
gaaacgattacagtccttgattacggcttgattgccgcagaactatcaatcgttcgctaaaaagtaaaagggccactaggcgcaatgcctagtggccctttttggcttacttgctcgcctgcttaatgatctgatccgcgccggtcgcagccaggccggaaacaatgcccacggccagggcggtcaggggatcggcggccggaaagtccggcacgttgatgtacatggcggccaccccccggcaggccgccatgggcacc

SEQ ID NO: 27559 - DNA, 260 bp, Unknown; identical to SEQ ID NO: 27521
  Description of Unknown: RightRegion for integrase B1560 sequence

SEQ ID NO: 27560 - DNA, 260 bp, Unknown
  Description of Unknown: RightRegion for integrase B1561 sequence
ggaaaacatcaagaaaaacttcggttttggctgtatgcgcctgcccttgaaggatggtgagattgatctgactgagaccagccggatggtcgattattttctggagcagggcttcaactacttcgacacggcccgcggctaccttcagggccggagcgaaacggcgctgaagacctgcctgaccagccgccacccccgcgacagttacatcctgaccaacaagctgaccggcactttcttcaaaactgaggctgacatcc

SEQ ID NO: 27561 - DNA, 260 bp, Unknown
  Description of Unknown: RightRegion for integrase B1562 sequence
ggccatgtcacgcagatcaccttcgtcaacggcgaaacccatacattcctctaccactgaaaaaaaagccttcccgcatagggaaggcttttactgtcacatcattcttttttctcggcctcagcctcgcgctgtcggtcgagctcctcgagttctttgagctcttcggctcgctccgcgtctggttgcttgcgtgagcagaacattgcatcgccaaacgagaaaaagcggtacttcatctcgacggcggtcttgtaggc

SEQ ID NO: 27562 - DNA, 260 bp, Unknown
  Description of Unknown: RightRegion for integrase B1563 sequence
cccttggaaactgaaacaactgtcgaggtttgcagtagttatatcagggcggataaataacctgcctacgtttcttattctcaagcgagctcccaacgcctcacaaaaaggcgacaaaaaactctcagaaatttagtaaatagcataaaggccgcccagcacggacggcctttgtgcttttattctttgtacgctccaatgctcctaaagaaagccgattcttgaatgtattgcacatcctctgcgattgaccgcacaga

SEQ ID NO: 27563 - DNA, 260 bp, Unknown
  Description of Unknown: RightRegion for integrase B1564 sequence
aagatgatcgaacagcaggaacgtcagatgtccggaagttcccagaacgaacagtactgagcattctgatcaataacctaaactcctgaattattcaggataaagacagtgcagctccaaaatctgtaatcagattccggactgcactgtttttttgtataaattttcaagaaataattgccaattttttgttgacttgttataatatatgagaatagctatattataactaaaaaaccagtaatgtattggtgaaaatg

SEQ ID NO: 27564 - DNA, 260 bp, Unknown
  Description of Unknown: RightRegion for integrase B1565 sequence
cgccgtggcaggcatttcccgtcaagttttttttgtaaacacacaaagtcaccgctgtgataatttgtgtgtcacttttacaaattcaggggcgtgcccctgcacccgatccgctttacttatgtaaggcggtttttttattgccgctcatggatcattatttataaacccaactttgttatttcaccatggcagacgctgatataatagaaaaagagtgcattaccacctcagataatgcactcttatattttacccta

SEQ ID NO: 27565 - DNA, 260 bp, Unknown
  Description of Unknown: RightRegion for integrase B1566 sequence
gaggcttctctaccaatatcggtcaagaggcctttgagctcaggatacggcatgctgtagcgctggctgagataccgcagcgaagcgccgagttcgccgtccgggcctccacacggaaaaaaccgataacacgtctaacgcttcatttacatgcaacatatcatcccctcatgcaaaagtcaaggacagcgcgtttgcgctgtcctttttctcattttgcgtttaattcgttgtagactttttgacctattgccacgctg

SEQ ID NO: 27566 - DNA, 260 bp, Unknown
  Description of Unknown: RightRegion for integrase B1567 sequence
atcaaaagccttatggctaaaatcaaagcaaatccacaggaatacaggcttaccgcctaaaaaagagaaaacggtgcaaccccgattgtggggttacaccgtatccctgccaaaaaacatccttatggggctttggcaaaggcaggcctccttttataatatatggggctttgcggcggggggggggagatcactccaccacgggaagctttttcaccacggcggcgcagcgggggcacaggtcggggtgctgggcatcg

SEQ ID NO: 27567 - DNA, 260 bp, Unknown
  Description of Unknown: RightRegion for integrase B1568 sequence
cccttggaaactgaaacaactgtcgagacggtagtattgatgtcaagaaaagataaataagtgccagaaaatggtgtatttccgggcctttttcggaagttgggattagaagcctaacttctgaaaaggcttggttgttttatatggaaacatatctattgtgaaaatgtgtgtcaggttgtgaattcggattagatgtcgcgatttgagacagtggattagatgtcaggcattttgaagtgatttttgaaagaggaaaa

SEQ ID NO: 27568 - DNA, 260 bp, Unknown; identical to SEQ ID NO: 27565
  Description of Unknown: RightRegion for integrase B1569 sequence

SEQ ID NO: 27569 - DNA, 260 bp, Unknown
  Description of Unknown: RightRegion for integrase B1570 sequence
attactttcaaaaatggaatagtccatcactttatatacaaaaatgaacacaaaatataaaaaatacccaagtgactttttcttacagccacttgggtttcattatatcatatttgattatacacacggacaacctagagtataaaaactgactgttttcttcatttaaagttcattccttacaatatatttaggttttattttgtctcctatagacattacatttcttacgaaatcaattacttgtctattttagcacg

SEQ ID NO: 27570 - DNA, 260 bp, Unknown
  Description of Unknown: RightRegion for integrase B1571 sequence
atttatatggatgcgaaccgagcgtttccggcgaattttggagattttagggagtattgaccccaatcggttcgcatcccttgcgatcatatactcttttcaaaccgcattaccttaccgtcccgccggtgacggaggaactcctcaaggccttgccggtactggtgtttgccgtctttttcagcgatgaccgcaaggacattctgcccgcggccatgtccgtcggcatcggcttttctattttggagaacaccgccatc

SEQ ID NO: 27571 - DNA, 260 bp, Unknown
  Description of Unknown: RightRegion for integrase B1572 sequence
tgttgttttctcccgctgcttttttctgacccaaacgctgaccccaacgggagcggatagcggaaaggtctataccgcacgggagaggatgctccccatcgtttgcgccgccttgagctgtgcgtcggtggtgacgtgggcataggtgtccagcgtgaagcctgcggagtagtggcccagcatcgaggacaccgggatgcagcaagatagccccgcagatgtactggcagatccgtcatgccgccaatcaggcgtaagac

SEQ ID NO: 27572 - DNA, 109 bp, Unknown
  Description of Unknown: RightRegion for integrase B1573 sequence
ggccgcgtcacgcagattaccttccgcaatggcgaggtgcacaccttcctctatgcatgaaaaaagccttcccgcagttgggaaggctttcttgctatatcattctttt

SEQ ID NO: 27573 - DNA, 109 bp, Unknown
  Description of Unknown: RightRegion for integrase B1574 sequence
attactttcaaaaatggaatagtccatcactttatatacaaaaatgaacacaaaatataaaaaatacccaagtgactttttcttacagccacttgggtttcattatatc

SEQ ID NO: 27574 - DNA, 109 bp, Unknown
  Description of Unknown: RightRegion for integrase B1575 sequence
ggccatgtcacgcagatcaccttcgccaatgacgaaatccacacattcctctaccactgaaaaaaagccttcccgcgcagggaaggcttttactgtcacatcattcttt

SEQ ID NO: 27575 - DNA, 260 bp, Unknown
  Description of Unknown: RightRegion for integrase B1576 sequence
attactttcaaaaatggaatagtccatcactttatatacaaaaatgaacacaaaatataaaaaatacccaagtgactttttcttacagccacttgggtttcattatatcatatttgattatacacacggacaaccgcaatgtgataaatgcaacttttttattcatttttattctctctttctatataaaaaagacgaatattgagtattttaaaaatattatatattcgtcctatattttatcttgatgcttttccttc

SEQ ID NO: 27576 - DNA, 260 bp, Unknown
  Description of Unknown: RightRegion for integrase B1577 sequence
gaactgacgattactttgcgccttgaaaaaggtagccacgaagccgtttttgtcgcataaatcaaagggaaacgcccaaccacacggaagggcgttttattgtttattcgtttttgttatgctcggtcttgtcgggtattttctctttattgaccttctcttccgccgccttgaaaagaaaatcaagaattttgcggaacagagtatttatgggcgtaattttgaaaatattataaaaagtctgattgagcgcatatatc

SEQ ID NO: 27577 - DNA, 260 bp, Unknown
  Description of Unknown: RightRegion for integrase B1578 sequence
ttccgttttttggtactgcttttttctgacccaaacgctgacccaaacgggagcgggtagcggaaagcatcagacggcacgggataggatactccccatggtctgggcagctttgagttgggcgtcggtggtaacgtgggcgtaggtgtccagcgtgaagcccgccgagtagtgaccgagcatggaggacacggtcttgacgtccacgccgttttgcagcgccatggtcgcgaaggtgtgcccttacggtataattacga

SEQ ID NO: 27578 - DNA, 260 bp, Unknown
  Description of Unknown: RightRegion for integrase B1579 sequence
atcaaaagccttatggctaaaatcaaagcaaacccgcaggaatacaggcttaccgcctgaaaaaagagaaaacggcgcaaccccgattgtggggttacaccgtatccctgccaaaaaacatccttatggggctttggctgatgaggctccacctttttttaacttcacaggaaggggcattcccgcagacgggcgctcactcatgcagcttctgcgaggcaatgtagagcgggatcgccgcaagctgagagacgaccgac

SEQ ID NO: 27579 - DNA, 260 bp, Unknown
  Description of Unknown: RightRegion for integrase B1580 sequence
ggcagcgagcccttgcgtggctggtgttggatgtgcagggcggcgattgccccggggtgacgctggcggatacggcggcggatgggaatccggaatggcagaatacggatgctgaaccggcggaaacgcacgttttcctgctcagctacgcgcaggtgatgcagtatcttccggagcaggagcagcggaaagtcagcggcacggaatatgcccggtcacggggcgcgaagtttctgggctttaccactatcggcatcggc

SEQ ID NO: 27580 - DNA, 260 bp, Unknown
  Description of Unknown: RightRegion for integrase B1581 sequence
acaaaacttatcgcgcactcactttgctgctcctcgcttccaaaccgaagcccagcgtagcgggttcggtttggtttttggcacagacctgtagccactgcatcttttttgtccacacaatacacactcgggagatctcgttttgagatttgccgagttttttcatactttcaggatgcgcgatagtacacactcttgtctccctccggatgcaggaagtcgaagaattgtgtgacgctgatcttgaattccacttcaat

SEQ ID NO: 27581 - DNA, 260 bp, Unknown
  Description of Unknown: RightRegion for integrase B1582 sequence
aaggtcatggagatcaccttccgaaatggcatgacacacaccttccaatacgacgcataagaaaagcccgcctccttctggaagcgggctttcccatacgttcatggcctggatggctcattcgttgtcgtggtcatgcatgtgctccagctcgtagagctctttatctcgctcttccttcggttgttgagctgaaatatacattgcatcgccgaaggagaagaagcggtacttctgttcgacggctgtcttgtaggcgc

SEQ ID NO: 27582 - DNA, 260 bp, Unknown
  Description of Unknown: RightRegion for integrase B1583 sequence
aagatgatcgaacagcaggaacgccagatgtccggaagttcccagaacgaacagtactgagcattctgatcaataacctaaactcctgaattattcaggataaagacagtgcagctccaaaatctgtaatcagattccggactgcactgtttttttgtataaattttcaagaaataattgccaattttttgttgacttgttataatatatgagaatagctatattataactaaaaaaccagtaatgtattggtgaaaatg

SEQ ID NO: 27583 - DNA, 260 bp, Unknown
  Description of Unknown: RightRegion for integrase B1584 sequence
ctccgtggtgggcatttcccgtcaagttttttttgtaaacacacaaagtcaccgctgtgataattcgtgtgtcacttttacaaattcagggacttgtccctgcacccgatccgctttactttatgtagggcggttttttattgccgctcatggatcattatttataaacccaactttgttatttcaccatggcagacactgatataataaaaaaagagtgcattaccacccatgataatgcactcttaaattttacccta

SEQ ID NO: 27584 - DNA, 260 bp, Unknown
  Description of Unknown: RightRegion for integrase B1585 sequence
aagcgtattacagagatcgtttttaaaaacggattgacacacacattattatacagatagaaaaagccccggaaatacaatgtttccagggcttttgtatgtttcgtatttaatgcttaataattcaaggataccgggttcatctgacaaccgaatgttgtgacacagaatgtcagcggacgtcccagttcttcggattcgcgctgtacataagcttttgctttttcgataaaataatactgacgggcagtatcatccac

SEQ ID NO: 27585 - DNA, 260 bp, Unknown
  Description of Unknown: RightRegion for integrase B1586 sequence
aagcgtattacagagatcgtttttaaaaacggattaacgcacacattattgtacagatagaaaaagccccggaaatccaatgtttccagggcttttgtatgtttcatattgaatgcttaataattcacggataccgggttcatctgacaaccgaatgttgtgacacagaatgtcagcggacgtcccagttcttcggattcgcgctgtacataagcttttgctttttcgataaaataatactgacgggcagtatcatccgc

SEQ ID NO: 27586 - DNA, 260 bp, Unknown
  Description of Unknown: RightRegion for integrase B1587 sequence
aaccagattcaagttgtcggtttgatttttatccaaaccaaaagacacgccttgccgtaacggtgggcgtgtcttttatatgtttgtgcgttttattttttgtacatcccctgcagcacgccaacctccgccgcatcatcgatcatccggcggtgtaaataatcgtacagggccagcatttccgccggaggttcgccgtgcatcctccggtgattttcgatccggcgcacgacgtctttgtgcagcatgttcatgtgatt

SEQ ID NO: 27587 - DNA, 260 bp, Unknown
  Description of Unknown: RightRegion for integrase B1588 sequence
ctggaagcaccggaatccctacaaacccaggacacagagaagccccggcaggcatcgtaaacacgatgacctgccggggtatcccaggaatcacttgttacccctgtgagggggaaacaaaaggctcggggctgttttttgctttatccagtccgcgtcataaccgaggacaagacagcaatattctttcccgctggtattgaactgcgaggatgccatatatccgccagagtcgctgtctaacgtctgcgatacccggc

SEQ ID NO: 27588 - DNA, 260 bp, Unknown
  Description of Unknown: RightRegion for integrase B1589 sequence
ttcatttctgcccaacgcacaaagtatcttcggccggaaatatttgcgccgcaaatgtgaaaagcgccggatgcttcgcacagcgcgccgaatgcgctgtttttctgcacgccggtgcatttttcacgcaggacatacaaacacattgcaatattctgccctatgcggcagcgcgaacgccccaagaattaagactaattaagatgtcgccgtatgcttttcttgctataatattggccgcagaacaaaaaataccatca

SEQ ID NO: 27589 - DNA, 260 bp, Unknown
  Description of Unknown: RightRegion for integrase B1590 sequence
ctgatgagtgggatcacgcacgagttcgtatactgcaatgaaacaaaaaaagagggctagaaatcaagcgatttctagcctttctgtgtatgtgaaaatcctgcctccaaagcactttgctttaggatatgttgttgccgcattgtcaaaatacgccatcgtcttcctccttgctcagcagagtttttttatgacttccatcagtatctggcgcttttcttgttctgagatcgagtgccccatagcatcaagcgaggccg

SEQ ID NO: 27590 - DNA, 260 bp, Unknown
  Description of Unknown: RightRegion for integrase B1591 sequence
gatttttcttgtttgcagttggtattgtcgcggaatgaattcaaaaaggaggatgcatgacccatggtcgatcatatgcttgtacgtggagcaaaggtccacaacctgaaaaatattgacgtggacattccgctgaatcagatcgtcggcatcgcgggcgtgtccggttccggcaagtcgtcgctggcgctgggcgtgctgtatgccgagggctcgcgccgctatctggaggcgctgtcgacctacacgcgccgccggat

SEQ ID NO: 27591 - DNA, 260 bp, Unknown
  Description of Unknown: RightRegion for integrase B1592 sequence
aataccgttgaaactgtcgtgaaacttgtgcggaaaatcaaggattctgaggaaatgtaaggttgaaaataggctttttgcctacctcctgcctacccttttttaagatggtaggcaggatttttctttttatgaagtggcttgcgtgaacagcttcacagcatcgtccttcattttgtccgtgttaaagacgtagcgctccatagtggttttaagatctttgtgccccagtcgttccattacagtcttaggttgtgcgc

SEQ ID NO: 27592 - DNA, 260 bp, Unknown
  Description of Unknown: RightRegion for integrase B1593 sequence
ctgatgagtgggatcacgcacgagttcgtatacggcaatgaaacaaaaaaagagggctagaaatcaagcgatttctagcctttctgtgtatgtgaaaatcctgcctccaaagcactttgcttttgtgaaatgtgtcagctcgtcgaaatacagccagtggatttccgcgccctgatatttcagcagcccctgcccctcgtcgctcaggtggcagaaatggatgacgcttccgttgctcagcctcagctcgtgcgcactgg

SEQ ID NO: 27593 - DNA, 260 bp, Unknown
  Description of Unknown: RightRegion for integrase B1594 sequence
acaatagtcgaggtgattgtttgtttgtcacgcgacccaggcggcagcagtaacggctaaagaataagaaaaggcagggcgcaagccccgccttttttagttttcaggagcgaacagccagtgaatggttatatcttccccatcaatatcaatgcggccaatcagagaatgaacaagggcgcgcttttgctccggcgttccgttttcgatgaccgccgaggcaccggccagcatttcctgcgcaacggccagcctgtcca

SEQ ID NO: 27594 - DNA, 260 bp, Unknown
  Description of Unknown: RightRegion for integrase B1595 sequence
aagcgtattgcagagatcgtttttaaaaacggattaacgcacacattattgtacagatagaaaaagccccggaaatccaatgtttccagggcttttgtatgtttcatattgaatgcttaataattcacggataccgggttcatctgacaaccgaatgttgtgacacagaatgtcagcggacgtcccagtttttcagattcgcgctgtacataagcttttgctttttcgataaaataatactgacgggcagtatcatccgc

SEQ ID NO: 27595 - DNA, 260 bp, Unknown
  Description of Unknown: RightRegion for integrase B1596 sequence
gctacaagcaataaacaacattcaaataatactgcaaccagagagaaacaacgcatgtagaatgcattgctgtgttatatttaaaataaactctacataagaaaaaatattaaaatagataaattcaagaaataaagaggagaatttatattacgaaaaaagtttatataattatataagtactaaaaagtagatattttaaaatactaaatctaaaatatctacttttttctaatgtcaatgttacctttattaaaaaa

SEQ ID NO: 27596 - DNA, 260 bp, Unknown
  Description of Unknown: RightRegion for integrase B1597 sequence
gggcacccgacggcgcataaggcgcttgtgccttgcggcgcggcgtgccgcatggtataatacatgcagcttttggaaaggcgggcacgggtgcctgtctttcataacactgcaaggagtctgccatgtcgataagaaaacgggccgccgccgcgcttgccgccctgctggggctctgcgtgctgctggccatccttgtaatggcctgtgccccgcgcaccgaaaccgccgatgtcgcgatcctcatgtaccacgccttc

SEQ ID NO: 27597 - DNA, 260 bp, Unknown
  Description of Unknown: RightRegion for integrase B1598 sequence
acaatggtcgaggtgattgtttgtttgtcacgcgacccaggcggcagcagtaacggctaaagaataagaaaaggcagggcgcaagccccgccttttttagttttcaggagcgaacagccagtgaatggttatatcctccccatcaatatcaatgcgaccaatcagagagtgaacaagggcgcgcttttgctctggcgttccgttttcgatgaccgccgaggcaccggccagcatttcctgcgcaacagccaacctgtcca

SEQ ID NO: 27598 - DNA, 260 bp, Unknown
  Description of Unknown: RightRegion for integrase B1599 sequence
gacaacttcacagtgaatgtcctgggctacaaaatcatcgatatagatacgcaattttgatacagaggtacctgtatctgtatcaaaattgcgtattattcctaaaaaaagaggggagggctatagccctcccctcttttttacgctttcatcaatgctccacaatccggagcaaattcattgccggctgcactaccgaatggatgtagccgtttcctccatcttcctcataatccttgaacagttcccaaaacgcctct

SEQ ID NO: 27599 - DNA, 260 bp, Unknown
  Description of Unknown: RightRegion for integrase B1600 sequence
acgctgctggaatatctgagctccacccggcagcgaaaggaaacaccgaagataaaataagaacaaagcgcggagaacggtataaaagccgctctccgctttcccagcagcaactccttgatctccttggagatgatcgcctgaaaatcgcgcacgatggtggggagcagttccctgcaccctcaaaggactttctctgttgtcattctgcctgtatctcttccaccagcggcagatagtcgacacagtatttccggtac

SEQ ID NO: 27600 - DNA, 260 bp, Unknown
  Description of Unknown: RightRegion for integrase B1601 sequence
aaagacgacaaccgtaaaattgcttaccggagtcctgagcccgtctggaggatcatgtgaaattatgggtgtcaatcctaatattcagccagaaaaagtgcatctccttgcagggattgtgactgaacacgcacagatgtatgacaatctgactggtattgaaaatctgatgttttatgctgcggcttttggcatggaacaaaaaggaaaatggcgtgctgagtcactactcaaggaattagagttgacagaagcgaaag

SEQ ID NO: 27601 - DNA, 260 bp, Unknown
  Description of Unknown: RightRegion for integrase B1602 sequence
ctgatgagtgggatcacgcacgagttcgtatacggcaatgaaacaaaaaaagagggctagaaatcaagcgatttctagcctttctgtgtatgtgaaaatcctgcctccaaagcactttgcttttgtgaaatgcgtcagctcgtcgaaatacagccagtggatttccgcgccctgatacttgagcagcccttcgccctcgttgctcaggtggcagaagtggatgacgctcccgttgctcagccgcagctcatgcgcgctgg

SEQ ID NO: 27602 - DNA, 260 bp, Unknown
  Description of Unknown: RightRegion for integrase B1603 sequence
aaagacgacttgcctgaagatgatcagtggacttgcaagaccgacagccggagagattgagatgttcgggtgtaaaggaaaagaactggagaggattcgttctcgtgtggggtgtctgattgaagcaccggggctgtatggcaacatgaatgcatatacaaacctgaaaataaaatgtgaattgtttggtattcggaaaaagggatacatcgaagatatcttagagacggtcggactggaaggtgtcggaaagaaaaaaa

SEQ ID NO: 27603 - DNA, 260 bp, Unknown
  Description of Unknown: RightRegion for integrase B1604 sequence
ctgatgagtgggatcacgcacgagttcgtatactgcaatgaaacaaaaaaagagggctagaaatcaagcgatttctagcctttctgtgtatgtgaaaatcctgcctccaaagcactttgctttggtgaaatgcgtcagctcgtcgaagtagagccactggatctccgcgccctgataggtgagcatgtccttgccctcgttgctcaaatgacaaaaatggagcacactcccgttgaccagtctcatccggtgtgtgctcg

SEQ ID NO: 27604 - DNA, 260 bp, Unknown
  Description of Unknown: RightRegion for integrase B1605 sequence
aaaaacgaccactatgaaaatgctacttggattgacaaagccaacttccggcgaagttaaaatatggggaaagtctttgcaggggaatgaaaagaaattgttgccccgtatcggtagtctgattgagtcacccggtttttaccctaatttgactgctacggaaaacttacaaatttttgctaccttacggggcatacccaaccgtcattcaattaaaaacacattggatttggtaggattgccttataaagacaaaaaac

SEQ ID NO: 27605 - DNA, 260 bp, Unknown
  Description of Unknown: RightRegion for integrase B1606 sequence
gttgtcccgaatgcaaaggcatggttcaaatctgaaaaaagcacaacaaagaccgcatagattgtggtatactatttaaggtagcaaggcacctgctgttttatcagtagcaggtgcaatgatataaaaacattcataaggagggcttgattatggctgatcagactttaccattgaatgttagttatgagatgaaagcagacgatgaaagacagaattgtgtaggaatggagagcaacgaagaattgtgttcttcttca

SEQ ID NO: 27606 - DNA, 260 bp, Unknown
  Description of Unknown: RightRegion for integrase B1607 sequence
ctgatgagtgggatcacgcacgagttcgtatactgcaatgaaacaaaaaaagagggctagaaatcaagcgatttctagcctttctgtgtatgtgaaaatcctgcctccaaagcactttgcttttgtgaaatgcgtcagctcgtcgaagtacagccagtggatttccgcgccctgatacttgagcagcccatcgccctcgttgctcaggtggcagaagtggatgacgctcccgttgctcagccgcagctcatgcgcgctgg

SEQ ID NO: 27607 - DNA, 260 bp, Unknown
  Description of Unknown: RightRegion for integrase B1608 sequence
tattcacttgaaactaaatctcccaaaatagttaatgactgctcaggctgcaatcgctgaaaagaactaatcactacttgtaaaagtattttagggggttgcccatatggacagcccccatttttatatttattttgagtattcattcgaatactctttttttatattgtgccggttacagtaatagttgaaactccaggtgttatgctaactgcacctgtcgtgtcatcccttgtagttgtagcagaaggaactgtaat

SEQ ID NO: 27608 - DNA, 260 bp, Unknown
  Description of Unknown: RightRegion for integrase B1609 sequence
ctgataagtgggatcacgcacgagttcgtatactgcaatgaaacaaaaaaagagggctagaaatcaagcgatttctagcctttctgtgtatgtgaaaatcctgcctccaaagcactttgcttttgtgaaatgcgtcagctcgtcgaagtacagccagtggatttccgcgccctgatacttgagcagcccttcgccctcgttgctcaggtggcagaagtggatgacgctcccgttgctcagccgcagctcatgcgcgctgg

SEQ ID NO: 27609 - DNA, 260 bp, Unknown
  Description of Unknown: RightRegion for integrase B1610 sequence
ctggaagcaccggaatccctacaaacccaggacacagagaagccccggcaggcatcgtaaacacgatgacctgccggggtatcccaggaatcacttgttacccctgtgaggggggaacaaaactactcccgttgttgtcttaatacgaattctttttgaaaagcaaattccccaaaaacgaaatagtcacaattatacagaaagcagagatatggaagaataaacgaaacggaaatgcgcatatccgcaatatattacgc

SEQ ID NO: 27610 - DNA, 260 bp, Unknown
  Description of Unknown: RightRegion for integrase B1611 sequence
gttgttcctaatgcgaaggagtggtttaaggctgaaaaaagtgcaatacagccggcgtagattgtggtatactaaggtaacaaggcacttgtttctatatggtagggacaggtgccctgatataaaaacattcataaggagggcttgattatggctaatcagacacaaattttgaatgttagtgatgagatgaaattaaacgataatgtgcagatgaaaaatgtgaaagaacaggaagaaaatatgtattcttcttcatc

SEQ ID NO: 27611 - DNA, 260 bp, Unknown
  Description of Unknown: RightRegion for integrase B1612 sequence
aaggtagataatgcgaaagcagactacagagcaaatcagaaagggaaaaaggtgtcataaatggagcagaataaggcagagcgattgaatgaaaatgtaactgaaaaaatgtgttcatcagacggtaacgtggttggggaaatgtgttccccagccgatgccgacacacgtagaaagtgcagtaaaacttgtgagggaataaggggatttgcaggattttaggtgcaaagttcagtcgttttgccacccatttgccaccc

SEQ ID NO: 27612 - DNA, 109 bp, Unknown
  Description of Unknown: RightRegion for integrase B1613 sequence
agcatctgtacagatgccgcgaatcgagacagcggagcactttattttatggttttgtgaaacgttattcaaacagcagaatcaagaccgtcctgccattgcctcaccc

SEQ ID NO: 27613 - DNA, 260 bp, Unknown
  Description of Unknown: RightRegion for integrase B1614 sequence
aggaaaaacaacttttttaaatctgcgcgggaaaaaagggtttatactgatatcgcatgacagggatattttagatgcatgcattgatcatgtactggttttaaatcgaaagacgatcgaggtacagagcggcaatttttcaagctggtgggaaaacaagacgcggatggatcattttgcgatggaggaaaatgaaaaacatttgaaagaaatcgcatctttaaaacaggcggcggcaagaagccgaaagtgggcggata

SEQ ID NO: 27614 - DNA, 260 bp, Unknown
  Description of Unknown: RightRegion for integrase B1615 sequence
aaaattaaatcaatgacattcagaaacggtattacaaatacatttgtctatgatgattaaaagttataaatatttatttttatgaataatactggttatcataactgttggtgacgctatgtttttaaaaacaaatgcacccaaaacaggtaagttcagggtttaaagattgagttgaataaacatataacgaaattattcattaaaagtaggtttaaacgccctgcttttacaaaagtttgattgaataaaaactttat

SEQ ID NO: 27615 - DNA, 260 bp, Unknown
  Description of Unknown: RightRegion for integrase B1616 sequence
agagttgactcaatagtatttaaaaatggattaacacatacttttatatacaaaaaatagaaaaataacctagtaaacaacgtgaaagcattgatattactaggttatttcttcattgtgtaccagttcatctgacacccgaacgtaccacagcccacgacaggacggcggtgttttttctttgcccactggtcattaagttctctaaccttatccatgaacacttcctgttcttctaattttttagggtctaatacttt

SEQ ID NO: 27616 - DNA, 260 bp, Unknown
  Description of Unknown: RightRegion for integrase B1617 sequence
gacgggcatatagactccattcttttccgcaacggtttataccacaaatttatttattagtttgcaggaggtttattttgattagacactccagttatcactataaaatagcaattactattgttgcagttcttttcacggggatgtgtttttccgggtgtaaagataagcaagacgctccctcatccgcttcggtatccagtcagcaagagaagatttctgatccgacaaaagccagtgaaaaatcagtgcttgctaaa

SEQ ID NO: 27617 - DNA, 260 bp, Unknown
  Description of Unknown: RightRegion for integrase B1618 sequence
aaaattaaatcaatgacattcagaaacggtattacaaatacatttgtctatgatgattaaaagttataaatatttatttttatgaataatactggttaccgtaactgttggtgacgctatgtttttaaaaacaaatgcacccaaaacaggtaagttcagggtttaaagattgagttgaataaacatataaccaaattattcattaaaagtaggtttaaatcgccctatttttacaaaagtttgattgaataaaaacttca

SEQ ID NO: 27618 - DNA, 260 bp, Unknown
  Description of Unknown: RightRegion for integrase B1619 sequence
ttcatttctgcccaacgcacaaagtatcttcggccggaaatatttgcgccgcaaatgtgaaaagcgccggatgcttcgcacagcgcgccgaatgcactgtttttctgcacgccggtgcatttttcacgcaggacatacaaacacattgcaatatcctgccctatgcgacagcgcgaacgtcccaagaattaagactaattaagatgtcaccgtatgcttttcttgctataatactggccgcagaacaaaaaacaccatca

SEQ ID NO: 27619 - DNA, 260 bp, Unknown
  Description of Unknown: RightRegion for integrase B1620 sequence
gacgggcatatagactccattcttttccgcaacggtttataccacaaatttatttattagtttgcaggaggtttattttgattagacgctccaattatcactataaaatagcccttactattgttgcagttcttttcacagggatgtgtttttccgggtgtaaagataagcaagacgctccctcatccgcttcggtatccagtcagcaagagaagatttctgatccgacaaaagccagtgaaaaatcagtgcttgctaaa

SEQ ID NO: 27620 - DNA, 260 bp, Unknown
  Description of Unknown: RightRegion for integrase B1621 sequence
gatttttcttgtttgcagttggtattgtcgcggaatgaattcaaaaaggaggatgcatgacccatggtcgatcatatgctcgtgcgtggcgcaaaggtccacaacctgaaaaatattgacgtagacattccgctgggtaagatcgtcggcatcgcgggcgtgtccggttccggcaagtcgtcgctggcgctgggtgtgctgtacgccgagggctcgcgccgctatctggaggcgctgtcaacctacacgcgccgccggat

SEQ ID NO: 27621 - DNA, 260 bp, Unknown
  Description of Unknown: RightRegion for integrase B1622 sequence
gcgttaaacgagcaaaggcagggtatcactatgacggtggtatcctgccttttgctttgaggaatcaagttcgctttgtgcgaacttggtcgtcaccctatatgacgcattgggggcaatcgctgtgtacgtgcgtaccgggagagcgtgtacacctctggcaaggtgtaacacactagactttgttccaaagtctgtgtgccaaggggcatagcccctttggaatccctgcggagcgtgtacgcacgtacgcagggaac

SEQ ID NO: 27622 - DNA, 260 bp, Unknown
  Description of Unknown: RightRegion for integrase B1623 sequence
ggcgaggcgcagccgcacattgcgccgcccctaagcgaggtattcgagcttcccgcataataaaaaacagagaaaaaacgcaagaaagcggacagcaaccgctgtccgcctccttgcaagatatggtgtcaacttgtgtccttatgaacattacccgaacggttacagggttttgtcatgccctttgcacctttattgagctttacgccaaccagactgtttcgccggtcatgttccataagaccggcagccgtaggcgg

SEQ ID NO: 27623 - DNA, 260 bp, Unknown
  Description of Unknown: RightRegion for integrase B1624 sequence
gggcacccgacggcgcgtaaggcgcttgtgccttgcggcgcggcgtgccgcatggcataatacatacagcttttggaaaggcgggcacgggtgcctgcctttcataacactgcaaggagtctgccatgtcgataagaaaacgggccgccgccgcgcttgccgccctgctggggctctgcgtgctgctggccatccttgtaatggcctgtgccccgcgcaccgaaaccgccgacgttgcgatcctcatgtaccacgccttc

SEQ ID NO: 27624 - DNA, 260 bp, Unknown
  Description of Unknown: RightRegion for integrase B1625 sequence
aagaaacgtggagcgtcaacgctcctggccctgggcgaaaatgtagggcaggcggtttgaccgcttgccccggtttaatcggatggtagtcaacggcgctataagtgacaggaacatttttcgacattccgttttcgtgcaagttaaatgcctgcaagcaactaacaccaaaaaatatcttttgctaaaaccgcaccgcttgccataggataaaacgaaaggagaatattatgcaaaaagttaaaaccttgaaaagagtc

SEQ ID NO: 27625 - DNA, 260 bp, Unknown
  Description of Unknown: RightRegion for integrase B1626 sequence
aaggtggaaaatgcaaaaaaagattacaaagcaaatcagaaaggaaaaaaggtgtcataaatggagcagggtagagagatgttattgagtagaaaaatgtgcccatttgcttataacggggtaaattatatgttttctttatgcgataacgatgcatgtggagacggtatgtttgctgtcaaggaaagataaataagagctgaaaagtggcgtatttccgggctttttgctaggttagcatcatcagagaagccttgcag

SEQ ID NO: 27626 - DNA, 260 bp, Unknown
  Description of Unknown: RightRegion for integrase B1627 sequence
aaaattaaatcaatgacattcagaaacggtattacaaatacatttgtctatgatgattaaaagttataaatatttatttttatgaataatactggttaccataactgttggtgacgctatgtttttaaaaacaaatgcacccaaaacaggtaagttcagggtttaaagattgagttgaataaacatataaccaaattattcattaaaagtaggtttaaatcgccctatttttacaaaagtttgattgaataaaaacttta

SEQ ID NO: 27627 - DNA, 260 bp, Unknown
  Description of Unknown: RightRegion for integrase B1628 sequence
gatttttcttgtttgcagttggtattgtcgcggaatgaattcaaaaaggaggatgcatgacccatggtcgatcatatgcttgtacgtggagcaaaggtccacaacctgaaaaatattgacttggacattccgctgggtaagatcgtcggcatcgcgggcgtgtccggttccggcaagtcgtcgctggcgctgggcgtgctgtatgccgagggctcgcgccgctatctggaggcgctgtcgacctacacgcgccgccggat

SEQ ID NO: 27628 - DNA, 249 bp, Unknown
  Description of Unknown: RightRegion for integrase B1629 sequence
tcagcgtttttgagcatttatgcggcaggatttcccctaaaaatgtctgtgttattttaggaaaagtgcttcgcgaaaatccacgggaactggcttgacccacaccgtgacccacacggcgaaatgtccaaagagcggcggagaggatatgtatctcatcctctccgccgctcttttgtttttacatgacctgtgccatgaaattgcccatcttttcggcggcgctttcctgcatctgccgtgtgacgt

SEQ ID NO: 27629 - DNA, 260 bp, Unknown
  Description of Unknown: RightRegion for integrase B1630 sequence
gccgccgggttcccggcggcgtttgcttacagatgcagctgctgcttcaatgcagcttgaagcgttgcagagaaattgattccggcccgttccgccatgtcgttcagccaggagggaaccgtcagcgttttcttgacagctctattgtcaaaaaatttccggtattccactgtatcgcaggggataaaattcacaaactcccgctctcccaccggaacgtcgtgaattccggaaggggccgggattttctccccattctg

SEQ ID NO: 27630 - DNA, 260 bp, Unknown
  Description of Unknown: RightRegion for integrase B1631 sequence
aaggatgggcgaaaaggtattggttcacctaccactctgtatacaccctgttcagcgtaaaggacataatagccagtgtattggcataaatggcagactcaggccaggtagcgtagatttctgaagatacaacatttttgatgtaatcagtataacgtacataataattctgagcggtgggatcctgcggaacaccatcatggacaatgacgtattcaggaatgaccacacggctgaggacaatttcgccggattcatcc

SEQ ID NO: 27631 - DNA, 260 bp, Unknown
  Description of Unknown: RightRegion for integrase B1632 sequence
ggtgcggaaagcacgcacgggtataaagtgaaaggaagtcgtgtagccgaaatcttttaacggctgcatattctccctgccgtttactcatccgaatacgagtaagacaataaaaaacgtcgcagacaaaatcgtctgcgaacgttttttatggaaggtaaaaatgaaattatatattttacgctttgttgctgctgccgagaacgtttactatcttgtgtctcacacattcggtaataagagttcttgcaggtccgaga

SEQ ID NO: 27632 - DNA, 260 bp, Unknown
  Description of Unknown: RightRegion for integrase B1633 sequence
ggcgaggcgcagccgcacattgcgccgcccctgagtgaggtattccagcttcccgcataataaaaaacagagaaaaaacgcaagaagcggacagcaaacgctgtccgcccccttgcaagatatggtgtcaacttgtgtccctatgaacattacccgaatggttacagggtttttattttgtcaggtacacacgaaggtacacacttttcattttgccttgataatttcagaaaatgcttcttcagtaaaggcggctgcct

SEQ ID NO: 27633 - DNA, 260 bp, Unknown
  Description of Unknown: RightRegion for integrase B1634 sequence
accacagagcctgctcctgccgcaaggcatcaaagcagcagtccagatacattttgttgaccgccgcaaaaatggtgctgcgcagcagcagacgctcgtcgttgagcacagtctccggctgggctgccttgccgccgaacaccacagaaagactgccctccagttcctcgcagaagatatcgtaggctgtcccggcggagcagtgctcccgctgcattttgaacagggtgtcgatattttcgatcgagagcaccgttttg

SEQ ID NO: 27634 - DNA, 260 bp, Unknown
  Description of Unknown: RightRegion for integrase B1635 sequence
tttaacaaatttttgctgcttttctgttcacgccagggatgcggctgttgtgattgctaataacatatgctctaatgaaaaagaatttgttaagttaatgaataagaaggccttagaaataggaatgactggtactacttatatgaatagtcatggtcttgatgaagaaactaaaaattattctacggctcatgatatggctttactttctagttatatttatagaacttcaaaagaatatcgaaaaattacaaagactt

SEQ ID NO: 27635 - DNA, 260 bp, Unknown
  Description of Unknown: RightRegion for integrase B1636 sequence
ggcgaggcgcagccgcgcattgcgccgcccctgagtgaggtattccagcttcccgcataataaaaaagcagagaaaaaacgcaagaaagcggacagcaaacgctgtccgcccccttgcaagatatggtgtcaacttgtgtccctacgaacattacccgaacggttctaaggttttttcgtacccaaatttgaggttgggataaaaagataccgaagtgaatatcgaggggttagacaggatttgaaccgaagcccccgcc

SEQ ID NO: 27636 - DNA, 260 bp, Unknown
  Description of Unknown: RightRegion for integrase B1637 sequence
caacagcttattgatacaatggaaagagtaaaacagaaaaatgcggagaaatccgcttaaataaagaaaaaggtgtaacccctttatcgggattacaccataattccttaaatactgccttattagcccgtggctaactactaccgtgtttcgtcctctgtcagccattccatactaaccctcagcacttccgcaaatacttttagctcataatctgttacaaatcttgtgccgatctctatacggcttatgctgtctct

SEQ ID NO: 27637 - DNA, 260 bp, Unknown
  Description of Unknown: RightRegion for integrase B1638 sequence
gacggtcatatagactccattcttttccgcaacggtttataccataaatttatttattagtttgcaggaggtttattttgattagacgctccaattatcaccataaaatagccattactattgttgcagttcttttcacagggatgtgtttttccgggtgtaaggatacgcaagacgctcccccatctgcgtcggtatccagtcagcaagagcaggtttctgattcgacaaaagccagtgaaaaatcagtgcttgctaaa

SEQ ID NO: 27638 - DNA, 260 bp, Unknown
  Description of Unknown: RightRegion for integrase B1639 sequence
gacgggcatatagactccattcttttccgcaacggtttataccacaaatttatttattagtttgcaggaggtttattttgattagacgctccaattatcactataaaatagcaattactattgttgcagttcttttcgcagggatgtgtttttccgggtgtaaagataagcaagacgctcccccatctgcgtcggtatccagtcagcaagagaaggtttctgattcgacaaaagccagtgaaaaatcagtgcttgctaaa

SEQ ID NO: 27639 - DNA, 260 bp, Unknown
  Description of Unknown: RightRegion for integrase B1640 sequence
aaaattaaatcaatgacattcagaaacggtattacaaatacatttgtctatgatgattaaaagttataaatatttatttttatgaataatactggttaccataacggttggtgacgctatgtttttaaaaacaaatgcacccaaaacaggtaagttcagggcttaaagattaggttggataaacatataaccgaattattcattcaaagtaggtttaaacgccctgcttttacaaaagtttgattgaataaaaacttcat

SEQ ID NO: 27640 - DNA, 260 bp, Unknown; identical to SEQ ID NO: 27638
  Description of Unknown: RightRegion for integrase B1641 sequence

SEQ ID NO: 27641 - DNA, 260 bp, Unknown
  Description of Unknown: RightRegion for integrase B1642 sequence
tttgttttggggcaaatcgggtgcgaatcaactaccaatttcaactgttttgtgctataatggaagcgaaaacggcagagggggaatggaaaatgaaaaagctgcttgctgtgtgcctgatggcgctcgtttgctgggtttgcgcggggtacgcggaagaaacgcgggttggcgatacggtcattttcgggcagtatgagcaggatggcaatctggataacggcagcgagcccattgcgtggctggtgctggatgtgcag

SEQ ID NO: 27642 - DNA, 260 bp, Unknown
  Description of Unknown: RightRegion for integrase B1643 sequence
aggaaaaacgacttttttaaatctgtgcggcaaaaaagggtttattctgatatcgcatgacagggatattttagatgcattgatcatgtactggttttaaatcgaaagacgatcgaggtacagagcggcaatttttcaagctggtgggaaaacaagacgcggatggatcattttgcgatggaggaaaatgaaaaacatttgaaagaaatcgcatctttaaaacaggcggcggtaagaagccgaaagtgggcagataaaaa

SEQ ID NO: 27643 - DNA, 260 bp, Unknown
  Description of Unknown: RightRegion for integrase B1644 sequence
aaaattaaatcaatgacattcagaaacggtattacaaatacatttgtctatgatgattaaaagttataaatatttatttttatgaataatactggttaccgtaactgttggtgacgctatgtttttaaaaacaaatgcacccaaaacaggtaagttcagggtttaaagattgagttgaataaacatataaccaaattattcattaaaagtaggtttaaatcgccctatttttacaaaagtttgattgaataaaaacttta

SEQ ID NO: 27644 - DNA, 260 bp, Unknown
  Description of Unknown: RightRegion for integrase B1645 sequence
gatttttcttgtttgcagttggtattgtcgcggaatgaattcaaaaaggaggatgcatgacccatggtcgatcatatgctcgtgcgtggcgcaaaggtccacaacctgaaaaatattgacgtggacattccgctgggtaagatcgtcggcatcgcgggcgtgtccggttccggcaagtcgtcgctggcgctgggcgtgctgtatgccgagggctcgcgccgctatctggaggcgctgtcgacctacacgcgccgccggat

SEQ ID NO: 27645 - DNA, 260 bp, Unknown
  Description of Unknown: RightRegion for integrase B1646 sequence
ttatttgtcagaactaatgaactgcaagttgagtgcgtggtgaagctgacgcgcggataaaagaagtggagatgtaaaatggcgatacctaagtacaacgaactatatgaccccttccttaccgcaatcagcgatggaaaaattcatactgctaaagaagttgcctctactgtagcaaatattcttcagctttccccggaagatttagctgagcagctgccgagccagcggcagactacgtttgtcaatcggttgaattg

SEQ ID NO: 27646 - DNA, 260 bp, Unknown
  Description of Unknown: RightRegion for integrase B1647 sequence
aaaattaaatcaatgacattcagaaacggtattacaaatacatttgtctatgatgattagaagttataaatatttatttttatgaataatactggttaccataactgttggtgacgctatgtttttaaaaacaaatgcacccaaaacaggtaagttcagggtttaaagattgagttgaataaacatataaccaaattattcattaaaagtaggtttaaatcgccctatttttacaaaagtttgattgaataaaaacttta

SEQ ID NO: 27647 - DNA, 260 bp, Unknown
  Description of Unknown: RightRegion for integrase B1648 sequence
gagacagagcgcagaatacggcgtgaagttttcgggttttacgggcgtttccgtgaataggaatagaataagaaaagccatgtacgaagatgtatacttcgtatgtggctttttttgatgctgtgttacagtgcagtgataatgaatcagcgagatgctcatataaagaaagagactgattcaacggccgggccattcggtgcggcgcgcactccactgttcgttcagccagccgaccacctgctctttgccctccggcg

SEQ ID NO: 27648 - DNA, 260 bp, Unknown
  Description of Unknown: RightRegion for integrase B1649 sequence
aaaattaaatcaatgacattcagaaacggtattacaaatacatttgtctatgatgattagaagatataaatatttatttttatgaataatactggttaccataactgttggtgatgctatgtttttaaaaacaaatgcacccaaaacaggtaaattcagggcttaaagattgaattgaataaacatataaccaaattattcattcaaaacaggtttaaatcgccctacttttacaaaagtttgattgaataaaaatttat

SEQ ID NO: 27649 - DNA, 260 bp, Unknown
  Description of Unknown: RightRegion for integrase B1650 sequence
gatttttcttgtttgcagttggtattgtcgcggaatgaattcaaaaaggaggatgcatgacccatggtcgatcatatgctcgtgcgtggcgcaaaggtccacaacctgaaaaatattgacgtagacattccgctgggtaagatcgtcggcatcgcgggcgtgtccggttccggcaagtcgtcgctggcgctgggtgtgctgtacgccgagggctcgcgccgctatctggaggcgctgtcgacctacacgcgccgccggat

SEQ ID NO: 27650 - DNA, 260 bp, Unknown
  Description of Unknown: RightRegion for integrase B1651 sequence
caacagcttattgatacaatggaaagagtaaaacagaaaaaagcggagaaatccgcttaaataataaagaaaaaggtgtaaccccctttatcgggattacaccataattccttaaatactgccttattagcccgtggctaaacgtgcggggcgttttgcgtatatttttatttgagcgagttgccggcgctgaacgcctttgcgactgcctcgccgaggacaacataggtgttgttgaacgggtcgaaggttatcggctg

SEQ ID NO: 27651 - DNA, 260 bp, Unknown
  Description of Unknown: RightRegion for integrase B1652 sequence
gacaacgagagtacagatgagacggtctgtcaaattatccctcaaaaaagatacacctaagattgaggttacaatggagcctgatgaagagagtaattatacaccacaagaaaaggctacttattcaaagattaaggaatatgtgaaggaaaagtatggtgtgaatgtgcatacttcttatattgcacaggtaaagcggatgtgtggtctggacatgggtgagaattataataagtccaagaaagagaatccagaggtaa

SEQ ID NO: 27652 - DNA, 260 bp, Unknown; identical to SEQ ID NO: 27620
  Description of Unknown: RightRegion for integrase B1653 sequence

SEQ ID NO: 27653 - DNA, 260 bp, Unknown
  Description of Unknown: RightRegion for integrase B1654 sequence
gagacagagcgcagaatacggcgtgaagttttcgggttttacgggcgtttccgtgaataggaatagaataagaaaagccatgtacgaagatgtatacttcgtatgtggctttttttgatgctgcgttacagtgcagtgataatgaatcagcgagatgctcatataaagaaagagactgattcaacggccgggccattcggtgcggcgcgcactccactgttcgttcagccagccgaccacctgctctttgccctccggcg

SEQ ID NO: 27654 - DNA, 260 bp, Unknown
  Description of Unknown: RightRegion for integrase B1655 sequence
atctataatattactttcaaaaatggaatagtacatcactttatatataaaaatcagtaaaaatcatcaaaaatacccaagtggtttttacttacagccacttgggttttactatatcatatttgattatacacacggacaaccgcaaggtaattattgacaccactttcttcttttctttttccatattcagtttatcctctcctatttgttctatcatttcttcttatgccaaaatccatcatctattctgattttgg

SEQ ID NO: 27655 - DNA, 260 bp, Unknown
  Description of Unknown: RightRegion for integrase B1656 sequence
ttggacaacgaacagcaagttgagaccgtcgtggaactatcacgcaaaatcaaggattgacggactatctgacatctttattggttgccctgcctacctcttgcctacgcttttttgagtggtaggcaaggttgctatgatatagcatctgccaggattacaatggcatcgttctgcattttttccgtgttaaacacataacggtccatggtggtcttgatgtccttgtggcccagacgctccatgacggtcttgggctg

SEQ ID NO: 27656 - DNA, 260 bp, Unknown
  Description of Unknown: RightRegion for integrase B1657 sequence
tgttgggacaacgaaagtaccgttgaaactgtttgtttgctggcaagaaaagataaataaaggctgaaaagtggcgtatttccgggctttttgcgaggttagtatcatcagagaagccttgtggaaagctcggttttcttgcatggaaacatatctactttttagtctgactggagaaaaagtgaatgatcgaaaaaatacagtagggtttaggctgcggattagatgtcataggttgtggcactgggattgttgtcaga

SEQ ID NO: 27657 - DNA, 260 bp, Unknown
  Description of Unknown: RightRegion for integrase B1658 sequence
atctataatattaccttcaaaaatggaatagtacatcactttaattataaaaatcaataaaaatatcaaaaatacccaaatggtttttacttacagccatttgggttttactatatcatatttgattatacacacggacaaccgtagtgtataaaaagctactctttttgccatgtttatttccccttttttagcaagaaagcccctttatttggggtttcttgttttattcattatttacagtctcagcagttttgttt

SEQ ID NO: 27658 - DNA, 260 bp, Unknown
  Description of Unknown: RightRegion for integrase B1659 sequence
cgcgggaaaaagtacgttattaaagattattgcaggagtcttaaaaccaactgctggtaaggttacacttaaaggaaatgtagtgccgatgctggaacttggctccggatttgatcaggagctaagcggaagcgaaaatatattccttaacggctcgatccttggatacgataaggaattcctggaatctaagtatgatgagatcgtggaattttctgaactgaaggaatttattcatatgccgatccgcaactactctt

SEQ ID NO: 27659 - DNA, 260 bp, Unknown
  Description of Unknown: RightRegion for integrase B1660 sequence
gcaatctatatggtcggcggagtcttcgttttggtctgtccgctcgacgcggaagaataaaaaagaggctactgcacaggattgttcctgcgcggtagcctctttgtgttttttcatagccataacggatttcgttataatctaccaaaatccagcgagattctaaaatcgttgttagaatctaccgtaaaggagcatggctatgattaggattttactgtccacccggcttggcgagcggaggtggtcacaagctgacc

SEQ ID NO: 27660 - DNA, 260 bp, Unknown
  Description of Unknown: RightRegion for integrase B1661 sequence
cgcaggtgtcatagttattcagaagtacttcttcgattgtatcggcaaacggcagtgtaatgccgtctgcgagagaagttgtgaagatcagaatatcgtttttttcatcctttcgacggtatgccaaaacgccgctcaccgtctcgtattccggaatcagcgttccgtagaggaaggtttcttccagatcttcacgtcgtcttactgccaccattttgcggtagaaccacagcagggaatcaggatctttttcctcggcc

SEQ ID NO: 27661 - DNA, 260 bp, Unknown
  Description of Unknown: RightRegion for integrase B1662 sequence
aaagaacttcccttggaaactgaaacaactgttgagacggtttgcctgctggtgaagtaaggcggtaagtttgaaacctatttggcctttttgctatgcgcggccctgcacgatacatggcagaaagcgctgtgctgtccgattctggtcgtggacggcacggcgcttctggacgaaacggcagcccgcgtggagggattgctatgatctgcaaactgacccctgaagaagaagtccggatgcacattcttttgaaaggg

SEQ ID NO: 27662 - DNA, 260 bp, Unknown
  Description of Unknown: RightRegion for integrase B1663 sequence
ttatttgcacattcgattcctgaccgctctcctgctacaatgattgcagaaaatcattaggaggacggaacaatgaaaaaaatcaacacagacgaaaggacaggcttgcactatgagcttgtcggggactactaccttatcgccggggatgatgggccggaggaagatcagccaatcggggtatggggacagcggcatctccactatctcaaggagcatcgccgtgggcgctatgccaccctgctgaccagcggtgaatt

SEQ ID NO: 27663 - DNA, 260 bp, Unknown
  Description of Unknown: RightRegion for integrase B1664 sequence
aaaattaaccttgacgattatttacctgaatcccgaatgactaataacgatatggtatagaaacaaagggtatgattttacgatcacttcatctacagcattcgatcataagtggataccggaaagaaatgtatatgaaagcatttccgtgatcgtagatgaattgtttgcaaattatctttcaagaccgaacgtgcggcagccgatattgacacagtattgtgacgggaaaatggtgagctgtccgaattggttgacct

SEQ ID NO: 27664 - DNA, 260 bp, Unknown
  Description of Unknown: RightRegion for integrase B1665 sequence
aacaccatgttcatgataggcatgttgtttgggtacacagcaaagcaccgccatccctgagaggggtcggcggtgctttctcattctccagtaaaaccgttggcttttgcacagcgaagtgcattgaggatcaggagatctcgttccagctccttctctctactccggtaggtcgatacagggccggaacccatcaggttccgtttgtcccgtaccaccttgccgatgtagtatgagatcacatcatcaatgtccatgct

SEQ ID NO: 27665 - DNA, 260 bp, Unknown
  Description of Unknown: RightRegion for integrase B1666 sequence
aaaacaggaacgaaacagactcttgctgattggggacgattgatcattcaaactctctaagctcaacataacagattctacggcagcaatcaatttttcgattgctgcctttttattttttaccgtttcagaacagcatatttatttaaaaattcaagaccatgttttgaattttatcaaaaataaatgttgaattttcctcttgtttactattaagttttccaattttttctttatattggaatgtaaccaaaaaaatt

SEQ ID NO: 27666 - DNA, 260 bp, Unknown
  Description of Unknown: RightRegion for integrase B1667 sequence
agccggaaaaaccacaactatgaaaatgctgttgggtttaacgaagcctacttccggtgaggtcaaaatctggggaaagtctttgcaaggaaatgaaaagaagttgctgccccgcattggcagtttgattgagtcccctggtttttatcccaatctgaccggtacggagaacctgcgtatctttgctaccctgcgtggagtaccaaacaatcatgccatcaaagacgctctggatttggtcgggctaccttataaggata

SEQ ID NO: 27667 - DNA, 260 bp, Unknown
  Description of Unknown: RightRegion for integrase B1668 sequence
tactacaaaggtatcgggattttggaaatgtccaaagtatttgatagcaggcaaaaatgaaagaaacggcatagccgaagctataccgtttctctctcgccttagaatgttttcttaactggacacccctaaacgtgtggtgtttttctttttatacagacgcagaaaaaggcgggagcttcccacaaaagggaaagccaccgcctttgttgatcatcggatgagccagccgtaatcctgtctgcaatctaccacatgat

SEQ ID NO: 27668 - DNA, 260 bp, Unknown
  Description of Unknown: RightRegion for integrase B1669 sequence
agcaggaaagacaacactgttcaattgcatcaatttagatattaccaaggatgcaggtgagtgttatctgataaagaatggtcagaagcaacaggtgactccggagcacgtgggatatgtgctctcggcgccgactgtgccggagttcctgacagcaagggagttccttaagttttttatagatatcaatagcgatacaatgtcactaataaaaccgcttgatgcatattttgatgagatgaggattgaacctgaggaca

SEQ ID NO: 27669 - DNA, 260 bp, Unknown
  Description of Unknown: RightRegion for integrase B1670 sequence
atcgcaatcgctgacgctggattgcgattttgttgctctaatttgataattgatccatagtgttcagatcatacacgccgctatgagcatccgggctgcagcctgcggtgcggtcatgccggagccgggcggcttgcgcatacagggtgcagagaagcgtttcgcaggagtgcgatcattttaacatattctgcttaaacccatagcctctttttcaaatgctccatgaaatttatcaaatcgtgcacaaaacgacaaaa

SEQ ID NO: 27670 - DNA, 260 bp, Unknown
  Description of Unknown: RightRegion for integrase B1671 sequence
  modified_base (1)..(7): a, c, t, g, unknown or other
nnnnnnnaaaaggtgcgatttacggatttatcggaagaaatgttccaagatacatactgaaagtatgatccactacttagaggattatatgtactgtactagaaagctggggctttatgtgcagttagtagcataaattatataggggttatctaaatatatttacctcctgtgattaagttatataaagactaaatcacaggaggtttatttttatgataacagtagaaaaactggaaaaaggtacttattttgatgat

SEQ ID NO: 27671 - DNA, 260 bp, Unknown
  Description of Unknown: RightRegion for integrase B1672 sequence
atctataatattaccttcaaaaatggaatagtacatcactttaattataaaaatcaataaaaatatcaaaaatacccaaatggtttttacttacagccatttgggttttactatatcatatttgattatacacacggacatcctaaagtacaaaacgctactgttttcatataattcctctttctattattacttagaatattataacatatatgtcaagaaaaaataaaatggcaacttaaaagttaccattttttatt

SEQ ID NO: 27672 - DNA, 260 bp, Unknown
  Description of Unknown: RightRegion for integrase B1673 sequence
tccgtagcccccataaaaacaaaaacagaatccgtcgttgcaacggattctattgcttgacgaatgtggtgcgtaaaaagtaaagcgcccgcgccctaaaaacagcccgcggggctgtttttgccccgcggtacgctggacgcggggcccgggcttttcgattcccacacgggtcaccttttacgcccgacacctattaaaaagcgcatacaaagaaaaaagcactacctcaaatgaagtagtgctttttggtgaaccaa

SEQ ID NO: 27673 - DNA, 91 bp, Unknown
  Description of Unknown: RightRegion for integrase B1674 sequence
gcgacggtacgcccatttttatgcagttattacaggatgctgatgcggcctgcgccgtagggattctcgtaatccagcagatagcccgggt

SEQ ID NO: 27674 - DNA, 260 bp, Unknown
  Description of Unknown: RightRegion for integrase B1675 sequence
tactataagggtattggagccctggaagtatccaaagtcacttcatcaaggcaagaatgagaaaaacggcatagccgaagctataccgtttctctcttgccccacgatgttttcttatcgggatgtgccttgcggagcgctctggttgctatcaaagaaggtccatgactgcgcctatttccatactagcttcataagcacatgcgttaatcattagctgtatgtcatccacgtcatgccctgttttttctttcagcttt

SEQ ID NO: 27675 - DNA, 260 bp, Unknown
  Description of Unknown: RightRegion for integrase B1676 sequence
gattgggacaacgagagtacagatgagactgaggtgggactacacagaaaggatatgtagaaatccttgaatttacgcactttgtagagtttttcagtttcaacaaaattagtgaaaatcacagggaaaaagagcttgtgaggaaagtaactgttgttgtagcgttagacctcggttgtgggaacacaaagaattctgaatatgaaagtgaatagagagctatcagatatattgatagaacatagggatacttgaaagag

SEQ ID NO: 27676 - DNA, 260 bp, Unknown
  Description of Unknown: RightRegion for integrase B1677 sequence
aggcggaagaaggtgtcgagtcgcagcgagacggatgaaggggaacgcagcagccgttagcaaaacgatataacatcccgccgcagcggcgttcctcgttcctccctctcgttcccccttcccgcccatcctttcccagctccttccagctaactgccagcgccctcgtcactcttccgcattattcgcctgcaatcgcgcgggataaaaaacattgcttcattatagtgcatcacaaaatttggatgttattcttattt

SEQ ID NO: 27677 - DNA, 260 bp, Unknown; identical to SEQ ID NO: 27675
  Description of Unknown: RightRegion for integrase B1678 sequence

SEQ ID NO: 27678 - DNA, 260 bp, Unknown
  Description of Unknown: RightRegion for integrase B1679 sequence
tatcttttgggctttttgcggaaaaccgggatgttcccgcagataagcgggtccccataacaaaagggaccgccgtacagcaagctgctgtacggcggtctcttcttcttttttcagttccgcgggatggccattcggcgctctgctttctttacgagccatgctcccgcccatccgcaggcggctcccaaaatggcaccgcccagaatatccgtcgggtaatggacacagaggtacatccgcgagaatgcgatgagaac

SEQ ID NO: 27679 - DNA, 260 bp, Unknown
  Description of Unknown: RightRegion for integrase B1680 sequence
tgcgaacctgatggaacaggtaaagcggggaaaaggtggcaaaaagaagcggaatggtgaggatatccgtggtgctgtcgttgtctttgtgattggggcggctgcttcgatcattctggttgccttttctttaggaagccgtctgtaccagacgcagagacagaaacgtctgaatacggaaattacaaaaaatgagtcagcagaaacgatttacaatgagtataaatcgatgaaggaaaagtacagccagtatgagcaaa

SEQ ID NO: 27680 - DNA, 260 bp, Unknown; identical to SEQ ID NO: 27675
  Description of Unknown: RightRegion for integrase B1681 sequence

SEQ ID NO: 27681 - DNA, 260 bp, Unknown
  Description of Unknown: RightRegion for integrase B1682 sequence
ccattttgcagacggatttgcagacgcaatcagtccttgcccttgacgatgctgcagtagtaagcggacatcctggcctttggccccagtccgtccggcatctatacggatacaccatgataaaaataaggccatctgcctttggcagatggccttatttttgggcttcgcccgcgcggcgcgcgggaacgaatttactcgatggcgtgcaggaagtcctcccaggcgttgtccacggcgttacccatgtgctgcatggt

SEQ ID NO: 27682 - DNA, 260 bp, Unknown
  Description of Unknown: RightRegion for integrase B1683 sequence
tctatattagatgtaattcaagaagatataagtaataatgagggtttaaggctgttgtaaaatgtaccaaccaagattcattgtatagtacaatttacaaccgatatgttgactaatgtttaagtatatttgattaccgaaaagtgcgtacatcaaatatacttatttatttgtcaaaaagcttgactttttattgtatttatgatacatttttggtaacaagtaaatagtacggttatcaaaacggtaaacgtaaatag

SEQ ID NO: 27683 - DNA, 260 bp, Unknown
  Description of Unknown: RightRegion for integrase B1684 sequence
tgtgatgaaagggatttcccttttttgcgaagcatgcttgggaacttcgtgctatgctgagcacagtaattcgcgcaggggcgcagaaacggggcagcagatgtatttgtgggtgatcgcggcggtagctgcatattttatcaagggcctgtgcggctttgccaatacgctcgtgctcacgtcgatcctgagcttcggcgcagccaacgccaacatctcgcctatcgacctgctgctgggctatcccgccaatctgatcc

SEQ ID NO: 27684 - DNA, 260 bp, Unknown
  Description of Unknown: RightRegion for integrase B1685 sequence
tactacaagggcatcggagccttggaaatgtcgaaagtcacggcatcaatggaaaaatgagaaaacggtacagccgaagctataccgttctctctttcctcacgatgttttcttatcgggagcagcctttcggatgtctcttttttgttggtgcgcgaggcgggacttgaatttaacaaagagaattttcagcaacaaattacatcaaattatgtgatattcagttctgaaactataaaacatggtatcagtcagtccag

SEQ ID NO: 27685 - DNA, 260 bp, Unknown
  Description of Unknown: RightRegion for integrase B1686 sequence
tactataagggcattggagccctggaagtatcgaaagttacttcatcaaggcaagaatgagaaaaacggcatagccgaagctataccgtttctctcttgccccacgatgttttcttatcgggaggcacctttcggggttcgcctttttttgtttgggttggaagtcatcgccccagtaatcgaacgcgaaatatagcttgagttcatccccgtctacttcaatgagccgcacgaacgtctcgatgatttcagccgcatct

SEQ ID NO: 27686 - DNA, 260 bp, Unknown
  Description of Unknown: RightRegion for integrase B1687 sequence
cagaagccatacagaccaaggaatagaaaggggaatgtcagaagccaaggggacacataaaaagccactttccctgtccccttggctttcttttttattgacgaatacacaaaaataaggatataatccttactagaagattgacgaggagaagttgaatgagtcaggacattattaataatcgttttttggaagagtcggtatttgctattgcggatgggtactgcgtgatcaatctcacaaagaatatcgtacgtggt

SEQ ID NO: 27687 - DNA, 109 bp, Unknown
  Description of Unknown: RightRegion for integrase B1688 sequence
gcaggcgatctacaacattcccgccgcgccacgccgatcgtcaggctagcgcattggtagcttcatgagttcctgccggtccgcaaagcttaagtccgttcaggtgctg

SEQ ID NO: 27688 - DNA, 260 bp, Unknown
  Description of Unknown: RightRegion for integrase B1689 sequence
tatcttttgggctttttgcggaaaaccgagatgttcccgcagataagcgggcccccataacagaagagatcgccgtacagcaagctgctgtacggcgatttcttcttcttttttcagttccgcgggatggccattcggcgctctgctttctttacgagccatgctcccgcccatccgcaggcagctcccaaaatgacgccacccagaatatccgtcgggtaatggacacagaggtacatccgcgagaatgcgatgagaac

SEQ ID NO: 27689 - DNA, 260 bp, Unknown; identical to SEQ ID NO: 27675
  Description of Unknown: RightRegion for integrase B1690 sequence

SEQ ID NO: 27690 - DNA, 260 bp, Unknown
  Description of Unknown: RightRegion for integrase B1691 sequence
cgtgtggcttcgatagagtttaaaaatggactcattcacgagttcctttacagagagtgagagcaggctgaggaggcagcctgctctcttttttgtatgtatgagtaagattagattaacaagaaaggttgattttacaaggttttaggcatcttgtttttagagttcatctgacacccgaatgtctttacaaaataagtcataggacggccgatttctttagatttcttttcaacaaaatcctttgcctttgccatgta

SEQ ID NO: 27691 - DNA, 260 bp, Unknown
  Description of Unknown: RightRegion for integrase B1692 sequence
cgtgtggcttcgatagagtttaagaacggactcgttcacgagttcctttacagagaataagagcaggcttaggcagcctgctctctttatgtgtgtatgagtaagattagattaacaagaaaggttgattttacaaggttttaggcatcttgtttttagagttcatctgacagccgaatgtctttacaaaataagtcataggacggccgatttctttagatttcttttcaacaaaatcctttgcctttgccatgtagtaa

SEQ ID NO: 27692 - DNA, 260 bp, Unknown
  Description of Unknown: RightRegion for integrase B1693 sequence
cgcgtagcttcgatagagtttaagaacggactcgttcacgagttcctttacagagaataagagcaggctgaggaggcagcctgctctctttatgtgtgtatgagtaagattagattaacaagaaaggttgattttacgcggttttaggcatcttgtttttagagttactcaaaaggcggcgggtaacccgccacaccttgcccttgcagagggcaatcaccctccgaagtcgggtgatttcttattatgaactgataata

SEQ ID NO: 27693 - DNA, 231 bp, Unknown
  Description of Unknown: RightRegion for integrase B1694 sequence
cgtgtggcttcgatagagtttaaaaatggactcgttcacgagttcctttacagagagtgagagcaggctgaggagacagcctgctctcttttttgtatgtatgagtaagattagattaacaagaaaggttgattttacaaggttttaggcatcttgtttttagagttcatctgacacccgaaggtcttgacgaaataagtcatgggacggccgatttctttagatttcttt

SEQ ID NO: 27694 - DNA, 260 bp, Unknown
  Description of Unknown: RightRegion for integrase B1695 sequence
cgcgtagcttcgatagagtttaagaacggactcgtgcacgagttcctttacagagagtgagagcaggctgaggaggcagcctgctctctttttatgtgtatgagtaagatcagattaacaagaaaggttgattttacaaggttttaggcatcttgtttttagagttcatcgtgcagccgaaggtctttacaaaataagtcataggacggccgatttctttagatttcttttcaacaaaattctttgcctttgccatgtag

SEQ ID NO: 27695 - DNA, 260 bp, Unknown
  Description of Unknown: RightRegion for integrase B1696 sequence
cgcgtggcttcgatagagtttaagaacggactcgttcacgagttcctttacagagaataagagcaggcttaggcagcctgctctctttatgtgtgtatgagtaagattagattaacaagaaaggttgattttacaaggttttaggcatcttgtttttagagttcatctgacacccgaaggtctttaaaaacaaggttagtggtcttcccagttcttcggactttttcttgacatactgcctagcctttgccatgtagtag

SEQ ID NO: 27696 - DNA, 260 bp, Unknown
  Description of Unknown: RightRegion for integrase B1697 sequence
cgcgtggcttcgatagagtttaagaacggactcgttcacgagttcctttacagagaataagagcaggcttaggcagcctgctctctttatgtgtgtatgagtaagattagattaacaagaaaggttgattttacaaggttttaggcatcttgtttttagagttcatctgacagccgaaggtctttacaaaataagtcataggacggccgatttctttagatttcttttcaacaaaatcctttgcctttgccatgtagtaa

SEQ ID NO: 27697 - DNA, 260 bp, Unknown
  Description of Unknown: RightRegion for integrase B1698 sequence
cgcgtggcttcgatagagtttaagaacagactcgttcacgagttcctttacagagagtgagagcaggctgaggaggcagcctgctctcttttttgtatgtatgagtaagattagattaacaagaaaggttgattttacaaggttttaggcatcttgtttttagagttcatctgacagccgaaagtctttacaaaataagtcataggacggcagatttctttagatttcttttcaacaaaatcctttgcctttgccatgta

SEQ ID NO: 27698 - DNA, 260 bp, Unknown
  Description of Unknown: RightRegion for integrase B1699 sequence
cgcgtagcttcgatagagtttaagaacggactcgtgcacgagttcctttacagagagtgagagcaggctgaggaggcagcctgctctctttttatgtgtatgagtaagatcagattaacaagaaaggttgattttacaaggttttaggcatcttgtttttagagttcatcgtgcagccgaaggtctttacaaaataagtcataggacggccgatttctttagatttcttttcaacaaaatcctttgcctttgccatgtag

SEQ ID NO: 27699 - DNA, 236 bp, Unknown
  Description of Unknown: RightRegion for integrase B1700 sequence
cgtgtggcttcgatagagtttaagaacggactcgttcacgagttcctttacagagaataagagcaggctgaggaggcagcctgctctctttatgtgtgtatgagtaagattagattaacaagaaaggttgattttacaaggttttaggcatcttgtttttagagttcatctgacagccgaaggtctttacaaaataagtcataggacggccgatttctttagatttcttttcaaca

SEQ ID NO: 27700 - DNA, 260 bp, Unknown
  Description of Unknown: RightRegion for integrase B1701 sequence
aaatggagcgggaaagacaacaacgcttcgcatgttagcaacgctgatcaaaccggataaaggtgatgctctgattgacggaagcagtattgtgacagatccgaacggtgttcggaaaaagatcggatttctgacgagtgaattaaaactggaagaattttttactccgaactatctgtttgattttttctcagaattatacggtgtcgatcaggcagagcgggatgagagaaaacgtatcctgtttcagaaatttggtg

SEQ ID NO: 27701 - DNA, 260 bp, Unknown
  Description of Unknown: RightRegion for integrase B1702 sequence
gataagaactggaaaccagaagaagaaataccaggtccattacaagaatttggaatttaagctaatgaagatgattaagattttaggtttaattttatctatgaattcttgcttggcattggcaaccgtagaccaagaaatgcgtagaccgctaacctatagagaagatgctttcattgatggagcacataagacattgaaattgctatgtcaaaagaccaccagtaattacgatgaatacagaaaatgttatgaggaat

SEQ ID NO: 27702 - DNA, 257 bp, Unknown
  Description of Unknown: RightRegion for integrase B1703 sequence
cgtgtggcttcgatagagtttaagaacggactcgttcacgagttcctttacagagaataagagcaggctgaggaggcagcctgctctctttatgtgtgtatgagtaagattagattaacaagaaaggttgattttacaaggttttaggcatcttgtttttagagttcatctgacagccgaatgtctttacaaaataagtcataggacggccgatttctttagatttcttttcaacaaaatcctttgcctttgccatg

SEQ ID NO: 27703 - DNA, 260 bp, Unknown
  Description of Unknown: RightRegion for integrase B1704 sequence
gataagaactggaaaccagaggaagaaataccaggtccattacaggaatttggaatttaagcggcctaaatcgacgtataacgagctaaaacagttaaggggtacatatgtacccctttttaatttaattgcgttaggcagcgtctaagagagtattaaagtattcatccattaaatcaggactgtcgtcatcaatacagaaaaattccggtttattgatgccgtagaagtgagtatgtagcttgaatgtatcgtcatca

SEQ ID NO: 27704 - DNA, 260 bp, Unknown
  Description of Unknown: RightRegion for integrase B1705 sequence
cgcgtggcttcgatagagtttaagaatggactcgttcacgagttcctttacagagaataagagcaggcttaggcagcctgctctctttatgtgtgtatgagtaagattagattaacaagaaaggttgattttacaaggttttaggcatcttgtttttagagttcatctgacagccgaaagtctttacaaaataagtcataggacggccgatttctttagatttcttttcaacaaaatcctttgcctttgccatgtagtaa

SEQ ID NO: 27705 - DNA, 245 bp, Unknown
  Description of Unknown: RightRegion for integrase B1706 sequence
cgcgtggcttcgatagagtttaagaatggactcgttcacgagttcctttacagagaataagagcaggctgaggaggcagcctgctctctttatgtgtgtatgagtaagattagattaacaagaaaggttgattttacaaggttttaggcatcttgtttttagagttcatctgacacccgaatgtctttacaaaataagtcataggacggccgatttctttagatttcttttcaacaaaatccttt

SEQ ID NO: 27706 - DNA, 260 bp, Unknown
  Description of Unknown: RightRegion for integrase B1707 sequence
cgtgtggcttcgatagagtttaagaacggactcgttcacgagttcctttacagagaataagagcaggctgaggagacagcctgctctctttatatgtgtatgagtaagattagattaacaagaaaggttgattttacaaggttttaggcatcttgtttttagagttcatctgacacccgaatgtctttacaaaataagtcataggacggccgatttctttagatttcttttcaacaaaatcctttgccttttccatgtag

SEQ ID NO: 27707 - DNA, 260 bp, Unknown
  Description of Unknown: RightRegion for integrase B1708 sequence
cgcgtggcttcgatagagtttaagaacggactcgttcacgagttcctttacagagagtgagagcaggctgaggaggcagcctgctctcttttttgtatgtatgagtaagattagattaacaagaaaggttgattttacaaggttttaggcatcttgtttttagagttcatctgacagccgaaagtctttacaaaataagtcataggacggccgatttctttagatttcttttcaacaaaatcctttgcctttgccatgta

SEQ ID NO: 27708 - DNA, 260 bp, Unknown
  Description of Unknown: RightRegion for integrase B1709 sequence
cgcgtagcttcgatagagtttaagaacggactcgttcacgagttcctttacagagaataagagcaggctgaggaggcagcctgctctctttatgtgtgtatgagtaagattagattaacaagaaaggttgattttacgcggttttaggcatcttgtttttagagttcatctgacacccgaaggtctttaaaaacaaggttagtggtcttcccagttcttcggactttttcttgacatactgcctagcctttgccatgtag

SEQ ID NO: 27709 - DNA, 260 bp, Unknown
  Description of Unknown: RightRegion for integrase B1710 sequence
gataagaactggaaaccagaagaggaaataccaggtccattacaggaatttggaatttaagcggcctaaatcgacgtataacgagctaaaacagttaaggggtacttcgtacccctttttaatttaattgcgttagagagcctctaagagagtattaaagtattcatccattaaatcaggactgtcgtcatcaatacagaaaaattccggtttattgatgccgtagaagtgagtatgtagcttgaatgtatcgtcatcaa

SEQ ID NO: 27710 - DNA, 260 bp, Unknown
  Description of Unknown: RightRegion for integrase B1711 sequence
catgacggacacatggggttctgtttcagaaacggaatgaaatgtgagtatccacaataaaaactaataacgaaaaggcctgatggtctgcttataatgcgggcaatcaggctttttatagtttgatctctgatgaaatgcgaaatccatgaaaatgtcacaaaatatctgattctgcgacggcgttggatgaagtaggcaaacatggaaacatcctaccatccattacaatattatacgtggaaagccttaccatgtca

SEQ ID NO: 27711 - DNA, 260 bp, Unknown
  Description of Unknown: RightRegion for integrase B1712 sequence
tctcttttctctactgtgtctgggcggcttttccagataaaagataagagagaaaagtgaaaagtggtgtgtatcaatcgtttcgcgatcagcgaaacgccttcggcgatgtattttttcagcttcgccttgccgctttgcggcttttcgccttcggcgatgctgaatgcaaaatctcgacttgtacctcttgacaacgccccccatatcagtgtataataatatcgttaatatgtaaactaattttgtgcattttgtat

SEQ ID NO: 27712 - DNA, 258 bp, Unknown
  Description of Unknown: RightRegion for integrase B1713 sequence
cgtgtggcttcgatagagtttaagaacggactcgttcacgagttcctttacagagaataagagcaggctgaggagacagcctgctctctttatatgtgtatgagtaagattagattaacaagaaaggttgattttacaaggttttaggcatcttgtttttagagttcatctgacagccgaatgtctttacaaaataagtcataggacggccgatttctttagatttcttttcaacaaaatcctttgcctttgccatgt

SEQ ID NO: 27713 - DNA, 260 bp, Unknown
  Description of Unknown: RightRegion for integrase B1714 sequence
tcaacgcctatgtctgtaagcaatcccttgagttcgggatacggcattgaatatcgctgagaaagatagcgaagcgacgcaccgagttccccgtgcggcccaccgtattgcttttagatataggtcaaagataaaaataaatagcgaggttattagcttctttttcgtatgttatatggtctataactgagcggagtgcttcatttttaactgcttcgtctgtttcgggcgatttaattgtttttaaaacgcttgcaacc

SEQ ID NO: 27714 - DNA, 260 bp, Unknown
  Description of Unknown: RightRegion for integrase B1715 sequence
gataagaactggaaaccagaagaggaaataccaggtccattacaggaatttggaatttaagcggcctaaatctacgtataacgagctaaaacagttaaggggtacattcgtacccctttttaatttaattgcgttagagagcctctaagagagtattaaagtattcatccattaaatcaggactgtcgtcatcaatacagaaaaattccggtttattgatgccgtagaagtgagtatgtagcttgaatgtatcgtcatca

SEQ ID NO: 27715 - DNA, 260 bp, Unknown
  Description of Unknown: RightRegion for integrase B1716 sequence
cgtgtggcttcgatagagtttaagaacggactcgtgcacgagttcctttacagagagtgagagcaggctgaggaggcagcctgctctcttttttgtatgtatgagtaagattagattaacaagaaaggttgattttacaagattttaggcatcttgtttttagagttcatctgacagccgaatgtctttacaaaataagtcataggacggccgatttctttagatttcttttcaacaaaatcctttgcctttgccatgta

SEQ ID NO: 27716 - DNA, 260 bp, Unknown
  Description of Unknown: RightRegion for integrase B1717 sequence
cgtgtggcttcgatagagtttaagaacggactcgttcacgagttcctttacagagaataagagcaggctgaggaggcagcctgctctctttatgtgtgtatgagtaagattagattaacaagaaaggttgattttacaaggttttaggcatcttgtttttagagttcatctgacacccgaatgtctttacaaaataagtcataggacgaccgatttctttagatttcttttcaacaaaatcctttgcctttgccatgtag

SEQ ID NO: 27717 - DNA, 260 bp, Unknown
  Description of Unknown: RightRegion for integrase B1718 sequence
atgatcccgtacagcagccagggatttaaccgccggttgggagggctggacctaaattaggcagccagggcgagctgctgacgctgcgcgcccttgaaagaaacaactttgccaattagttggctgtacccctgtttatcgtggcgaggagaccacggcctgctgcccctgtcaaaactatcatgtcgaaaccagtcacccccggtttcaaacgctgtcaatgagcaacactaagtatatacgcaacatttcgatattca

SEQ ID NO: 27718 - DNA, 260 bp, Unknown
  Description of Unknown: RightRegion for integrase B1719 sequence
cgtgtggcttcgatagagtttaagaacggactcgttcacgagttcctttacagagaataagagcaggctgaggaggcagcctgctctctttttggtacgtatgagtaagattagattaacaagaaaggttgattttacgcggttttaggcatcttgtttttagagttcatctgacacccgaaggtcttgacgaaataagtcatgggacggccgatttctttagatttcttttcaacaaaatcctttgcctttgccatgta

SEQ ID NO: 27719 - DNA, 260 bp, Unknown
  Description of Unknown: RightRegion for integrase B1720 sequence
cgtgtggcttcgatagagtttaagaatggactcgttcacgagttcctttacagagaataagagcaggctgaggaggcagcctgctctctttatgtgtgtatgagtaagattagattaacaagaaaggttgattttacaaggttttaggcatcttgtttttagagttcatctgacagccgaaggtctttaaaaacaaggttagtggtcttcccagttcttcggactttttcttgacatactgcctagcctttgccatgtag

SEQ ID NO: 27720 - DNA, 236 bp, Unknown
  Description of Unknown: RightRegion for integrase B1721 sequence
cgtgtggcttcgatagagtttaagaatggactcgttcacgagttcctttacagagaataagagcaggctgaggaggcagcctgctctctttatgtgtgtatgagtaagattagattaacaagaaaggttgattttacaaggttttaggcatcttgtttttagagttcatctgacagccgaaggtctttacaaaataagtcataggacggccgatttctttagatttcttttcaaca

SEQ ID NO: 27721 - DNA, 260 bp, Unknown
  Description of Unknown: RightRegion for integrase B1722 sequence
cgtgtggcttcggtagagtttaagaacggactcgttcacgagttcctttacagagaataagagcaggctgaggaggcagcctgctctctttttggtacgtatgagtaagattagattaacaagaaaggttgattttacgcggttttaggcatcttgtttttagagttcatctgacacccgaatgtctttacaaaataagtcataggacggccgatttctttagatttcttttcaacaaaatcctttgccttttccatgta

SEQ ID NO: 27722 - DNA, 260 bp, Unknown
  Description of Unknown: RightRegion for integrase B1723 sequence
gataagaactggaaaccagaagaagaaataccaggtccgttacaggaatttgggatttaagcggcctaaatcgacgtataacgagttaaacactttcaggggtacagatgtacccctttttaatttaattgcgttatacagcctctaaagggcttaaatcaagttctgctaaattactgtaatattcctcatcgctggtatctgggaacatgaattgtgattcatcgaatacaaaatcatctttgatcgctgaccagtat

SEQ ID NO: 27723 - DNA, 260 bp, Unknown
  Description of Unknown: RightRegion for integrase B1724 sequence
gaactttgttgggacaacgaaagtaccgttgagacggtatgcaaattagtgcggaaataggcggttttgtaggctttcaggtatgaagttcagtctatttgccacccttttgccacccaaaaaaatgaaatgaacaaaaaatgaagaaaagcggttgaacactctgaactaaatcggaatgtccaaccgctttttttatgcctgtaaagatttttcgaatatatcaacagctgcctgttgcatcacatctgtgttaaaag

SEQ ID NO: 27724 - DNA, 260 bp, Unknown
  Description of Unknown: RightRegion for integrase B1725 sequence
aaacggagcaggaaagacaacacttttaaatatcttagcaggaatcaggctagactataaaggtgaaatcacttatttcggacagtattccgacaaacagaaggaaaactcgggagatattaaaaaccgcataggctataccggccccggcaaatactatctgccgcagtggacagttaaggatatcgaggaaatcagcaagctgatgtttgatgatttttcagcagatgattttcacagatattgtgaggagcttgcaa

SEQ ID NO: 27725 - DNA, 215 bp, Unknown
  Description of Unknown: RightRegion for integrase B1726 sequence
cgcgtggcttcgatagagtttaagaacggactcgttcacgagttcctttacagagaataagagcaggcttaggcagcctgctctctttatgtgtgtatgagtaagattagattaacaagaaaggttgattttacaaggttttaggcatcttgtttttagagttcatctgacagccgaaggtctttacaaaataagtcataggacggccgatttct

SEQ ID NO: 27726 - DNA, 254 bp, Unknown
  Description of Unknown: RightRegion for integrase B1727 sequence
cgtgtggcttcgatagagtttaagaacggactcgttcacgagttcctttacagagaataagagcaggcttaggcagcctgctctctttatgtgtgtatgagtaagattagattaacaagaaaggttgattttacaaggttttaggcatcttgtttttagagttcatctgacagccgaaggtcttgacgaaataagtcatgggacggccgatttctttagatttcttttcaacaaaatcctttgcctttgccatg

SEQ ID NO: 27727 - DNA, 260 bp, Unknown
  Description of Unknown: RightRegion for integrase B1728 sequence
cgtgtggcttcgatagagtttaaaaatggactcgttcacgagttcctttacagagagtgagagcaggctgaggagacagcctgctctcttttttgtatgtatgagtaagattagattaacaagaaaggttgattttacaaggttttaggcatcttgtttttagagttcatctgacacccgaatgtctttacaaaataagtcatgggacggccgatttctttagatttcttttcaacaaaatcctttgcctttgccatgta

SEQ ID NO: 27728 - DNA, 260 bp, Unknown
  Description of Unknown: RightRegion for integrase B1729 sequence
cgtgtggcttcggtagagtttaagaacggactcgttcacgagttcctttacagagaataagagcaggctgaggaggcagcctgctctctttatgtgtgtatgagtaagattagattaacaagaaaggttgattttacaaggttttaggcatcttgtttttagagttcatctgacagccgaaggtctttacaaaataagtcataggacggccgatttctttagatttcttttcaacaaaatcctttgcctttgccatgtag

SEQ ID NO: 27729 - DNA, 260 bp, Unknown
  Description of Unknown: RightRegion for integrase B1730 sequence
cgtgtggcttcgatagagtttaagaatggactcgttcacgagttcctttacagagaataagagcaggctgaggaggcagcctgctctctttatgtgtgtatgagtaagattagattaacaagaaaggttgattttacaaggttttaggcatcttgtttttagagttcatctgacagccgaaagtctttacaaaataagtcataggacggccgatttctttagatttcttttcaacaaaatcctttgcctttgccatgtag

SEQ ID NO: 27730 - DNA, 260 bp, Unknown
  Description of Unknown: RightRegion for integrase B1731 sequence
atggtcacatcagaatggctgtcctgtgtattatgcaggacagtcattttgtcgtcatagaggtaaatcctgttgacaaaagtatccaccagtgcctgccgatatttcaggtcattcacatcgcctttgcggaactggttcaggaagaaccgcacttcattgaccgtgggcgtagggtgggaggaagtctccaaaagaatctgctgttccagctcgttgcgttcccgtttcttctgggagatacgctccgcaatcacatc

SEQ ID NO: 27731 - DNA, 260 bp, Unknown
  Description of Unknown: RightRegion for integrase B1732 sequence
tcctgcgggttcgaccgcatgcagtctgccgcgtttacacggccgctgcgcgaaatgtaactcgaggagtattctcttcagtttcatcagaaatccattataattttgataaaactacggcggattctttgttgcacggcattttcgtggatgatataatgagcgttagagaaagtaatttttggggaggaatagtatgatttaccacggttcgtgtatttctgggctgcacacaatcaaggcaaattcaaaatctcatt

SEQ ID NO: 27732 - DNA, 260 bp, Unknown
  Description of Unknown: RightRegion for integrase B1733 sequence
cgtgtggcttcgatagaatttaagaatggactcgttcacgagttcctttacagagagtgagatcaggctgaggaggcagcctgctctcttttttgtatgtatgagtaagattagattaacaagaaaggttgattttacaaggttttaggcatcttgtttttagagttcatctgacagccgaatgtctttacaaaataagtcataggacggccgatttctttagatttcttttcaacaaaatcctttgccttttccatgta

SEQ ID NO: 27733 - DNA, 258 bp, Unknown
  Description of Unknown: RightRegion for integrase B1734 sequence
cgtgtggcttcgatagagtttaaaaatggactcgttcacgagttcctttacagagagtgagatcaggctgaggaggcagcctgctctcttttttgtatgtatgagtaagattagattaacaagaaaggttgattttacaaggttttaggcatcttgtttttagagttcatctgacagccgaaagtctttacaaaataagtcataggacggccgatttctttagatttcttttcaacaaaatcctttgcctttgccatg

SEQ ID NO: 27734 - DNA, 260 bp, Unknown
  Description of Unknown: RightRegion for integrase B1735 sequence
catgtggcttcgatagagtttaaaaatggactcgttcacgagttcctttacagagagtgagagcaggctgaggagacagcctgctctcttttttgtatgtatgagtaagattagattaacaagaaaggttgattttacaaggttttaggcatcttgtttttagagttcatctgacacccgaatgtctttacaaaataagtcataggacgaccgatttctttagatttcttttcaacaaaatcctttgcctttgccatgta

SEQ ID NO: 27735 - DNA, 260 bp, Unknown
  Description of Unknown: RightRegion for integrase B1736 sequence
gagctgcctcagagtatggcggattccgtggcagaagcaatccaaaatgaggttgcatgagcagaaaagagaggctgtgccgaaacacagcctccctccacaggaacaaatattaagttatatgggtaggttcataaattgtccctatggaacgccggagaacgggcggcagttttttattgcagtgcgtcaatgtaagcgttcagcgcggcaaaatcgccgcggggataggcgtttaggtcgcggtttttcgcgttgat

SEQ ID NO: 27736 - DNA, 258 bp, Unknown
  Description of Unknown: RightRegion for integrase B1737 sequence
cgcgtagcttcgatagagtttaagaacggactcgttcacgagttcctttacagagaataagagcaggctgaggaggcagcctgctctctttttggtacgtatgagtaagattagattaacaagaaaggttgattttacgcggttttaggcatcttgtttttagagttcatctgacagccgaaggtcttgacgaaataagtcatgggacggccgatttctttagatttcttttcaacaaaatcctttgcctttgccatg

SEQ ID NO: 27737 - DNA, 260 bp, Unknown
  Description of Unknown: RightRegion for integrase B1738 sequence
cgtgtggcttcgatagagtttaagaacggactcgttcacgagttcctttacagagaataagagcaggctgaggaggcagcctgctctctttatgtgtgtatgagtaagattagattaacaagaaaggttgattttacaaggttttaggcatcttgtttttagagttcatctgacagccgaaggtcttgacgaaataagtcatgggacggccgatttctttagatttcttttcaacaaaatcctttgcctttgccatgtag

SEQ ID NO: 27738 - DNA, 260 bp, Unknown
  Description of Unknown: RightRegion for integrase B1739 sequence
cgtgtggcttcgatagagtttaagaatggactcgttcacgagttcctttacagagagtgagagcaggctgaggaggcagcctgctctctttatgtatgtatgagtaagattagattaacaagaaaggttgattttacaaggttttaggcatcttgtttttagagttcatctgacagccgaaggtctttacaaaataagtcataggacggccgatttctttagatttcttttcaacaaaatcctttgcctttgccatgtag

SEQ ID NO: 27739 - DNA, 260 bp, Unknown
  Description of Unknown: RightRegion for integrase B1740 sequence
cgcgtagcttcgatagagtttaagaacggactcgtgcacgagttcctttacagagagtgagagcaggctgaggaggcagcctgctctctttttatgtgtatgagtaagatcagattaacaagaaaggttgattttacaaggttttaggcatcttgtttttagagttcatcgtgcacccgaatgtctttacaaaataagtcataggacggccgatttctttagatttcttttcaacaaaatcctttgcctttgccatgtag

SEQ ID NO: 27740 - DNA, 260 bp, Unknown
  Description of Unknown: RightRegion for integrase B1741 sequence
cgtgtggcttcgatagagtttaaaaatggactcgttcacgagttcctttacagagagtgagagcaggctgaggagacagcctgctctcttttttgtatgtatgagtaagattagattaacaagaaaggttgattttacaaggttttaggcatcttgtttttagagttcatctgacagccgaaagtctttacaaaataagtcataggacggccgatttctttagatttcttttcaacaaaatcctttgcctttgccatgta

SEQ ID NO: 27741 - DNA, 260 bp, Unknown
  Description of Unknown: RightRegion for integrase B1742 sequence
gcactatccacgggtacgaagatgaacatggtgtttggcttcttccacaagctgccgtaggctggtacgtgtactgaaagattttttcgcttttgccgtccaccagccagttgacttttttgcaaatcgagaatacactgtatgcagtgatcgtgctgtggatacttgtgaggcccacagcccggaaggaggttcctaaacataggagcctcctttttatatgtcgtgaagaaacatctacctgtaaaagattcgtctga

SEQ ID NO: 27742 - DNA, 260 bp, Unknown
  Description of Unknown: RightRegion for integrase B1743 sequence
cgcgtggcttcgatagagtttaagaacggactcgttcacgagttcctttacagagaataagagcaggcttaggcagcctgctctctttatgtgtgtatgagtaagattagattaacaagaaaggttgattttacaaggttttaggcatcttgtttttagagttcatctgacagccgaatgtctttacaaaataagtcataggacggccgatttctttagatttcttttcaacaaaatcctttgcctttgccatgtagtaa

SEQ ID NO: 27743 - DNA, 260 bp, Unknown
  Description of Unknown: RightRegion for integrase B1744 sequence
aaatggagcgggaaagacaacaacgcttcgcatgttagcaacgttgatcaaaccggatgagggggatgctgtcattggtggttattccgtgcaaaaagaagcagagcaggttcggcgtaagattggatttttgaccagtgaacttcgattggaagaatttttcactccaaattatttgtttgattttttctcaaatctccatcaggtgccggctaatcttcgtaaagagcgaaagaagcacttattcgagatctttggca

SEQ ID NO: 27744 - DNA, 260 bp, Unknown
  Description of Unknown: RightRegion for integrase B1745 sequence
ctttgttgggacaatgaaagtaccgttgaaacagtctgcttgctgtcgaagaaaccttgagtttatgcgggttagcgggcttttatgcaaaatatgaacctgtgtttttagcaggaaaaaatgtatatagaatttagtaattgcagaggggtgcaaaaatttgttgagaccgaagttgtgcgccggaatagtatcggtagagatttggtgtccgcgaatagttgcacccagtatattagataagacgttttttaattagg

SEQ ID NO: 27745 - DNA, 260 bp, Unknown
  Description of Unknown: RightRegion for integrase B1746 sequence
cgcgtggcttcgatagagtttaagaacggactcgttcacgagttcctttacagagagtgagagcaggctgaggaggcagcctgctctcttttttgtatgtatgagtaagattagattaacaagaaagattgattttacaaggttttaggcatcttgtttttagagttcatctgacacccgaaggtcttgacgaaataagtcataggacggccgatttctttagatttcttttcaacaaaatcctttgcctttgccatgta

SEQ ID NO: 27746 - DNA, 260 bp, Unknown
  Description of Unknown: RightRegion for integrase B1747 sequence
cgtgtggcttcgatagagtttaaaaatggactcgttcacgagttcctttacagagagtgagatcaggctgaggaggcagcctgctctcttttttgtatgtatgagtaagattagattaacaagaaaggttgattttacaaggttttaggcatcttgtttttagagttcatctgacacccgaaggtcttgacgaaataagtcataggacggccgatttctttagatttcttttcaacaaaatcctttgcctttgccatgta

SEQ ID NO: 27747 - DNA, 260 bp, Unknown
  Description of Unknown: RightRegion for integrase B1748 sequence
cgtgtggcttcgatagagtttaagaatggactcgttcacgagttcctttacagagaataagagcaggctgaggaggcagcctgctctctttatgtgtgtatgagtaagattagattaacaagaaaggttgattttacaaggttttaggcatcttgtttttagagttcatctgacagccgaaggtctttacaaaataagtcataggacggccgatttctttagatttcttttcaacaaaatcctttgcctttgccatgtag

SEQ ID NO: 27748 - DNA, 109 bp, Unknown
  Description of Unknown: RightRegion for integrase B1749 sequence
tatcctacagagtttcccttaaagcctataggaatcagccttaaggtatcccactattgactgtcattcctcacccgcgggaggaggctcagagacagttagcagatta

SEQ ID NO: 27749 - DNA, 260 bp, Unknown
  Description of Unknown: RightRegion for integrase B1750 sequence
cgtgtggcttcgatagagtttaaaaatggactcgttcacgagttcctttacagagagtgagagcaggctgaggagacagcctgctctcttttttgtatgtatgagtaagattagattaacaagaaaggttgattttacaaggttttaggcatcttgtttttagagttcatctgacagccgaatgtctttacaaaataagtcataggacggccgatttctttagatttcttttcaacaaaatcctttgcctttgccatgta

SEQ ID NO: 27750 - DNA, 260 bp, Unknown
  Description of Unknown: RightRegion for integrase B1751 sequence
cgcgtagcttcgatagagtttaagaacggactcgtgcacgagttcctttacagagagtgagagcaggctgaggaggcagcctgctctctttttatgtgtatgagtaagatcagattaacaagaaaggttgattttacaaggttttaggcatcttgtttttagagttcatcgtgcagccgaaagtctttacaaaataagtcataggacggccgatttctttagatttcttttcaacaaaatcctttgcctttgccatgtag

SEQ ID NO: 27751 - DNA, 260 bp, Unknown
  Description of Unknown: RightRegion for integrase B1752 sequence
ttgtgtttggacaatggaagtcacgtggagtgtatcacggcatttgcccgcatgaaataaggatctccggcattttcaaggcgtaaaaaatgcccatttgccaccattgaactttgaacatgaaaaagagggttgaaccgttgaacttttcagcggctcagccctctttttcgttatgatgttttcttctgccctatcgcctgttcaaagatgtcaacagaacgatttgccattgtttccgtatcgtgtacataggtttg

SEQ ID NO: 27752 - DNA, 260 bp, Unknown
  Description of Unknown: RightRegion for integrase B1753 sequence
gataagaactggaaaccagaagaagaaataccaggtccattacaggaatttggaatttaagctaatgaagatgattaagattttaggtttgattttatctatgaattcttgcctggcattggcaaccgtagaccaagaaatgcgtagaccgctaacctatagagaagatgctttcattgatggagcacataaaacattgaaattgctatgtcaaaagaccaccagtaattacggtgaatacagaaaatgttatgaggaat

SEQ ID NO: 27753 - DNA, 260 bp, Unknown
  Description of Unknown: RightRegion for integrase B1754 sequence
cgcgtggcttcgatagagtttaagaacagactcgttcacgagttcctttacagagagtgagagcaggctgaggaggcagcctgctctcttttttgtatgtatgagtaagattagattaacaagaaaggttgattttacaaggttttaggcatcttgtttttagagttcatctgacagccgaaggtctttacaaaataagtcataggacggccgatttctttagatttcttttcaacaaaatcctttgcctttgccatgta

SEQ ID NO: 27754 - DNA, 260 bp, Unknown
  Description of Unknown: RightRegion for integrase B1755 sequence
tccaagcggcgtcccaaggcacggagaaaggagagcggagaaaagtggcaaagacagtaagggccatcccggccaccatcagccgttatacggcggctccgattaacagccggaagaagcggagagtagcgggctatgccagggtttccacggaccatgatgaccagatcagcagctatgaagcacaggtcgattattatacgaactatatcagggaacgggatgactgggaattcattggcatctatacagaaatgaaa

SEQ ID NO: 27755 - DNA, 260 bp, Unknown
  Description of Unknown: RightRegion for integrase B1756 sequence
cgtgtggcttcgatagagtttaagaacggactcgttcacgagttcctttacagagagtgagagcaggctgaggaggcagcctgctctcttttttgtatgtatgagtaagattagattaacaagaaaggttgattttacaaggttttaggcatcttgtttttagagttcatctgacagccgaaagtctttaaaaacaaggttagtggtcttcccagttcttcggactttttcttgacatactgcctagcctttgccatgta

SEQ ID NO: 27756 - DNA, 260 bp, Unknown
  Description of Unknown: RightRegion for integrase B1757 sequence
gataagaactggaaaccagaagaagaaataccaggtccattacaagaatttggaatttaagctaatgaagatgattaagattttaggtttgattttatctatgaattcttgcttggcattggcaaccgtagaccaagaaatgcgtagaccgctaacctatagagaagatgctttcattgatggagcacataagacattgaaattgctatgtcaaaagaccaccagtaattacgatgaatacagaaaatgttatgaggaat

SEQ ID NO: 27757 - DNA, 260 bp, Unknown
  Description of Unknown: RightRegion for integrase B1758 sequence
cgtgtggcttcgatagagtttaaaaatggactcgttcacgagttcctttacagagagtgagagcaggctgaggagacagcctgctctcttttttgtatgtatgagtaagattagattaacaagaaaggttgattttacaaggttttaggcatcttgtttttagagttcatctgacacccgaatgtctttacaaaataagtcataggacggccgatttctttagatttcttttcaacaaaatcctttgcctttgccatgta

SEQ ID NO: 27758 - DNA, 260 bp, Unknown
  Description of Unknown: RightRegion for integrase B1759 sequence
gatttttcttgtttgcagttggtattgtcgcggaatgaattcaaaatggaggatgcatgacccatggtcgatcatatgcttgtacgtggagcaaaggtccacaacctgaaaaatattgacgtggacattccgctgaatcagatcgtcggcattgcgggcgtgtccggttccggcaagtcgtcgctggcgctgggcgtgctgtatgccgagggctcgcgccgctatctggaggcgctgtcgacctacacgcgccgccggat

SEQ ID NO: 27759 - DNA, 260 bp, Unknown
  Description of Unknown: RightRegion for integrase B1760 sequence
gcgacggtacgcccatttttatgcagttattacaggatgctgatgcggcctgcgccgtagggattctcgtaatccagcagatagcccgggtaatcggccagcgggctgtttgcggtggtcaaatgcggcagaccctctgcatctacaccgccaaaggtcatggcataggtagacatcacaaggtaatcctcagacacatagtccttgatcagctctgcgccatcaaacatggcaaagccatcgcccagattgcgcagagt

SEQ ID NO: 27760 - DNA, 260 bp, Unknown
  Description of Unknown: RightRegion for integrase B1761 sequence
gccgagcgcagtgctggcgacgcaaccatctacatccaaatcgaacggcggtttgaatagcaaaccttagccggtcgattatatgtatcataaaacaacttattcataagtcatgagtagcacatcgtctgccgctgcgccaagcgcggcataatcgtgcgactcatacagcagtcccggctggtcggccgaggtcttgggcgcaagcgccaccatgaccgtcaacccggacggctccagccgcgtgcgcaccgcgcgga

SEQ ID NO: 27761 - DNA, 260 bp, Unknown
  Description of Unknown: RightRegion for integrase B1762 sequence
aaccatatcggagtattcgaccactcaaaggtcactttgtggaaagggaaagcggtatagtacgcaacatactataccgcaaaacctaaatcttaaaaacatccttaccaaaccctcacatttacaagggtttcaagcggagacggtgggattcgaacccaacctaggatcttataaaatcaaggcctatgcagtatcgtgttgcatttcgtgttgcacgcattattaaaacctaaaaagatgatacaatattttgggaa

SEQ ID NO: 27762 - DNA, 260 bp, Unknown
  Description of Unknown: RightRegion for integrase B1763 sequence
cttatttgccggttgttctgctctttgtgcgtggcgggtcattcggcacccactctataatttcagacggttggcaatgtaacgcctcgcatatcaagtcaagatgctcaaggctgatgcgctcggcaatgccatgataatactcgttgatagtattcggtctgataccggtagcccttgcaagatccgcctgtgaccacttagcctcgccgagcttcgtagacagtaaaaatcttatcatatgtagttcctcctttcta

SEQ ID NO: 27763 - DNA, 260 bp, Unknown
  Description of Unknown: RightRegion for integrase B1764 sequence
cttatttgccggttgttctgctttttgttcgtggcgggttatttggcacccactctataatgtcagacggctggcaatgtaacgcctcacagatcaagtcaagatgctcaaggctgatgcgctcggcaatgccatgataatactcattgatcgtatttggtcttatgcctgtagctcttgcaagatccgcctgtgtccacttgacttcgccgagcttcgtggacagtaaaaatcttatcatatgtagttcctccttccta

SEQ ID NO: 27764 - DNA, 260 bp, Unknown
  Description of Unknown: RightRegion for integrase B1765 sequence
gcgacggtacgcccatttttatgcagttattacagaatgctgatgcggcctgcgccgtagggattctcgtaatccagcagatagcccgggtaatcggccagcgggctgtttgcggtggtcaaatgcggcagaccctctgcatctacaccgccaaaggtcatggcataggtagacatcacaaggtaatcctcagacacatagtccttgatcagctctgcgccatcaaacatggcaaagccatcgcccagattgcgcagagt

SEQ ID NO: 27765 - DNA, 260 bp, Unknown
  Description of Unknown: RightRegion for integrase B1766 sequence
actgaaagtatctcctattttagacagataggagccgacgtaaagagttatgctatctaacatatatcaaaaagaggtaagataacgccctctatgaaaaaggttacgttatcttacctcatcaaaggtcgtgccgctgaccccatcatcgcagtagacggagcagtcgttccagccctgttcctcacaatatttcatgagcatcagcttttggttttcaatgctgaccgactcgcccgcccgttcgtcatccttgctga

SEQ ID NO: 27766 - DNA, 260 bp, Unknown
  Description of Unknown: RightRegion for integrase B1767 sequence
tccgcgtgcgtgtcggcgcacggcagtgcgccgagcgttcctcttcgtctccaccaatgacacgaatactgcttttgcggtgttcgtgttatttttatacccacgcccgatttcctaatcttcgtttaatctttacacgctatgataaaatctgtataattataccggagggtgatccaatgcgtattctgcttgccgaggacgagaagagtctcaacaggataatcacaaagcagctcaaggctgccggctacagcgta

SEQ ID NO: 27767 - DNA, 260 bp, Unknown; identical to SEQ ID NO: 27763
  Description of Unknown: RightRegion for integrase B1768 sequence

SEQ ID NO: 27768 - DNA, 260 bp, Unknown
  Description of Unknown: RightRegion for integrase B1769 sequence
ttcacaatagctgttttttggacggtttttgtgcaaacgagaagacacgccctgccatgattggcaaggcgtgtctttgttatgatacggggatgcttgactcctatttcttatacattgcctggagaatcccgaccttttctgcttcctccacggcctcaccgtggagatatctgtagagaatcaacatggacgccggtgtctcgcctttctctcggcggcagttttcaatgattctcactacctccttatgaagagaa

SEQ ID NO: 27769 - DNA, 260 bp, Unknown
  Description of Unknown: RightRegion for integrase B1770 sequence
cttatttgccggttgttctgctctttgtgcgtggcgggtcattcggcacccactctataatttcagacggttggcaatgtaatgcctcgcatatcaggtcaagatgctcaaggctgatgcgctcggcaatgccatgataatactcgttgatagtattcggtctgataccggtagcccttgcaagatccgcctgtgaccacttagcctcgccgagcttcgtagacagtaaaaatcttatcatatgtagttcctcctttcta

SEQ ID NO: 27770 - DNA, 260 bp, Unknown; identical to SEQ ID NO: 27763
  Description of Unknown: RightRegion for integrase B1771 sequence

SEQ ID NO: 27771 - DNA, 260 bp, Unknown
  Description of Unknown: RightRegion for integrase B1772 sequence
gcgacggtacgtccatttttatgcagttattacagaatgctgatgcggcctgcgccgtagggattctcgtaatccagcagatagcccgggtaatcggccagcgggctgtttgcggtggtcagatgcggcagaccctctgcatctacaccgccaaaggtcatggcataggtagacatcacaaggtaatcctcagacacatagtccttgatcagctctgcgccatcaaacatggcaaagccatcgcccagattgcgcagagt

SEQ ID NO: 27772 - DNA, 260 bp, Unknown; identical to SEQ ID NO: 27769
  Description of Unknown: RightRegion for integrase B1773 sequence

SEQ ID NO: 27773 - DNA, 260 bp, Unknown
  Description of Unknown: RightRegion for integrase B1774 sequence
tttttggacgaaaaattacttgaaaacaatggctccgatttatcgcggaaagggctataattttaatattacttcgtccacggcatatgaccacaaattcatctatggcagaaatatatatgacaatatctcgctgatagtaaatgaaatgtttgaaaactatctgtcgagacctaatgtgaagcagccgattctgacgcagtactgtgacggacagaaggtctcctgtccgagctggatgaccagattgcgtttgcgta

SEQ ID NO: 27774 - DNA, 260 bp, Unknown
  Description of Unknown: RightRegion for integrase B1775 sequence
gaactaacttctagagagctaggggaagctgctgctaggtacgctaagaagcaagaataatcataaataagcataaaatccagtcttttggctggatttgtgctttattaaataaacataaataaaattccaagattgcctagttttatatttatttattacttttgtgataacaataatcaaaaactatctattatggttaattttgtagcactagatttagaaacagataatatttaagaatatgaagcagtcaatat

SEQ ID NO: 27775 - DNA, 260 bp, Unknown
  Description of Unknown: RightRegion for integrase B1776 sequence
gagaaatggtgcaggaaagactacaataataaattgcatcttaaaaatgataaaacctgatcaaggaattatagagtggaatgggaagaatattgccaagttaaaaaacagaatatatttttctgaagtaggggcgttattggagacaagcatcaatatatacgattatttgactggcatgcaaaatatagaatattttgcggggttaatgaatcttgataaaggatgtctggaaaaagctagtaaatatattaagcagt

SEQ ID NO: 27776 - DNA, 260 bp, Unknown
  Description of Unknown: RightRegion for integrase B1777 sequence
ggacacacttttaaaacaaattgccggactttcgcaaaaaatttccaagtatcaaattaaaatttagaaccggtgtggaatcttttaacccgaaaatcagacaatttttgaataaaggtattcctcaagccgtaacagcctacgatatcgcgaaagattttgatggagtctgcttgctaattggatttgtcgggcaaactcgcgatgacataataaaagacataaatatggcccgtaaatattttgagtacacaagcgta

SEQ ID NO: 27777 - DNA, 260 bp, Unknown
  Description of Unknown: RightRegion for integrase B1778 sequence
aaccatatcggagtattcgaccactcaaaggtcactttgtggaaaggaaaagcggtatagtacgcaacatactataccgcaaaacctaaatcttaaaaacatccttaccaaaccctcacattttcaaggctttttctttttgtgagaaccttcgtgagaaccaccagataacaaatcttcaaaatgttcatttgcaagcttattcatttcctgtgctttatctgacagtgcatgtctgtaaacagctttaagcgttccat

SEQ ID NO: 27778 - DNA, 260 bp, Unknown
  Description of Unknown: RightRegion for integrase B1779 sequence
aatgacaaccttttaaagaagatgatcgaggagcaggagaagaagatggcgggcaaataagggttagagcctgagcatctgagggagaggccttcgcgatgggatgggatttcagagattctatctgatcgcgggggcttttttctgtgtaaaattggttggcgaggggtacgcggtgagcttccgcctgggagcgcccggggatgcggggatggttcctctaagcttgcgggagactgctaaaggcggaaaaaagatga

SEQ ID NO: 27779 - DNA, 219 bp, Unknown
  Description of Unknown: RightRegion for integrase B1780 sequence
tccgcgtgcgtgtcggcgcacggcagtgcgccgagcgatcctcttcgtctccaccagtaacacgaatactgcttttgcagtgttcgtgttatttttttagaagaggatcgaacaggacggttctgcaaagcagaattccgagcgtccggtggacggtcggaaagtccgcgtgcgtgtcggcgcacggcagtgcgccgagcgatcctcttcgtctccacc

SEQ ID NO: 27780 - DNA, 260 bp, Unknown
  Description of Unknown: RightRegion for integrase B1781 sequence
atggtcacatcagaatggctgtcctgtgtattatacaggacagtcattttgtcgtcataaaggtaaatcctgttgacaaaagtatccaccagtgcctgccgatatttcaggtcattcacatcgcctttgcggaactggttcaggaagaaccgcacttcattgaccgtgggcgtagggtgggaggaagtctccaaaagaatctgctgttccagctcgttgcgttcccgtttcttctgggagatacgctccgcaatacacgc

SEQ ID NO: 27781 - DNA, 260 bp, Unknown
  Description of Unknown: RightRegion for integrase B1782 sequence
tccgcgtgcgtgtcggcgcacggcagtgcgccgagcgatcctcttcgtctccaccaatgacacgaatactgcttttgcagtgttcgtgttatttttatacccacgcccgatttcctaatcttcgtttaatctttacacgctatgataaaatctgtataattataccggagggtgatccaatgcgtattctgcttgccgaggacgagaagagtctcaacaggataatcacaaagcagctcaaggctgccggctacagcgta

SEQ ID NO: 27782 - DNA, 260 bp, Unknown
  Description of Unknown: RightRegion for integrase B1783 sequence
ttcacaatagctgttattggaacggtttttgtgcaaacgagaagacacgccctgccatgattagcaaggcgtgtctttgttatgatacagggatgttttgacccctacttcttatacatcgcctgaagaatcccgactttctcggcctccttcacgacctcaccgtgaaggtatctgtagaggaccaacatggacgccggtgtctcgcctttctctcggcggcagttttcaatgattctcactacctccttatgaagaga

SEQ ID NO: 27783 - DNA, 248 bp, Unknown
  Description of Unknown: RightRegion for integrase B1784 sequence
ggcaagcgggataattctaatttcactttaaatgtttggcccaaacttcctcatgcctaattaccaatagcattaatgcgcaaacgtatacccccattcgtaggtcatgaggagtacgctgtccgccgcccttcccagtccttcataatcctttccttcatagagaaggccggtctgggtatcggatatcttgggcgcgagcgcgacggaaagggtgtagccttccgcattggccgccgccctcgttt

SEQ ID NO: 27784 - DNA, 260 bp, Unknown
  Description of Unknown: RightRegion for integrase B1785 sequence
gcgacggtacgcccatttttatgcagttattacaggatgctgatgcggcctgcgccgtagggattctcgtaatccagcagatagcccgggtaatcggccagcgggctgtttgcggtggtcagatgcggcagaccctctgcatctacaccgccaaaggtcatggcataggtagacatcacaaggtaatcctcagacacatagtccttgatcagctctgcgccatcaaacatggcaaagccatcgcccagattgcgcagagt

SEQ ID NO: 27785 - DNA, 109 bp, Unknown
  Description of Unknown: RightRegion for integrase B1786 sequence
tcaaaaagacgcaggaatcaaattcctgcgtcttttttgcatgtattgatgggtgtgtaactcagtgcccggcccgactggggatcgtctggagctcgaagcggtaggt

SEQ ID NO: 27786 - DNA, 113 bp, Unknown
  Description of Unknown: RightRegion for integrase B1787 sequence
tccgcgtgcgtgtcggcgcacggcagtgcgccgagcgatcctcttcgtctccaccaatgacacgaatactgcttttgcagtgttcgtgttatttttttagaagaggatcgaac

SEQ ID NO: 27787 - DNA, 260 bp, Unknown; identical to SEQ ID NO: 27781
  Description of Unknown: RightRegion for integrase B1788 sequence

SEQ ID NO: 27788 - DNA, 109 bp, Unknown
  Description of Unknown: RightRegion for integrase B1789 sequence
aatgacaaccttttaaagaagatgatcgaagagcaggaaaagaagatggcaggtaaataaagcctgagcatccggaaagccttcgcaggaaagacgggacctcatcagt

SEQ ID NO: 27789 - DNA, 260 bp, Unknown
  Description of Unknown: RightRegion for integrase B1790 sequence
tccgcgtgcgtgtcggcgcacggcagtgcgccgagcgatcctcttcgtctccaccaataacacgaatactgcttttgcagtgttcgtgttatttttttagaagaggatcgaacaggacggttctgcaaagcagaattccgagcgtccggtggacggtcggaaagtccgcgtgcgtgtcggcgcacggcagtgcgccgagcgatcctcttcgtctccaccaataacacgaatactgcttttgcagtgttcgtgttattttt

SEQ ID NO: 27790 - DNA, 109 bp, Unknown
  Description of Unknown: RightRegion for integrase B1791 sequence
ttccgctgttttcagaacgctttgaggaagtggcttctgattcagccggaaaatggatgattgagtttgctatcgccctgtacgagaagaacaccttgcagcaataaaa

SEQ ID NO: 27791 - DNA, 260 bp, Unknown
  Description of Unknown: RightRegion for integrase B1792 sequence
gaactaacttctagagagctaggggaagctgctgctaggtacgctaagaagcaagaataatcataaataagcataaaatccagtcttttggctggatttgtgctttattaaataaacataaataaaattccaagattgcctagttttatatttatttattaattttgtgataacaataatcaaaaactatctattatggttaattttgtagcactagatttagaaacagataatatttaagaatatgaagcagtcaatat

SEQ ID NO: 27792 - DNA, 260 bp, Unknown
  Description of Unknown: RightRegion for integrase B1793 sequence
tcggctttcattgccgggtgcttattttttgctcgaatagttttgacagaatgcctctaaaagagatcaatctttggtatgaagttcccgctctttttcgttgaagcgttccagaaagctgtgctccacaccttcggacttatagcccggcatggtgtccagcgccacggcgtggatgctgcggaaaatgctgttttcgatgttgggattctcacgcttcaggcggcgcagcagagtcttgacctcctgccgtttggaac

SEQ ID NO: 27793 - DNA, 260 bp, Unknown
  Description of Unknown: RightRegion for integrase B1794 sequence
caattcagtttagacaaaaaggattggcttgagaatgtgatggtattggctaaactgtaagcgtacataaggataacgagaatacaaatatgagggaaaaagcagtgaacaacgaaatgaaagcccacagcaaatcattagcggaagcggcgcagatgccggaagatttgccgatcccggaaaagagtatcaggcagattggaagcgagcagaagaaacaattgagcggaaagtaaaagtgaaaaatcctcttgaaatgg

SEQ ID NO: 27794 - DNA, 260 bp, Unknown; identical to SEQ ID NO: 27762
  Description of Unknown: RightRegion for integrase B1795 sequence

SEQ ID NO: 27795 - DNA, 260 bp, Unknown
  Description of Unknown: RightRegion for integrase B1796 sequence
aatgacaaccttttaaagaagatgatcgaagagcaggaaaagaagatggcaggtaaataaagcctgagcatccggaaagccttcgcaggaaagacgggacctcatcagttccatctgccctgtgagggctttttccgtgtcacgattcacgccttgccgcagacagtaactgagtatgttacagcaaaaaatacttgtataatagaaaaaatgcgattataatgggtatgctttcttacggtcagcgtagcaagtgcgca

SEQ ID NO: 27796 - DNA, 260 bp, Unknown
  Description of Unknown: RightRegion for integrase B1797 sequence
cccttggaaaatgaaacaatagtcgagaccgtagtcttgatgtcaagaaaagaggagtaaatcgggataggtggcttaacggtgtggtttgtgcgtattggtcaggctgtgctgttttggcaggttggctttgatttggatacaaataagggaatgcagacagcacactaggagaaacgaatggatagattttcagagaagagtcttctttcactcggagatcattatgtgtatggactcatagatccacgcagtaagca

SEQ ID NO: 27797 - DNA, 260 bp, Unknown
  Description of Unknown: RightRegion for integrase B1798 sequence
cttatttgccggttgttctgctttttgttcgtggcgggttatttggcacccactctataatatcagacggctggcaatgtaacgcctcacagatcaagtcaagatgctcaaggctgatgcgctcggcaatgccatgataatactcattgatcgtatttggtcttatgcctgtagctcttgcaagatccgcctgtgtccacttgacttcgccgagcttcgtggacagtaaaaatcttatcatatgtagttcctccttccta

SEQ ID NO: 27798 - DNA, 109 bp, Unknown; identical to SEQ ID NO: 27788
  Description of Unknown: RightRegion for integrase B1799 sequence

SEQ ID NO: 27799 - DNA, 260 bp, Unknown
  Description of Unknown: RightRegion for integrase B1800 sequence
tccgcgtgcgtgtcggcgcacggcagtgcgccgagcgatcctcttcgtctccaccaatgacacgaatactgcttttgcggtgttcgtgttatttttatacccacgcccgatttcctaatcttcgtttaatctttacacgctatgataaaatctgtataattataccggagggtgatccaatgcgtattctgcttgccgaggacgagaagagtctcaacaggataatcacaaagcaactcaaggctgccggttacagcgtg

SEQ ID NO: 27800 - DNA, 260 bp, Unknown
  Description of Unknown: RightRegion for integrase B1801 sequence
tccgcgtgcgtgtcggcgcacggcagtgcgccgagcgatcctcttcgtctccaccagtaacacgaatactgcttttgcagtgttcgtgttatttttttagaagaggatcgaacaggacggttctgcaaagcagaattccgagcgtccggtggacggtcggaaagtccgcgtgcgtgtcggcgcacggcagtgcgccgagcgatcctcttcgtctccaccaatgacacgaatactgcttttgcggtgttcgtgttattttt

SEQ ID NO: 27801 - DNA, 260 bp, Unknown; identical to SEQ ID NO: 27763
  Description of Unknown: RightRegion for integrase B1802 sequence

SEQ ID NO: 27802 - DNA, 210 bp, Unknown
  Description of Unknown: RightRegion for integrase B1803 sequence
tccgcgtgcgtgtcggcgcacggcagtgcgccgagcgatcctcttcgtctccaccagtaacacgaatactgcttttgcagtgttcgtgttatttttatacccacacccgatttcctaatcttcgtttaatctttacacgctatgataaaatctgtataattataccggagggtgatccaatgcgtattctgcttgccgaggacgagaaga

SEQ ID NO: 27803 - DNA, 260 bp, Unknown
  Description of Unknown: RightRegion for integrase B1804 sequence
cttatttgccggttgttctgctttttgtacgcggcgggtcattcggtacccactctataatctcagacggttggcaatgtaacgcctcgcatatcaggtcaagatgctcaaggctgatgcgctcggcaatgccatgataatactcgttgatagtattcggtctgataccggtagcccttgcaagatccgcctgcgaccacttagcttcgtagacagtaaaaatcttatcatatgtagttcctcctttctataattctaca

SEQ ID NO: 27804 - DNA, 260 bp, Unknown; identical to SEQ ID NO: 27784
  Description of Unknown: RightRegion for integrase B1805 sequence

SEQ ID NO: 27805 - DNA, 260 bp, Unknown
  Description of Unknown: RightRegion for integrase B1806 sequence
tccgcgtgcgtgtcggcgcactgccgtgcgccgagtgatcctcttcgtctccaccaatgacacgaatactgcttttgcggtgttcgtgttatttttatacccacgcccgattttctaatcttcgtttaatctttacacactatgataaaatctgtataattataccggagggtgatccaatgcgtattctgcttgccgaggacgagaagagtctcaacaggataatcacaaagcagctcaaggctgctggctacagcgta

SEQ ID NO: 27806 - DNA, 93 bp, Unknown
  Description of Unknown: RightRegion for integrase B1807 sequence
tccgcgtgcgtgtcggcgcacggcagtgcgccgagcgatcctcttcgtctccaccagtaacacgaatactgcttttgcagtgttcgtgttatt

SEQ ID NO: 27807 - DNA, 260 bp, Unknown
  Description of Unknown: RightRegion for integrase B1808 sequence
aaccatatcggagtattcgaccactcaaaggtcactttgtggaaaggaaaagcggtatagtacgcaacatactataccgcaaaacctaaatcttaaaaacatccttaccaaaccctcacatttactgggcttgcgggtattttacctgtataggaaaaagtagattttaagagaatcgttcttgcgatcgtagataattttatcaatgatctgcttcagagcttcgttcttttgaatgtatgtataattgttggagatga

SEQ ID NO: 27808 - DNA, 260 bp, Unknown
  Description of Unknown: RightRegion for integrase B1809 sequence
atgagtttggacagtgatacacatgtcgaagcgatagtttcgctacaaagagaaatctagtgaaaatcctccgttttacgttattttctcgtcacgttgtgttcgatggcgagggcgataaactccgcaacaaacgcattgaaaatcacattactgtttcggtggtaattgatatggagtgcggaaacacaaagaattgaatatctaacaatcggcatagccgcagactttcacaaaaagcctgcggctttttctttgcc

SEQ ID NO: 27809 - DNA, 260 bp, Unknown; identical to SEQ ID NO: 27762
  Description of Unknown: RightRegion for integrase B1810 sequence

SEQ ID NO: 27810 - DNA, 260 bp, Unknown
  Description of Unknown: RightRegion for integrase B1811 sequence
gccattacggtgaggtttaagggcgggtttgaaatcagaaaggacttaaatggaaattgaaatcccaacatggctttatgaaatgcttctgatcgaagcggcagaaactggttccgcgatagaagatatcgcggaattttgctttagggcaacaccgcataatcgcccccaaaaacgggacacagtttcaaacattcggtaaatgccagtgtatctcttaaaatgtccgccaaggcgcactgaatcaagccgtcagacaa

SEQ ID NO: 27811 - DNA, 260 bp, Unknown; identical to SEQ ID NO: 27781
  Description of Unknown: RightRegion for integrase B1812 sequence

SEQ ID NO: 27812 - DNA, 260 bp, Unknown; identical to SEQ ID NO: 27763
  Description of Unknown: RightRegion for integrase B1813 sequence

SEQ ID NO: 27813 - DNA, 260 bp, Unknown
  Description of Unknown: RightRegion for integrase B1814 sequence
tcaccatgcaggcgggccagtgacacccccgatctcaatcgaaaccgttatctgatttaacgcttgcagtgttttccgcgccgcgccagcagtaaggcaagctgggcggcgaaacggcaagagcgactggatgccgttaacaacgatttgacggcgttgcgtcaatctggtaaaatcaaattgaccggaactgctgttacccctcctgcgttgccaaacaccctaagttttgagggccacgctatcgagcaaatgggaaa

SEQ ID NO: 27814 - DNA, 260 bp, Unknown
  Description of Unknown: RightRegion for integrase B1815 sequence
aaagcgaactccatactttttttccagcgcgcttttggaatcattgtaaaactgcaataattttaccacactttttctgaaacgccaatcgcttcgtacaaaaggtgcttttgctttgtggttgcgtttggcacagccttgtcgatggcatctttctttttccggctggcagagttggtaatcgtcttaccgttctcgtccttgtcgccggtgatgccgcgggcagcaaagtatgcggcatagtactggtcataggtaac

SEQ ID NO: 27815 - DNA, 260 bp, Unknown
  Description of Unknown: RightRegion for integrase B1816 sequence
agcgcggttcgtttttgctcgggtttggttcaccaaaaagcactacttcatttgaggtagtgcttttttctttgtatgcgctttttaataggtgtcgggcgtaaaaggtgacccgtgtgggaatcgaaaagcccgggccccgcgtccagcgtaccgcggggcaaaaacagccccgcgggctgtttttagggcgcgggcgctttactttttacgcaccacattcgtcaagcaatagaatccgttgcaacgacggattctgt

SEQ ID NO: 27816 - DNA, 260 bp, Unknown
  Description of Unknown: RightRegion for integrase B1817 sequence
gcactgtacagccaaaaacggttgtacagtgcgtttttttatgcatttaaaatgctgtgacaacgaaatgagaacatcttttatgccctgttcgtttccgtgccggccaaacagacccgcatggcaggaagaaagggcatgctgctattttttacttcaataattttccgccttgatttcggtatagctctgggaatgcccgcatacagggcaaacttccggcgagcatgcggcatacgttacgtttccgcataccatgc

SEQ ID NO: 27817 - DNA, 260 bp, Unknown
  Description of Unknown: RightRegion for integrase B1818 sequence
ccaacgataacttttatcgggttcctgctggtgcaaacacaaagatattccctgccataaccggcaggggatatttttttgaaaaaattgtgattcgcccattgacataccgtactcagtgtggtattatatcaacacaaagtgaagagccaaggagggcaaaaacaatgacaactgagcaaatcaaggcctgcggacgcatttatgcgctgcttcgcaaggccctcggcaaggacagcctcgctgacaaccgcaacgtg

SEQ ID NO: 27818 - DNA, 260 bp, Unknown
  Description of Unknown: RightRegion for integrase B1819 sequence
cttttgtgggacaaagggaataccgttgagactgttgcactaattacccgcataaaataagggattgcggagtgcttgagatatcttaaatgtagtcttgcctaccatttgcctacgcttttttaaacggtaggcaagaatttaagatatagcgtgctttaaaatggtcattgcatcgtcctgcattttctcagtgttgaagatatacctttctattgttgtcttgatgtctttgtgtcccaggcgctccattacggttt

SEQ ID NO: 27819 - DNA, 260 bp, Unknown
  Description of Unknown: RightRegion for integrase B1820 sequence
gaaaaagaaataccgcttttatggtctgagcagcgaattaaatacggcttcggcgactgatttccacaagaaaattacataagattctcgctcaaaagtagcgcaaatccacagcctttaccttattctagttttagttgcacaaatacaatattgtatcgtaacggtaagttgagatgatgaacttctcattaactttcagaggagtttatcatgaatatcaacgtgtttaacggactacccaagtatgtccgcataac

SEQ ID NO: 27820 - DNA, 260 bp, Unknown
  Description of Unknown: RightRegion for integrase B1821 sequence
tttgatttcgacccccaaattgggccgttgctatggatgaaaattccactcacagaatagagattgtttccctaaaatctggaagtgtgttaaaaagtgtgttattttcccggcttcagcagcctcaaaaacgttgcgttgacggcctgcgctgtggcgacatcctcgccggtcagggcgtggctgtaaatgccgaaggtatccatatcttcggagtggcctacaagctccttgacttccccggcgggcagcgtcttgac

SEQ ID NO: 27821 - DNA, 260 bp, Unknown
  Description of Unknown: RightRegion for integrase B1822 sequence
agcgcggttcgtttttgttcgggtttggttcaccaaaaagcactatctcaaatgaggtagtgcttttttcttgtgctataaacttttaagggagtagaggagtacgggaatcgaacagcccgggccccgcgtccagcgtcccgcggggcaaaaacagccccgcgggctgtttttagggcgcgggagatggacgggagggtcaccaaaaagcactacttcatttgaggtagtgcttttttctttgtatacgctttttaata

SEQ ID NO: 27822 - DNA, 260 bp, Unknown
  Description of Unknown: RightRegion for integrase B1823 sequence
tttagaccgcggcttgcgaatccaccagctcccaccaaaaagctgtggcaaagatattgacgcagctttttttctttgctgcattgcacaaaatcggcaaaggcgatgaccgattttcaaagtgcgttttatagagatgtccaactgcttccgggcggttggatttttttgttaccaaccttttctgctgctttcggaatgttaaggcaataccgcataattctaagtgccgatacggcgagcgaggtgcggcagccgcc

SEQ ID NO: 27823 - DNA, 260 bp, Unknown
  Description of Unknown: RightRegion for integrase B1824 sequence
agcgcggttcgtttttgttcgtgtttggttcaccaaaaagcactacttcatttgaggtagtgcttttttctttgtatgcgctttttaataggtgtcgggcgtaaaaggtgacccgtgtgggaatcgaaaagcccgggccccgcgtccagcgtaccgcggggcaaaaacagccccgcgggctgtttttagggcgcgggagattccgcgcgggcggaagctgatgtggccggggtggttggcgtgggatgttgttgtttaag

SEQ ID NO: 27824 - DNA, 260 bp, Unknown
  Description of Unknown: RightRegion for integrase B1825 sequence
gtgtgctctgcacctatatccgtcagcaggccttttaattcgggcagcggcatagaatagcgctgggaaaggtagcgcagtgacgcacccaattcgccgtccggccctcttgacggcaaaaagagatgatttaagtataaaaaataatatcaagccggttttccggcttaacatatatgattttgctgatgatcgtccgcagggcttcgttctttgcctgttctgaaacatcgggtgatttaatgaaatcaagcacattt

SEQ ID NO: 27825 - DNA, 260 bp, Unknown
  Description of Unknown: RightRegion for integrase B1826 sequence
gaatcggaaattccaatactttggacggaacagcgaataaaatatggatttactgcctgatttaggcaaagaaaatctagcttagaatatttaatcgtataacattattaaatgttcacctactgattaacaataaaacttattgtctattattcgtatttatagaaaataagcctctctacaattttttagcgaggtttatattatgaatcttaaaatttttaacggactgcctccgtatgtccgaataacaatcttat

SEQ ID NO: 27826 - DNA, 260 bp, Unknown
  Description of Unknown: RightRegion for integrase B1827 sequence
cccacgataacttttatcgggttcctgctggtgcaaacacaaagatattccctgccttaacggcggggaatattttttgtggaaaattgcgatttgcccattgacataccacactcagtgtggtattatatcaacacaaagcgaagagccaaggagggcaaaaacaatgacaactgagcaaatcaaggcctgcggacgcatttatgcgctgcttcgcaaggccctcggcaaggacaacctcgctgacaaccgcaacgtga

SEQ ID NO: 27827 - DNA, 260 bp, Unknown
  Description of Unknown: RightRegion for integrase B1828 sequence
cccacgataacttttgttgggttcctgctggtgcaaacacggagatattccctgccttaacggcagggaatatttttcggggaaaattgcgatttgcctattgacataccacactcagtgtggtattatatcaacacaaagagagacacaaaggagctgaccacaatggcccgtgaaaaaatggtttgccaatccacaatcctggaaatgggatggacaaagagcatgatctcccggcttctgcctgagcctgtgctgcg

SEQ ID NO: 27828 - DNA, 260 bp, Unknown
  Description of Unknown: RightRegion for integrase B1829 sequence
gcactgtacagccaaaaacggttgtacagtgcggttttttatgcatttaaaatgctgtgacaacgaaatgagaacatcttttatgccctgttcgtttccgtgccggccaaacagacccgcatggcatgaagaaagggcatgctgctattttttacttcaataattttccgccttgatttcggtatagctctgggaatgcccgcatacagggcaaacttccggcgagcatgcggcatacgttacgtttccgcataccatgc

SEQ ID NO: 27829 - DNA, 260 bp, Unknown
  Description of Unknown: RightRegion for integrase B1830 sequence
tcgccatgcaggcgggccagtgacacccccgatctcaaacgaaaccgttatccgatttaacgcatgcagtgttttccgcgccgcgccgacagctccatgccaagaatcgcctgcgtatctctacgctgacgttttttatgggcgcgggtggattacgcaagccgcgctgctaaaaacagcccactgggctgtttttgcgctgtcttctgcgacagcgccgcagctgttcgaatccacccttgcggtgctttatagaagtt

SEQ ID NO: 27830 - DNA, 260 bp, Unknown; identical to SEQ ID NO: 27822
  Description of Unknown: RightRegion for integrase B1831 sequence

SEQ ID NO: 27831 - DNA, 260 bp, Unknown
  Description of Unknown: RightRegion for integrase B1832 sequence
tttcccttggaatcgcaatcaaccgttgaagcgatagtttcgctacgaagagaaatctagtggaaatcattcgttttacgttgttttctcgtcatgttgtgttcgatggcgagggcgataaactccacaataaacgcattgaaaatcacatcaccgtttcggtggtaattgatatggagtgcggaaacacaaaaaatgaatgttcagaatggaaaggatatcgtgagaacggtgtcctttcctcataggctttgccgcag

SEQ ID NO: 27832 - DNA, 260 bp, Unknown
  Description of Unknown: RightRegion for integrase B1833 sequence
tcgccatgcaggcgggccagtgacacccccgatctcaatcgaaaccgttatctgatttaacgcttgcagtgttttccgcgccgcgccgccagctccatgccaaggccggcggcagagccgacagcgcccgcaccaatgtggcagggtttggtagcagtgccagcagtaaggttggcttcattgcccgtaaacaaaaacgtttcgatgcagccaatacagagttgcagcagatgcgggaaactggtacaataaaggccaga

SEQ ID NO: 27833 - DNA, 260 bp, Unknown
  Description of Unknown: RightRegion for integrase B1834 sequence
cactcttccctcactccctgctctttcctttcgaaacttgccgatttagggaatcggtaatcgtgaatacgcatagaaagcggatattgcagcgacacagaaatgcccggcaaatgcacggagctgaaaaaaatctggatcgcctccgtcaacaccgcgaagaaaaaccgcacatgatccgcccgcccacaccgtgggcgggtttttgctgctccgccccccctcacgctcccggtgcgctcaggcgcgcggccagctcc

SEQ ID NO: 27834 - DNA, 260 bp, Unknown
  Description of Unknown: RightRegion for integrase B1835 sequence
tctgattctgactccaaaattgtgccgttgctatggctgaaaattccactcacagaatagagcttgtttccctaaaatctggaagtgtgttaaaaagtgtgttattttcccggcttcagcagcttcaaaaacgttgcgttgacggcctgcgctgtggcgacatcctcgccggtcagggcgtggctgtaaatgccgaaggtgtccatatcttcggagtggcctacaagctccttgacttccccggcgggcagcgtcttgac

SEQ ID NO: 27835 - DNA, 260 bp, Unknown
  Description of Unknown: RightRegion for integrase B1836 sequence
gaatcggaaattccattgctttggtctcagcaacgattaaagtatggcttcagtttttgattgtacacagatttttacacaagcgatattttattaaaataatgtcaagtccttatctatgatacactttcaacttgtaattgttttatctgtgtattgcacgcaaatgtattaaacctgaaaataagcctctattcaattatttaacgaggcttatcaatgaacttgaatatttttaacggactacctcagtatgtccg

SEQ ID NO: 27836 - DNA, 260 bp, Unknown
  Description of Unknown: RightRegion for integrase B1837 sequence
tcatcgcaattaagacatccatgccgaagctatatgtacaggcaccctagctggccataattcagtaagactagcactaggattgccacttcttatccttccaagttcaattgctattggagatataatttcatatgaaaatgaacaatctaaaactagagatggaagaaaggtaagatatacttttgcaggtgctggctactttaagagaatgcaagaactaggactatatacacttaatataaaagaaatcaagaata

SEQ ID NO: 27837 - DNA, 260 bp, Unknown
  Description of Unknown: RightRegion for integrase B1838 sequence
tctagggagaaacggcgcaggaaaaacaactttaacaaagcttcttatgagactttatgagccaacagagggaaggattcttcttaatggagttgatgtaaagaagtatgacagagatacatattttaaaatatttgcgcctgtgttccaaaacattgaaatttttgcttttccggtatggcagaatatttcaatgaagcctgaaaatgagacggacaaaaacagaacaatggaggctttggaaaaaagtggtttggatg

SEQ ID NO: 27838 - DNA, 260 bp, Unknown
  Description of Unknown: RightRegion for integrase B1839 sequence
tctagggagaaacggtgcaggaaagtctacgctgctaagagttctgtcagggatatataaggcagataagggagaagcaataatcgatggaattaatgtgtatgagaatacatacatgaagaataagctggtgttcgttgcagatgaattattctttcttgcaggtgcgaacatgaagagcatggctaagttctatagttcaatatatgataattttgatatggacagattcgcagagcttacgaaaacatttggacttg

SEQ ID NO: 27839 - DNA, 260 bp, Unknown
  Description of Unknown: RightRegion for integrase B1840 sequence
gtctatatgaccggcgggatatttgtcctggtgtttccacttgcctatgccaagaaataaagaaagaggctactacacagggaatttcctgtgtggtagcctctttgtgttctctcatagccataacggatttcgttataatctaccaaaatccagcgagattctaaaatcgttgttagaatctaccgtaaaggagcatggctatgattaggattttactgtccacccggcttggcgagcggaggtggtcacaagctgac

SEQ ID NO: 27840 - DNA, 260 bp, Unknown
  Description of Unknown: RightRegion for integrase B1841 sequence
tgttatttaacaatacgtaagaacgacacaaggcattttataggcgaacttgtagcttaaaaatagcccgcaaacactgatatttactggttttttaacacatttaacaggagtggaatcaatgaataatacgcataccgcatatgacgtaatgaaagaatatttaataaccgatgcagagtttgacggactgtaccagataccgatgttgccgaagtcagatgccgtaccgggcaaaggaatagatttcgtatcttcaa

SEQ ID NO: 27841 - DNA, 260 bp, Unknown
  Description of Unknown: RightRegion for integrase B1842 sequence
atctacatggtcagcggcattttcgttctggtctgtccgttcgatcatgctcggaaatgaaaaaagcggctaccgcacagtttctctgctgtgtggtagccgcttcgttttttatcatagccataacggttttcgttatattctaccaaaaccctgcggaattctaaaatcgttgttagaatctaccgtaaaggagcatggctatgattaggattttactgtccacccggcttggcgagcgaaggtggacgcaagctgac

SEQ ID NO: 27842 - DNA, 260 bp, Unknown
  Description of Unknown: RightRegion for integrase B1843 sequence
gaatcggaaattccattgctttggtctcagcagcgattaaagtatggcttcagtttttgattgtacacagatttttacacaagcgatattttattaaaataatgtcaagtccttatctatgacatgctttcaacttgtaattgttttatctacatattgcacgcaagtgtattaaacctgaaaataagcctctattcaattatttaacggggcttatcaatgaacttgaatatttttaacggactacctcagtatgtccg

SEQ ID NO: 27843 - DNA, 260 bp, Unknown
  Description of Unknown: RightRegion for integrase B1844 sequence
tcatcgcaattaagacatccatgcagaagctatatgtacaggcaccctagctggccataattcagtaagacttgcactaggattgccacttcttatccttccaagttcaattgctattggagatataatttcatatgaaaatgaacaatctaaaactagagatggaagaaaggtaagatatacttttgcaggtgctggctactttaagagaatgcaagaactaggactatatacacttaatataaaagaaatcaagaata

SEQ ID NO: 27844 - DNA, 260 bp, Unknown
  Description of Unknown: RightRegion for integrase B1845 sequence
aaaagagttgactctatagtttttagaaatggattagtacataaattttactataaataaaaagagggctagtgttttactagtcctcttttacttctatattaactttttcaattttatcatcagctatattattttttttgattttttcaattttatcatttatatcatcagctattacttttaaaaattcattgtacttttcttcattccaattatcactatctttttctaagttatattcttgattaataataggc

SEQ ID NO: 27845 - DNA, 260 bp, Unknown
  Description of Unknown: RightRegion for integrase B1846 sequence
gaatcggaaattccattgctttggtctcagcagcgattaaagtatggcttcagtttttgatagtacacagatttttacacaagcaacattttattaaaataatgtcaagtccttatctatgacacgctttcaacttgtaattgttttatctgtatattgcacgcaagtgtattaaacctgaaaataagcctctattcaattatttaacggggcttatcaatgaacttgaatatttttaacggactacctcagtatgtccg

SEQ ID NO: 27846 - DNA, 260 bp, Unknown
  Description of Unknown: RightRegion for integrase B1847 sequence
atggtcacatcagaatggctgtcctgtgtgttatacaggacagtcattttgtcatcatagaggtaaatcttgttgacaaaggtatccaccagagcctgacggtatttcaggtcatttacatcgcctttacggaactggttcaggaagaaccgcacttcattgaccgtgggcgtagggtgggaggaagtctccacaagaatctgctgttccagctcgttgcgttcccgtttcttctgggagatacgctccgcaatcacatc

SEQ ID NO: 27847 - DNA, 260 bp, Unknown
  Description of Unknown: RightRegion for integrase B1848 sequence
gaatcggaaattccattgctttggtctcagcaacgattaaagtatggcttcagtttttgattgtacacagatttttacacaagcgatattttattaaaataatgtcaagtccttatctatgacacgttttcaacttgtaattgttttatctgcatattgcacgcaaatgtattaaacctgaaaataagcctctattcaattatttaacggggcttatcaatgaacttgaatatttttaacggactacctcagtatgtccg

SEQ ID NO: 27848 - DNA, 260 bp, Unknown
  Description of Unknown: RightRegion for integrase B1849 sequence
tcgcgtgtctcttatttttttggttcactcatttcattcgttcaccccaagggtaattaaaatgctcgatggaaatgaatcccacctccgccaagattttgctgcgcaaaatgcttgcacggcgcaaatgcgccggttttggtatccgtgggacatttaacagcgcacaagcaggtgaattgcttgtgcaccaaggttttcgcacagcgaaaacacttgtgacgcgccgctcggcgcgtttttttgtttttccgcagacg

SEQ ID NO: 27849 - DNA, 260 bp, Unknown
  Description of Unknown: RightRegion for integrase B1850 sequence
tatctaaaacccaaccattgtttcgccgtggcggacatttcccgtcaaggttttttgtaaacacacaaagtcaccgctgtgataatttgtgtgtcacttttacaaattcaggggcgtgcccctgcacccaatccgctttactttatgtaaggcggttttttattgccgctcatggatcattatttataaacccaactttgttatttcaccatggcagacgctgacataataaaaaagagtgcattaccacctcagataat

SEQ ID NO: 27850 - DNA, 260 bp, Unknown
  Description of Unknown: RightRegion for integrase B1851 sequence
ctgatttcgaggacttttgcttttcataagtcaccattttcagataccgtttttttctgacccaaacgctgaccccaacgggagcgggtagcggaaagcatcagacggcacgggagaggatattgcccatcgtctgcgccgccttgagctgcgcgtcggtggtcacatgagcataagtgtccagcgtgaacccggctgagtagtggcccagcatactgctgacggttttcacgtccacgccgttctggagtgccatggtc

SEQ ID NO: 27851 - DNA, 260 bp, Unknown
  Description of Unknown: RightRegion for integrase B1852 sequence
tgttatttaacaatacgtaagaacgacacaaggtattttataggcgaacttgtagcttaaaaatagcccgcaaacactgatatttactggcttttaacacatttaacaggagtggagtcgatgaataatacgcataccgcatatgacgtaatgaaagaatatctgataaccggcgcagagttggatggtccataccagataccggttattccaccgatgcagctggcgccaaagaaaagcatagatttcgtttcttcaaa

SEQ ID NO: 27852 - DNA, 260 bp, Unknown
  Description of Unknown: RightRegion for integrase B1853 sequence
tctaggaagaaatggagcgggaaagacaactttgatgagagttttgaccactgtgcttaaacctacaaacggaatggttacattagacggaattttgtatagcgaaggaaactatgaaaaaatccaaagaaagatagggtatttaccacaggaaattgaactgtatcctaatttgacggttcaggagtgtttggagtatatgggagatctggcaggtgttccgaaagcagaatgtagaaagcggatagaatattatttga

SEQ ID NO: 27853 - DNA, 260 bp, Unknown
  Description of Unknown: RightRegion for integrase B1854 sequence
ggatttccgccgcttccggcggcgatatctttgccatggtgcagtatgtggctctggtaatgaacggtatcgttatggcggcctttgccctggtgatgtacccccatgccaaggtggccgcgggccgcatcggtgaagtgatggacgccaacatgatgaccgagaccgccgaggaggatgacaatatcacctttgccggggacatccgcatggagaatgtgacctttcggtatgagggtgctgacgccgcggcggtaagc

SEQ ID NO: 27854 - DNA, 260 bp, Unknown
  Description of Unknown: RightRegion for integrase B1855 sequence
gaatcggaaattccattgctttggtctcagcagcgattaaagtatggcttcagtttttgattgtacacagatttttacacaagcgacattttattaaaataacgtcaagtccttatctatggcgcactttcaacttatgattgttttatctgcgtattgcacgcaaatatattaaacctgaaaataagcctctattcaattatttaacgaggcttatcaatgaacttgaatatttttaacggactacctcagtatgtccg

SEQ ID NO: 27855 - DNA, 260 bp, Unknown
  Description of Unknown: RightRegion for integrase B1856 sequence
tctagggagaaacggagcaggcaagacaactcttttacgctgcctgatgggactgtataggtcaacaggagacatagtgatagatggacacaatttaaacagcgatgaggcagccgccagggaagtaatagcggtagtaggtgatgagggattttttgatgagaatataaatctcgaaaagctcggaaaatactatgggcagatgtatgtgcggtttgatatggaaaagtatctgggatatcttgaaagatttaaccttg

SEQ ID NO: 27856 - DNA, 100 bp, Unknown
  Description of Unknown: RightRegion for integrase B1857 sequence
tcatcgcaattaagacatccatgcagaagctatatgtacaggcaccctagctggccataattcagtaagacttgcactaggattgccacttcttatcctt

SEQ ID NO: 27857 - DNA, 260 bp, Unknown
  Description of Unknown: RightRegion for integrase B1858 sequence
tcgagggctttttctttggttacggaaaccaccggctctgccggtggaggcacctcgtaaaagctttagctttaagcatcgagcgaagcgagctacaagtagaaggcttgataaaagattagccacaagtagaacatgaatcgcccgtttacgggctgtaggacaaaaaatgcaagtgaaataaaactcagtgccccttgaggggcttgccagtaacaggcccttatagggccaaatcaaacctccggcttagccggagg

SEQ ID NO: 27858 - DNA, 260 bp, Unknown
  Description of Unknown: RightRegion for integrase B1859 sequence
aatttcagctgttttgtgctacaatggaagcgaaaacggcagagggggaacggaaaatgaaaaagctgcttgctgtgtgcctgacggcgctcgtttgctgggtttgcgcggggtacgcggaagaaacgcaggtcggcgatacggtcatgttcgggcaatatgaacaggatggaaatctggacaacggcagtgagcccattgcgtggcaggtgctggatgtgcagggcggcaaagcgctgctgatgagccggtacgcgctg

SEQ ID NO: 27859 - DNA, 260 bp, Unknown
  Description of Unknown: RightRegion for integrase B1860 sequence
tgttatttaacaatacgtaagaacgacacaaggcattttataggcgagcttgtagcttaaaaatagcccgcaaacactgatatttactggttttaacacatttaacaggagtggaatcaatgaataatacacataccgcatatgacgtaatgaaagaatatctgataaccggagcagagcttgacggactgtaccagataccgatgttgccgaagttagatgccgtaccgggcaagggaatagattttgtatcttcaaaa

SEQ ID NO: 27860 - DNA, 260 bp, Unknown; identical to SEQ ID NO: 27849
  Description of Unknown: RightRegion for integrase B1861 sequence

SEQ ID NO: 27861 - DNA, 260 bp, Unknown
  Description of Unknown: RightRegion for integrase B1862 sequence
tctagggagaaacggagcaggaaaatctacgtttctgcgtctggcagccgggatccttaaagcagatgagggccatgtgaccatagacggagaagaggtatttgaaaacataaaagcaaagaaaaagtttttctatataccggacgatgctcattttttcagcaatgcttctcctcttgatatgatggaatattacagcgttgtgtatgaacgttttgacaaggcccgtttccataaattaatgggtaatttcggcttag

SEQ ID NO: 27862 - DNA, 260 bp, Unknown
  Description of Unknown: RightRegion for integrase B1863 sequence
cgcaaagccaggcgcatcaaccgtttccgggctttttcgagcccggatttcttcttttgaaccatagatttttatggaggtctcggagcaactgaccggatttgaaccggaggacctcatgccttggacagtttccaacctccagcgcccttttagagaggacttttctctcgaaaaaagcggcatcatcgcagaaaaagaatcacaaatatttgggcgtcgttttgtcggctttgacgggccgaaaaaagcggcgccct

SEQ ID NO: 27863 - DNA, 109 bp, Unknown
  Description of Unknown: RightRegion for integrase B1864 sequence
tctatcgaaattcatttcaatctcaaacccatcccggaagtggagcaggtcacagcctgacctgccccgccggggcggttcttaaaaaactccatagatatttcttgac

SEQ ID NO: 27864 - DNA, 260 bp, Unknown
  Description of Unknown: RightRegion for integrase B1865 sequence
tgttatttaacaatacgtaagaacgacacaaggcattttataggcgaacttgtagcttaaaaatagcccgcaaacactgatatttactggttttttaacacatttaacaggagtggaatcaatgaataatacgcataccgcatatgacgtaatgaaagaatatttaataaccgatgcagagcttgacgggctgtaccagataccgatgttgccgaagtcagatgccgtaccgggcaaaggaatagatttcgtatcttcaa

SEQ ID NO: 27865 - DNA, 260 bp, Unknown; identical to SEQ ID NO: 27843
  Description of Unknown: RightRegion for integrase B1866 sequence

SEQ ID NO: 27866 - DNA, 260 bp, Unknown
  Description of Unknown: RightRegion for integrase B1867 sequence
gtctatatgaccggcgggatatttgtcttggtgtttccacttgcctatgccaagaaataaagaaagaggctactacacagggaatttcctgtgtggtagcctctttgtgttctctcatagccataacggatttcgttataatctaccaaaatccagcgagattctaaaatcgttgttagaatctaccgtaaaggagcatggctatgattaggattttactgtccacccggcttggcgagcggaggtggtcacaagctgac

SEQ ID NO: 27867 - DNA, 260 bp, Unknown
  Description of Unknown: RightRegion for integrase B1868 sequence
atctatatggtcagcgatgttttcgtcttggtctgcccgttcagccatgctcggaaataagaaaagcggctaccgcacagtttctctgctgtgtggtagccgcttcgtttttcgtcatagccataacctatttcgttatattctaccaaaaccctgcggaattctaaaattgttgttagaatctaccgtaaaggagcatggctatgattaggattttactgtccacccggcttggcgagcggaggtggacgcaagctgac

SEQ ID NO: 27868 - DNA, 70 bp, Unknown
  Description of Unknown: RightRegion for integrase B1869 sequence
tctagggagaaacggtgcgggaaaaacaaccactttacggacgattttagagcttactaatcgaacttct

SEQ ID NO: 27869 - DNA, 260 bp, Unknown
  Description of Unknown: RightRegion for integrase B1870 sequence
gaaacggaaattccattgctttggtctcagcagcgattaaagtatggcttcagtttttgattgtacacagatttttacacaagcgatattttattaaaataatgtcaagtccttatctatgacacgctttcaacttgtaattgttttatctgtgtattgcacgcaaatgtattaaacctgaaaataagcctctattcaattatttaacggggcttatcaatgaacttgaatatttttaacggactgcctacgtatgtccg

SEQ ID NO: 27870 - DNA, 260 bp, Unknown
  Description of Unknown: RightRegion for integrase B1871 sequence
gaatcggaaattccaattctttggcgggaccagcgaattaaatatggattttccgtttgattttacacagatttttacacaagatgaataaataaaaaaacattgggcgtacatactgtcaagcgtaattctatttagagttgaatttatttaacattgttcatttataatttaggaaacacaataaacctctaatcaatagtttaagaggtttattttatgaactcaaatatttttagcggactacccgagtatgtccg

SEQ ID NO: 27871 - DNA, 260 bp, Unknown
  Description of Unknown: RightRegion for integrase B1872 sequence
gagagcgcggttcgtttttgttcgggtttggttcaccaagacagcataatccgaacttaattctttatgagaatgggttcggattttgtttttgtattgatgatttatatacgaaatagtacacaagaagtgacagtaatctatgcgattactgtcactcttatatttgaaaatttcagtttgagatgtgactgtacagcgataaaaaagattctttgtttactttaaggagcaattgtggtatattaatcatataagct

SEQ ID NO: 27872 - DNA, 260 bp, Unknown
  Description of Unknown: RightRegion for integrase B1873 sequence
atctacatggtcagcggcatttttgttctggtctgtccgttcgatcatgctcggaaatgaaaaaagcggctaccgcacagtttctctgctgtgtggtagccgcttcgttttttgtcatagccataacggttttcgttatattctaccaaaaccctgcggaattctaaaatcattgttagaatctaccgtaaaggagcatggctatgattaggattttactgtccacccggcttggcgagcggaggtggtcacaagctgac

SEQ ID NO: 27873 - DNA, 260 bp, Unknown
  Description of Unknown: RightRegion for integrase B1874 sequence
tgttatttaacaatacgtaagaacgacacaagacattttataggcgaacttgtagcttaaaaatagcccgcaaacactgatatttactggttttttaacacatttaacaggagtggaatcaatgaataatacgcataccgcatatgacgtaatgaaagaatatttaataaccggtgcagagcttgacggactgtaccagataccgatgttaccgaagtcagatgccgtaccgggcaagggaatagatttcgtatcttcaa

SEQ ID NO: 27874 - DNA, 260 bp, Unknown
  Description of Unknown: RightRegion for integrase B1875 sequence
gaatcggaaattccaattctttggcgggaccaacgaattaaatatggattttctgtttgattttacacagatttttacacaagatgaataaataaaaaaacattgggcgcacatactgtcaaacgtaattctatttatagttgaatttatttggcattgttcatttataatttaggaaacacaataaacctctaatcaatagtttaagaggtttattttatgaactcaaatatttttagcggactacccgagtatgtccg

SEQ ID NO: 27875 - DNA, 260 bp, Unknown
  Description of Unknown: RightRegion for integrase B1876 sequence
tgttatttaacaatacgtaagaacgacacaaggcattttataggcgaacttgtagcttaaaaatagcccgcaaacactgatatttactggttttttaacacatttaacaggagtggagtcgatgaataatacgcataccgcatatgatatagtgaaagaatatctgataaccggagcagagcttgacgggcaatttcagatacccatgctgccaaaagtagatttctcaccgggcaagtcgattgacttcgtttcttcga

SEQ ID NO: 27876 - DNA, 260 bp, Unknown
  Description of Unknown: RightRegion for integrase B1877 sequence
gttcgtacgggacacacgtttaaaaagatgattgaatcatacgaaaacagtatgaaataatttgatttaataaataaatcataaaaatatatcggggcatatggcaacagctgtatgctccgatgtttattatgcaatattattcttaaaatatcagttgattttcaaattatgctcttttatgtactccaaaagtgctctgcaaccattgtcaatgtcggtgtaagtaacatcaaaattgcctgtgtaccatggatctg

SEQ ID NO: 27877 - DNA, 260 bp, Unknown
  Description of Unknown: RightRegion for integrase B1878 sequence
gacgggatcacctacgataaggaaaagaataggctgtattttaactttttcatttcataaaaaacgccggaagcccttataaaatggggcttcccggcgatttgtagggtattgcaatccgggccaccgtattgtgatgcaataatcttcgcgatccgtgcatccgttttcgtgatatttaccggatattgcaatcgtttttcatatatccacatacactaacacctgcctttcccggatctttcccatggccatggctg

SEQ ID NO: 27878 - DNA, 260 bp, Unknown
  Description of Unknown: RightRegion for integrase B1879 sequence
ccagcaatctacatggtcggcggcgcgtttgtcctcgtgtgctctcttgtgcaagaatagaaaaagagcacctgcccttcagcgaagatgggcaggtgctcttttctacattttttcataacgtaagccgttataacctaacgattccatgaaaaatgagaaaatacttgttatattttctcgtaaaggagcatggctatgattaggattttactgtccacgcgcctcggcgaaaggcgctggacgcaggctgatctcgc

SEQ ID NO: 27879 - DNA, 260 bp, Unknown
  Description of Unknown: RightRegion for integrase B1880 sequence
gtatctagggagaaacggagcaggaaagacgacgcttttaagacttatgtcaggaattaaaaagcctatatccggtaaggtgaaagtgaatggaagatgtgcggtgcttccgcagaatccaatggcactgcttagtcagataagtgttgaggaagaattagcatcagcagttatggataagggaaattcgtctgttaagaatatggacaggaaacagaggattgtgcttgttgagaatatgctggagcggacgggacttc

SEQ ID NO: 27880 - DNA, 260 bp, Unknown
  Description of Unknown: RightRegion for integrase B1881 sequence
gaaatggaagaagccttccagcaccaccttaccgagcgtaacaaagagaaaacggcatagccacaagggttacaccgtttccgagaacttataaaactgtgatacaagagccgccccggggcaccttccttatggagggtgccccgatagggtggtgtttttggagcgggcgacgaggctcgaactcgcttcccggcatcccgcgaatggcatagccattcgcaggaaccctgcctcacctctgaatttgacgcgcttcg

SEQ ID NO: 27881 - DNA, 260 bp, Unknown
  Description of Unknown: RightRegion for integrase B1882 sequence
gctgtatcgacctacgatggtgcggagatttttgaagaaatttccgagaagggggcataaaagcgatgcgcttgcccgcagcactctgcaaaatgcaaagaaagaagcgtgaaaccgatggattttcaaaaaatatattgatgaccccgcccggttcgcatccgacttcagggttcggagcccggcacggtctgccaatgttttttaggcataaaaaacgccgcatcgtacaaaacgatgcggcaaattggtggagctgg

SEQ ID NO: 27882 - DNA, 260 bp, Unknown
  Description of Unknown: RightRegion for integrase B1883 sequence
gtttctgtggataaggacggggaaaagatgaaaatcatccggcggcacaaggacttgtaacccatgctgaaaccatgagcatttgacaaacaacgcgctggcggggcatactggaaacctctctaatcctattggcggtcgttccgccccgtcagacagcggctttttttatgcccaaaatgggctgttacctatcactggtcggggtagagaccggatatacaacacccgaaaggggaaatccggacgcggtaccaata

SEQ ID NO: 27883 - DNA, 260 bp, Unknown
  Description of Unknown: RightRegion for integrase B1884 sequence
tttttcactgttaccttgtcagagctgcggttttttggtaaagtaaaaagtaagaagtaatagtgaataggtaaggtgtatttcaattcgcggaattgaaataccgattgaaagttggtgcgtaaaatgagcgtcagtccgcttatcggcaaatccaagacttttgcattagaaaccataaaggtctgcaacgaggtgaaggcttcaaagcgcgaatcggtgctcaccaatcagctcatccgctcgggcacaagcattgg

SEQ ID NO: 27884 - DNA, 223 bp, Unknown
  Description of Unknown: RightRegion for integrase B1885 sequence
tgttcaactctcatttcctgtgagtctcgaggattttattcaggggaatcaggagtatgatggtgaacctgggcgtcggcgtgcgctttgtgagctcggagcgaatttttctcgcacgaaagtttccttttgcgcacgcaatcggtcatttcgctagactgggcgcacggcctgatcgttcgaacgaagcatgaggaagatgagcaacaaacagtctgacact

SEQ ID NO: 27885 - DNA, 260 bp, Unknown
  Description of Unknown: RightRegion for integrase B1886 sequence
ttgcttcgcctgcatgtcttttgggctttttgcgaaaaaccgggatgttcccgcagataagcgggtccccataacaaaagagaccgccgtacagcaagctgctgtacggcggtctcttcttcttttttcagttccgcgggatggccattcggcgctctgctttctttacgagccatgctcccgcccatccgcaggcggctcccaaaatggcaccacccagaatatccgtcgggtaatggacacagaggtacatccgcgag

SEQ ID NO: 27886 - DNA, 260 bp, Unknown
  Description of Unknown: RightRegion for integrase B1887 sequence
gctgtgtcaacctacgatggtgcggaaatttttgaagaaatttccgagaagggggcataaaagcgatgcgcttgcccgcagcactctgcaaaatgcaaagaaagaagcgtgaaaccgatggattttcaaaaagtacatggatgaccccgcccggttcgcatccgacttcagggttcggagcccggcacggtctgccaaagttttttaggcataaaaaacgccgcatcgtacaaaacgacgcggcaaattggtggactcga

SEQ ID NO: 27887 - DNA, 260 bp, Unknown
  Description of Unknown: RightRegion for integrase B1888 sequence
gagcatccttttggtacgaactatacatatgataaaagtagaagtagaaagcacatttgaacctataataggtagtgaactccaaagtaaagaattaatagatcatctaaccaaaagtgacgacaatgaaaatatatggaaaagcgaaatatttggtcgcagtctagatgtaatagttcaagaaggaatacaagcaaaattatcaatgatgccagataatgtaagatttaaattatgtcaaaccctaacaaaaataataa

SEQ ID NO: 27888 - DNA, 260 bp, Unknown
  Description of Unknown: RightRegion for integrase B1889 sequence
gaaccctacattgtgtggggaacggtgttcgttcaaactaaaagacactccttaccttaatcggtagggagtgtcttcttttattcttcgccggaatacccgttcgctctggcgcatttcagcgcacccaagatcatcttgtcctgagccagtgttcgttctttcagctcatagagtggagtacggcgatgatcgtcccattcaatgagctgctttttgtcgtgaacgacttgaccctcatagagattgataaccttgtc

SEQ ID NO: 27889 - DNA, 260 bp, Unknown
  Description of Unknown: RightRegion for integrase B1890 sequence
tatagaagaatagcaccatgcttgcaagccggttgccctcccacgcgggggagggcttagggggactggatttttacgttggatttgctataataagcgtaaaggatgcaggcatcgacttctgcagcaaacggagagcaatataagaggtaaacaccatgcaatacgtcaatttcggcaccacaggcttacaaatctcccgccttgggtttggcggcattcccattcagcgcatcgaccagcccggcacgcgggagctg

SEQ ID NO: 27890 - DNA, 260 bp, Unknown
  Description of Unknown: RightRegion for integrase B1891 sequence
gaaccctacattgtgtggggaacggtattcgttcaaaccaaaagacactccttaccttaattggtagggagtgtcttcttttattcttcgccggaatacccgttcgctctggcgcatttcagcgcacccaaaatcatcttgtcctgagccagtgttcgttctttcagctcatagagtggagtacggcgatgatcgtcccattcaatgagctgctttttatcatgaacgacttgaccctcatagagattgataaccttgtc

SEQ ID NO: 27891 - DNA, 260 bp, Unknown
  Description of Unknown: RightRegion for integrase B1892 sequence
ttagtatcccgtcaggaatggtgcaggaaaaagcactactatcaatctgatattaaatgaactaaacaaagatagcggacagatacaggtctttggaatagaccacacaattccaacagtcaaagacaatattggcgttgtttttgatgaatgtaattttcatgatgtgtttacagccacagatattgaaaaaatcttaaaaggcatttataagacatgggatagtaacctctttttgcaatacttgaaaaaattcaaaa

SEQ ID NO: 27892 - DNA, 260 bp, Unknown
  Description of Unknown: RightRegion for integrase B1893 sequence
ggtgtggcggtatcgactatatccgttgaaacaggtaaatatggaaaaaaggtcgcataaccgacggtgttatgcgactacactaagggagaaaaaacttctatatcactactgtgctttcgcaccggggttatcattaccgtaaccttccagaaggtttacaacgccccatacaccaacacctgcaccgatcaggcagataacgctcttgagtacggtacaagcagtagaaatgaaagaagaagtatcaacagcacccg

SEQ ID NO: 27893 - DNA, 260 bp, Unknown
  Description of Unknown: RightRegion for integrase B1894 sequence
ccattgttatcatataaagaacttggtgaagctgctgctgaatatgccaaaacacattaaataaaaggtggggagatttttaagatttccctacctttcttctatataaatcagcatactaagtttaaagaagcttaaataattggctatcatttctatagtttctatattttcattacttttgtggtatatttataaactaacaattcaaagctatatgaacaactttgtagcgatagattttgaaaccgccaatgcag

SEQ ID NO: 27894 - DNA, 260 bp, Unknown
  Description of Unknown: RightRegion for integrase B1895 sequence
gagatggaagaagccttccagcaccacctcgctgagcgtagcaaagagaaaacggcgtaaccacaagggttacaccgtttccaagaatttattaaattgagatacaagagccgccccggggcaccttccttacggagggtgccccgagggcggcttttctaagaaattgaagttagcgaaagctaaccaccataacagaggtcggaggggaatgattatgcggtttgcagcacttggcgaaagaaaaaatccagcggtac

SEQ ID NO: 27895 - DNA, 260 bp, Unknown
  Description of Unknown: RightRegion for integrase B1896 sequence
ggtttgagtgctgattataaggtcaagatagaatttatgcaaattgttatctttgtataaatcgtgccataagatatactttattttaaaataaacagcctttagttattttatagcacctatggtattgacaattaatagatactatgcaactttacgaaccttggataagaaaggattaattgttggtgcatctgaaaaaaacggaaatatgccatttcgtacagtatattcaataagtgaaaagggtaaagaagagt

SEQ ID NO: 27896 - DNA, 260 bp, Unknown
  Description of Unknown: RightRegion for integrase B1897 sequence
gcgtccggtagtccgtgccgtacttggcggcgatgcccgagagcgtgtctccgctcttgaccgtgtaggtcttcttggacgacgccccgaggcggtcgttgaccacgccctgcacctccgcgtagcgcccgccgagcacgcgcttgcgaagctcgccgctgccgagctgcccacggattaccgcgtcggccagctccgtggcccccgtcttcaggacgtagttcaccaactcctgcacctcgtcgtagcggtccccgagc

SEQ ID NO: 27897 - DNA, 260 bp, Unknown
  Description of Unknown: RightRegion for integrase B1898 sequence
acggagcttttgtgggacaaagggaataccgttgagacggtctgtttgctctgtcattgacagtggggataattggattgcgatatagtacagacattgtgttagcggtagcaactgtggcggctattcaagagaaataccatgtgatgaaaaaaattaatcggaggtgcaacatgagcgaaaagctgaaggtactgataataaacggctcgccgcgagtcggcggcaacacgtcgatagcgctgcgcgagatggaaact

SEQ ID NO: 27898 - DNA, 260 bp, Unknown
  Description of Unknown: RightRegion for integrase B1899 sequence
gctgtatcaacctacgatggtgcggaaatttttgaagaaatttccgcaaagggggcataaaagcgatgcgcttgcccgcagcactgtgtaaaattcaaagaaagaagcgtgaaaccgatggattttcaaaaagtacatttatgaccccgcccggttcgcatccgacttcagggttcggaacccggcacagtctgccaaagttttttaggcataaaaaacgccgcatcgtacaaaacgatgcggcaaattggtggaggcaa

SEQ ID NO: 27899 - DNA, 260 bp, Unknown; identical to SEQ ID NO: 27659
  Description of Unknown: RightRegion for integrase B1900 sequence

SEQ ID NO: 27900 - DNA, 260 bp, Unknown
  Description of Unknown: RightRegion for integrase B1901 sequence
agttatgatataatactatcggaagttctaagtgtttatattgataatgagtatttatgaaaagagaaaagatatcatataatggagatactttgttacaaagggcaacattatgaaatataacgggggattatttcaaaacagaaagtttatagagcaaaaattgctcttgtatggtttttcttttgaaaaagagcgatatgtctattctgtcggtcttatgcacagtgatttcagaatggatatatcaatcgacaaag

SEQ ID NO: 27901 - DNA, 260 bp, Unknown
  Description of Unknown: RightRegion for integrase B1902 sequence
gagatggaagaggcctttcagcagcacctcgcccagcgcaacaaagagaaaacggcgtaaccgcaaaggctacaccgtttcaaagaaacaaatttaattgagatacaagagccaccttggggcaccttccttacggagggtgccccaatggggtggctgttcttttgcaaaatttttaagcgtacatcataacggtgtgcgctgtttttatgcctgtttttaaagaatctaaaatgaaaggaagtggtgaatatggcgac

SEQ ID NO: 27902 - DNA, 260 bp, Unknown; identical to SEQ ID NO: 27883
  Description of Unknown: RightRegion for integrase B1903 sequence

SEQ ID NO: 27903 - DNA, 260 bp, Unknown
  Description of Unknown: RightRegion for integrase B1904 sequence
aacaccataacggtagttggaatggtatttgtccaaaccagaaaacacgccctgccttaattggcaaggcgtgcattttttatctcttgtacatattttggagtgccccagcctctccggctttctcgatagcccgcttatgcagatactcataaacggccatatcgtcctccgggaatttgtctccgcttcggtgatgggcatcgatcattcgaaccacgttcttgtgcagggcattcgcatggttcacctcttcgccg

SEQ ID NO: 27904 - DNA, 260 bp, Unknown
  Description of Unknown: RightRegion for integrase B1905 sequence
ctgatttcgaggacttttgcttttcataagttccgtttttatggtgttgcttttttctgacccaaacgctgaccccaacgggagcgggtagcggaaagcatcagacggcacgggagaggatattgcccattgtttgcgccgctttgagttgggcgtcggtggtgacgtgggcgtaagtgtccagcgtgaaacccgccgagtagtggccaagcatactgctgacagtcttgacgtccacgccgttttgcagggccatggtt

SEQ ID NO: 27905 - DNA, 260 bp, Unknown
  Description of Unknown: RightRegion for integrase B1906 sequence
ctgatttcgaggacttttgcttttcgtaagttgctattttcggacgctgctttttcctgacccaaacgctgaccccaacgggagcgggtagcggaaagcatcagacggcacgggataggatactccccatcgtctgggccgctttgagctgggcatcggtggtgacgtgggcgtaggtgtccagtgtgaagcccgcggagtagtgacccagcatactgctgacggtcttgacgtccacgccgttctgcagggccatcgtc

SEQ ID NO: 27906 - DNA, 260 bp, Unknown
  Description of Unknown: RightRegion for integrase B1907 sequence
ctgatttcgaggacttttgcttttcataagttccgttttttgggtgttgcttttttctgacccaaacgctgaccccaacgggagcggatagcggaaaccatcaaacggcacgggataggatactccccatggtctgggcggctttgagttgggcgtcggtggtgacgtgggcgtaggtgtccagcgtaaagcccgcggagtagtgcccgagcatactgctgacggtcttgacgtccacgccgttttgcagggccatggtc

SEQ ID NO: 27907 - DNA, 260 bp, Unknown
  Description of Unknown: RightRegion for integrase B1908 sequence
ctggtttcgaggacttttgcttttcataagttccgttttttgggtactgcttttttctgacccaaacgctgaccccaacgggagcgggtagcggaaaggtctataccgcacgggataggatattgcccattgtttgcgccgctttgagttgggcgtcggtggtgacgtgggcgtaggtgtccagcgtgaagcctgcggagtagtgtccgagcatactgctgaccgttttcacgtccacgccgttttgcagggccatcgtc

SEQ ID NO: 27908 - DNA, 260 bp, Unknown; identical to SEQ ID NO: 27906
  Description of Unknown: RightRegion for integrase B1909 sequence

SEQ ID NO: 27909 - DNA, 260 bp, Unknown
  Description of Unknown: RightRegion for integrase B1910 sequence
acctttgacactatcattaccgagcgggatatggatgaataccgcatcaccgtatcgtgacgccctgctttattcaaatcgaggggtgggaatatttatagttcccgcccctctccctttcatttgcgattatccgagatactgattcagcaaatcaaaggtagcctgctctcggctctgattctcttctttgtgaggattcataatttcatccgcctgctcccgtgtcagctggttgattttctcttccatttgagcgg

SEQ ID NO: 27910 - DNA, 260 bp, Unknown
  Description of Unknown: RightRegion for integrase B1911 sequence
gaaccctacattgtgtggggaacggtgttcgttcaaaccaaaagacattccttgtcttaaagcaaggggtgtctttttgtttaggtgataaaggtgagtaatcgggcgtttttcctataaactatctctaatacgcgcgtactaaggagaagttatagggattttgacccgattactcacctttatcaccttatacaattgaatgtaaaaatccccggaagctgaaacctccggggatgccgttatataaatatcactta

SEQ ID NO: 27911 - DNA, 260 bp, Unknown
  Description of Unknown: RightRegion for integrase B1912 sequence
gctgttctctatatgatcggcggcctgttcgtgttggaatgctcccttgaggagagataaaaaagaggttatccgtcctgcgttgcagcgggagggataacctctttttgcgtttcattctaacgaaatcggttattttttaccaaagccatgcggaaatctaaaattgtagttatattctaccgtaaaggagcatggctatgattaggattttactgtccacccggcttggcgagcggaggtggacgcaagctgacctt

SEQ ID NO: 27912 - DNA, 260 bp, Unknown
  Description of Unknown: RightRegion for integrase B1913 sequence
acctttgacactatcattaccgagcgggatatggatgaataccgcatcaccgtatcgtgacgccctgctttattcaaatcgaggggtgggaatatttatagttcccgcccctctccctttcatttgcgattatccgagatactgattcagcaaatcaaaggtagcctgctctcggctctgattctctcctttgtgaggattcataatttcatccgcctgctcccgtgtcaactggttgattttctcttccatttgagcgg

SEQ ID NO: 27913 - DNA, 260 bp, Unknown
  Description of Unknown: RightRegion for integrase B1914 sequence
atgatttcgaggacttttgcttttcataagttccgttttttgggtgttgcttttttctgacccaaacgctgaccccaacgggagcgggtagtggaaaggtctataccgcacgggagaggatgctccccatggtttgggctgccttgagttgggcgtcggtggtgacgtgggcgtaagtgtccagcgtgaaacccgcggagtagtggcccagcatcgaggacaccgttttcacgtccacgccattctggagcgccatggtt

SEQ ID NO: 27914 - DNA, 82 bp, Unknown
  Description of Unknown: RightRegion for integrase B1915 sequence
ctggtaggtttcataactggcgttcaacgacaagacaatggtgaacatggacgtaaatagcagcgttgtcagcgcaatggca

SEQ ID NO: 27915 - DNA, 260 bp, Unknown
  Description of Unknown: RightRegion for integrase B1916 sequence
tgcaaagaaaaaaataatattatattttttgaagttcttcaaaattggcttgctgcttagtgtttagcagccgtttaaatttttacccaaaaatataatgaaaaatataacaaattttattccaatttcaaaaggaattgcccacacgttgaagcatgggcaaactattcaagaagtagaatcacaaagattttataaatttttccatatcgttcagcctattcagccaaccattcagaaattttttctgatttccgtat

SEQ ID NO: 27916 - DNA, 115 bp, Unknown
  Description of Unknown: RightRegion for integrase B1917 sequence
taccagcaaactcgaacttggtcttgtatgagagcgggttcgggtttgttttttgtctgaacatgattttaaagtagagcaagcaggccgcacaggagagatatcttctgcgcgg

SEQ ID NO: 27917 - DNA, 260 bp, Unknown
  Description of Unknown: RightRegion for integrase B1918 sequence
gaaccctacgttgtgtggggaacggtgttcgttcaaaccaaaagacacttcttaccttaatcggtagggagtgtctttttttacgtttaggtgataaaggtgagtaatcgggcgtttttcctataaactctctcttatacgtgcgtactatagaaaagttatagggattttagcccgattactcacctaactcacctaaacagtgaatctacttctgcaaattacaggttattcgcccggataccccggtctcacggcgc

SEQ ID NO: 27918 - DNA, 260 bp, Unknown
  Description of Unknown: RightRegion for integrase B1919 sequence
aaatcctacaccaaatccggcagcgacatgcacgtcaccctctaccccctcgcggattgaacattatacatttattcggtacgcatgaatgaatcccatttaaatgtagattttatagcaagtgaaaatccctcctggtgacaggagggatttctttattttgcgatatgctcataatacgccatgagcttctgttccggccccgggccgtccttgtcgagcagaaacgcctttgccagcgcggcgtagaattccgggcg

SEQ ID NO: 27919 - DNA, 260 bp, Unknown
  Description of Unknown: RightRegion for integrase B1920 sequence
tatgtatctagggagaaacggcgcagggaaaagtacaatgtttggtatgctgacggataatttgcgcccggataagggaagcataacggcagacggagaagatatttataagatgggagcggattaccgggcgaagatcgggtatatgccacagcagcagagtctttatgaagcatttactgcagaaaagttcctttggtatatggctgctttaaaaggaatgaacagaaaagatgccagagaacagattgaaaatttat

SEQ ID NO: 27920 - DNA, 260 bp, Unknown
  Description of Unknown: RightRegion for integrase B1921 sequence
aacacgataaccgtttccggaatggtcttcgtccaaaccagaaaacacgccttgccgtaattggcagggcgtgtcctttttatgttctaaactggtcgatttcggccagtttactttttgtacatcccttgcaggacaccgaccttctccgctttctcgatcgcccgcttatgcaggtactcgtagaccgccatcatgtccgcaggcggttcacccttctcccggcggtaagcatcgatcaggcggaccacgttcttatg

SEQ ID NO: 27921 - DNA, 260 bp, Unknown
  Description of Unknown: RightRegion for integrase B1922 sequence
ctgatttcgaggacttttgcttttcataagttgtcattttcggatgttgctttttcctgacccaaacgctgaccccaacgggagtattttttacaagtcatctgattacgggcaaaccaagcgaggtacttgagcgccgctccaaggcatcggccaaagcccagcataaagagattgggggcagactggagcggcaatcagcgaagtatcatcggagatgggcatcttctttgatgtcccagcaggtgcttaatatgcca

SEQ ID NO: 27922 - DNA, 109 bp, Unknown
  Description of Unknown: RightRegion for integrase B1923 sequence
gcgacggtacgcccatttttatgcagttattacagaatgctgatgcggcctgcgccgtagggattctcgtaatccagcagatagcccgggtaatcggccagcgggctgt

SEQ ID NO: 27923 - DNA, 260 bp, Unknown
  Description of Unknown: RightRegion for integrase B1924 sequence
ctgatttcgagggcttttgcttttcataagttgtcattttgggataccgcttttccctgacccaaacgctgaccccaacgggagcgggtagcggaaagcatcagacggcacgggagaggatatttcccatggtttgcgccgctttgagctgggcgtcggtggtgacgtgggcgtaggtgtccagcgtgaagcctgcggagtagtgtcccagcatactgctgaccgttttcacgtccacgccgttctggagcgccatcgtc

SEQ ID NO: 27924 - DNA, 260 bp, Unknown
  Description of Unknown: RightRegion for integrase B1925 sequence
gaaccctatattgtatggggtacggtctttgtccaaaccaaaagacactccttgtcttaaagcaaggggtgtctttttgtttaggtgataaaggtgagtaatcgggcgtttttcctataaactctctcttatacgcgcgtactaaggagaagttatagggattttgacccgattactcacctttatcaccttgtacgattaaatgtaaaaatccccggaagttttagcttccggggatgctgttatatggatatcactta

SEQ ID NO: 27925 - DNA, 260 bp, Unknown
  Description of Unknown: RightRegion for integrase B1926 sequence
cagttcgaacttggcttggaaacggaagttgagtatgaagcacagaacattgtttcatgaaaaaagcgctgtctgacagtgcgctcattcagcctctctaattgacagaaattccgaaacacgctaaaatagtcacagaaagtgtgctgtaggaatttgatggagatatgacccctgatgctcgtgggggtgcttaaccgatcactcgggagagcgcttgaatggcattcaagaggtcagcggttcgatcccgcttatct

SEQ ID NO: 27926 - DNA, 260 bp, Unknown
  Description of Unknown: RightRegion for integrase B1927 sequence
taccagcaaactcgaacttggtcttgtatgagagcgggttcgggtttgttttttgtctgaacatgattttaaagtagagcaagcaggccgcacaggagagatatcttctgcgcggtctgtttgctttctatggaatttgaatgcattccgcaaactgctcgaaggacatctcccctacctggtatttgaccattgccttctgcgcggtatcacgccatttgttgtagccctcgcgcattttggcgttcccctgtgcgcgg

SEQ ID NO: 27927 - DNA, 260 bp, Unknown
  Description of Unknown: RightRegion for integrase B1928 sequence
ctgatttcgaggacttttgcttttcataagttccgttttttgggagttgctttttcctgacccaaacgctgaccccaacgggagcgggtagcggaaaggtctataccgcacgggataggatattgcccatggtctgggcggctttcagttgggcgtcggtggtaacgtgggcgtaagtgtccagtgtgaagcctgcggagtagtgtccgagcatactgctgaccgttttcacgtccacgccgttttgcagcgccatggtt

SEQ ID NO: 27928 - DNA, 260 bp, Unknown
  Description of Unknown: RightRegion for integrase B1929 sequence
ctgatttcgaggacttttgcttttcataagttccgtttttttggtactgcttttttctgacccaaacgctgacccaaacgggagcgggtagcggaaaccgtcagacggcacgggagaggatgttccccatggtttgtgctgccttgagttgggcgtcggtggtgacatgggcgtaggtatccagcgtgaaccctgccgagtagtgacccagcatactgctgacggtcttgacgtccacgccgttttgcagggccatcgtc

SEQ ID NO: 27929 - DNA, 260 bp, Unknown
  Description of Unknown: RightRegion for integrase B1930 sequence
gttcgtacagccccacttccgccgcaccaaaccatgaaaatccgaaccttttctcgataggagaagggctcggattttttgttttcttcggaaacgagaacaatggctcttcccttacggctgtgtgtccaaaaccttatcagaagaaagaccgtatcacgaaggtcacaacagtaagagtgccgtaaggcagaagggacgcaagattatgaagtacgatgcaagagcctgtcagtttaacatgggcaccggctgtgtgg

SEQ ID NO: 27930 - DNA, 260 bp, Unknown
  Description of Unknown: RightRegion for integrase B1931 sequence
tcgatttcgaggacttttgctttttataagttgccattttcggatgtcgcttttttctgacccaaacgctgaccccaacgggagcggatagcggaaagcatcagacggcacgggagaggatattgcccatcgtctgggcggctttgagctgcgcgtcggtggtgacgtgggcgtaggtgtccagcgtgaaacccgccgagtagtggcccagcatcgtggacaccgtttttacgtccacgccgttctggagcgccatggtc

SEQ ID NO: 27931 - DNA, 260 bp, Unknown; identical to SEQ ID NO: 27920
  Description of Unknown: RightRegion for integrase B1932 sequence

SEQ ID NO: 27932 - DNA, 260 bp, Unknown
  Description of Unknown: RightRegion for integrase B1933 sequence
cctacgaacggaaactttggaaaaagttttctgaaaggctatgagattgttcaaacataaaagtccccaataaaattcaaatgaactggggacttttgatggggaaaatgacatcgaactgcaaaatggagaaattcaaagaaatttgcattgtaataaatgctaaatcaaaaagaaaaaaaccacagtttttcagcaattttgcataaaactgtggattaaatggtcgaggtgacaggacttgaacctgcggcatcttg

SEQ ID NO: 27933 - DNA, 260 bp, Unknown
  Description of Unknown: RightRegion for integrase B1934 sequence
aaatcctacaccaaatccggcagcgacatgcacgtcaccctctaccccctcgcggattgatggttatacatttattcggtacgcatgaatgcgacccgaccgtcgaccagtgcaccgactgcctgtccttcgtcaagaagtaaatttcccgcaccccgcgccgcggcaaccgccgcggcgcggggatctttgttccgtgatccgctgtttacgatcgcgcgatcgcgtcccactgttcccctatcgcaaattccgcgcag

SEQ ID NO: 27934 - DNA, 136 bp, Unknown
  Description of Unknown: RightRegion for integrase B1935 sequence
ctgatttcgagggcttttgcttttcataagttccgtttttttggtgctgcttttttctgacccaaacgctgaccccaacgggagctaaactgtacccaagaaaatggacacgagattttgacccatggccccgttc

SEQ ID NO: 27935 - DNA, 260 bp, Unknown
  Description of Unknown: RightRegion for integrase B1936 sequence
aaatcctacaccaaatccggcagcgacatgcacgtcaccctctaccccctcgcggattgatggttatacatttattcggtacgcatgaatgaatcccatctaaatatagattctatagcaagctgaaatccctcctggtgacaggagggatttctttattttgcgatatgctcataatacgccatgagcttctgttccggccccgggccgtctttatcgagcagaaacgcttttgccagcgcggcgtagaactccgggcg

SEQ ID NO: 27936 - DNA, 260 bp, Unknown
  Description of Unknown: RightRegion for integrase B1937 sequence
ctgatttcgaggacttttgcttttcataagttccgttttttgggtgttgcttttttctgacccaaacgctgaccccaacgggagcgggtagcggaaagcatcagacggcacgggagaggatattgcccattgtttgcgccgctttgagttgggcgtcggtggtgacgtgggcgtaggtgtccagcgtgaagcccgccgagtagtgacccagcatcgaggacaccgttttcacgtccacgccgttttgcagggccatggtc

SEQ ID NO: 27937 - DNA, 260 bp, Unknown
  Description of Unknown: RightRegion for integrase B1938 sequence
ctgatttcgaggacttttgcttttcataagttgctatttgtgggtgttgcttttttctgacccaaacgctgaccccaacgggagcggatagcggaaaggtctatacagcacgggagaggatgttccccatcgtctgggctgctttcagctgcgcgtcggtggtaacgtgggcgtaggtgtccagtgtgaagcccgcagagtagtgacccagcatggaggacaccgtttttacatccacaccgttttgcagggccatcgtg

SEQ ID NO: 27938 - DNA, 73 bp, Unknown
  Description of Unknown: RightRegion for integrase B1939 sequence
ctgatttcgaggacttttgcttttcataagttccgttttttgggtactgcttttttctgacccaaacgctgac

SEQ ID NO: 27939 - DNA, 260 bp, Unknown
  Description of Unknown: RightRegion for integrase B1940 sequence
ctgatttcgatgacttttgcttttcataagttgctattttcggatgttgctttttcctgacccaaacgcttaccccaacgggacagtggaaaggtctataccgcacgggataggatattgcccatcgtttgcgccaccttgagctgcgcgtcggtggtgacgtgggcgtaggtgtccagcgtgaagcccgccgagtagtggtcgagcatactgctgacggtcttgacgtccacgccgttttgcagggccataaataacct

SEQ ID NO: 27940 - DNA, 260 bp, Unknown
  Description of Unknown: RightRegion for integrase B1941 sequence
aaatcctacaccaaatccggcagcgacatgcacgtcaccctctaccccctcgcggattgatggttatacatttattcggtacgcatgaatgaatcccatctaaatatagattctatggcaagcggaaatccctcctggtgacaggagggatttctttattttgcgatatgctcataatacgccatgagcttctgttccggccccgggccgtctttatcgagcagaaacgcctttgccagcgcggcgtagaactccgggcg

SEQ ID NO: 27941 - DNA, 260 bp, Unknown
  Description of Unknown: RightRegion for integrase B1942 sequence
ctgatttcgaggacttttgctttttataagttgccattttcggacgctgctttttcctgacccaaacgctgaccccaacgggagcgggtagcggaacgcattagacagcacgggataggatattgcccatcgtttgcgccgctttgagttgggcgttggtggtgacatgggcgtaggtatccagcgtgaagcccaccgagtagtggcccagcatggaggacaccgtttttacatccacgccgttttggagcgccatcgtc

SEQ ID NO: 27942 - DNA, 260 bp, Unknown
  Description of Unknown: RightRegion for integrase B1943 sequence
tatgtatctagggagaaatggagccggaaaaagtacactgatgaatcttctgacggataatctcctgagggattccgggagtgtcctgtatgagggagaggaaatattgaaccttggggcatcttatcgggaaattatgggatatatgccgcagcagcaacagctttatgatacctttacggtaacgcattttatttcttatatgggtacgctgaaagggatgaagagcagaaccatccagagaagaatggacgagctgc

SEQ ID NO: 27943 - DNA, 260 bp, Unknown
  Description of Unknown: RightRegion for integrase B1944 sequence
tatgtatctagggagaaacggcgcagggaaaagtacaatgtttggtatgctgacggataatttgcgcccggataagggaagcataacggcagacggagaagatatttataagatgggagcggattaccgggcgaagatcgggtatatgccacagcagcagagtctttatgaagcatttactgcagaaaagttcctttggtatatggctgctttaaaaggaatgaacagaaaagatgccagagaacagattgaaaatttgt

SEQ ID NO: 27944 - DNA, 201 bp, Unknown
  Description of Unknown: RightRegion for integrase B1945 sequence
ccgatttcgaggacttttgcttttcataagttccgtttttatggtgttgcttttttctgacccaaacgctgaccccaacggggcgttaaagtgctccctaaagtgctccccaagtcaaggacattttcatttgacccatagcggctgcataccggcggggtactcacctgtggtgatgtagtggtaatattcgttagggga

SEQ ID NO: 27945 - DNA, 260 bp, Unknown
  Description of Unknown: RightRegion for integrase B1946 sequence
acctttgacgctatcattaccgagcgggatatggatgaataccgcatcaccgtatcgtgatgctctgctttattcaaatcgaggggtgggaatacttatagttcccgcccctctttttccaatatccgctatccgagatactgattcagcaaatcaaaggtcgcctgctctcggctctgattctctcctttgtgaggattcataatttcatccgcctgctcccgtgtcaactgattgattttctcttccatttgagcggt

SEQ ID NO: 27946 - DNA, 260 bp, Unknown
  Description of Unknown: RightRegion for integrase B1947 sequence
aacaccataacggtagttggaatggtatttgtccaaaccagaaaacatgccttgccttaattggcagggcattttttcttgactattacagcgtacaatgatatgattattttgcaggaatcggaattgcgcacagaaaggaactgatgaatatggccgttgcaaacaaaaaggttgaaccgaacaaaaaagaatggcttgaaagtttgtcggatgatgacttttgtgttcttgttgaacccaactatgcctatgataag

SEQ ID NO: 27947 - DNA, 260 bp, Unknown
  Description of Unknown: RightRegion for integrase B1948 sequence
acctttgacgctatcattaccgagcgagatatggatgaataccgcatcaccgtatcgtgacgccctgctttattcaaatcgaggggtgggaatatttatagttcccgcccctctttttccaatatctactatccgagatactgattcagcaaatcaaaggtagcctgctctcggctctgattctctcctttgtgaggattcataatttcatccgcctgctcccgtgtcaactgattgattttctcttccatttgagcggt

SEQ ID NO: 27948 - DNA, 260 bp, Unknown; identical to SEQ ID NO: 27919
  Description of Unknown: RightRegion for integrase B1949 sequence

SEQ ID NO: 27949 - DNA, 260 bp, Unknown
  Description of Unknown: RightRegion for integrase B1950 sequence
ggcggagataaattcgcagggcggttgcagcatgccggtggcatgctgcagtcgccttgactttttccgcagaaaagcgagtcagcctatgcgctgcgggcaatccaaaaagcgaagaaagagtctgtgaaaacctcggcgattgtgcatgaaagagggcccgcatgatgcgaacatggggctgtgtggaggaagggacgctgcgaacaaaagtgctgcttttgaatttttgaacatggaaaaatcgagaaataaagagg

SEQ ID NO: 27950 - DNA, 260 bp, Unknown
  Description of Unknown: RightRegion for integrase B1951 sequence
gcattttggaacacatcttcttcacgatgtgcgccacaagacgcaggttgtgctcgatgagcacgttgcgcgcctcaaggtcgcccgcagcgaagcgttccaaatacgccttttcctcggcggcggagagcgggcgcgggaatgagccgggattgccggcaaggcgcagggagaaaaacaggctgttgcacaaaagccaaacggcggcggaaagcatatacatcaactcctcccctcaccctatgtcggggcaggaagtc

SEQ ID NO: 27951 - DNA, 260 bp, Unknown
  Description of Unknown: RightRegion for integrase B1952 sequence
atttcaacttcattggcgatacttttcccagccaaatcgagatcaaccacgatgatgtgaaaaagattacagagcagcagatagccaagcgtaaaaagtaccaaaaaacatctggagaaaaccgcaagaaaaaacgagcggctttgagagaagctgctaaaactgacccgcaggcagcagccgaatacgaagcactcttgcagaaaaaccgggaacgctgccgccaatatgcccaaaagaaaaagctggctcaacaagag

SEQ ID NO: 27952 - DNA, 260 bp, Unknown
  Description of Unknown: RightRegion for integrase B1953 sequence
gaaccctacattgtgtggggaacggtattcgtccaaaccagaagacactccttgtcttaaaacaaggggtgtcttttttttgtttaggtgataaaggtgagtaatcgggcgtttttcctataaactatctctaatacgcgcgtactaagaagaagttatagggattttgacccgattactcacctttatcaccttatacgattatttatccgccaagccgagtaactaaaactacacgtttaacctccttcacgtgcttt

SEQ ID NO: 27953 - DNA, 260 bp, Unknown
  Description of Unknown: RightRegion for integrase B1954 sequence
aaatcctacaccaaatccggcagcgacatgcacgtcaccctctaccccctcgcagattgacggttatacatttattcggtacgcatgaatgaatcccatttaaatgtagattctatagcaagcggaaatccctcctggtgacaggagggatttctttattttgcgatatgctcataatacgccatgagcttctgttccggccccgggccgtctttatcgagcaggaacgcctttgccagcgcggcgtagaattccgggcg

SEQ ID NO: 27954 - DNA, 260 bp, Unknown
  Description of Unknown: RightRegion for integrase B1955 sequence
gggtcatgggggggatttcttgttattcaaagaaaagaagcgagatcacgcatccgctgatgggaggaattcgcatgaaagcacagatcatcgccgcactgctttttctgattctgggcatcgtgtttgcctgcggaaaaggcacatttttgatcgcgggctataatacgctcccggaggagaaaaaggcacggtatgatgcgcgcaggatcctaaaaagcatgagccggatgatgttttcctgcgtgggctgcatggcg

SEQ ID NO: 27955 - DNA, 260 bp, Unknown
  Description of Unknown: RightRegion for integrase B1956 sequence
gaaccctacattgtgtggggaacggtattcgtccaaaccaaaagacactctttaccttaatcggtggagagtgtctttttttgcgtttaggtgataaaggtgagtaatcgggtgcatttccctataactatttctatatacgcgcgtataagagagagttataggcatttatgcccgattactcacctaactcacctaaaatacgaaaaacaatttttcaaaacacgccaatttgaaaaaagtctttgcaaaaacactca

SEQ ID NO: 27956 - DNA, 260 bp, Unknown
  Description of Unknown: RightRegion for integrase B1957 sequence
gaaccctacattgtgtggggaacggtgttcgttcaaaccaaaagacactccttaccttaatcggtagggagtgtcttcttttattcttcgccggaatacccgttcgctctggcgcatttcagcgcacccaagatcatcttgtcctgagccagcgttcgttctttcagctcatagagtggagtacggcgatgatcgtcccattcaatgagctgctttttatcgtgaacgacttgaccctcatagagattgataaccttgtc

SEQ ID NO: 27957 - DNA, 260 bp, Unknown
  Description of Unknown: RightRegion for integrase B1958 sequence
gaaccctacattgtgtggggaacggtattcgttcaaaccaaaagacactccttaccttaatcggtagggagtgtcttcttttattctttgccggaatacccgttcgctctggcgcatttcagcgcacccaagatcatcttgtcctgagccagagttcgttctttcagctcatagagtggtgtgcggcgatgatcgtcccattcaatgagctgctttttgtcatgaacgacttgaccctcatagagattgataaccttgtc

SEQ ID NO: 27958 - DNA, 260 bp, Unknown
  Description of Unknown: RightRegion for integrase B1959 sequence
gaaccctacattgtgtggggaacggtgttcgttcaaaccaaaagacactccttaccttaatcggtagggagtgtcttcttttattcttcgccggaatacccgttcgctctggcgcatttcagcgcacccaagatcatcttgtcctgagccagagttcgttctttcagctcatagagtggagtgcggcgatgatcgtcccattcaatgagctgctttttgtcgtgaacgacttgaccctcgtagagattgataaccttgtc

SEQ ID NO: 27959 - DNA, 260 bp, Unknown
  Description of Unknown: RightRegion for integrase B1960 sequence
gaaccctacattgtgtggggaacgatttgtgttcaaacaaaaattcaccccctaccgtaatggtagagggtggattttttactcttcgccggtaaacccgttctctctggcacagcgcaaggcaccgagtatcatggtatcttgggccaaggttctctgtttcaattcataaagcggagtcttccgatgatcgtcccactcaatgagttgcttcttatcatgaaccacaatgccggtgtagaggtttatcagcttgtcca

SEQ ID NO: 27960 - DNA, 260 bp, Unknown
  Description of Unknown: RightRegion for integrase B1961 sequence
aacaccataacggtggttggaatggtttttgtccagaccagaaaacacgccttgccttaatcggcagggcgtgttatttttatctcttgtacatattttgaagtacgccaaccttttctgctttctcaatctcacgctggtggagataattgtaaatagccatcatctcggcgggcggttcgcctttttccctgcggtagttttctatcaagcgaacgacttccttatgaagtgcgttcatgtgattctgttcctcacca

SEQ ID NO: 27961 - DNA, 260 bp, Unknown
  Description of Unknown: RightRegion for integrase B1962 sequence
aacaccatttccgtaatagggatggtattcatccaaaccaaaagacacgctttgccgtaattggcagggcatattctcttgactattgcaacgtacgatgatattattattttgcaggaatcaatattgcgcacggaaaggaattggtgaatatggccgttgtaaacaaaaatattgaaccgagtacaaaggtatggcttgaaagtttgtctgatgatgacttttgcattccagttgaagtctactcttactacgataag

SEQ ID NO: 27962 - DNA, 260 bp, Unknown
  Description of Unknown: RightRegion for integrase B1963 sequence
aacaccatttccgtaatagggatggtattcatccaaaccaaaagacacgccttgccttaattggcagggcattttttcttgactattacagcgtacaatgatatgattattttgcaggaatcggaattgcgcacagaaaggaactgatgaatatggccgttgcaaacaaaaaggttgaaccgaacaaaaaagaatggcttgaaagtttgtcggatgatgacttttgtgttcttgttgaacccaactatgcctatgataag

SEQ ID NO: 27963 - DNA, 260 bp, Unknown
  Description of Unknown: RightRegion for integrase B1964 sequence
ttcgacgaatttttcaaggccatgcccgtcgaagaatacgagatcccgataacggaatgaaaaaagagggcgattgctgtaatggcaatcgtccccttttcggttcggttaaacgaccgaacaattaaagatgttcccgtaacagatcaaggattatctgttcttgtgtctgcgtagaggttttgcgggcattttggattttatccgcctgccattgggtaagattctttaatttttcttccatttcagaagtgtaggcg

SEQ ID NO: 27964 - DNA, 260 bp, Unknown
  Description of Unknown: RightRegion for integrase B1965 sequence
gaaccctacattgtgtggggaacggtattcgttcaaaccaaaagacactccttaccttaatcggtagggagtgtcttcttttattcttcgccggaatacccgttcgctctggcgcatttcagcgcacccaagatcatcttgtcctgagccagcgttcgttctttcagctcatagagtggagtgcggcgatgatcgtcccattcaatgagctgctttttgtcgtgaacgacttgaccctcgtagagattgataaccttgtc

SEQ ID NO: 27965 - DNA, 260 bp, Unknown
  Description of Unknown: RightRegion for integrase B1966 sequence
gaaccctacattgtgtggggaacggtgttcgttcaaaccaaaagacactccttaccttaatcggtagggagtgtctttttttattcttcgccggaatacccgttcgctctggcgcatttcagcgcacccaagatcatcttgtcctgagccagtgttcgttctttcagctcatagagtggagtacggcgatgatcgtcccattcaatgagctgctttttgtcgtgaacgacttgaccctcatagagattgataaccttgtc

SEQ ID NO: 27966 - DNA, 260 bp, Unknown
  Description of Unknown: RightRegion for integrase B1967 sequence
aacggtttcgggtctttttgtctgcataagttgttgttttctcccgctgcttttttctgacccaaccgctgaccccaacgggagcgaggagcggaaagcatcagacggcacgggagaggatattccccatcgtctgggcggctttgagttgggcgtcggtggtgacgtgggcgtaggtgtccagcgtgaagcccgccgaatagtgacccagcatggaggacacggttttcacgtccacgccgttttgcagggccatggtc

SEQ ID NO: 27967 - DNA, 260 bp, Unknown
  Description of Unknown: RightRegion for integrase B1968 sequence
gaaccctacattgtgtggggaacggtgttcgttcaaaccaaaagacactccttaccttaatcggtagggagtgtcttcttttattcttcgccggaatacccgttcgctctggcgcatttcagcgcacccaagatcatattgtcctgagccagcgttcgttctttcagctcatagagtggagtacggcgatgatcgtcccattcaatgagctgctttttgtcatgaacgacttgcccctcatagagattgataaccttgtc

SEQ ID NO: 27968 - DNA, 260 bp, Unknown
  Description of Unknown: RightRegion for integrase B1969 sequence
gaaccctacattgtgtggggaacggtgttcgttcaaaccaaaagacactccttaccttaatcggtagggagtgtcttcttttattcttcgccggaatacccgttcgctctggcgcatttcagcgcacccaagatcatcttgtcttgagccagagttcgttcttttagctcatagagtggagtgcggcgatgatcgtcccattcaatgagctgctttttgtcgtgaacgacttgaccctcatagagattgataaccttgtc

SEQ ID NO: 27969 - DNA, 260 bp, Unknown
  Description of Unknown: RightRegion for integrase B1970 sequence
ttcgacgaatttttcaaggccatgcccgtcgaagaatacgagatcccgataacggaatgaaagaaaaagcattgctggaaaattctcctgcaatgctttttccctatttttcaaattagcccattcgcctcatattgttaagcacctgcggagttagccatatgctgtttcgcttcccgattccttccataaattccacaaaatcgggtgatagctttacattatgaagattaaaattagtagcacctcccatatcaaga

SEQ ID NO: 27970 - DNA, 260 bp, Unknown
  Description of Unknown: RightRegion for integrase B1971 sequence
gaaccctacattgtatggggaacggtgttcgttcaaaccaaaagacactccttaccttaatcggtagggagtgtcttcttttattcttcgccggaatacccgttcgctctggcgcatttcagcgcacccaagatcatcttgtcttgagccaacgttcgttctttcagctcatagagtggagtgcggcgatgatcgtcccattcaatgagctgctttttgtcgtgaacgacttgaccctcgtagagattgataaccttgtc

SEQ ID NO: 27971 - DNA, 260 bp, Unknown
  Description of Unknown: RightRegion for integrase B1972 sequence
gaaccctacatcgtgtggggtacggtattcgttcaaaccaaaagacactccttaccttaatcggtagggagtgtcttcttttatttttcgccggaatacccgtttgctctggcgcatttcagcgcacccaagatcatcttgtcctgagccagcgttcgttctttcagctcatagagtggagtacggcgatgatcgtcccattcaatgagctgctttttatcatgaacgacttgaccctcatagagattgataaccttgtc

SEQ ID NO: 27972 - DNA, 260 bp, Unknown
  Description of Unknown: RightRegion for integrase B1973 sequence
gaaccctacattgtgtggggaacggtattcgttcaaaccaaaagacactccttaccttaattggtagggagtgtcttcttttattcttcgccggaatacccgttcgctctggcgcatttcagtgcacccaaaatcatcttgtcctgagccagtattcgttctttcagctcatagagtggagtgcggcgatgatcgtcccattcaatgagctgctttttatcatgaacgacttgaccctcgtagagattgataaccttgtc

SEQ ID NO: 27973 - DNA, 260 bp, Unknown
  Description of Unknown: RightRegion for integrase B1974 sequence
gaaccctacattgtgtggggaacggtgttcgttcaaaccaaaagacactccttaccttaattggtagggagtgtcttcttttattcttcgccggaatacccgttcgctctggcgcatttcagcgcacccaagatcatcttgtcctgagccagtgttcgttctttcagctcatagagtggagtacggcgatgatcgtcccattcaatgagctgctttttgtcgtgaacgacttgaccctcatagagattgataaccttgtc

SEQ ID NO: 27974 - DNA, 260 bp, Unknown
  Description of Unknown: RightRegion for integrase B1975 sequence
gaaccctacattgtatggggaaagatattcgttcaaacaaaaagacaccctttaccataacggtagagggtgtcttcctttattctccggtgaaaccgttcgctttggcacatttcagcgcacccaaaatcattttgtcctgcgccaatgtccgttgcttgatctcgtagataggtgtcccacagtgtccatcccattccacaatctgttttctgtcatggactaccacaccctcatagagatttatcagcttgtccagc

SEQ ID NO: 27975 - DNA, 260 bp, Unknown
  Description of Unknown: RightRegion for integrase B1976 sequence
cagtatgtatctagggagaaatggagccggaaaaagcacaactatcaatgctattcttgatttaattcataaagatgatggaacagttactttttgggggcaggaattatcgtccacaaaacaaatcaaagaggatgttggcgtagtgtttgacggaattaacttctatgaaacgctcactccggccaaagtcgggaaaattgctggtgctgcctacaaacagtgggacggccatctgtttcaagactatctaaagcggt

SEQ ID NO: 27976 - DNA, 260 bp, Unknown
  Description of Unknown: RightRegion for integrase B1977 sequence
gaaccctacattgtgtggggaacggtgttcgttcaaaccaaaagacactccttaccttaatcggtagggagtgtcttcttttattcttcgccggaatacccgttcgctctggcgcatttcagcgcacccaagatcatcttgtcctgagccagcgttcgttctttcagctcatagagtggagtacggcgatgatcgtcccattcaatgagctgctttttgtcgtgaacgacttgaccctcatagagattgataaccttatc

SEQ ID NO: 27977 - DNA, 260 bp, Unknown
  Description of Unknown: RightRegion for integrase B1978 sequence
gaaccctacattgtgtggggaacggtgttcgttcaaaccaaaagacactccttaccttaatcggtagggagtgtcttcttttattcttcgccggaatacccgttcgctctggcacatttcagcgcacccaagatcatcttgtcctgagccagcgttcgttctttcagctcatagagtggagtacggcgatgatcgtcccattcaatgagctgctttttgtcgtgaacgacttgaccctcatagagattgataaccttgtc

SEQ ID NO: 27978 - DNA, 260 bp, Unknown
  Description of Unknown: RightRegion for integrase B1979 sequence
tcatggatcattatttataaacccaactttgttatttcaccatggcagacgctgatataatagaaaaagagtgcattaccacctcagataatgcactcttatattttaccctatttctcctccagcccgctgagcgaaagcctgctctccattttctgaacagtcttgctctcctgctttgcgatctttgcttcaaaccagaaggtcgagcctttgccctcctccgattgaacgccgtatgcaaagccgtgggctttgag

SEQ ID NO: 27979 - DNA, 260 bp, Unknown
  Description of Unknown: RightRegion for integrase B1980 sequence
gaaccctacattgtgtggggaacggtgttcgttcaaaccaaaagacactccttaccttaatcggtagggagtgtcttcttttattcttcaccagaatacccgttcgctctggcgcatttcagcgcacccaaaatcatcttgtcctgagccagtgttcgttctttcagctcatagagtggagtacggcgatgatcgtcccattcaatgagctgctttttgtcatgaacgacttgaccctcatagagattgataaccttgtc

SEQ ID NO: 27980 - DNA, 260 bp, Unknown
  Description of Unknown: RightRegion for integrase B1981 sequence
gaaccctacattgtgtggggaacggtattcgttcaaaccaaaagacactccttaccttaatcggtagggagtgtcttcttttattcttcgccggaatacccgttcgctctggcgcatttcagcgcacccaagatcatcttgtcttgagccagagttcgttcttttagctcatagagtggagtgcggcgatgatcgtcccattcaatgagctgctttttgtcgtgaacgacttgaccctcatagagattgataaccttgtc

SEQ ID NO: 27981 - DNA, 260 bp, Unknown
  Description of Unknown: RightRegion for integrase B1982 sequence
gaaccctacatagtatggggaacggtattcgttcaaaccaaaagacactccttaccttaatcggtagggagtgtcttcttttattcttcgtcagaatacccgttcgctctggcgcatttcagcgcacccaagatcatcttgtcctgagccagcgttcgttctttcagctcatagagtggagtacggcgatgatcgtcccattcaatgagctgctttttgtcgtgaacgacttgaccctcatagagattgataaccttgtc

SEQ ID NO: 27982 - DNA, 260 bp, Unknown
  Description of Unknown: RightRegion for integrase B1983 sequence
aacacaattaccgttgtgggaatggttttcatccaaaccaaaagacacgccctgccttgattggtagggcgtgtttctttattttttatacatcccctgcaccactccgacgttctccgcccgctcaatatcccgcttgtgcaggtactcatagacggccatcatggccgcaggcggttcgcccttctgcttgcggtattcctcgatgtgggaaacaacggccttgtgcagggcgttcatgtggttcatttcctccccgc

SEQ ID NO: 27983 - DNA, 260 bp, Unknown
  Description of Unknown: RightRegion for integrase B1984 sequence
gaaccatacattgtgtggggaacggtgttcgttcaaaccaaaagacactccttaccttaatcggtagggagtgtcttcttttattcttcgccggaatacccgttcgctctggcacatttcagcgcacccaagatcatcttgtcctgagccagcgttcgttctttcagctcatagagtggagtgcggcgatgatcgtcccattcaatgagctgctttttgtcatgaacgacttgaccctcatagagattgataaccttatc

SEQ ID NO: 27984 - DNA, 260 bp, Unknown
  Description of Unknown: RightRegion for integrase B1985 sequence
gaaccctacattgtgtggggaacggtattcgttcaaaccaaaagacactccttaccttaatcggtagggagtgtcttcttttattctttaccggaatacccgttcgctctggcgcatttcagcgcacccaagatcatcttgtcttgagccagcgttcgttctttcagctcatagagtggagtacggcgatgatcgtcccattcaatgagctgctttttgtcgtgaacgacttgaccctcatagagattgataaccttgtc

SEQ ID NO: 27985 - DNA, 260 bp, Unknown
  Description of Unknown: RightRegion for integrase B1986 sequence
aacacaattaccgttgtgggaatggttttcatccaaaccaaaagacacgccctgccttgattggcagggcgtattttcttgactattgcaacgtacgatgatattattatttcgcaggaatcaatattgcgcacggaaaggaatttgtgaatatggccgttgtaaacaaaaatattgaaccgagtacaaaggaatggcttgaaagtttgtcggatgatgacttttgcattccagttgaagtctacccttactacgataag

SEQ ID NO: 27986 - DNA, 260 bp, Unknown
  Description of Unknown: RightRegion for integrase B1987 sequence
gtaatgaaccaaaagcgaactccatactttttttccagcgcgcttttggaatcattgtaaaactgcaataattttaccacactttttctgaaacgccaatcgcttcgtacaaaaggtgcttttgctttgtggttgcgtttggcacagccttgtcgatggcatctttctttttccggctggcagagttggtaatcgtcttaccgttctcgtccttgtcgccggtgatgccgcgggcagcaaagtatgcggcatagtactgg

SEQ ID NO: 27987 - DNA, 260 bp, Unknown
  Description of Unknown: RightRegion for integrase B1988 sequence
gaaccctacattgtatggggaacggtattcgttcaaaccaaaagacactccttaccttaatcggtagggagtgtcttcttttattcttcgccagaatacccgttcgctctggcgcatttcagcgcacccaagatcatcttgtcctgagccagtgttcgttctttcagctcatagagtggagtacggcgatgatcgtcccattcaatgagctgctttttgtcgtgaacgacttgaccctcatagagattgataaccttgtc

SEQ ID NO: 27988 - DNA, 260 bp, Unknown
  Description of Unknown: RightRegion for integrase B1989 sequence
gaaccctacattgtgtggggaacggtattcgttcaaaccaaaagacactccttaccttaatcggtagggagtgtcttcttttattcttcgccggaatacccgttcgctctggcgcatttcagcgcacccaagatcatcttgtcctgagccagcgttcgttctttcagctcatagagtggagtgcggcgatgatcgtcccattcaatgagctgctttttgtcatgaacgacttgaccttcatagagattgataaccttgtc

SEQ ID NO: 27989 - DNA, 260 bp, Unknown
  Description of Unknown: RightRegion for integrase B1990 sequence
aacacaattaccgttgtgggaatggttttcatccaaaccagaagacacgccctgccttgattggcagggcgtgtttctttattttttatacataccctgcaccactccgacgttctccgcccgctcaatatctcgcttgtgcaggtactcatagacggccatcatggccgcaggcggttcgcccttctgcttgcggtattcctcaatgtgggaaacaacggccttgtgcagggcgttcatgtggttcatttcctccccgc

SEQ ID NO: 27990 - DNA, 260 bp, Unknown; identical to SEQ ID NO: 27979
  Description of Unknown: RightRegion for integrase B1991 sequence

SEQ ID NO: 27991 - DNA, 260 bp, Unknown
  Description of Unknown: RightRegion for integrase B1992 sequence
gaaccctacattgtgtggggaacggtgttcgttcaaaccaaaagacactccttaccttaattggtagggagtgtcttcttttattcttcgccggaatacccgtttgctctggcgcatttcagcgcacccaaaatcatcttgtcctgagccagcgttcgttctttcagctcatagagtggagtgcggcgatgatcgtcccattcaatgagctgctttttatcatgaacgacttgaccctcatagagattgataaccttgtc

SEQ ID NO: 27992 - DNA, 260 bp, Unknown
  Description of Unknown: RightRegion for integrase B1993 sequence
gaaccctacattgtgtggggaacggtgttcgttcaaaccaaaagacactccttaccttaatcggtagggagtgtcttcttttattcttcgccggaatacccgttcgctctggcgcatttcagcgcacccaagatcatcttgtcctgagccagcgttcgttctttcagctcatagagtggagtgcggcgatgatcgtcccattcaatgagctgctttttgtcatgaacgacttgaccttcatagagattgataaccttgtc

SEQ ID NO: 27993 - DNA, 260 bp, Unknown
  Description of Unknown: RightRegion for integrase B1994 sequence
gaaccctacattgtgtggggaacggtgttcgttcaaaccaaaagacactccttaccttaattggtagggagtgtcttcttttattcttcgccggaatacccgttcgctctggcgcatttcagcgcacccaagatcatcttgtcctgagccagagttcgttctttcagctcatagagtggagtgcggcgatgatcgtcccattcaatgagctgctttttgtcatgaacgacttgaccctcatagagattgataaccttgtc

SEQ ID NO: 27994 - DNA, 260 bp, Unknown
  Description of Unknown: RightRegion for integrase B1995 sequence
gaaccctacattgtgtggggaacggtgttcgttcaaaccaaaagacactccttaccttaatcggtagggagtgtcttcttttattcttcaccagaatacccgttcgctctggcgcatttcagcgcacccaagatcatcttgtcctgagccagtgttcgttctttcagctcatagagtggagtacggcgatgatcgtcccattcaatgagctgctttttgtcatgaacgacttgaccctcatagagattgataaccttgtc

SEQ ID NO: 27995 - DNA, 260 bp, Unknown
  Description of Unknown: RightRegion for integrase B1996 sequence
gtcgaactcttcttttacaagaatgagtttgcgcttgtgtataggttgggggacgcctgatggcgtcccctttccgttttcgttgctgtgaaacgccgtattttgcgttttaaggcgttttaagcctgttggggtactcgtgtacccctcgggctttttccgtgccttaaaacgcctctgaagcggtctgtggacattcgagcgcccatgcgcatctcgcatccgctcgatgcaagaaagcaacgactgcggcaagaggt

SEQ ID NO: 27996 - DNA, 260 bp, Unknown
  Description of Unknown: RightRegion for integrase B1997 sequence
gaaccctacattgtgtggggaacggtgttcgttcaaaccaaaagacactccttaccttaatcggtagggagtgtcttcttttattcttcgccggaatacccgttcgctctggcgcatttcagcgcacccaagatcatcttgtcttgagccagcgttcgttctttcagctcatagagtggagtgcggcgatgatcgtcccattcaatgagctgctttttgtcatgaacgacttgaccttcatagagattgataaccttgtc

SEQ ID NO: 27997 - DNA, 260 bp, Unknown
  Description of Unknown: RightRegion for integrase B1998 sequence
aacacgattactgttgtgggaatggttttcatccaagccaaaagacacgccctgccttaataggctgggcgtgttgctttattttttgtacatagcctgtaccactccgacgttttccgcccgttcaatatcccgcctgtgcagatactcatacaccgccatcatggccgcaggcggttcgcccttttgcttgcggtattcctcaatgtgggaaacaacggccttgtgcagggcgttcatgtggttcatttcctccccgc

SEQ ID NO: 27998 - DNA, 260 bp, Unknown
  Description of Unknown: RightRegion for integrase B1999 sequence
gaaccctacattgtgtggggaacggtgttcgttcaaaccaaaagacactccttaccttaatcggtagggagtgtcttcttttattcttcgccggaatacccgtttgctctggcgcatttcagcgcacccaagatcatcttgtcctgagccagagttcgttcttttagctcatagagtggagtgcggcgatgatcgtcccattcaatgagctgctttttatcatgaacgacttgaccctcatagagattgataaccttgtc

SEQ ID NO: 27999 - DNA, 260 bp, Unknown
  Description of Unknown: RightRegion for integrase B2000 sequence
gaaccctacattgtgtggggaacggtattcgttcaaaccaaaagacactccttaccttaatcggtagggagtgtcttcttttattcttcgccggaatacccgttcgctctggcgcatttcagcgcacccaagatcatcttgtcctgagccagagttcgttctttcagctcatagagtggagtgcggcgatgatcgtcccattcaatgagctgctttttgtcgtgaacgacttgaccctcgtagagattgataaccttgtc

SEQ ID NO: 28000 - DNA, 260 bp, Unknown; identical to SEQ ID NO: 27989
  Description of Unknown: RightRegion for integrase B2001 sequence

SEQ ID NO: 28001 - DNA, 260 bp, Unknown
  Description of Unknown: RightRegion for integrase B2002 sequence
gcggaaaacccttgtcggacagggcgaaaatatggtataatacactggttgtgtctgtaaaggacgcttcattcggtatgcctgtctttttcgggcatatgaaggaggaaatgcctttgaccctgcgcgaagaagcgccgatgaccaaagatgatgtacgccgcctgaatccactccagctggcgtatatcggggatacggtctatgatttgctgacccggtcgcgcctgctgtaccgggggtataatctgcatcactgc

SEQ ID NO: 28002 - DNA, 260 bp, Unknown
  Description of Unknown: RightRegion for integrase B2003 sequence
cgtggttacgtactttggccggggaattggaaagacctgacagttaaggttcttctataaatcctatcaagtcccgaattgcttgtatctgcaattcgggactttttgttttattttgccatgttttgtacattttcctgaaaatatacacggtttgatgggtcagacaaaaaagcgcacacccctcggtgtgcgcttggattttacgtctgcgtcgattcccgcaggcttacctggtaacctaactccatgcgggtttc

SEQ ID NO: 28003 - DNA, 260 bp, Unknown
  Description of Unknown: RightRegion for integrase B2004 sequence
aacacaattgttgttgtgggtatggttttcgtccagaccaaaaaacacgccctgccttaattggccgggcgtgtttctttattttttatacatcccctgcaccactccgacgttctccgctcgttcaatatcacgcttgtgcaggtactcatagacagccatcatggccgcaggcggttcacccttctgcttgcggtattcctcgatgtgagaaacaacggccttgtgcagggcgttcatatggttcatttcctcgcctg

SEQ ID NO: 28004 - DNA, 260 bp, Unknown
  Description of Unknown: RightRegion for integrase B2005 sequence
gaaccctacattgtgtggggaaaggtattcgttcaaaccaaaagacactccttaccttaatcggtagggagtgtcttcttttatttttcgccggaatacccgttcgctctggcgtatttcagcgcacccaagatcatcttgtcctgagccagcgttcgttctttcagctcatagagcggaatgcggcgatgattgtcccattcaatgagctgctttttgtcatgaacgacttgaccttcatagagattgataaccttgcc

SEQ ID NO: 28005 - DNA, 260 bp, Unknown; identical to SEQ ID NO: 27981
  Description of Unknown: RightRegion for integrase B2006 sequence

SEQ ID NO: 28006 - DNA, 260 bp, Unknown
  Description of Unknown: RightRegion for integrase B2007 sequence
gaaccctacattgtgtggggaacggtgttcgttcaaaccaaaagacactccttaccttaatcggtagggagtgtcttcttttattcttcgccggaatacccgttcgctctggcgcatttcagcgcacccaaaatcatcttgtcctgagccagagttcgttctttcagctcatagagtggagtgcggcgatgatcgtcccattcaatgagctgctttttgttgtgaacgacttgaccctcgtagagattgataaccttgtc

SEQ ID NO: 28007 - DNA, 260 bp, Unknown
  Description of Unknown: RightRegion for integrase B2008 sequence
gctgttctctatatgatcggcggcctgttcgtgttggaatgctcccttgaggagagataaaaaaagaggttatccgtcctgcgttgcagcgggagggataacctctttttgcgtttcattctaacgaaatcggttattttttaccaaatccatgcggaaatctaaaattgtagttatattctaccgtaaaggagcatggctatgattaggattttactgtccacccggcttggcgagcggaggtggacgcaagctgacct

SEQ ID NO: 28008 - DNA, 260 bp, Unknown
  Description of Unknown: RightRegion for integrase B2009 sequence
gaaccctacattgtgtggggaacggtgttcgttcaaaccaaaagacactccttaccttaatcggtagggagtgtcttcttttattcttcgccagaatacccgttcgctctggcgcatttcagcgcacccaagatcatcttgtcttgagccagcgttcgttctttcagctcatagagtggagtacggcgatgatcgtcccattcaatgagctgctttttgtcatgaacgacttgaccctcatagagattgataaccttgtc

SEQ ID NO: 28009 - DNA, 260 bp, Unknown
  Description of Unknown: RightRegion for integrase B2010 sequence
gaaccctacattgtgtggggaaaggtattcgttcaaaccaaaagacactccttaccttaatcggtagggagtgtcttcttttatttttcgccggaatacccgttcgctctggcgcatttcagcgcacccaagatcatcttgtcctgagccagcgttcgttctttcagctcatagagcggagtgcggcgatgatcgtcccattcaatgagctgctttttgtcatgaacgacttgaccttcatagagattgataaccttgtc

SEQ ID NO: 28010 - DNA, 260 bp, Unknown
  Description of Unknown: RightRegion for integrase B2011 sequence
gaaccctacattgtgtggggaacggtgttcgttcaaaccaaaagacactccttaccttaatcggtagggagtgtcttcttttattcttcgccggaatacccgttcgctctggcgcatttcagcgcacccaagatcatcttgtcctgagccagtgttcgttctttcagctcatagagtggagtacggcgatgatcgtcccattcaatgagctgctttttgtcgtgaacgacttgaccctcgtagagattgataaccttgtc

SEQ ID NO: 28011 - DNA, 260 bp, Unknown
  Description of Unknown: RightRegion for integrase B2012 sequence
aacacgataaccgtcttcggaatggtcttcgtccaaaccaaaagccacgccttgccgtaattggcagggcgtggctttttatagcctaaactggtcgatttccaccagtttactttttatacatcccttgcagcgccccagcctctccggctttttcgatagcccgcttatgcagatactcataaacggccatatcgtcctccgggaatttgtctccgcttcggtgataggcatcaatcattcgaatcacgttcttgtgc

SEQ ID NO: 28012 - DNA, 260 bp, Unknown
  Description of Unknown: RightRegion for integrase B2013 sequence
gaaccctacattgtgtggggaacggtattcgttcaaaccaaaaaacactccttaccttaatcggtagggagtgtcttcttttattctttaccggaatacccgttcgctctggcgcatttcagcgcacccaagatcatcttgtcttgagccagcgttcgttctttcagctcatagagtggagtacggcgatgatcgtcccattcaatgagctgctttttgtcgtgaacgacttgaccctcatagagattgataaccttgtc

SEQ ID NO: 28013 - DNA, 260 bp, Unknown
  Description of Unknown: RightRegion for integrase B2014 sequence
gaaccctacattgtgtggggaacggtgttcgttcaaaccaaaagacactccttaccttaatcggtagggagtgtcttcttttattcttcgcctattcttcgccggaatacccgttcgctctggcgcatttcagcgcacccaagatcatcttgtcttgagccagcgttcgttctttcagctcatagagcggggtacggcgatgatcgtcccattcaatgagttgcttcttgtcgtgaacgacttgaccctcatagagattg

SEQ ID NO: 28014 - DNA, 260 bp, Unknown
  Description of Unknown: RightRegion for integrase B2015 sequence
ttcgacgaatttttcaaggccatgcccgtcgaagaatacgagatcccgataacggaatgaaagaaaaagcattgctggaaaattctcctgcaatgctttttccctatttttcaaattagcccattcgcctcacattgttaagcacctgcggagttagccatatgctgtttcgcttcccgattccttccataaattccacaaaatcgggtgatagctttacattatgaagattaaaattagtagcacctcccatatcaaga

SEQ ID NO: 28015 - DNA, 260 bp, Unknown
  Description of Unknown: RightRegion for integrase B2016 sequence
aacacaattgttgttgtgggtatggttttcgtccagaccaagaaacacgccctgccttgattggctgggcgtgtcttctttattttttgtacatagcctgtaccactccgacgttctccgcccgttcaatatcccgcttgtgcaggtactcatagacggccatcatggccgcaggcggttcacccttctgcttgcggtattcctcaatgtgagaaacaacggccttgtgcagggcgttcatgtggttcatttcctcgccg

SEQ ID NO: 28016 - DNA, 260 bp, Unknown
  Description of Unknown: RightRegion for integrase B2017 sequence
gaaccctacattgtgtggggaacggtattcgttcaaaccaaaagacactccttaccttaatcggtagggagtgtcttcttttattcttcgccggaatacccgtttgctctggcacatttcagcgcacctaagatcatcttgtcctgagccagtgttcgttctttcagctcatagagtggagtacggcgatgattgtcccattcaatgagctgctttttgtcgtgaacgacttgaccctcgtagagattgataaccttgtc

SEQ ID NO: 28017 - DNA, 260 bp, Unknown
  Description of Unknown: RightRegion for integrase B2018 sequence
cagtatgtatctagggagaaatggtgcaggcaagacaactttaatgagaatactttctaatttgcaaagtccatcctcaggaacagttgttaaatctgaaaatattaaaatcggtgccattattgaaacacctgcattatatcctaccttaagtgcaaaaggaaatttgaagtatcagcttaaaatttgtggatgcccatcaaaggaagtaaagtcgaagattgctgaactattagaactggtacatctgaaagatactc

SEQ ID NO: 28018 - DNA, 260 bp, Unknown; identical to SEQ ID NO: 27989
  Description of Unknown: RightRegion for integrase B2019 sequence

SEQ ID NO: 28019 - DNA, 260 bp, Unknown
  Description of Unknown: RightRegion for integrase B2020 sequence
ttcgacgaattttttaaggctatgcctgtcgaggaataccaaattccaataacagaatgaaaaaagagggcgattgctataatggcaatcgtccccttttcaattcggttaaatggtcgaatattaaagatgttcccgtagcaggtcaaggattacctgttcttgtgtctgcgtagaggttttgcgggcattttgaattttctccgcttgccattgggtaagtttttttaatttctcctctatttcaagagtgtaggccg

SEQ ID NO: 28020 - DNA, 260 bp, Unknown
  Description of Unknown: RightRegion for integrase B2021 sequence
aacacaattgttgttgtgggtatggttttcgtccagaccaagaaacacgccctgccttaattggccgggcgtgtttcttacttcttgtacattgcctgtagcactccgacttcctccgcccgctcaatatcacgcttgtgcaggtactcatagacagccatcatggccgcaggcggttcacccttctgcttgcggtattcctcaatgtgagaaacaacggccttgtgcagggcgttcatatggttcatttcctcgcctga

SEQ ID NO: 28021 - DNA, 260 bp, Unknown
  Description of Unknown: RightRegion for integrase B2022 sequence
aacacgataaccgtcttcggaatgattttcgtccaaaccagaaaacacgccttgccgtaattggcagggcgtgttctttttttcttggataaactggctggaatcgggctggttactttttatacatcccctgcaaaaccccaaccctttcggcctcggcgatgaaacgcttgtgcagatgttcgtaccttgccatcatgtctgcggggagttcacctttcttctgccggtaggcctcaatcatacgaaccacatcctta

SEQ ID NO: 28022 - DNA, 260 bp, Unknown
  Description of Unknown: RightRegion for integrase B2023 sequence
aactcaatagtagttgttgggatggtttttgtccaaaccaagagacacgccctgccttaataggctgggcgtgtctcttttattttttgtacattgcctgaaggattccgaccttctcggcttcttccatggcttccccgtggaggtacttgtagaggatcatcatgggttccgggacttcgcccttttccttgcggtagttttcgatcagccggaccacgtctctgtggagggcggtcatgtgattcagttcctctccg

SEQ ID NO: 28023 - DNA, 260 bp, Unknown
  Description of Unknown: RightRegion for integrase B2024 sequence
gaaccctacattgtgtggggaacggtattcgttcaaaccaaaagacactccttaccttaatcggtagggagtgtcttcttttattcttcgccggaatacccgttcgctctggcacatttcagcgcacccaagatcatcttgtcctgagccagcgttcgttctttcagctcatagagtggagtacggcgatgatcgtcccattcaatgagctgctttttgtcgtgaacgacttgaccctcatagagattgataaccttgtc

SEQ ID NO: 28024 - DNA, 260 bp, Unknown
  Description of Unknown: RightRegion for integrase B2025 sequence
ttcgacgaatttttcaaagctatgcccgtcgaagaatacgagatcccgataacggaatgaaagaaaaagcattgctggaaaattctcctgcaatgctttttccctatttttcaaattagcccattcgcctcatattgttaagcacttgcggagttagccatatgctgtttcgcttcccgattccttccataaattccacaaaatcgggtgatagctttacattatgaagattaaaattagtagcacctcccatatcaaga

SEQ ID NO: 28025 - DNA, 260 bp, Unknown
  Description of Unknown: RightRegion for integrase B2026 sequence
gaaccctacattgtgtggggaacggtattcgttcaaaccaaaagacactccttaccttaatcggtagggagtgtcttcttttattcttcgccggaatacccgttcgctctggcgcatttcagcgcacccaaaatcatcttgtcctgagccagagttcgttctttcagctcatagagtggagtgcggcgatgatcgtcccattcaatgagctgatttttgtcgtgaacgacttgaccctcatagagattgataaccttgtc

SEQ ID NO: 28026 - DNA, 260 bp, Unknown
  Description of Unknown: RightRegion for integrase B2027 sequence
gacaaccgttttattgacctcggcaaatgccgggggtcatatgtggtatttaagaggtgataaaatgtttggaaaaattaagataaaaaactgcatactgactattataggaagtgcggtattagcctttgggctatataatgtgcactcgctttccggagtaactgaaggcggcgtacttggacttactctgctcttggaacaccattttggcatttctccgtccgtttcaggccttattctgaatcttgcgtgctatc

SEQ ID NO: 28027 - DNA, 260 bp, Unknown
  Description of Unknown: RightRegion for integrase B2028 sequence
gaaccatacatagcatacgggtcgattcttgttcaaaccaaaagacactctttaccttaattggtagagagtgtctttttttgcgtttaggtgataaaggtgagtaatcgggtgtttttcctataaactctttctaatacgcgcgtactaagaggaagttatagggattttaacccgattactcacctaactcacctaatttgacttatttgcggctccgcagcaccatcgctgcgacttcttcgcgtttggcgtagccg

SEQ ID NO: 28028 - DNA, 260 bp, Unknown
  Description of Unknown: RightRegion for integrase B2029 sequence
atttcgccgtacagcgttgttttcatcatcccgcttcccggaaaactggtacgccgataaaatccgcctgccgtttcacgcaatataatttgcttctacgttctttattttcattctttcggacagaggtttatattccgtcacctccacagacaacaaaaaaatcccccgccagctttcctttcagattgccagcgggggattttcagttatgcggttttagtgcaggaatgtagccagttcataggccacaaagcccg

SEQ ID NO: 28029 - DNA, 260 bp, Unknown
  Description of Unknown: RightRegion for integrase B2030 sequence
tatggcacaatcaaaaagacgcaggaattcaaattcctgcgtcttttttgcatgtattgatgggtgtgtacctcagtgcccggcccgactggggatcgtctggagctcgaagcggtaggtctgcccggcgtccgggtatttttcgcggtcgaccgggctcaggaacatatccagcggccggacccagaggccgccgtcgccgtaaagcttgcggtagatcacgcagggctcgttcgtctcggaatcacgggcaagcgcct

SEQ ID NO: 28030 - DNA, 260 bp, Unknown; identical to SEQ ID NO: 27958
  Description of Unknown: RightRegion for integrase B2031 sequence

SEQ ID NO: 28031 - DNA, 260 bp, Unknown
  Description of Unknown: RightRegion for integrase B2032 sequence
aacacaattaccgttgtgggaatggttttcatccaaaccaaaagacacgccctgccttgattggtagggcgtgtttctttattttttatacatcccctgcaccactccgacgttctccgcccgctcaatatcccgcttgtgcaggtactcatagacggccatcatggccgcaggcggttcgcccttctgcttgcggtattcctcaatgtgggaaacaacggccttgtgcagggcgttcatgtggttcatttcctccccgc

SEQ ID NO: 28032 - DNA, 260 bp, Unknown
  Description of Unknown: RightRegion for integrase B2033 sequence
aacacaatagttgttgtgggtatggttttcgtccagaccaagaagcacgccctgccttaattggccgggcgtgtttcttacttcttgtacattgcctgtagcactccgacttcctccgcccgctcaatatcacgcttgtgcaggtactcatagacagccatcatggccgcaggcggttcacccttctgcttgcggtattcctcaatgtgagaaacaacggccttgtgcagggcattcatgtggttcatttcctcgccgct

SEQ ID NO: 28033 - DNA, 260 bp, Unknown; identical to SEQ ID NO: 27982
  Description of Unknown: RightRegion for integrase B2034 sequence

SEQ ID NO: 28034 - DNA, 260 bp, Unknown
  Description of Unknown: RightRegion for integrase B2035 sequence
aacacaattgttgttgtgggtatggttttcgtccaagccaagaaacacgccctgccttaattggccgggcgtgtttcttacttcttgtacatagcctgtaccactccgacgttctccgcccgttcaatatcccgcttgtgcaggtactcatagacggccatcatggccgcaggcggttcacccttctgcttgcggtattcctcaatgtgagaaacaacggccttgtgcagggcgttcatatggttcatttcctcgcctga

SEQ ID NO: 28035 - DNA, 260 bp, Unknown
  Description of Unknown: RightRegion for integrase B2036 sequence
gaaccctacattgtgtggggaacggtgttcgttcaaaccaaaagacactccttaccttaatcggtagggagtgtcttcttttattcttcgccggaatacccgtttgctctggcacatttcagcgcacccaagatcatcttgtcctgagccagtgttcgttctttcagctcatagagtggagtgcggcgatgatcgtcccattcaatgagctgctttttatcatgaacgacttgaccctcatagagattgataaccttgtc

SEQ ID NO: 28036 - DNA, 260 bp, Unknown
  Description of Unknown: RightRegion for integrase B2037 sequence
aactccatcacagttgtgggcatggtttttgtgtgcacaagaagacacgctctgccgtaatggcggggcgtgtctctttttattttttgtacattgcctgaaggattccgaccttctcggcttcttccatggcttccccgtggaggtacttgtagaggatcatcatgggttccgggacttcgcccttttccttgcggtagttttcgatcagccggaccacgtccttgtggagggcggtcatgtgattcagttcctctccg

SEQ ID NO: 28037 - DNA, 260 bp, Unknown
  Description of Unknown: RightRegion for integrase B2038 sequence
gaaccctacatcgtgtggggaacggtgttcgttcaaaccaaaagacactccttaccttaatcggtagggagtgtcttcttttattcttcgccggaatacccgttcgctctggcgcatttcagcgcacccaaaatcatcttgtcctgagccagagttcgttctttcagctcatagagtggagtgcggcgatgatcgtcccattcaatgagctgctttttgtcgtgaacgacttgaccctcgtagagattgataaccttgtc

SEQ ID NO: 28038 - DNA, 260 bp, Unknown
  Description of Unknown: RightRegion for integrase B2039 sequence
gaaccctacattgtgtggggaacggtgttcgttcaaaccaaaagacactccttaccttaatcggtagggagtgtcttcttttattcttcgccggaatacccgttcgctctggcgcatttcagcgcacccaagatcatcttgtcctgagccagtgttcgttctttcagttcatagagtggagtacggcgatgatcgtcccattcaatgagctgctttttgtcatgaacgacttgaccctcgtagagattgataaccttgtc

SEQ ID NO: 28039 - DNA, 260 bp, Unknown
  Description of Unknown: RightRegion for integrase B2040 sequence
gaaccctacattgtatggggaacggtgttcgttcaaaccaaaagacactccttaccttaatcggtagggagtgtcttcttttattcttcgccggaatacccgttcgctctggcgcatttcagcgcacccaagatcatcttgtcttgagccagcgttcgttctttcagctcatagagtggagtacggcgatgatcgtcccattcaatgagctgctttttgtcgtgaacgacttgaccctcgtagagattgataaccttgtc

SEQ ID NO: 28040 - DNA, 260 bp, Unknown
  Description of Unknown: RightRegion for integrase B2041 sequence
gaaccctacattgtgtggggaacggtgttcgttcaaaccaaaagacactccttaccttaatcggtagggagtgtcttcttttattcttcgccggaatacccgtttgctctggcacatttcagcgcacccaagatcatcttgtcctgagccagtgttcgttctttcagctcatagagtggagtgcggcgataattgtcccattcaatgagctgctttttgtcgtgaacgacttgaccctcgtagagattgataaccttgtc

SEQ ID NO: 28041 - DNA, 260 bp, Unknown
  Description of Unknown: RightRegion for integrase B2042 sequence
ctgatttcgaggacttttgcttttcataagttccgttttggggataccgcttttttctgacccaaacgccgaccccaacgggagctaaactgtacccaagaaaatggacacgagattttgacccatggccccgttcggcggacacgcatttgacccatagggtcagaagcgccgcacctgtgttatgatagaactaccgaacggaggtgctgtatgggcacgaagaagaaattcacaccagaggaactgaagcatctgca

SEQ ID NO: 28042 - DNA, 260 bp, Unknown
  Description of Unknown: RightRegion for integrase B2043 sequence
gaaccctacattgtgtggggaacggtattcgttcaaaccaaaagacactccttaccttaatcggtagggagtgtcttcttttattcttcgccggaatacccgttcgctctggcgcatttcagcgcacccaagatcatcttgtcctgagccagtgttcgttctttcagctcatagagtggagtgcggcgatgatcgtcccattcaatgagctgctttttatcatgaacgacttgaccctcatagagattgataaccttgtc

SEQ ID NO: 28043 - DNA, 156 bp, Unknown
  Description of Unknown: RightRegion for integrase B2044 sequence
gcggtactggcggtaatccatgacggggataggttcagtcttgttgttcttcataaatgagttctttcataaagccgataacctccttgaatgaatttattgttaaatattcgtgcaaagtattgttttcttcgtgcaaatggcatatactataat

SEQ ID NO: 28044 - DNA, 260 bp, Unknown
  Description of Unknown: RightRegion for integrase B2045 sequence
gaaccctacattgtgtggggaacggtattcgttcaaaccaaaagacactccttaccttaattggtagggagtgtcttcttttattcttcgccggaatacccgttcgctctggcgcatttcagcgcacccaagatcatcttgtcctgagccagtgttcgttctttcagttcatagagtggagtgcggcgatgatcgtcccattcaatgagctgctttttatcatgaacgacttgaccttcatagagattgataaccttgtc

SEQ ID NO: 28045 - DNA, 260 bp, Unknown
  Description of Unknown: RightRegion for integrase B2046 sequence
gaaccctacattgtgcggggaacggtgttcgttcaaaccaaaagacactccttaccttaattggtagggagtgtcttcttttattcttcgccggaatacccgttcgctctggcgcatttcagcgcacccaagatcatcttgtcctgagccagcgttcgttctttcagctcatagagcggggtacggcgatgatcgtcccattcaatgagttgcttcttgtcgtgaacgacttgaccctcatagagattgataaccttgtc

SEQ ID NO: 28046 - DNA, 260 bp, Unknown; identical to SEQ ID NO: 28010
  Description of Unknown: RightRegion for integrase B2047 sequence

SEQ ID NO: 28047 - DNA, 260 bp, Unknown; identical to SEQ ID NO: 28034
  Description of Unknown: RightRegion for integrase B2048 sequence

SEQ ID NO: 28048 - DNA, 260 bp, Unknown
  Description of Unknown: RightRegion for integrase B2049 sequence
gaaccctacattgtgtggggaacggtgttcgttcaaaccaaaagacactccttaccttaatcggtagggagtgtcttcttttattcttcgccggaatacccgttcgctctggcgcatttcagcgcacccaagatcatcttgtcctgagccagcgttcgttctttcagctcatagagtggagtgcggcgatgatcgtcccattcaatgagctgctttttgtcgtgaacgacttgaccctcgtagagattgataaccttgtc

SEQ ID NO: 28049 - DNA, 260 bp, Unknown; identical to SEQ ID NO: 27984
  Description of Unknown: RightRegion for integrase B2050 sequence

SEQ ID NO: 28050 - DNA, 260 bp, Unknown
  Description of Unknown: RightRegion for integrase B2051 sequence
gaaccctacattgtgtggggaacggtgttcgttcaaaccaaaagacactccttaccttaatcggtagggagtgtcttcttttattcttcgccggaatacccgttcgctctggcgcatttcagcgcacccaagatcatcttgtcctgagccagtgttcgttctttcagctcatagagtggagtacggcgatgatcgtcccattcaatgagctgctttttgtcgtgaacgacttgaccctcatagagattgataaccttatc

SEQ ID NO: 28051 - DNA, 260 bp, Unknown; identical to SEQ ID NO: 27979
  Description of Unknown: RightRegion for integrase B2052 sequence

SEQ ID NO: 28052 - DNA, 260 bp, Unknown
  Description of Unknown: RightRegion for integrase B2053 sequence
ccgtattatattatttacggtacgatatttgtccaaaccaaaagacactccttgtcttaaagcaaggggtgtctttttttcggttaggtgataaaggtgagtaatcgggcgtttttcctataaactatctctaatacgcgcgtactaaggaaaagttatagggattttgacccgattactcacctttatcaccttatgcaattaaatgtaaaaatccccggaagctaaaacctccggggatgctgttatatgaatatcac

SEQ ID NO: 28053 - DNA, 260 bp, Unknown
  Description of Unknown: RightRegion for integrase B2054 sequence
ttcgacgaatttttcaaagctatgcccgtcgaagaatacgagatcccgataacggaatgaaaaaagagggcgattgctataatggcaatcgtccccttttcggttcggctaaacgaccgaacaattaaagatgttcccgtaacagatcaaggattacttgttcttgtgtctgcgtagaggttttgcgggcattttggattttatccgcctgccattgggcaagtttttttaatttctcctctatttcaagcgtgtaggcc

SEQ ID NO: 28054 - DNA, 260 bp, Unknown
  Description of Unknown: RightRegion for integrase B2055 sequence
aacacaattaccgttgtgggaatggttttcatccaaaccagaagacacgccctgccttgattggtagggcgtgtttctttatttttttatacataccctgcaccactccgacgttctccgcccgttcaatatcccgcttgtgcaggtactcatagacggccatcatggccgcaggcggcgcgcccttctgcttgcggtattcctcgatgtgggaaacaacggccttgtgcagggcgttcatgtggttcatttcctccccg

SEQ ID NO: 28055 - DNA, 260 bp, Unknown
  Description of Unknown: RightRegion for integrase B2056 sequence
gaaccctacattgtgtggggaacggtgttcgttcaaaccaaaagacactccttaccttaatcggtagggagtgtcttcttttattcttcgccggaatacccgttcgctctggcgcatttcagcgcacccaagatcatcttgtcctgagccagtgttcgttctttcagctcatagagtggagtacggcgatgatcgtcccattcaatgagctgctttttgtcatgaacgacctgaccctcgtagagattgataaccttgtc

SEQ ID NO: 28056 - DNA, 260 bp, Unknown
  Description of Unknown: RightRegion for integrase B2057 sequence
gaaccctacattgtgtggggaaaggtattcgttcaaaccaaaagacactccttaccttaatcggtagggagtgtcttcttttatttttcgccggaatacccattcgctctggcgcatttcagcgcacccaagatcatcttgtcctgagccagcgttcgttctttcagctcatagagcggagtgcggcgatgatcgtcccattcaatgagctgctttttgtcatgaacgacttgaccttcatagagattgataaccttgtc

SEQ ID NO: 28057 - DNA, 260 bp, Unknown
  Description of Unknown: RightRegion for integrase B2058 sequence
aacaccatagcagtggttggaatggtatttgtccaaaccaaaatacacgccttgccttaattggcagggcgtgttattttttaccgtttatacatggcttggagaacgccaaccttttctgctttctcaatctcacgctggtggagataattgtaaatcgccatcatctcggcgggcggttcgcctttctcccggcggtatttttcaattagccgaacaacttctttatgtagagctgtgaagtggccctgctcctcgcc

SEQ ID NO: 28058 - DNA, 260 bp, Unknown
  Description of Unknown: RightRegion for integrase B2059 sequence
gaaccctacattgtgtggggaacggtattcgttcaaaccaaaagacactccttaccttaatcggtagggagtgtcttcttttattcttcgccggaatacccgttcgctctggcgcatttcagcgcacccaagatcatcttgtcctgagccagagttcgttctttcagctcatagagtggagtgcggcgatgatcgtcccattcaatgagctgctttttatcatgaacgacttgaccctcatagagattgataaccttgtc

SEQ ID NO: 28059 - DNA, 109 bp, Unknown
  Description of Unknown: RightRegion for integrase B2060 sequence
attactgataacaaattatcgcaatttagtgtgcctagcttctgtatgtcctacaaataaaccgcttttttctccagcacagaaaagattatctactcctataaccttc

SEQ ID NO: 28060 - DNA, 260 bp, Unknown; identical to SEQ ID NO: 27958
  Description of Unknown: RightRegion for integrase B2061 sequence

SEQ ID NO: 28061 - DNA, 260 bp, Unknown
  Description of Unknown: RightRegion for integrase B2062 sequence
aacacaattgttgttgtgggtatggttttcgtccagaccaaaaaacacgccctgccttaattggccgggcgtgtttctttattttttatacatcccctgcaccactccgacgttctccgctcgttcaatatcacgcttgtgcaggtactcatagacagccatcatggccgcaggcggttcacccttctgcttgcggtattcctcaatgtgggaaacaacggctttgtgcagggcgttcatgtggttcatttcttccccgc

SEQ ID NO: 28062 - DNA, 260 bp, Unknown
  Description of Unknown: RightRegion for integrase B2063 sequence
aacacaattaccgttgtgggaatggttttcatccaaaccaaaagacacgccctgccttgattggtagggcgtgtttctttattttttatacatcccctgcaccactccgacgttctccgcccgctcaatatcccgcttgtgcaggtactcatagacggccatcatggccgcaggcggctcgcccttctgcttgcggtattcctcaatgtgggaaacaacggccttgtgcagggcgttcatgtggttcatttcctccccgc

SEQ ID NO: 28063 - DNA, 260 bp, Unknown
  Description of Unknown: RightRegion for integrase B2064 sequence
aacacaattaccgttgtggggatggttttcatccaaaccagaagacacgccctgccttgattggtagggcgtgttgctttattttttgtacatagcctgtacaactccgacgttctccgcccgttcaatatcccgcttgtgcaggtactcatagacggccatcatggccgcaggcggtgtggttcatttcctccccgctcagcctgtaaaacaggtctgccagctccgggtcgtcgtgcttgtattccacggccagttct

SEQ ID NO: 28064 - DNA, 260 bp, Unknown; identical to SEQ ID NO: 27992
  Description of Unknown: RightRegion for integrase B2065 sequence

SEQ ID NO: 28065 - DNA, 260 bp, Unknown
  Description of Unknown: RightRegion for integrase B2066 sequence
aacacaattaccgttgtgggaatggttttcatccaaaccaaaagacacgccctgccttgattggtagggcgtgttgctttattttttgtacatagcctgcaccactccgacgttctccgcccgttcaatatcccgcttgtgcagatactcatagacggccatcatggccgcaggcggctcgcccttctgcttgcggtattcctcaatgtgggaaacaacggccttgtgcagggcgttcatgtggttcatttcctccccgc

SEQ ID NO: 28066 - DNA, 260 bp, Unknown
  Description of Unknown: RightRegion for integrase B2067 sequence
ttcgacgaattttttaaggctatgcctgtcgaggaataccaaattccaataacagaatgaaaaaagagggcgattgctataatggcaatcgtccccttttcgattcggttaaatggccgaatattaaagatgttcccgtagcaggtcaaggattacctgttcttgtgtctgcgtagaggttttgcgggcattttgaattttttccgcttgccattgggtaagtttttttaatttctcctctatttcaagagtgtaggccg

SEQ ID NO: 28067 - DNA, 260 bp, Unknown
  Description of Unknown: RightRegion for integrase B2068 sequence
gaaccctacatcgtgtggggaacggtgttcgttcaaaccaaaagacactccttaccttaatcggtagggagtgtcttcttttattcttcgccggaatacccgtttgctctggcacatttcagcgcacccaagatcatcttgtcttgagccagagttcgttcttttagctcatagagtggagtgcggcgatgatcgtcccattcaatgagctgctttttgtcatgaacgacttgaccttcatagagattgataaccttgtc

SEQ ID NO: 28068 - DNA, 260 bp, Unknown
  Description of Unknown: RightRegion for integrase B2069 sequence
gaaccctacattgtgtggggaacggtgttcgttcaaaccaaaagacactccttgccttaattggtagggagtgtcttcttttattcttcgccggaatacccgtttgctctggcacatttcagcgcacccaagatcatcttgtcctgagccagtgttcgttctttcagctcatagagtggagtgcggcgatgattgtcccattcaatgagctgctttttgtcgtgaacgacttgaccctcgtagagattgataaccttgtc

SEQ ID NO: 28069 - DNA, 260 bp, Unknown
  Description of Unknown: RightRegion for integrase B2070 sequence
gaaccctacattgtgtggggaacggtgttcgttcaaaccaaaagacactccttaccttaatcggtagggagtgtcttcttttattcttcgccggaatacccgttcgctctggcgcatttcagcgcacccaaaatcatcttgtcctgagccagtgttcgttctttcagctcatagagtggagtacggcgatgatcgttccattcaatgagctgctttttgtcatgaacgacttgaccctcatagagattgataaccttgtc

SEQ ID NO: 28070 - DNA, 260 bp, Unknown
  Description of Unknown: RightRegion for integrase B2071 sequence
caaaaagataatcatattataggcgaaattcgtgtaaaagaacgagaaaaagttagttaaaaataaaattatggaggtaaaattaaatggaaaataaagagataaaacaaaatagatatggaattgaatatataaaacaaggcgattattatatgccaaatctagtattagaaaaagaaaaactagaattaaataagtatggtagagcaagattaaactatctaaaaacaaataaaaaagcagaatatatgataatgtct

SEQ ID NO: 28071 - DNA, 75 bp, Unknown
  Description of Unknown: RightRegion for integrase B2072 sequence
actcagtatgtatctagggagaaatggctcggggaaaagtacaataacaactttttttgataaagctggtaaata

SEQ ID NO: 28072 - DNA, 260 bp, Unknown
  Description of Unknown: RightRegion for integrase B2073 sequence
agatttgttcgtacagccccacttccgccgcataaaaagaccccccaagcttacgcttgaggggctttttattttgcttattttacaccttgccgccgtgcagctctgcatacatcttggaacggcactcggccacagccggggtcatgttcacatagtgcttatgcgggcactccagacgcagctcgctctcccaggtctcctcggtgagctgctttgcaatgtaggccttcttctctgcgatcgaaggcagctcaatg

SEQ ID NO: 28073 - DNA, 109 bp, Unknown
  Description of Unknown: RightRegion for integrase B2074 sequence
aaagttataagcattcaatttacgaatggtctaatatcaacattcatatacgaggtctaaacccttatttttactagcctttcaattcttcttttcttctactaacgca

SEQ ID NO: 28074 - DNA, 260 bp, Unknown; identical to SEQ ID NO: 28070
  Description of Unknown: RightRegion for integrase B2075 sequence

SEQ ID NO: 28075 - DNA, 260 bp, Unknown
  Description of Unknown: RightRegion for integrase B2076 sequence
gaaccctacattgtgtggggaacggtgttcgttcaaaccaaaagacactccttaccttaattggtagggagtgtcttcttttattcttcgccggaatacccgttcgctctggcacatttcagcgcacccaagatcatcttgtcctgagccagcgttcgttctttcagctcatagagtggagtacggcgatgatcgtcccattcaatgagctgctttttgtcgtgaacgacttgaccctcatagagattgataaccttatc

SEQ ID NO: 28076 - DNA, 260 bp, Unknown
  Description of Unknown: RightRegion for integrase B2077 sequence
atttttgttgttgcggcgttttctgttttgcgcgaacataaaaataaggagagggtttaaccctctccttatttttattccgccacaatcccgtgataatatgccgcaagttttgcttccggccccggcccgtctttgtcaaacagaaacgcctttgcgagatcagcgtaaaactccaccttgctgcacccatatcttgtcgccacgctgcaatagtcagagtacatcatattcatggcggcgttccactcctccggggt

SEQ ID NO: 28077 - DNA, 260 bp, Unknown
  Description of Unknown: RightRegion for integrase B2078 sequence
agatttgttcgtacagccccacttccgccgcataaaaagaccccccaagcttacgcttgaggggctttttattttgcttattttacaccttgccgccgtgcagctctgcatacatcttggaacggcactcggccacagccggggtcatgttcacatagtgcttatgcgggcactccagacgcagttcgctctcccaggtctcctcggtgagctgctttgcaatgtaggccttcttctctgcgatcgaaggcagctcaatg

SEQ ID NO: 28078 - DNA, 260 bp, Unknown; identical to SEQ ID NO: 28076
  Description of Unknown: RightRegion for integrase B2079 sequence

SEQ ID NO: 28079 - DNA, 260 bp, Unknown; identical to SEQ ID NO: 28076
  Description of Unknown: RightRegion for integrase B2080 sequence

SEQ ID NO: 28080 - DNA, 260 bp, Unknown
  Description of Unknown: RightRegion for integrase B2081 sequence
ccgtgttatatcatttacggtacgatatttgtccaaaccagaagacactccttgtcttaaaacaaggggtgtctttttttgtttaggtgataaaggtgagtaatcgggtgtttttcctataaactctctctaatacgcgcgtactaagaagaagttatagggattttgacccgattactcacctttatcaccttatacacttaaatgtaaaaatccccggaagctgaaacctccggggatgctgttatatatcacttatc

SEQ ID NO: 28081 - DNA, 260 bp, Unknown
  Description of Unknown: RightRegion for integrase B2082 sequence
ctaaaaacagaaagagcgttgctgctagcggctgaccctttcgatctatcacgaaactagttcatgctgaccgtttggggggctaccaagcggtcagcaagcttttatggacagtgccagggccaaaatgaccacgcacactaaaaatttcaaaagaaatttatccacttcggcttcaccccccttcacggagagtggccaaccacttttttcgcaacaacgcatctttccggcccctttgacggggccttttgatttta

SEQ ID NO: 28082 - DNA, 260 bp, Unknown
  Description of Unknown: RightRegion for integrase B2083 sequence
tatggcacgatcaaaaagacgcaggaattcaaattcctgcgtcttttttgcatgtattgatgggtgtgtacctcagtgcccggcccggctggggatcgtctggagctcgaagcggtaggtctgcccggcgtccgggtatttttcgcggtcgaccgggctcaggaacatatccagcggccggacccagaggccgccgtcgccgtaaagcttgcggtagatcacgcagggctcgttcgtctcggaatcacgggcaagcgcct

SEQ ID NO: 28083 - DNA, 260 bp, Unknown
  Description of Unknown: RightRegion for integrase B2084 sequence
aacagcgtaccgtctttgcgacggtacgcccatttttatgcagttattacagaatgctgatgcggcctgcgccgtagggattctcgtaatccagcagatagcccgggtaatcggccagcgggctgtttgcggtggtcaaatgcggcagaccctctgcatctacaccgccaaaggtcatggcataggtagacatcacaaggtaatcctcagacacatagtccttgatcagctctgcgccatcaaacatggcaaagccatcg

SEQ ID NO: 28084 - DNA, 260 bp, Unknown; identical to SEQ ID NO: 28076
  Description of Unknown: RightRegion for integrase B2085 sequence

SEQ ID NO: 28085 - DNA, 260 bp, Unknown
  Description of Unknown: RightRegion for integrase B2086 sequence
gagatttctccttacagcgttattttcatcattccgcttcccggaaaactggtacgctgataaaatccacctgccgctttgcataatacaattcgcttctacgttctttattctttcggacagaggtttacattccgtcacctccacagacagcaaaaaatcccccgccagctttcctttcggattgccagcgggggatttttagttatgcagttttaatgcactgattcgtcagtttgccgtacacgtcctcgtacagc

SEQ ID NO: 28086 - DNA, 260 bp, Unknown
  Description of Unknown: RightRegion for integrase B2087 sequence
agatttgttcgtacagccccacttccgccgcataaaaagaccccccaagcttacgcttgaggggctttttattttgcttattttacaccttgccgccgtgcagctctgcgtacatcttggaacggcactcggccacagccggggtcatgttcacatagtgcttatgcgggcactccagacgcagctcgctctcccaggtctcctcggtgagctgctttgcaatgtaggccttcttctctgcgatcgaaggcagctcaatg

SEQ ID NO: 28087 - DNA, 260 bp, Unknown
  Description of Unknown: RightRegion for integrase B2088 sequence
agatttgttcgtacagccccacttccgccgcataaaaagaccccccaagcttacgcttgaggggctttttattttgcttattttacaccttgccgccgtgcagctctgcatacatcttggaacggcactcggccacagccggggtcatgttcacatagtgcttatgcgggcactccagacgcagttcgctctcccaggtctcctcggtgagctgctttgcaatgtatgccttcttctctgcgatcgaaggcagctcaatg

SEQ ID NO: 28088 - DNA, 260 bp, Unknown
  Description of Unknown: RightRegion for integrase B2089 sequence
actcagtatgtatctagggagaaatgtgccaagaaaaaagacgtttttaagcgaagttaaaagtggaagtgtgccaatgactatctggaaatatgaagatgtaggttcgacgcaggatgcaaaaaaagaagtgaagcagattaatcctgaggatccatttgctacaccaaaaccagaaaagttaattgaacgtattctagaaattgccacaaagccaggagatattatcttggattcttttttgggatcaggtacaacta

SEQ ID NO: 28089 - DNA, 260 bp, Unknown
  Description of Unknown: RightRegion for integrase B2090 sequence
gagatttcgccttacagcgttattttcattatcccacttcccggaaaaatggtacgctgataaaatccatctgccgctttgcataatataattcgcttctacgttctttattctttcggacagaggtttacattccgtcgcctccacagacagcaaaaaaatcccccgccagctttcctttcggattgccagcgggggatttttagttatgcagttttaatgcactgattcgtcagtttgccgtacacgtcctcgtacaa

SEQ ID NO: 28090 - DNA, 260 bp, Unknown
  Description of Unknown: RightRegion for integrase B2091 sequence
ttcatgataatagaatgttcacggagcgcgcattctattatttgctcttggatgagataaaaattaaatatgggcgaaatatatagaagatagaggtgatttcatccattttataatagaaattcatttaacatacaagaaaatgggtgaaaaaggatgagatttcattataatagcccacgaaaatcaaaaagtcagggtgaaaacagcagaaatgaaggagtttcgcccaaaatgatagaggaagaagttgaaaatag

SEQ ID NO: 28091 - DNA, 260 bp, Unknown
  Description of Unknown: RightRegion for integrase B2092 sequence
gagatttcgccttatagcgttattttcattatcccacttcctggaaaactggtacgctgataaaatccatctgccgctttgcataatataattcgcttctacgttctttattctttcggacagaggtttacattccgtcacctccacagacagcaaaaaatcccccgccagctttcctttcggattgccagcgggggatttttagttatgcagttttaatgcactgattcgtcagcttgccgtacacgtcctcgtacaac

SEQ ID NO: 28092 - DNA, 260 bp, Unknown
  Description of Unknown: RightRegion for integrase B2093 sequence
gttttgctttgtcctcttccaacagtcgacagaaagccgacgctcgtcaaccggcattgagaaaggcccgaaaccttgcgttatgcacgcgggtttcgggccttttttcgtttcagttttccgtatttcgttctaatttgccgtattttgtacttttctgccaaaatcctgacaagccggtttcaaatcggtaaaattcttggcaaaggagatacaggctatgattaggattatgctgtccacccgccttggcgaacgac

SEQ ID NO: 28093 - DNA, 109 bp, Unknown
  Description of Unknown: RightRegion for integrase B2094 sequence
agatttgttcgtacagccccacttccgccgcataaaaagaccccccaagcttacgcttgaggggctttttattttgcttattttacaccttgccgccgtgcagctctgc

SEQ ID NO: 28094 - DNA, 260 bp, Unknown
  Description of Unknown: RightRegion for integrase B2095 sequence
gaaaatcttcaaatcaatctatttgggcaagatatactaaaaaaaaacagcgtaagctaatccattcagaggctgtatcccctacgcctttgtgcaaggatagcaaatgctataccaactgcagaaggcgccatccaatatgccatgcaaaatagtgaaattacacttaatgatagtaaatgccttatccttggctttggtagatgtggaaaaattcttgcccataaactaaaaggtattggggctagagtctatgtaga

SEQ ID NO: 28095 - DNA, 260 bp, Unknown
  Description of Unknown: RightRegion for integrase B2096 sequence
agatttgttcgtacagccccacttccgccgcataaaaagaccccccaagcttacgcttgaggggctttttattttgcttattttacaccttgccgccgtgcagctctgcatacatcttggaacgacactcggccacagccggggtcatgttcacatagtgcttatgcgggcattccagacgcagttcgctctcccaggtctcctcggtgagctgctttgcaatgtaggccttcttctctgcgatcgaaggcagctcaatg

SEQ ID NO: 28096 - DNA, 260 bp, Unknown
  Description of Unknown: RightRegion for integrase B2097 sequence
atttttgttgttgcggcgtttactgttttgcgcgaacgtaaaaataaggagagggtttaacccctctccttatttttattccgccacaatcccgtgataatatgccgcaagttttgcttccggccctggcccatctttgtcaaataaaaacgcctttgcgaggtctgcgtaaaaatccaccttactgcatccgtgttttgttgccacgctgcaatagtcggagtacatcatattcattgcggcattccattcctccggcg

SEQ ID NO: 28097 - DNA, 260 bp, Unknown
  Description of Unknown: RightRegion for integrase B2098 sequence
gttaaaatggtcggtaatgtgttcgttttgttttgttctattccctcactgactcattgacaacaaaaagaggggcaatcgcaacaggtggaaaagctgcgattgcccctcttttttttgttgtataaattgtgaaatttttgcgttagaatataccgtttccacgccaaattctaccatattccttacaaacccgtgaggatttgatagaatacgacgtaaaggagataggttctatgattagaattttactgtccacc

SEQ ID NO: 28098 - DNA, 260 bp, Unknown
  Description of Unknown: RightRegion for integrase B2099 sequence
gaaccctacattgtatggggaaagatattcgttcaaacaaaaagacaccctttaccataacggtagagggtgtcttccttattctccggtaaacccgtttgccctggcgcatttcagcgcacccaaaatcattttgtcctgcgccaatgtccgctgtttgatctcgtaaataggtgttccacggtgcccatcccattcctcaatctgtttcctgtcatggactaccgcaccctcatagagatttatcagcttgtccagcg

SEQ ID NO: 28099 - DNA, 260 bp, Unknown
  Description of Unknown: RightRegion for integrase B2100 sequence
tttatttgtccagtcaaggtctgctgtcgtatatggctgctccggctgaatttcatataaatctgcaccaattgcctgtgacaaattcttcgctaactttgcggtaactccgctggcgctaaaatatgcaactaattttttactcatacttcatctcctccaatacttaataccttaactcaaactggctgtcagaacatttacaatatcttcatgtgtaagtacacgataaccaccttccataaccagcgtactgtctg

SEQ ID NO: 28100 - DNA, 260 bp, Unknown
  Description of Unknown: RightRegion for integrase B2101 sequence
gaaccatgtattgtatggggatcgattctcgttcaaaccaaaagacatcctctgttttaatagacagagggtgtctttttttgctaaggtgagttaggtgagtaatcgggttaaaatccctataacttttctatatacgcgcgtactaaggagaagttataggaaaaatacctcgattactcacctttctcaccttgatgaacgaatactaaatataaaaaacgttatcctatcgaaaaaaataactccctcacaccgtc

SEQ ID NO: 28101 - DNA, 260 bp, Unknown
  Description of Unknown: RightRegion for integrase B2102 sequence
attaaaatggtcggtaatgtgttcgttttgttttgttctattccctcattgactcattgacaacaaaaagaggggcaatcgcaacaggtggaaaagctgcgattgcccctctttttttgttgtataaattgtgaaatttttgcgttagaatataccgtttccacgccaaattctaccatattccttacaaacccgtgaggatttgatagaatacgacgtaaaggagataggttctatgattagaattttactgtccaccc

SEQ ID NO: 28102 - DNA, 260 bp, Unknown
  Description of Unknown: RightRegion for integrase B2103 sequence
gaaccctacattgtatggggaaagatattcgttcaaacaaaaaggcaccctttaccatgacggtagagggtgtctttcttcattctccggtaaaaccgttttcccgggcgcatttcagcgcacccaaaatcatcttatcctgagccaaagtccgctgcttgatctcgtaaaggggtgtcccccggtgcctgtcccattccatgagctgcttccggtcatggactaccacaccctcatagagatttatcagcttgtccagc

SEQ ID NO: 28103 - DNA, 260 bp, Unknown
  Description of Unknown: RightRegion for integrase B2104 sequence
gaaccctgcattgtgtggggaacgatttgtgttcaaacaaaaattcaccccctaccgtaatggtagagggtggattttttactcttcgccggtaaacccgttctctctggcacagcgcaaggcaccgagtatcatggtatcttgggccaaggttctctgtttcaattcataaagcggagtcttccgatgatcgtcccactcaatgagttgcttcttatcatgaaccacaatgccggtgtagaggtttatcagcttgtcca

SEQ ID NO: 28104 - DNA, 260 bp, Unknown
  Description of Unknown: RightRegion for integrase B2105 sequence
caagtagtaagaattacatttcgtaacggcgtatcacataactttatctacgaaaattagcttttgcttagctcgtatttgaatttatagacagtaaaaaagaggtagtagcttttttagctactacctcttttgcatgatggaacgccataaaatcggaaaatatcacatacacacttttataacatatggtcagccataggtcagggtgaagtacttcttttccatcataatatatttcctttatataacaactcaca

SEQ ID NO: 28105 - DNA, 260 bp, Unknown
  Description of Unknown: RightRegion for integrase B2106 sequence
gaaccctgctttgtgtgggggacgattttcgttcaaacaaaaagacactccttgccgtaaatggcagggagtgtcctctttttgtccattttggggttcgactctccatcgaaaaagttcgactcttcaatggggtcagccctcttctccggtaaatccgttggccttggcacatcgaagtgccccaagtatcatagtgtcctgagccaaagttctcttcttcaactcatagagcggggttctccggtggtcatcccatt

SEQ ID NO: 28106 - DNA, 260 bp, Unknown
  Description of Unknown: RightRegion for integrase B2107 sequence
tttattcatccagtcaagatcagcctttgtatatggaactttcggctcaatctcaaataaatccgcctttacttcctctgcaatcatttctgctacttttttcgttgttccgcttgcactgaaaaatgccactaattttttactcataataaaaagcccctttctttacgtatttttcaaaaaaaatagatgtataagatttacattcatcttacacatctattttaagctctatcgcttcattatgtctaatgcttata

SEQ ID NO: 28107 - DNA, 260 bp, Unknown
  Description of Unknown: RightRegion for integrase B2108 sequence
tttggagcagatttcttaggcagcgaaccaattgaggaaaatgagcttaaaaaaaaataagctctttattgcctcttttatccaaatcgtcgcaatttagtacaattagcacctgcatctaatatagcttcataacaagattgacaagccccagcgaatataattagatcatcataacttctttcataatctcttaagacccctacagtcttaacaaaatatttagagtttctatagttatttatatctgtataattttc

SEQ ID NO: 28108 - DNA, 260 bp, Unknown
  Description of Unknown: RightRegion for integrase B2109 sequence
caagtggtaaggattacatttaataatggtgtatcccataactttatctacgaaaattagcttttgcttggctcgtatttgaatttatagacagttaaaaagaggtagtagcttttttagctactacctcttttgcatgatggaatgcgataaaatcagcaaaaatcgtatacacacttttataacatatggtcaaccatatgttattgaatagtacatctttttcatagatttatcgctcctgtaaaataatgcttttt

SEQ ID NO: 28109 - DNA, 260 bp, Unknown
  Description of Unknown: RightRegion for integrase B2110 sequence
gaaccctacattgtttggggtacggtatttgtgcaaacgaaaaaacacaccttaccataatcggtagggtgtgtctctttttattattcgccggtgaacccgttggccttggcacatttcaaagcacagagaaccaatttgtgccgtttcagttccttttcgtaaacggctctcggaacaccttcggaaatcggggaagcggttaaaactctctttcgatctctcactaccttcccctcatagtaagagataatatcgtc

SEQ ID NO: 28110 - DNA, 260 bp, Unknown
  Description of Unknown: RightRegion for integrase B2111 sequence
gttaaaatggtcggtaatgtgttcgttttgttttgttctattccctcactgactcattgacaacaaaaagaggggcaatcgcaacaggtggaaaagctgcgattgcccctctttttttgttgtataaattgtgaaatttttgcgttagaatataccgtttccacgccaaattctaccatattccttacaaacccgtgaggatttgatagaatacgacgtaaaggagataggttctatgattagaattttactgtccaccc

SEQ ID NO: 28111 - DNA, 260 bp, Unknown
  Description of Unknown: RightRegion for integrase B2112 sequence
tttattcatccagtcaagatcagcctttgtatatggaacttttggctcaatctcaaataaatccgcttttgcttcctctgcaatcatttctgctactttttttgttgtcccgcttgcactgaaaaatgcgactaaatttttactcataataaaaatcccctttctttgcgaatttttcgtataaaaatagatgtataagatttgaatttctcttatacatctattttatacctgatatttttattatgtctaatgcttat

SEQ ID NO: 28112 - DNA, 260 bp, Unknown
  Description of Unknown: RightRegion for integrase B2113 sequence
gaaccctgctttgtgtggggaacgattttcgttcaaacaaaaagacactccttgccgtaaatggcagggagtgttctctttttgcctattttggggttcgactctccatcgaaaaagttcgactcttcaatagggtcaaccctcttcgccggtaaatccgttggccttggcacatcgaagtgccccaagtatcatagtgtcctgagccaaagttctcttcttcaactcatagagtggggttctccggtggtcatcccatt

SEQ ID NO: 28113 - DNA, 109 bp, Unknown
  Description of Unknown: RightRegion for integrase B2114 sequence
aaagttataagcattcaatttacgaatggtctaatatcaacattcatatacgaggtctaaaccctcatttttactagcctttcaattcttcttttcttctactaacgca

SEQ ID NO: 28114 - DNA, 260 bp, Unknown
  Description of Unknown: RightRegion for integrase B2115 sequence
tttattcatccagtcaagatcagcctttgtatatggaacttttggctcaatctcaaataaatccgcttttacttcctctgcgatcatctgtgctactttttttgttgttccgcttgcactgaaaaatgcgactaaatttttactcataataaaaatcccctttctttgcgaatttttcgtataaaaatagatgtataagatttgaatttctcttatacatctattttatacctgatatttttattatgtctaatgcttat

SEQ ID NO: 28115 - DNA, 109 bp, Unknown
  Description of Unknown: RightRegion for integrase B2116 sequence
tgtcaccatttatacctattaccataccgccctcaacactgttcggaacacagcatgtaacgtgttttttatatggatgtttgcctataagacacaggcaagcatatgc

SEQ ID NO: 28116 - DNA, 260 bp, Unknown
  Description of Unknown: RightRegion for integrase B2117 sequence
gaaccctacattgtgtggggaaagatattcgttcaaacaaaaagacaccctttaccataacggtagagggtgtcttcctttattctccggtgaaaccgttcgctttggcacatttcagcgcacccaaaatcattttgtcctgcgccaatgtccgttgcttgatctcgtagataggtgtcccacggtattcatcccattccacaatctgttttctgtcatggactaccacaccctcatagagatttatcagcttgtccagc

SEQ ID NO: 28117 - DNA, 260 bp, Unknown
  Description of Unknown: RightRegion for integrase B2118 sequence
caagttatgagaattacattttgcaatggcgtatctcataactttatctacgaaaactagcttttgcttggcccgtatttgaatttatagacagttaaaaagaggtagcagcttttttagctgctacctctttgcatgatagaatgcgataaaatcagaaaacattacatacacacttttataacatatggtcagccgtaggtcagggtgaagtacttctttcccatcataatatatttcctttatataacaactcacac

SEQ ID NO: 28118 - DNA, 260 bp, Unknown
  Description of Unknown: RightRegion for integrase B2119 sequence
ttttctgcgcggctcgcgacatcagcccgcacatgtattgcatctgtcccttacctgtgataccatacaggtaagcaaaacgatacagacggaggactttttccatgatctacgataccctgaacaacctgcccaactatctgggcgtaagcgacaatctggacaccgtgatcgagtacatcatggcgcgggatatcaccaccctgcctgccgggcgcacccgcattgatggggacaaggcggtggtcaccgtgagcccc

SEQ ID NO: 28119 - DNA, 248 bp, Unknown
  Description of Unknown: RightRegion for integrase B2120 sequence
caagtggtaaggattacatttaataatggtgtatcccataattttatctacgaaaagtagcttttgcttagctcgcatttgagtttatagacagttaaaaagaggtagcagctgaaaaagctactacctcttttgcatgatggaatgcgataaaatcggaaaacatcacatacacacttttataacatatggtcagccgtaggtcagggtgaagtacttcttttccatcataatatatttcctttata

SEQ ID NO: 28120 - DNA, 260 bp, Unknown
  Description of Unknown: RightRegion for integrase B2121 sequence
attaaaatggtcggtaatgtgttcgttttgttttgttctattccctcactgactcattgacaacaaaagaggggcaatcgcaacaggtggaaaagctgcgattgcccctctttttttgttgtataaattgtgaaatttttgcgttagaatataccgtttccacgccaaattctaccatattccttacaaacccgtgaggatttgatagaatacgacgtaaaggagataggttctatgattagaattttactgtccacccg

SEQ ID NO: 28121 - DNA, 260 bp, Unknown
  Description of Unknown: RightRegion for integrase B2122 sequence
gaaccctacattgtttggggtacggtatttgtgcaaacgaaaagacacaccttaccataatcggtagggtgtgtctctttttattcttcgccggtgaacccgttggccttggcacatttcaaagcaccgagaaccaatttgtgccgtttcagttccttttcgtaaacggctctcggaacaccttcggaaatcggggaagcggttaaaactctctttcgatctctgactaccttcccctcatagtaagagattacatcgtc

SEQ ID NO: 28122 - DNA, 260 bp, Unknown; identical to SEQ ID NO: 27974
  Description of Unknown: RightRegion for integrase B2123 sequence

SEQ ID NO: 28123 - DNA, 260 bp, Unknown; identical to SEQ ID NO: 28110
  Description of Unknown: RightRegion for integrase B2124 sequence

SEQ ID NO: 28124 - DNA, 260 bp, Unknown
  Description of Unknown: RightRegion for integrase B2125 sequence
cccctctcccatcaacctcttccctccggcacgtcgtccagtatctcgtcgtttcgataacaaccgctttttacacgttcttccacgtccactttaattaaaaatcgcattcaaacaaaatccctctttcagcgagtcaacgccgaaagagggagctatgtatcattatatttttttgccggtacgttttttgtcaatcaatttataaattgattccaatgaattttgaacttctttccaaaagtttttttgttctcctc

SEQ ID NO: 28125 - DNA, 260 bp, Unknown
  Description of Unknown: RightRegion for integrase B2126 sequence
gaacttttcatggtttgcaacgacttttttaatatttgttctttcttgaggagaaattgacatgagcacctttgctaaaatcaaattgggtttggaagaagctattgcatacgaaaagggcgagctttccacggacatcggacatcatgatcagatagttttaaaggacagaccgacaaatcatcagcctgtccttttcgttaaaaaatcaaaatatggtgccgacagaaagagcctgtgagcgaacataggcgacactt

SEQ ID NO: 28126 - DNA, 260 bp, Unknown
  Description of Unknown: RightRegion for integrase B2127 sequence
tttatccatccagtcaagatcagcctttgtatatggaatcttcggctcaatctcaaataagtctgcttttgcttcctctgcaatcatatctgctactttttttgttgttccacttgcactgaaaaatgcaactaattttttacacataatacaaaacctctttccttgcgtatttttcacagaaaaaatagatgtataagattcacattcatcttacacatctattttaagctccatcgcctcattatgtctaatgctta

SEQ ID NO: 28127 - DNA, 109 bp, Unknown; identical to SEQ ID NO: 28113
  Description of Unknown: RightRegion for integrase B2128 sequence

SEQ ID NO: 28128 - DNA, 260 bp, Unknown
  Description of Unknown: RightRegion for integrase B2129 sequence
gttaaaatggtcggtaatgtgttcgttttgttttgttctattccctcactgactcattgacaacaaaaagaggggcaatcgcaacaggtggaaaagctgcgattgcccctctttttttgttgtataaattgtaaaatttttgcgttagaatataccgtttccacgccaaattctaccatattccttacaaacccgtgaggatttgatagaatacgacgtaaaggagataggttctatgattagaattttactgtccaccc

SEQ ID NO: 28129 - DNA, 260 bp, Unknown
  Description of Unknown: RightRegion for integrase B2130 sequence
gaaccctgttttgtgtgggggacgattttcgttcaaacaaaaagacactccttgccgtaaatggcagggagtgtcctctttttatctcttttggggttcgactctccatcgaaaaagttcgactctccgatggggtcagcccttttcaccggtaaatccgttagccttggcacatcgaagtgccccgagtatcatagtgtcctgagccaaggttctctgtttcaactcataaagcggggttccccgatgtgcgtcccatt

SEQ ID NO: 28130 - DNA, 260 bp, Unknown
  Description of Unknown: RightRegion for integrase B2131 sequence
gaaccctgctttgtgtgggggacgattttcgttcaaacaaaaagacactccttgccgtaaatggcagggagtgttctctttttgcctattttggggttcgactctccatcgaaaaagttcgactcttcaatagggtcaaccctcttcgccggtaaatccgttggccttggcacatcgaagtgccccaagtatcatagtgtcctgagccaaagttctcttcttcaactcatagagcggggttctccggtggtcatcccatt

SEQ ID NO: 28131 - DNA, 260 bp, Unknown; identical to SEQ ID NO: 28110
  Description of Unknown: RightRegion for integrase B2132 sequence

SEQ ID NO: 28132 - DNA, 260 bp, Unknown
  Description of Unknown: RightRegion for integrase B2133 sequence
gaaccctgctttgtgtggggaacgattttcgttcaaacaaaaagacactccttgccgtaaatggcagggagtgtcctcttttttgcctattttggggttcgactctccatcgaaaaagttcgactcttcaatagggtcaaccctcttcgccggtaaatccgttgaccttggcacatcgaagtgccccgagtatcatggtgtcctgagccaaggttctcttcttcaactcataaagtggggttctccggtggtcatcccac

SEQ ID NO: 28133 - DNA, 260 bp, Unknown
  Description of Unknown: RightRegion for integrase B2134 sequence
gaaccatgtattgtatggggatcgattctcgttcaaaccaaaagacatcctctgttttaatagacagagggtgtcttttttgtcaaggtgagttaggtgagtaatcgggctaaaatccctataacttttctatatacgcgcgtactaaggagaagttataggaaaaatacctcgattactcacctttctcaccttgatgaacgaatactaaataaaaaacgtcatcctatcgaaaaaaaaataactctctcaccgtcaca

SEQ ID NO: 28134 - DNA, 260 bp, Unknown
  Description of Unknown: RightRegion for integrase B2135 sequence
aataatataaatataatagtatggacgaattgtataattatattgtcagcaaaagtataaaagcaaaaacctcccactccgagaaaatcagagtgggaggtttgctttttatttgtcacttccgttatcacctttatcacggagagcctgcaaagcctttttgagaaacgtagggtaaggcatacccataagaccgacattttcaaagagcgacaacccttcattgcctatgaagaacagtatcacagccgtgcgaacat

SEQ ID NO: 28135 - DNA, 260 bp, Unknown
  Description of Unknown: RightRegion for integrase B2136 sequence
cctaccggcggcaactggacatctccggagatatctctcgatatcaagttgcgggtttagttttgtgccgaccataactatcaatgatgttccaatgagctggcgcatttggagatgatcggcgccatcgtccaccagctcacccgcaacctctccatcgaggagatcaaaaagtccggctttgacgtctactttgtggatcacaccaccggcatctggccgcaggccgcaggcggaatgcccttctccgccgccacctt

SEQ ID NO: 28136 - DNA, 260 bp, Unknown
  Description of Unknown: RightRegion for integrase B2137 sequence
agcacgggcggcaactggacaagcccggagatcgtgcttgatgttaaactgaaggcgtgattcttcgcgccgtccatttccatcagttgtgcgcacattcaaccgcgcatgactgatggatataatcaaaacaaggagctgaaaccattgaaaacgcttggattgcttgaaaagctgttagtcgctggaatgataaccgaagaggaatacaaggagaggaaaacggtgtatgtagaatcgctcttggaactctattgtct

SEQ ID NO: 28137 - DNA, 260 bp, Unknown
  Description of Unknown: RightRegion for integrase B2138 sequence
aacaccggggggaactggacttcgccggagatcgtgcttgatgttaaattaagggtgtgatttttgtacctaccatttccatcatcaatgcgcggattcaaccgcgcatgactgatggatatagttaaaccaaaccgggaaaagccttatatatcaacggaaaggaagaacggaatgaatacattaggattgcttgaaacgctgttggttgccaatatgataactgcggaggaatacaaggaaagaaaagcggtgtatgt

SEQ ID NO: 28138 - DNA, 260 bp, Unknown
  Description of Unknown: RightRegion for integrase B2139 sequence
agcacgggcggcaactggacaagcccggagatcgtgcttgatgttaaactgaaggcgtgaatttttgcgccgtccatttccatcagttgtgcgcacattcttccgtgccgatgtcggtaaggatccccttgacttcatcgctcggcatggcaaagcgctggctcagatagcggagcgacgcccccagttcgccgttcgggccgccgtactgggagatgataaccttggcaagcgccgggttcggattggcaattcggaca

SEQ ID NO: 28139 - DNA, 260 bp, Unknown
  Description of Unknown: RightRegion for integrase B2140 sequence
agcacgggcggcaactggacaagcccggagatcgtgcttgatgttaaactgaaggcgtgattcttcgcgccgtccatttccatcagttgtgcgcacattcaaccgcgcatgactgatggatataatcaaaacaaggagctgaaaccattgaaaacgcttggattgcttgaaaagctgttagtcgctggaatgataaccgaagaggaatacaaggaaagaaaagcggtgtatgttgaatcgctgcttgaactgtactgttt

SEQ ID NO: 28140 - DNA, 260 bp, Unknown
  Description of Unknown: RightRegion for integrase B2141 sequence
agcacgggcggcaactggacaagcccggagatcgtgcttgatgttaaactgaaggcgtgatttttcgcgccgtccatttccatcagttgtgcgtacattcaaccgcgcatgactgatggatataatcaaaacaaggagctgaaaccattgaaaacgcttggattgcttgaaaagctgttagtcgctggaatgataaccgaagaggaatacaaggagaggaaaacggtgtatgtagaatcgctcttggaactatattgtct

SEQ ID NO: 28141 - DNA, 260 bp, Unknown; identical to SEQ ID NO: 28136
  Description of Unknown: RightRegion for integrase B2142 sequence

SEQ ID NO: 28142 - DNA, 109 bp, Unknown
  Description of Unknown: RightRegion for integrase B2143 sequence
aatacaggtggaaactggacttcgccggagatcgtgcttgatgttaaattaagggtgtgatttttgtatctaccatttccatcatcaatgcgcggattcctcggtgccc

SEQ ID NO: 28143 - DNA, 260 bp, Unknown
  Description of Unknown: RightRegion for integrase B2144 sequence
aacaccgggggaaactggacttcgcctgagatcgttcttgatgttaaactaagggtgtgattttttgcaccaaccatttccatcagttgtgcgcctatacagcagagcatgactgatggatatagctaaaccaaaccggaaaaagccttatatatcaacggaaaggaagatcgaaatgaatacattaggattgcttgaaacgctgttggttgccaatatgataactgcggaggaatacaaagaaagaaaagcggtgtatg

SEQ ID NO: 28144 - DNA, 150 bp, Unknown
  Description of Unknown: RightRegion for integrase B2145 sequence
aaaacaggtggtaattggactactccaaacatcgaattagatgtgaaattgaaggtgtaaatttttttgcgcctatcaattccatcattagtgtgcaggttctactgcacaccaatgatggatatcaaaaaacaaccgaaaggaagattg

SEQ ID NO: 28145 - DNA, 160 bp, Unknown
  Description of Unknown: RightRegion for integrase B2146 sequence
aaaagtcctcgaaatcgtctgatttcgaggacttttgtttttcataagttccgtatttagggtgttgccttttcctgacccaaacgctgaccccaacgggagcgggtagcggaaaggtctataccgcacgggagaggatgctccccatcgtttgcgccgc

SEQ ID NO: 28146 - DNA, 260 bp, Unknown
  Description of Unknown: RightRegion for integrase B2147 sequence
aacgttggtggtaactggacagcgcccaagatcattcttgatgtcaaactgaaggtgtaattttcacgcccattatatccatcagctatgcgccatttcttccgtgccgatatccgtcaaagtggcgatgacccgctgatccgtcatggaataccgctgggtcaggtatcgaaggcccgctcccagctcgctgtccggcccgccgtactgagccatgagcagtttagccattttcaggtctgcccgtgtgatatgtaccg

SEQ ID NO: 28147 - DNA, 260 bp, Unknown
  Description of Unknown: RightRegion for integrase B2148 sequence
agcacgggcggcaactggacaagcccggagatcgtgcttgatgttaaactgaaggcgtgattcttcgcgccgtccatttccatcagttgtgcgcacattcaaccgcgcatgactgatggatatagttaaaccaaaccgggaaaagccttatatatcaacggaaaggaagaacggaatgaatacattaggattgcttgaaacgctgttggttgccaatatgataactgcggaggaatacaaggaaagaaaagcggtgtatg

SEQ ID NO: 28148 - DNA, 260 bp, Unknown
  Description of Unknown: RightRegion for integrase B2149 sequence
aatgggacggaagtgaaagaattgcccttggaaaatgaaacaatggtcgagacggtctgattgatgtctagaaaagaaaaataaatagcgaaaagtagcgtatttacgggcttttttgagattaggcaatagctcatgaaagtccgtatttcttatattgaaacatatctactgtaaaaacggtcagagggtttaggctgtgaattagatgtcgtgggttgtggcactaggatagatgttatctagggtgcaaactcaat

SEQ ID NO: 28149 - DNA, 260 bp, Unknown
  Description of Unknown: RightRegion for integrase B2150 sequence
attcggacaggggttcgattcccctcaggtccaccattcgggccgtactcgaacacgtgagtgcgggcccttttctcggatattgtaaaatatcagcgcctcatcgttgcggagctcgactcgggcgatgaacgtgtcaaccaaccgagcgcggaagtcgtcatccgtgacgtctccgacgcggaaggagcgcagccaggcctcgaccacctcatgggtgagtcggggcctttttatttctgcccgctggatctccagca

SEQ ID NO: 28150 - DNA, 260 bp, Unknown
  Description of Unknown: RightRegion for integrase B2151 sequence
accacgctatctcctaacacttgcaacacacgcttgcaattgcggctttttccccagtgatcgctgtacctgctctgaacaagaggttcgacgatatcaacatagaatctcagggcccttgcttgatcgtattgatatttatttgtgggtagaacctgtttcttacgatgatttatccctaaaatcgcaaggtgaaccatcagaaatgatccgtaaacgagtcatcgcggtaagaaatctgacgcaagagagattggcac

SEQ ID NO: 28151 - DNA, 260 bp, Unknown
  Description of Unknown: RightRegion for integrase B2152 sequence
agtgagggcttagctcacccaggagagcgccgtgcatggactgcaagagggtcaccgtgatcagaatcggcccggtattctccaccaaaaagcactgtacttcgtaggaagtatggtgcttttctttttatacagacgcagaaaaaggcgggagcttcccacaaaagggaaagccaccgcctttgttgatcatcggatgagccagccgtaatcctgtctgcaatctaccacatgatctgcataaaccgtatgatctacga

SEQ ID NO: 28152 - DNA, 260 bp, Unknown
  Description of Unknown: RightRegion for integrase B2153 sequence
agcacgggcggcaactggacaagcccggagatcgtgcttgatgttaaactgaaggcgtgattcttcgcgctgtccatttccatcagttgtgcgcacattcaaccgcgcatgactgatggatataatcaaaacaaggagctgaaaccattgaaaacgcttggattgcttgaaaagctgttagtcgctgaaatgataaccgaagaggaatacaaagagaggaaaacggtgtatgtagaatcgctcttggaactctattgtct

SEQ ID NO: 28153 - DNA, 260 bp, Unknown
  Description of Unknown: RightRegion for integrase B2154 sequence
agcacaggcggcaactggacaagcccggagatcgtgcttgatgttaaactgaaggcgtgattcttcgcgccgtccatttccatcagttgtgcgcacattcttccgtgccgatgtcggtaaggatccccttgacttcatcgctcggcatggcaaagcgctgactcagatagcggagcgacgcccccagttcgccgttcggtccgccgtactgggagatgatgaccttggcaagcgccgggttcggattggcaattcggaca

SEQ ID NO: 28154 - DNA, 260 bp, Unknown
  Description of Unknown: RightRegion for integrase B2155 sequence
aacaccggggggaactggacttcgccggagatcgtgcttgatgttaaactaagggtgtgattttttgcacccaccatttccatcagttgtgtgcggattcaaccgcgcatgactgatggatatagttaaaccaagccggaaaaagccttatatatcaacggaaaggaagaacggaatgaatacattaggattgcttgaaacgctgttggttgccaatatgataactgcggaggaatacaaggaaagaaaagcggtgtatg

SEQ ID NO: 28155 - DNA, 260 bp, Unknown; identical to SEQ ID NO: 28136
  Description of Unknown: RightRegion for integrase B2156 sequence

SEQ ID NO: 28156 - DNA, 260 bp, Unknown; identical to SEQ ID NO: 28135
  Description of Unknown: RightRegion for integrase B2157 sequence

SEQ ID NO: 28157 - DNA, 260 bp, Unknown
  Description of Unknown: RightRegion for integrase B2158 sequence
ccacaggctatccactgtggcggctttttattatctgttggagggtgggatgtaccgtgagctggtgggtgtatgtgctggagtgccgggatggcaccctgtataccggctgtaccgatgacatcccccggcggctggaggcgcacaatgccggccgcggtgccaaatatacccgtggccgtgggccggtgacgctgcgctaccgggaggagaccctggataaaccggctgccctgcggcgggaggcggccatcaagcgg

SEQ ID NO: 28158 - DNA, 260 bp, Unknown
  Description of Unknown: RightRegion for integrase B2159 sequence
agcacgggcggcaactggacaagcccggagatcgtgcttgatgttaaactgaaggcgtgattcttcgcgccgtccatttccatcagttgtgcgcacattcaaccgcgcatgactgatggatataatcaaaacaaggagctgaaaccattgaaaacgcttggattgcttgaaaagctgttagtcgctggaatgataaccgaagaggaatacaaggagaggaaaacggtatatgtagaatcgctcttggaactctattgtct

SEQ ID NO: 28159 - DNA, 260 bp, Unknown
  Description of Unknown: RightRegion for integrase B2160 sequence
aacaccgggggaaactggacttcgcctgagatcgtgcttgatgttaaattaagggtgtgatttttgtacctaccatttccatcatcaatgcgcatattcaaccgcgcattgatgatggatatagttaaaccaaaccggaaaaagccttatatatcaacggaaaggaagaacggaatgaatacattaggattgcttgaaacgctgttggttgccaatatgataactgcggaggaatacaaggaaagaaaagcggtgtatgt

SEQ ID NO: 28160 - DNA, 260 bp, Unknown
  Description of Unknown: RightRegion for integrase B2161 sequence
agtgagggtttagctcacccaggagagtgccgtgcatggactgcaagagggtcaccgtgatcagaatcggcccggtaatctccaccagaatgaaagcactacacggaaacgtgtggtgcttttttgttttatctgccgttcaccttacgtcccctttcatgaaaaaagcgtttgtcgcagcccgcaggccgtgacaaacgctttttattttactgtgcgcccaagcgcattttgaagtcctgatagccgaagtgcaccag

SEQ ID NO: 28161 - DNA, 260 bp, Unknown
  Description of Unknown: RightRegion for integrase B2162 sequence
gcattcgggttcgtatttctttgtccgttgccatgcagcaaaaaagaggcagacgtttgatgcgtctgcctctttttataacgaagttcgttataatctaccatcttcctgcaaaatgagaaaatacttgttatattttctcgtaaaggagcatggctatgattaggattttactgtccacgcgcctcggcgaaaggcgctggacgcaggctgatctcgctcgcgcaactggcatacgtccgtctaccatcaacgactac

SEQ ID NO: 28162 - DNA, 260 bp, Unknown
  Description of Unknown: RightRegion for integrase B2163 sequence
ttttcaatgactgcggttcttgccggaaactggcgcgaatacgtcgtttcgcttgtatagaaaaaaaaaaggcggagttcgcctccgcctttttgccgttctggtgcttaaatgcccgaaaaactcgttaaaactttaatgtcgacttgcaatacgcccgctatgcgttccagcatatcgtctttcggcgtgcgctcgccgtattcgtatttttgccagctctgcaccttgattcccgccttttcggcggcttgctcttg

SEQ ID NO: 28163 - DNA, 260 bp, Unknown
  Description of Unknown: RightRegion for integrase B2164 sequence
aaaacaggtggtaattggactactccaaacatcgaattagatgtgaaattgaaggtgtaaatttttttgcgcctatcaattccatcattagtgtgcaggttctactgcacaccaatgatggatatcaaaaaacaaccgaaaggaagattgcaatgaacacacttggtaaattggaacagctgctgcttgccggcgaaattacggaagacgaatacaaggaaagaaaagaagtgtatgttgaaacgatcctggaaatatac

SEQ ID NO: 28164 - DNA, 260 bp, Unknown
  Description of Unknown: RightRegion for integrase B2165 sequence
gaaccctacattgtgtggggtacggtcttcgtccaaaccaaaagacactccttgtcttaatcgacagggagtgtcttttttgcatttaggtgataaaggtgagtaatcgggcgtttttcctataaactctttctaatacgcgcatactaagaagaagttatagggattttcacccgattactcacctaactcaccttaatccgagtcaactgtacctgatgtacccctcaaacccggcacctttcaaacgctggagcatc

SEQ ID NO: 28165 - DNA, 260 bp, Unknown
  Description of Unknown: RightRegion for integrase B2166 sequence
cctaccggcggcaactggacatctccggagatatctctcgatatcaagttgcgggtttagttttgtgccgaccataactatcaatgttgttccaatgagctggcgcatttggagatgatcggcgccatcgtccaccagctcacccgcaacctctccatcgaggagatcaaaaagtccggctttgacgtctactttgtggatcacaccaccggcatctggccgcaggccgcaggcggaatgcccttctccgccgccacctt

SEQ ID NO: 28166 - DNA, 260 bp, Unknown
  Description of Unknown: RightRegion for integrase B2167 sequence
agcacgggcggcaactggacaagcccggagatcgtgcttgatgttaaactgaaggcgtgattcttcgcgccgtccatttccatcagttgtgcgcacattcaaccgcgcatgactgatggatataatcaaaacaaggagctgaaaccattgaaaacgcttggattgcttgaaaagctgttagtcgctgaaatgataaccgaagaggaatacaaggaaaggaaaacggtgtatgtagaatcgctcttggaactctattgtct

SEQ ID NO: 28167 - DNA, 260 bp, Unknown
  Description of Unknown: RightRegion for integrase B2168 sequence
ccggaagaggcaaaaaggcccggaacagatacagttttggcaatagaaacaaaaaagtaaggcaagctttatgcttgccttactgctggtggagcataacactcaatatccgaactcgtgagagtagcggtattattgcccgaaagattgaatgttagcacaatccgcttcccaccatcttcatcgtcatacacatatacagagtttaccaatgtatcaatcacgcgccgtgggtaattctcatcatcaacattcccgct

SEQ ID NO: 28168 - DNA, 260 bp, Unknown
  Description of Unknown: RightRegion for integrase B2169 sequence
agcacgggcggcaactggacaagcccggagatcgtgcttgatgttaaactgaaggcgtgattcttcgcgccgtccatttccatcagttgtgcgcccattcaaccgcgcatgactgatggatatggttaaaccaaaccgagaaaagccttatatatcaacggaaaggaagaacggaatgaatacattaggattgcttgaaacgctgttggttgccaatatgataactgcggaggaatacaaggaaagaaaagcggtgtatg

SEQ ID NO: 28169 - DNA, 260 bp, Unknown
  Description of Unknown: RightRegion for integrase B2170 sequence
cacgaacacctactttttcaaaggcggctttgccgtaagggtgtggctgtgatgtcataaaacacaaaacgaggtttaaggcacgatgtgccctgaacctcgttttttatatgctcgtgccttatttggattcggtgtccaatcataataggcagatcaccgcaagcaatgcgagtgttcatatacactcacatcctctgcttgttgggtgctatacccccgctggacacagaatttattctgtggctgcgcgttctgca

SEQ ID NO: 28170 - DNA, 91 bp, Unknown
  Description of Unknown: RightRegion for integrase B2171 sequence
agcaaatcaccgacccgaccgccggtgattttctatacggcccgttggtcaagtggttaagacagaggcctctcacgcctttaacatcggt

SEQ ID NO: 28171 - DNA, 260 bp, Unknown
  Description of Unknown: RightRegion for integrase B2172 sequence
aatacaggtggaaactggacttcgccggagatcgtgctcgatgttatattaaaggcctgatttttcgtatctatcatttccatcatcaatgcgcggattcaaccgcgcatgtctgatggatatagttaagtcaaaccgggaaaagccttatatatcaacggaaaggaagaacggaatgaatacattaggattgcttgaaacgctgttggttgccaatatgataactgcggaggaatacaaagaaagaaaagcggtgtatg

SEQ ID NO: 28172 - DNA, 260 bp, Unknown
  Description of Unknown: RightRegion for integrase B2173 sequence
tacgaacccacgcggttcgtatggctctcgttcgtatcaggccttttttgcgctacctaaataaatgattttagatgccaaggactgcctgcttatgaggttcgccattttgtttttcctcttgacgtgcttaactgaccattgtgtgccttattcggtattatgatactgcggaggttctaatatgagcatatttgcatctaaaaaaagcagaagccccattcagagagcgaaacttttaggaatgaggactgcacagg

SEQ ID NO: 28173 - DNA, 109 bp, Unknown
  Description of Unknown: RightRegion for integrase B2174 sequence
aacgttggtggtaactggacagcgccggagatcatacttgatgttaaactgaaggtgtaattttcacgcccattatatccatcagttgtgcgcagattcttccgtgccg

SEQ ID NO: 28174 - DNA, 260 bp, Unknown
  Description of Unknown: RightRegion for integrase B2175 sequence
gtgcaggaagtcagaatcgtttataactttgtcggagaaatcccggagattacagcataatcatttcgcctcatctctcaatcagcgagggatgaggcttttctttttgtaaaattgcgatagatatattcacaatttttttaccattaaattcttagtcagacagtagaaaaatgatgacgactccccctacagatgctataatgttcgcatatagatatggcaatttgacaattactttttcttattggtatctgtct

SEQ ID NO: 28175 - DNA, 260 bp, Unknown
  Description of Unknown: RightRegion for integrase B2176 sequence
aaaagtcctcgaaatcgtctgatttcgaggacttttgcttttcataagttccgtttttagtgtggagtagtaccctgtaagtgcagtcgcaaaatccccaaaaatctgttaaactgaaagaacagagatggagggaatcgcaacgaaacattacagcaaagaattcaaggaagaagcgctgaagctgtcagacgagatcggcgtgaagaaggctgcacagcagctcggtgttgcgtactacacgctggcggattggcgca

SEQ ID NO: 28176 - DNA, 260 bp, Unknown
  Description of Unknown: RightRegion for integrase B2177 sequence
agtgagggcttagctcacccaggagagcgccgtgcatggactgcaagagggtcaccgtgatcagaatcggcccggtattctccaccagatcagaaaggcatcacacattgtgtggtgccttttttgttttgcattgcagcaggaaaacacaaaaaaatttctgcccactgccgcaacctgcgcgaaacgggctgttttgtgcgcgaatggcagaccacggaaggcggaacttgtgctataatataaaaaaacagggaagc

SEQ ID NO: 28177 - DNA, 260 bp, Unknown
  Description of Unknown: RightRegion for integrase B2178 sequence
gtgcaggaagtcaggatcgtgtataactttgtcggggaaatcccggagattgcagcgtaaatagtttgccccatctctcattttggagggatggggcttttgttgtggataaagtgatttgcctaaacgatagtattatcccatataatccgttcgcagtgcttctaccagatcacatttcagaattttcttgccacccaggtaatatgccagtgcgacaaagccaaaaagtgccgcgataaaaagcaggataggaacaa

SEQ ID NO: 28178 - DNA, 260 bp, Unknown
  Description of Unknown: RightRegion for integrase B2179 sequence
gatggttctatatattctataacctttaaaaacggtttagtacattattttatttactaaatataaataagaccgcctaaatctattgatattagcggtcttttatttcatgtgtaggttgttcatttgacatccaaatgtaacacaatgcacgcgtggttttcttcctctttctctttcgaaatgataagtatattctctcattttatctatatatctttcctgttctcttattttttccataggaacagttacttgtt

SEQ ID NO: 28179 - DNA, 260 bp, Unknown
  Description of Unknown: RightRegion for integrase B2180 sequence
cgcaacggtgtagaaatcgaacagaccgtagaccaacctaagaggaggaaattcatatgatttatgtaactggcgattgccacggaaacttccggcgtttccaatcggattgtttcccggagcaagctaacatgacgaaggatgacacggtcatcatcaccggagactgcggcggcgtgtggtttggcgacagccgcgacgatgaaacgctggactggctggaacgcctgcccttcacgctcgccttcgtctgcggcaac

SEQ ID NO: 28180 - DNA, 260 bp, Unknown
  Description of Unknown: RightRegion for integrase B2181 sequence
tgcacgggcggcaactggacaagcccggagatcgtgcttgatgttaaactgaaggcgtgattcttcgcgctgtccatttccatcagttgtgcgcacattcaaccgcgcatgactgatggatataatcaaaacaaggagctgaaaccattgaaaacgcttggattgcttgaaaagctgttagtcgctggaatgataaccgaagaggaatacaaggagaggaaaacggtgtatgtagaatcgctcttggaactctattgtct

SEQ ID NO: 28181 - DNA, 99 bp, Unknown
  Description of Unknown: RightRegion for integrase B2182 sequence
agcacgggcggcaactggacaagcccggagatcgtgcttgatgttaaactgaaggcgtgatttttcgcgccgtccatttccatcagttgtgcgcacatt

SEQ ID NO: 28182 - DNA, 260 bp, Unknown
  Description of Unknown: RightRegion for integrase B2183 sequence
aacactggcggcaactggacaagccctgaaatcacgcttgatgttaaactaagggtttaattatttgtaccttccatatccatcagttgtgcgcatattcaacagcgcgtcactgatggatataaacgctaaaaagacaatggcagaggaaaaagctagtgttttcagtgctttgcgtcgttatacaaaaacattccccattgcaaggaaactgcaatagggatgcaatcaactctaacgtccgctcaccaatatcccca

SEQ ID NO: 28183 - DNA, 260 bp, Unknown
  Description of Unknown: RightRegion for integrase B2184 sequence
gtagaaaaagatcagtatgtatctagggagaaatggagcaggaaaaactacagcaattaagatgatgctggggcttgtaaagccagaaggtggggaagtaaaagtattagggacagatgcaaggcatctgtcagcacagaagaaacaggagataggagtagtactttctgaatcaggctttagttcatatcttaatatttctgatattgaacatatacttatgaagatgtatccggagtttgacagggattattttaaac

SEQ ID NO: 28184 - DNA, 260 bp, Unknown
  Description of Unknown: RightRegion for integrase B2185 sequence
ttctttttgcaaaaatgcttgcggcacaaggcttttcggcaaagcgacactttggaatagtttcattgtgggctttatgcaggtgttttgctcctctccaactatccattctgtgccaaagacaaagccctctccgacacaaaagtgccgaaaaaggcttgaaatcaagggcttccgaggtcaactgctgactttggaagccctttttatgtttattcgattgtgggattccagcgttcagacgctcggcagcgatgtgg

SEQ ID NO: 28185 - DNA, 260 bp, Unknown
  Description of Unknown: RightRegion for integrase B2186 sequence
aaggttcaggaagtcaaaatcatctataactttgtcggggaaataccggcggcgcaataatgacagcagcccttcttccattccgggagaagggtctttttttcgggcatggaaaaagccggggcttttattctccggcttccgggataaattccagatgttccaacgcatagcgcagagccatgcacataagttcattgcgggagcggtcgcttttagctgacagtttatcaaattcctcctgcaattccctgtctatc

SEQ ID NO: 28186 - DNA, 260 bp, Unknown
  Description of Unknown: RightRegion for integrase B2187 sequence
aaagcacgcttcggcgtgctttttcgcttatttcaaaagaccaaaggccttttgaaataaagggtctgatactattttctgattaaaatatttattttaatcagaaaggcatcgcctgatggcgctgccggttttgtgatttataaggaaagaaatcacaaaacaagtctcatatgaacttcatgcccttcgggcaattaaaatcttttttaaagattttaattgaagttcagtatgacacgttgacatccggctgtcgt

SEQ ID NO: 28187 - DNA, 260 bp, Unknown
  Description of Unknown: RightRegion for integrase B2188 sequence
gacttttcgaccaacggcggcaggggactacccctgccaaaagccgcttatctcgtttgaggtaagcggcttttcgttttttgctgcgtcgtaggggccgggcatgcccggcccgcgggttggcgggagcgacccgagcacacgactgacatctggaatgctaaacaggcgtttacttacgatgcgccgaaaaaagaggatgtggactgatccacatcctctaaaacaaaaacaaatccgaaacaatgcttcacaaagaa

SEQ ID NO: 28188 - DNA, 260 bp, Unknown
  Description of Unknown: RightRegion for integrase B2189 sequence
gtagagaaaactcagtatgtatctagggagaaatggtgctggaaaaagcacaacatttaaggcgatattaggtttgatttcaactgacggcggaaatattaccatacttggaaaggacagaaaagacttcacagcaaaagataaagaggaattgggtgtagtattgtcggattctggttttagtgggtatctgaagataaaagatattatccctatattgcagaatatgtactcaaaattcgacaaatcactatttatag

SEQ ID NO: 28189 - DNA, 260 bp, Unknown
  Description of Unknown: RightRegion for integrase B2190 sequence
gcatttgggttcgtatttctttgtccattaccaagcagcaaaaaagaggcagacgtgtaaagcgtctgcctcttttactataacgaagttcgttataatctaccatcttcctgcaaaatgagaaaatacttgttatattttctcgtaaaggagcatggctatgattaggattttactgtccacgcgcctcggcgaaaggcgctggacgcaggctgatctcgctcgcgcaactggcatacgtccgtctaccatcaacgact

SEQ ID NO: 28190 - DNA, 260 bp, Unknown
  Description of Unknown: RightRegion for integrase B2191 sequence
gtagagaaaactcagtatgtatctagggagaaacggcgctggaaaaacaacgctgtttaactgcctgaacagggatttgaaggcggatagcggcaatttctatatagaagatgaaaacggcgtccgccgtgaggtgtccgcagaggacatcggatatgtactctctaccccgaccgtgccggagtttcttacaggcagggagtttttgaaattctttatggacatcaacgagaagtctatcaataatccgaaaagcattg

SEQ ID NO: 28191 - DNA, 260 bp, Unknown
  Description of Unknown: RightRegion for integrase B2192 sequence
gtagagaaagctcagtatgtatctagggagaaatggttcaggaaagactacattttataatgtacttacaggaatttcccctgcaaccagaggccagatcattttcaagggcaaaagcatagaaaaaatgcagccggaagctattacccgccttggcatggcccgtactttccagaatatccgtctttttggaaatatgacagtagcggaaaatatcattattgcccgccactgcagaagaaagactggtatctgggact

SEQ ID NO: 28192 - DNA, 260 bp, Unknown
  Description of Unknown: RightRegion for integrase B2193 sequence
gtagagaaaactcagtatgtatctagggagaaacggcgcaggaaaaagtacggcaattaaactgatacttggactggtaaagccggatgctggaaagatttgtgtgtttggtaacgaaggtggagagcttccggctgcggtaaagcagaaaatcggagtatctttgacggaggcaggctttagttcacaatttacggtggaagatgtctggcatatccttgctaaaatgtatcctgatttccagaaggatttttttgacc

SEQ ID NO: 28193 - DNA, 260 bp, Unknown
  Description of Unknown: RightRegion for integrase B2194 sequence
gtagagaaaactcagtatgtatctagggagaaatggggctgggaaaagcacaacatttaaggcaatactgggtttgatttcaaccgatggcgggaatattacaatacttgggaaagatatgaaagacttcaccgcaaaagataaagaaaatttgggtgttgtattgtctgactctggttttagcggttatctgaaaatcaaagatattatccctatattgcagaatatgtactcaaaattcgataagtcattatttatag

SEQ ID NO: 28194 - DNA, 260 bp, Unknown
  Description of Unknown: RightRegion for integrase B2195 sequence
gaaccctacattgtatggggaacggtatttgtgcaaacgaaaagacacgccttgccataaacggcagggcgtgtcctattttactcttccccggtgaatccgttagcctcggcacacttcaaagcaccgagtatcattttgtcctgggccaatgctcttcggtaaacatcagcagaaattacctcgcttccctcatgccgttcgatattcacccggtcacgaacaatgataccctcatagagatttatcagtttgtccaa

SEQ ID NO: 28195 - DNA, 260 bp, Unknown
  Description of Unknown: RightRegion for integrase B2196 sequence
tgtagtcacaatgaaaatcatgacagcaacaattgctttagaaaaaggaaatctaaatgatgtttttgttgcgggtgatgaagttttaaaaatgtatggtacaaatatctatttagaaaaaggagaggagatgaagcttcaagatttactttatggtttgttattaagaagtggaaatgatgcggctgttgtgattgctaataacatatgctctaatgaaaaagaatttgttaagttaatgaataagaaggccttagaaa

SEQ ID NO: 28196 - DNA, 260 bp, Unknown
  Description of Unknown: RightRegion for integrase B2197 sequence
gaaaggctgctaagaacactcgcttttttcatacagcgagttagtttgaggcgtagttgacgactacgccttttttgtattcaccgacaactgcggtgccggaagtgggaacacatcggggatgaagatggctcccacacagtagcttcccctgtctgcggcaaagccgccaatcgtagcgcggggaaagttccctgtgcggagattaagccctcggcagagtgcacacgccctttagggtgtataagtgcgcccttagt

SEQ ID NO: 28197 - DNA, 260 bp, Unknown
  Description of Unknown: RightRegion for integrase B2198 sequence
aaaggcttgcagtatcatgtcgctccgtatactatacgagtgaaacttaagtgcgaatagcattggggtcaatttggtccccattcatacggggttacttcatcccaatgcctatgcagcaagggttaggagaaaaagaaaaggggctgtaatcattatgattcggtcccttttcaattccattttgaattttaccgtttaatcaggtactcttctaattcggttctggctgttttcatcttctctactccgttcccggt

SEQ ID NO: 28198 - DNA, 260 bp, Unknown
  Description of Unknown: RightRegion for integrase B2199 sequence
gcattcgggttcgtatttctttgtccgttgccatgcagcaaaaaagaggcagccgtttgacgcgtctgcctctttttataacgaagttcgttataatctaccgtcttcctgcaaaatgagaaaatacttgttatattttctcgtaaaggagcatggctatgattaggattttactgtccacgcgcctcggcgaaaggcgctggacgcaggctgatctcgctcgcgcaactggcatacgtccgtctaccatcaacgactac

SEQ ID NO: 28199 - DNA, 260 bp, Unknown
  Description of Unknown: RightRegion for integrase B2200 sequence
gacattggttatgtggaactcacttcgcctgaaggtcagtccacccccaagggtgcgtaagacaaaaagaagtccccggcagatactgccgtagcaatatctgccgggggttcagacaccttcaaagttacccctgtcagggggcaccaaatggccggtggtatttttgtacccaaaatcagggaggttttaccgatgattatcgtaaattttgataaaaatgaactttgcaaaaaagcctatggtctctggcagtacga

SEQ ID NO: 28200 - DNA, 260 bp, Unknown
  Description of Unknown: RightRegion for integrase B2201 sequence
tgtagtcacaatgaaaatcatgacagcaacaattgctttagaaaaaggaaatctaaatgatgtttttgttgcgggtgatgaagttttaaaaatgtatggtacaaatatctatttagaaaaaggagaggagatgaagcttcaagatttactttatggtttgttattaagaagtggaaatgaactagcatgaacggaatagcagttggaacttatgaaagaagatttaataatataacatcttttaaaccttatactttaac

SEQ ID NO: 28201 - DNA, 260 bp, Unknown; identical to SEQ ID NO: 28189
  Description of Unknown: RightRegion for integrase B2202 sequence

SEQ ID NO: 28202 - DNA, 260 bp, Unknown
  Description of Unknown: RightRegion for integrase B2203 sequence
aagcaggaagttatcggaggtatcactgccgaggctcttttgctcaccgcaccagactaatcaaacgccccaaaaatcgcgccgcaaaattttttaaaaaactagaaaaatttcttgacttcttggtcgtggcatgatattatatacaagcagtcgacaaacggcactgcgaaatgcgccggtagctcagctggatagagtgtttggctacgaaccaaaaggtcgggggttcgaatcccttccggcgtaccacggacatc

SEQ ID NO: 28203 - DNA, 260 bp, Unknown
  Description of Unknown: RightRegion for integrase B2204 sequence
gtagagaaaactcagtatctatctagggagaaatggtgccggaaaaacaacgctgtttaactgcctgaacagggatttgaaggctgacagcggcaatttctatatagaagatgaaaacggcgtccgccgtgaggtagccgcagaggacatcggatatgtactttctaccccgaccgtgccggagtttcttacaggcagggagtttttgaagttctttatggacatcaatgagaagtctatcaaaaatccgaaaagcattg

SEQ ID NO: 28204 - DNA, 260 bp, Unknown
  Description of Unknown: RightRegion for integrase B2205 sequence
aaagcacgcttcggcgtgctttttcgcttatttcagaagaccaaagaccttttgaaataaaggatctgacagtctgctgcgcgcacgccctggccgcctgcgggctgctttcctctgcgaggtttttgacacgttgacatccggctgtcgtgtgacaaccggatgtttcgtatgtatctgtattctcaaacaccggagggctgcttttcccggatgacgcagggatttcccatgacgatgctgttggcgggaacgtcctt

SEQ ID NO: 28205 - DNA, 109 bp, Unknown
  Description of Unknown: RightRegion for integrase B2206 sequence
gcagcatatctgctgaggtggattttctattgccaacgcggtgaaaatatggtaagctgaatcaaaaataatgaaatgagatgtcaaaaatgacagaatcgctgtttta

SEQ ID NO: 28206 - DNA, 260 bp, Unknown
  Description of Unknown: RightRegion for integrase B2207 sequence
gtagagaaaactcagtatgtatctagggagaaatggtgcaggaaagacaacgcttattaaggcaataacagggagtgttaagtttgacagcggaagtattgaagtattaggacatgatattgatgctgcatcacagaataaaacagatgacagattcagacaggatatcggaaccgtgcttgcagaagattcatttccggagataatgacggcaggtatgattggcaatgtcatgaaatctatttacattaactgggata

SEQ ID NO: 28207 - DNA, 260 bp, Unknown
  Description of Unknown: RightRegion for integrase B2208 sequence
aaaaagtcttgtaatccttgggattgcaagacttttttgttttttctcttgtgtcgctgacagattggctgccgcaaaaaagcgcacaaaaagcgcacaaatccgaaaaaacacgcccaaaagcaagatacatccgcaggaaaggatgttatctatggccaccattcaggaaaacaggaaaaacggcaagctggtttcgtacaagtttacagcctgcgtcggcagagatgccgccggtaagcagattcgctattaccgca

SEQ ID NO: 28208 - DNA, 260 bp, Unknown
  Description of Unknown: RightRegion for integrase B2209 sequence
gtgcaggaagtcaagatcgtgtataactttgtcggggaaatcccggagattgcagcgtaaatagtttgccccatctctcacaaccattgagggatggggcttttattttgccgtcgtccggcagcattatattgattgggtttactccatccgcaaccgttccactacggtgcgttttgccatctcatggccggtgataacaggaataccagccccaagcaaggcaaagagagggatgatgaacaggaagggcgtgaggt

SEQ ID NO: 28209 - DNA, 260 bp, Unknown
  Description of Unknown: RightRegion for integrase B2210 sequence
gtatattcacagaaaaatctgtatatttcaaatgggaaagtgttgaatccgaacggctgattctgcctgacccttattttgaccctttatacggcggtttcaggcagtccaatctgaccacttgatacagaatgtcacacactggattttgctgcttctgtgctttcgcggatgcggcgaagatactgccccatgcggtttgcactttcgcgtttcatgccgggcgtggcgtgtgcataggtgctgagcgtgaatgatgc

SEQ ID NO: 28210 - DNA, 260 bp, Unknown
  Description of Unknown: RightRegion for integrase B2211 sequence
gaaaggctgttaagaacactcgcttttttcatacagcgagttagtttgaggcgtagttgacgactacgccttttcttgtattcaccgacaactgcggtgccggaagtgggaacacatcgggaatgaagatagctcccacacagtagcttcccctgtctgcggcaaagccgccaatcgtagcgcggggaaagttccctgtgcggagattaagccctcggcagagcgcacacgccctttagggtgtataagtgcgcccttag

SEQ ID NO: 28211 - DNA, 154 bp, Unknown
  Description of Unknown: RightRegion for integrase B2212 sequence
acaaaaacaaagataagaagtgaatcggacctaaaactcgatatatatcctaaattctaattattttatactcttttgtgtaagcattgaggtttatatccatctaatacgccagcaagaaaagctcctatagcgccaagaacaatacctatag

SEQ ID NO: 28212 - DNA, 260 bp, Unknown
  Description of Unknown: RightRegion for integrase B2213 sequence
gacttttcgaccaacggcggcaggggactacccctgccaaaagctgcttatctcgtttgaggtaagcggctttttattttttgctgcatcgtagggctcgggcatgcccggcccgcgggttggcgggagcgacccgaccacggctggcatctggaatgctaaacaggcgcttacttacgatgcgccgaaaaaagaggatgtggactgatccacatcctctaaaacaaaaacaaatccgaaacaatgcttcacaaagaaga

SEQ ID NO: 28213 - DNA, 260 bp, Unknown
  Description of Unknown: RightRegion for integrase B2214 sequence
gtagagaaaactcagtatgtatctagggagaaatggtgcaggaaaaagcacaacatttaaagctattttagggctaatttcctttgatagtggaactatcaatattcttggaaagtcattacaagattttactgcaaaagacaagcaagatttgggagtagttctttcggactctggctttagtggatatttaacaatcaatgatattattcctattattgataatttatatcaaaattttgataaatcattttttatag

SEQ ID NO: 28214 - DNA, 260 bp, Unknown
  Description of Unknown: RightRegion for integrase B2215 sequence
aaatccgaacctgtttccgattggagaagggttcggatttttcgttttcttcgggtttgagaatgaaggctcccgtggacggcgtaaaactccgataccttgtcatagaccgtaagccaataacaagatttggagggtatgattatgaagtacgatgaaagagcctgcaagtttaatatggacactggctgcgtggaactgctgctccgggatgagagaaaaatttccattgactgcaccggggtcgaggatgcgctgaa

SEQ ID NO: 28215 - DNA, 260 bp, Unknown
  Description of Unknown: RightRegion for integrase B2216 sequence
gtagagaaaactcagtatgtatctagggagaaatggtgcaggaaaaagtacagcgtttaaagcagcattaggtctgatcagaccagacgcaggtgttgtaaagatgctgggaaaaaatgtagaagattttacagtgcaggataaagagtggattggagttgttctggctgattccggtttcagtggatatttacgtgtgaaagatatacttccgatgcttgaaagtatgtaccataagtttcagaaagaagatttcctgg

SEQ ID NO: 28216 - DNA, 260 bp, Unknown
  Description of Unknown: RightRegion for integrase B2217 sequence
caaggcgaaccccgcaaggggttcgcctttggtgtatcatgctcagccaagataggttgacaggtttttgatgcaaaacctgtcgaccttctttcctttatgctatgatcgtactacatcagccgcagaaggaaaacagcaaaagaacatgggtgcaaatttgaatcttccattcccctggcaaaatagccacataaaaaaggtgtcctgtgtgctgcacaggacacctttttgaaaggcacagcagtatacaggaggaa

SEQ ID NO: 28217 - DNA, 260 bp, Unknown
  Description of Unknown: RightRegion for integrase B2218 sequence
ccacaccatacccacaaacgctttcttttccgtacccacgaaaaaccgctatgcgcgtgagtctgcgctttttacagcgagcaaatgaatttttccatcttggctgctgcgttttgcgacatatggttgctgacgtgtccgtaggtgtcgagcgtgaaggcgacggttgcatgtccgagtgacaaggaaagcgtcttgaagtcaatttcgctttgaatagcgagggtggcgtaggtgtgcccttacggtataattacgac

SEQ ID NO: 28218 - DNA, 260 bp, Unknown
  Description of Unknown: RightRegion for integrase B2219 sequence
cgcgacattgacgacgcagtggtcgcctaccgtgcgcaggtgcgcgacatattcgcctgagatgaataaaagccgcagacctgtcaaggtctgcggctttcctttttgacggagcaaaatgaaatcctgcaaaataaaggcgttatggaaacaagcggacgttatttgcaaaagggagaagaaatatcgtgcgttatgtcaaacgagtcatgtaccggagagggacgggacatttgacgctgcggctgtgcagaatgtct

SEQ ID NO: 28219 - DNA, 260 bp, Unknown
  Description of Unknown: RightRegion for integrase B2220 sequence
aaacgcaaaccatccatatatcgtttacaagaccaaaacaaacagccacccaaaaaatgaacgaatcaatattgtcatctatcctggccaatctggccgtcatggttatcgcagacaccgtactcatcgctctttacctgttcggaaaaatccggaaaaacacgctgtattgcatcatgagcggcgttacgttttcctatctgattacgttcctgacacttgccggcggcatgtctttcggtatctgtcgagttatcgta

SEQ ID NO: 28220 - DNA, 109 bp, Unknown
  Description of Unknown: RightRegion for integrase B2221 sequence
caggcgttgacaaacgccctccgaacgattacaatagacaaaaattacattatgaggtgatttctcatggattccaagctgcgccccgaaacactgtgcattcaggccg

SEQ ID NO: 28221 - DNA, 260 bp, Unknown; identical to SEQ ID NO: 26386
  Description of Unknown: RightRegion for integrase B2222 sequence

SEQ ID NO: 28222 - DNA, 76 bp, Unknown
  Description of Unknown: RightRegion for integrase B2223 sequence
tttggatacgaccggcaacggtctacccctgccaaaagtcgcttatctcgtttgaggtaagcggctttttgttttt

SEQ ID NO: 28223 - DNA, 260 bp, Unknown
  Description of Unknown: RightRegion for integrase B2224 sequence
caaaatttttcgcatacgggcggcagcggtctacccctgccaaaagcacagcagttgtgatacagatgtatcgaaaaactgctgtgctttttgtttgcggttcgattcgttaaaatccgaagagtttcaaggagaataagttggagaaaattatcgtaatggcacccggccatgaactgtgggatgggaccatcgcttttgcagcaggctgcccatggaaagcagcagcatttttggggcagagaagatggagccaaacg

SEQ ID NO: 28224 - DNA, 260 bp, Unknown
  Description of Unknown: RightRegion for integrase B2225 sequence
aatcagcttttttattttcctattttgattattttacgacctcatagggccagtccatgatgccgccgatgctgtagacgttggtatagccctgttctgtcagcgccgctgccgcgcggccggcgcgcttgccgctgcggcaatatacgaagatttccgcgtttttatccggcaggaccttggcgacggaatcagccttcgcttcaatctgctctaccggcagcagcacggcggaaggaatatggcctgccacatattct

SEQ ID NO: 28225 - DNA, 222 bp, Unknown
  Description of Unknown: RightRegion for integrase B2226 sequence
aaaagtcctcgaaatcgtctgatttcgaggacttttgcttttcataagttccgtttttagggtgttgcttttttctgacccaaacgctgaccccaacgggagcgggtagcggaaaccgtcagacggcacgggaaaggatattgcccatcgtctgggcggctttgagctgtgcgtcggtggtcacatgggcgtaggtgtccagcgtaaagcccgccgagtagt

SEQ ID NO: 28226 - DNA, 260 bp, Unknown
  Description of Unknown: RightRegion for integrase B2227 sequence
caaaatttttcgcatacggccggcagcggtctacccctgccaaaagcacagcagttgtgatacagatgtatcgaaaaactgctgtgctttttgtttgcggttcgattcgttaaaatccgaaggatttcaaggagaataagttggagaaaattatcgtaatggcacccggccatgaactgtgggatgggaccatcgcttttgcagcaggctgcccatggaaagcagcagcatttttggggcagagaagatggagccaaacg

SEQ ID NO: 28227 - DNA, 260 bp, Unknown
  Description of Unknown: RightRegion for integrase B2228 sequence
aaaggtatgcagtactacaatcccccttataaaataaccatcgagcttaagtgtgactaatttagggtacatttaagccctcattcatggggtactacttgataccgaaagtgatgtagcaaggtttatagagcaaaaagaagagggcttgttagtcctcttccagctttttgagcttcaaggttaactccacacatttcatggtatgtcttgctgtcttattaccccaatatatattatcgtctgcattccattcatca

SEQ ID NO: 28228 - DNA, 100 bp, Unknown
  Description of Unknown: RightRegion for integrase B2229 sequence
aaaagtcctcgaaatcgtctgatttcgatgacttttgcttttcataagttacgcttttagggtgttgcttttttctgaccaaaacgctgaccccaacggg

SEQ ID NO: 28229 - DNA, 260 bp, Unknown
  Description of Unknown: RightRegion for integrase B2230 sequence
aaacgcaaaccatccatatatcgtttacaaaaccaaaacaaacagcctctaaaaaaatgaacgaatcaatcttgtcatctatcctagccaatctggccgtcatggttatcgcagacgtcgtactcatcgctctttacctgctcggaaaaatccggaaaaacacgatgtattgcttcataagcggcattacgttttcctacctgattacgttcctgacacttgccggcggcatgtctttcggtatctgtcgagttatcgta

SEQ ID NO: 28230 - DNA, 260 bp, Unknown
  Description of Unknown: RightRegion for integrase B2231 sequence
aaaggtttacgctactatactcccccttataagataacgatcgagcttaagtgtgactaatttagggtacatttaagcccacactcatagggtagtaattgataccgatggctttatagcaatccattttgaagtaaaaagaagaggccctgtcgtaatgacggagcctctttttatttaattacgaggaattgctttttcaagatcggtaattcgatgattcgctacggcgatctcttcgtcaacaactgcatcgtgct

SEQ ID NO: 28231 - DNA, 260 bp, Unknown
  Description of Unknown: RightRegion for integrase B2232 sequence
caaaatttttcgcatacggccggcagcggtctacccctgccaaaagcacagcagttgtgatacagatgtatcgaaaaactgctgtgctttttgtttgcagttcgattcgttaaaatccgaagggtttcacggagaataagttggagaaaattatcgtaatggcacccggccatgaactgtgggatgggaccatcgcttttgcagcaggctgcccatggaaagcagcagcatttttggggcagagaagatggagccaaacg

SEQ ID NO: 28232 - DNA, 260 bp, Unknown
  Description of Unknown: RightRegion for integrase B2233 sequence
ttattcccaatcgggaacgggttcggatttcttattttcatcaaagatattatcgattgagcgtgggtccccggttttgccttgcgcaaaaccgggggctttgtacattcgacgaagcattcctccttctgtacaatagcagtatcaaccaaaagggggattgcatatggaagttcagtacattagcggggcggcgcccaggatgtctgtttctgcgaatttgacggccccgcttccggaaatgtccttgtcattgttga

SEQ ID NO: 28233 - DNA, 260 bp, Unknown
  Description of Unknown: RightRegion for integrase B2234 sequence
aaaagtcctcgaaatcgtctgatttcgaggacttttgcttttcataagttccgtttttagtgtgccgcttttttctgacccaaacgctgaccccaacgggagctaaactgtacccaagaaaatggacacgagattttgacccatggccccgttcggcggacacgcatttgacccatagggtcagaagcgccgcacctgtgttatgatagaactaccgaacggaggtgctgtatgggcacgaagaagaaattcacaccaga

SEQ ID NO: 28234 - DNA, 260 bp, Unknown
  Description of Unknown: RightRegion for integrase B2235 sequence
aagggtacaaaatactataaccctccctataagataacgattgagcttaagtgtgattaatttagggaacatttaagccctggttcatagggatatacatgataccgaaagtgatatatcaaggtttgttgagtaaaaagaagaggccctgtagaatatacggagcctcttttcttattatttattaatcaagaactcttgcaaatcatctctggcatgtttgagattctcgataccattaccagttatctcatggttaa

SEQ ID NO: 28235 - DNA, 260 bp, Unknown
  Description of Unknown: RightRegion for integrase B2236 sequence
attactgttttccctgaggaaacaaaaaattttattatgtcatttatccatttttcttaagaagtctatatgattttttcgtataggctttattgttataacggctatgtcatatattaatagccacaaaaataatatttctttaaccacatccatattctcatctcctcctaatctcattcataggtgctcctatttttattttgtttattatcctattaagatatttcttctgtaaaaaaaatttcttcaatcggcaa

SEQ ID NO: 28236 - DNA, 260 bp, Unknown
  Description of Unknown: RightRegion for integrase B2237 sequence
ggtccacagacagcacctcgatgctgttttcgagatagattcagctgcgaccagccgtgaggaaataggcaatccgccgcactacggcaccaaaaacaaactatacgaggagcatattcctcttattccacaccgcgcgagacagatgacacgtgatgattatttgtactatgaccttttgattggaatggacactgcaaatatcaggaatatgacaaggattgcaggtggcagtgacagtctgcagaagatatttaaga

SEQ ID NO: 28237 - DNA, 260 bp, Unknown
  Description of Unknown: RightRegion for integrase B2238 sequence
actaaggaggttgttattgatattatgggtagccaagagaattgctccccatctgggtaagtttgctattaggtcgcaatacagtaaatcatgcacatgccagcctttatgacgtcaacaggattgaaggtgctgtaagagattatatcaaatctttaggaatagtaattcacatggagaaaagagttagagatgttgaatttgatggacataagataaaaggtttatacttagctgatgatagctttgtagacggggat

SEQ ID NO: 28238 - DNA, 260 bp, Unknown
  Description of Unknown: RightRegion for integrase B2239 sequence
caaaatttttcgcatacgggcggcagcggtctacccctgccaaaagcacagcagttgtgatacagatgtatcgaaaaactgctgtgctttttgtttgcggttcgattcgttaaaatccgaagggtttcaaggagaataagttggagaaaattatcgtaatggcacccggccatgaactgtgggatgggatcatcgcttttgcagcaggctgcccatggaaagccgcagcatttttggggcagagaagatggagccaaacg

SEQ ID NO: 28239 - DNA, 260 bp, Unknown
  Description of Unknown: RightRegion for integrase B2240 sequence
caaaatttttcgcatacgggcggcagcggtctacccctgccaaaagcacagcagttgtgatacagatgtatcgaaaaactgctgtgctttttgtttgcggttcgattcgttaaaatccgaagggtttcaaggagaataagttggagaaaattatcgtaatggcacccgaccatgaactgtgggatgggaccatcgcttttgcagcaggctgcccatggaaagcagcagcatttttggggcagagaaaatggagccaaacg

SEQ ID NO: 28240 - DNA, 260 bp, Unknown
  Description of Unknown: RightRegion for integrase B2241 sequence
accacactgtttcacgcactttgcaatgacagagcctcccgcgctggcggagagggataagcggcttgcaaaatgagaacccttgtgctacaataggaaaggttcctagtagatatttccggttcgccggaacagcgatacaacagaaaagaggatgtctgttatgagcgtgaaaaagatcagcgaggccattctgggcgtaggtgtggatgataccaccatcgacctgttcgagagccagtacccggtgcccaccggtg

SEQ ID NO: 28241 - DNA, 260 bp, Unknown
  Description of Unknown: RightRegion for integrase B2242 sequence
caaaatttttcgcatacggccggcagcggtctacccctgccaaaagcacagcggttgtgatacagatgtatcgaaaaactgctgtgctttttgtttgcggttcgattcgttaaaatccgaagggtttcaaggagaataagttggagaaaattatcgtaatggcacccggccatgaactgtgggatgggaccatcgcttttgcagcaggctgcccatggaaagcagcagcatttttggggcagagaaaatggagccaaacg

SEQ ID NO: 28242 - DNA, 260 bp, Unknown
  Description of Unknown: RightRegion for integrase B2243 sequence
caaaatttttcgcatacgggcggcagcggtctacccctgccaaaagcacagcagttgtgatacagatgtatcgaaaaactgttgtgctttttgtttgcggttcgattcgttaaaatccgaagggtttcaaggagaataagttggagaaaattatcgtaatggcacccggccatgaactgtgggatgggaccatcgcttttgcagcaggctgcccatggaaagcagcagcatttttggggcagagaagatggagccaaacg

SEQ ID NO: 28243 - DNA, 260 bp, Unknown
  Description of Unknown: RightRegion for integrase B2244 sequence
caaaatttttcgcatacgggcggcagcggtctacccctgccaaaagcacagcagttgtgatacagatgtatcgaaaaactgctgtgctttttgtttgcggttcgattcgttaaaatccgaagggtttcaaggagaataagttggagaaaattatcgtaatggcacccggtcatgaactgtgggatgggaccatcgcttttgcagcaggctgcccatggaaagcagcagcatttttggggcagagaagatggagccaaacg

SEQ ID NO: 28244 - DNA, 260 bp, Unknown
  Description of Unknown: RightRegion for integrase B2245 sequence
aaaggtttacactaccacactcccccttataagataacaatcgagcttaagtgtgactaatttagggtacatttaagcccttactcatggggtagtaattcatcccgatggctctacagcaatccattttgaaataaaaagaagaggccctgtcgtagtgacggagcctctttttgtcggcgaatcatattggttccaatccaaaagcttttcgcataccattcggcgtcaacctaccttcgagatagcattcatacgat

SEQ ID NO: 28245 - DNA, 260 bp, Unknown
  Description of Unknown: RightRegion for integrase B2246 sequence
aaaggcttgcagtatcatgtcgctccgtatactatacgagtgaaacttaagtgcgaatagcattggggtcaatttggtccccattcatacggggttacttcatcccaatgcctatgcagcaagggttaggagaaaaagaaaaggggctgtaatcattacgattcggtcccttttcaattccattttgaattttaccgtttaatcaggtactcttctaattcggttctggctgttttcatcttctctattccgttcccggt

SEQ ID NO: 28246 - DNA, 260 bp, Unknown
  Description of Unknown: RightRegion for integrase B2247 sequence
aaaggcttgcagtatcatgtcgctccgtatactatacgagtgaaacttaagtgcgaatagtattggggtcaatttggtccccattcatagggcattacatcatcccaatggctatatatcaaaggttggagaaaaaagaaaaggggctgtaatcatcacgattcggtcccttttcaattccattttgaattttaccgtttaatcaggtactcttctaattcggctctggctgttttcatcttctctactccgttcccggt

SEQ ID NO: 28247 - DNA, 260 bp, Unknown
  Description of Unknown: RightRegion for integrase B2248 sequence
tatgcaaaacacgagattgttattgcgattcttgcggctcgtccgcagaaaataaggtgagggcatttgccctcaccttattttcatctctccacgatcccgtgatagtacgcactcagcttctcctccggccccggcccgtccttatcaaacagaaatgcctttgccatttccgcatagaattccgctttgttgcagttgtttttctgcgccacaccggaataatcagagtacatcatgttcatggtgacgttccacat

SEQ ID NO: 28248 - DNA, 260 bp, Unknown
  Description of Unknown: RightRegion for integrase B2249 sequence
gtagtagagaaaactcagtatgtatctagggagaaatattgcagcaaaaccagaaaataaagactctttaattaattatataaaggttttatataatattaagacatcagttgccacatcgaatgaaactgttcaggaactcaagaaaatatctttgggaaatcttggaatagaaagaagtatgaatcaagcaattcgctttttggatgttgatttggcttcctatatagaaatgacagagcaaatgatcaaatcaatag

SEQ ID NO: 28249 - DNA, 109 bp, Unknown
  Description of Unknown: RightRegion for integrase B2250 sequence
gatactggggatttaactattaattttataggttcaggtgagtctaaaaaaaaacaatagactccctgaactctattttaggggataataaaaaatcgcattttagtat

SEQ ID NO: 28250 - DNA, 260 bp, Unknown
  Description of Unknown: RightRegion for integrase B2251 sequence
cttgtaccgattggtcatgggttcggatttcttgtttttatcaaggatattgaagtttagtttcgggatagaataacatcaaattcaggaggatatacccatggaaaagctcgtagctgtacgttcaatatagataccgcctgcgtggaacttcacttcacggaggggagtatttactccataaattgcaccgccgtggagaacgaggcggcggacaacggtgcgtgctgtctgactgcatcacaagctatgctaaaaat

SEQ ID NO: 28251 - DNA, 260 bp, Unknown
  Description of Unknown: RightRegion for integrase B2252 sequence
caaaatttttcgcatacgggcggcagcggtctacccctgccaaaagcacagcagttgtgatacagatgtatcgaaaaactgctgtgctttttgtttgcggttcgattcgttaaaatccgaagggtttcaaggagaataagttggagaaaattatcgtaatggcacccggccatgaactgtgggatgggaccatcgcttttgcagcaggctgcccatggaaagcagcagcatttttggggcagagaagatggagccaaacg

SEQ ID NO: 28252 - DNA, 260 bp, Unknown
  Description of Unknown: RightRegion for integrase B2253 sequence
aagggtacaaaatactataaccctccctataagataacgattgagcttaagtgtgattaatttagggaacatttaagccctggttcatagggatatacatgataccgaaagtgatatatcaaggtttgttgagtaaaaagaagaggccctgtagaatatacggagcctcttttcttattatttattaatcaagaactcttccaaatcatctctggcatgtttgagattctcgataccattaccagttatctcatggttaa

SEQ ID NO: 28253 - DNA, 260 bp, Unknown
  Description of Unknown: RightRegion for integrase B2254 sequence
ggtccaccagctgcacctcgacaaccagttcgagatcgactccgctgcgaccagccgtgaggagatcggcaacccgccgcactacggcacaaaaaataaattatacgaagaaaacattccgcttgttccgcaccgggcgcgccagatgacaagggatgactatctgtattttgattatctgatcggcatggattccgcaaatatccggaacatgacaagaatcgcgggaggcacggacagccaggataaaatatacaaga

SEQ ID NO: 28254 - DNA, 260 bp, Unknown
  Description of Unknown: RightRegion for integrase B2255 sequence
aaaggactacgctattacactcccccatataaaataacgattgagcttaagtgtgactaatttcgggtacatttaagcccacaatcatggggtactacttgataccgatggctctacagcaatccattttgaaataaaaagaagaggccctgtcgtaatgacggagcctctttctcttttacagaccaatcgccgctagtgcaaaaccgataactccggcgatgaccgcccaaagaatttttgcacccaattcgtcccaa

SEQ ID NO: 28255 - DNA, 260 bp, Unknown
  Description of Unknown: RightRegion for integrase B2256 sequence
accacactgtttcacgcactttgcaatgacagagcctcccgcgctgacggagagagataagcggcttgcaaaatgagaacccttgtgctacaataggaaaggttcctagtagatatttccggttcgccggaacagcgatacaacagaaaagaggatgtctgttatgagcgtgaaaaagatcagcgaggccattctgggcgtaggtgtggatgatacaaccatcgacctgttcgagagccagtacccggtgcccaccggtg

SEQ ID NO: 28256 - DNA, 260 bp, Unknown
  Description of Unknown: RightRegion for integrase B2257 sequence
ttattcccaatcgggaacgggttcggatttcttattttcatcaaagatattatcgattgagcgtggatccccggttttgccttgcgcaaaaccgggggctttgtacattcgacgaagaattcctccttctgtataatagcagtatcaaccaaaagggggattgcatacggaaattcagtacattagcggggcggcgcccaggatgtctgtttctgcgaatttgacggccccgcttccggaaatgtccttgtcattgttga

SEQ ID NO: 28257 - DNA, 260 bp, Unknown
  Description of Unknown: RightRegion for integrase B2258 sequence
gtagtagagaaaactcagtatgtatctagggagaaatattgcagcaaaaccagaaaataaagactctttaattaattatataaaggctttatataatattaagacatcagttgccacatcgaatgaaactgttcaggaactcaagaaaatatctttgggaaatcttggaatagaaagaagtatgaatcaagcaattcgctttttggatgttgatttggcttcctatatagaaatgacagagcaaatgatcaaatcaatag

SEQ ID NO: 28258 - DNA, 260 bp, Unknown
  Description of Unknown: RightRegion for integrase B2259 sequence
gaaagcattttacagctgtttttttatgcccgaaatcttttaaaatatttcttaaaatagtgctttacattccaggaagttagtgggataatagctgagcggtccggtagggaccgataataaaacatacatatcgtataagtgtttctaataaacaaattaccaaaatggtggcaaaaaaatgccattgtctgaattctttctttttcacatgttccccttttcaagcggtgatttttgtagtattataatacatggca

SEQ ID NO: 28259 - DNA, 260 bp, Unknown
  Description of Unknown: RightRegion for integrase B2260 sequence
caaaatttttcgcatacggccggcagcggtctacccctgccaaaagcacagcagttgtgatacagatgtatcgaaaaactgctgtgctttttgtttgcggttcgattcgttaaaatccgaagggtttcaaggagaataagttggagaaaattatcgtaatggcacccggccatgaactgtgggatgggaccatcgcttttgcagcaggctgcccatggaaagcagcagcatttttggggcagagaagatggagccaaacg

SEQ ID NO: 28260 - DNA, 260 bp, Unknown
  Description of Unknown: RightRegion for integrase B2261 sequence
ggtccacagacagcacctcgatgctgttttcgagatagattcagctgcgaccagccgtgaggaaataggcaatccgccacactacggcaccaaaaacaaactatacgaggagcatattcctcttattccacaccgcgcgagacagatgacacgcgatgattatttgtactatgaccttctgattggaatggacactgcaaatatcaggaatatgacaaggattgcaggtggcagtgacagtcagcagaagatatttaaga

SEQ ID NO: 28261 - DNA, 260 bp, Unknown
  Description of Unknown: RightRegion for integrase B2262 sequence
gagatccagttccggtcggggatcgtgatggtgcagaggctggatgcatgggaagactagaaatggatattaaggaagaaatacggggaccgcctgactaaaaacataaaattcaaacataaaatgaactgtaatgaaccttgcaacaaaagtgtgcctgtgataaaatttaggtatgataggggaagtatatgcttctgataaaaacaggcagagaaaggaagagcagacatgagtaaggattgggaagaaaagttcag

SEQ ID NO: 28262 - DNA, 260 bp, Unknown
  Description of Unknown: RightRegion for integrase B2263 sequence
aaaggtttacgctactacactcccccttataagataacgatcgagcttaagtgtgactaatttagggtacatttaagcccacactcatagggtagtaattgataccgatggctatacagcaatccattttgaagtaaaaaaaaaagaagaggctctgtcgtagtgacagagtcgtttcttttcagattataactctggtttccaatactttgggttctttgcttcttctctaacttgtgcctttagtcttctaatctcgt

SEQ ID NO: 28263 - DNA, 260 bp, Unknown
  Description of Unknown: RightRegion for integrase B2264 sequence
aaaggcttgcagtaccacatcgctccgtatactatacgagtgaaactcaagtgcgaatagcattggggtcatgtaagcccccattcacacggtattacatgataccgatagcgctatataaaccattttgaagcaaaaaagaagagggcttgtctacgtgacgaaccctctttccttttaaaggaacttattttcctttatgcatttgttgtatgttcctctgatgttttctattgctagattagctacattattcttat

SEQ ID NO: 28264 - DNA, 260 bp, Unknown
  Description of Unknown: RightRegion for integrase B2265 sequence
aaaggcttgcagtatcacgtggctccgtatacgattcgagtgaagcttaagtgcgagtaattttggggtcatatcacacctcattcacgtgaccatgcttcatcccaatggctatatagcaaggctgggagaaaaagaaaaggggctgtaatcaacgcgattcggtcccttttctccattttgaattttatcgcttaatcagatactcttctaaactatctctcaccgtcttcatcttctccacaccattcccggttatc

SEQ ID NO: 28265 - DNA, 260 bp, Unknown
  Description of Unknown: RightRegion for integrase B2266 sequence
tatgcaaaacacgagattgttattgcgattcttgcggctcgtccgcagaaaataaggtgagggcatttgccctcaccttatttttatctctccacgatcccgtgatagtacgcactcagtttctcctccggtcccggcccgtccttgtcgaacagaaatgcctttgccatttccgcatagaattccgctttgttgcagttgtttttctgcgccacaccggaataatcagagtacatcatgttcatggtgacgttccacat

SEQ ID NO: 28266 - DNA, 260 bp, Unknown
  Description of Unknown: RightRegion for integrase B2267 sequence
gtagtagagaaaactcagtatgtatctagggagaaatgtgactgtgaaagctctttttgaaagaaaatcgagcagtggcagtggcggagattcttcttctgaccgtgatgcatcctcttccgcaatcagaaaagatccggtcaggggatggaccagcagtgatcgcggcatcataaccggcgcagccaacagcatggccaatgatggttacagtcactggatgcaggatgcgtatggctggtggctccgttttgcggata

SEQ ID NO: 28267 - DNA, 130 bp, Unknown
  Description of Unknown: RightRegion for integrase B2268 sequence
aacagcgtaccgcctttgcgacggtacgcccatttttatgcagttattacaggatgctgatgcggcctgcgccgtagggattctcgtaatccagcagatagcccgggtaatcggccagcgggctgtttgc

SEQ ID NO: 28268 - DNA, 260 bp, Unknown
  Description of Unknown: RightRegion for integrase B2269 sequence
ggtcaacagacagcacctcgatgctgttttcgagatagattcagctgcgaccagccgtgaggaaataggcaatccgccgcactacggcaccaaaaacaaactatacgaggagaatattcctcttattccacaccgcgcgagacagatgacacgcgatgattatttgtactatgaccttttgattggaatggacactgcaaatatcaggaatatgacaaggattgcaggtggcagtgacagtcagcagaagatatttaaga

SEQ ID NO: 28269 - DNA, 260 bp, Unknown
  Description of Unknown: RightRegion for integrase B2270 sequence
agatgtaaaatcgccgttttccctttgtggatagacttgaactctcacacaaccgaataatgatacgcaaggcagatagaaatcaaaaatctatctgccttttttattaccttcataaaggagaagacagatatgctacagaaagaattagccaaacgcctcaaagctcagtacgataccaaaatggacgggaacggatggctggaagtgtcctcgaaacgccgtccgtcagatgacgcaggatgccggtcccgtaaagg

SEQ ID NO: 28270 - DNA, 260 bp, Unknown
  Description of Unknown: RightRegion for integrase B2271 sequence
ttattcccaatcgggaacgggttcggatttcttattttcatcaaagatattatcgattgagtgtgggtccccggttttgccttgcgcaaaaccgggggctttgtacattcgacgaagaattcctccttctgtataatagcagtatcaaccaaaagggtgattgcatatggaagttcggtacattagcggggcggcgcccgggatgtctgtttctgcgaatttgacggccccgcttccggaaatgtccttgtcattgttga

SEQ ID NO: 28271 - DNA, 260 bp, Unknown
  Description of Unknown: RightRegion for integrase B2272 sequence
caaaatttttcgcatacggccggcagcggtctacccctgccaaaagcacagcagttgtgatacagatgtatcgaaaaactgctgtgctttttgtttgcggttcgattcgttaaaatccgaagggtttcaaggagaatgagttggagaaaattatcgtaatggcacccggccatgaactgtgggatggaaccatcgcttttgcagcaggctgcccatggaaagcagcagcatttttggggcagagaagatggagccaaacg

SEQ ID NO: 28272 - DNA, 260 bp, Unknown; identical to SEQ ID NO: 28246
  Description of Unknown: RightRegion for integrase B2273 sequence

SEQ ID NO: 28273 - DNA, 247 bp, Unknown
  Description of Unknown: RightRegion for integrase B2274 sequence
tttaaagtttcgcctcaaacatcgcccaaaagcaggctatatcatcagctatcccgttagacccttatgctgccgggcattcacataaggttttcctgcatgtttgacgcatggttccggacctgcaggtgaacccgggcatgcgcgcggtgctgaactaagcagctaatgcgaaattgttgttctttttagcgtttatatttaacgtgtcccttttaacgcagactggacaaactgcggctcgctt

SEQ ID NO: 28274 - DNA, 260 bp, Unknown
  Description of Unknown: RightRegion for integrase B2275 sequence
aaaggtaccagatactataatcctccttataaaataacgattgaacttaagtgtgagtaatttagggatgtattaatccctgactcatagggtactatttcatcccgatagtggtatatcaaggttttaaagcaaaaagaagaggctccgtcactatgacagggcctcttttattattttgaagataagaatcgaactatctcttaatcttcttagccttagctaacgtcttcttaccgaacttaccatcgatagtaatg

SEQ ID NO: 28275 - DNA, 257 bp, Unknown
  Description of Unknown: RightRegion for integrase B2276 sequence
aaaagtcctcgaaatcgtctgatttcgaggacttttgcttttcataagttccgtttttagtgtgccgcttttttctgacccaaacgctgacccaaacgggacggggagcggaaaccatcagaccgcacgggagaggatgctccccatggtttgcgccgccttgagctgggcgtcggtggtgacgtgggcgtaggtgtccagcgtgaaacccgccgagtagtggcccagcatcgaggacaccgttttcacgtccacgc

SEQ ID NO: 28276 - DNA, 109 bp, Unknown
  Description of Unknown: RightRegion for integrase B2277 sequence
ggtccacagacagcacctcgatgctgttttcgagatagattcagctgcgaccagccgtgaggaaataggcaatccgccgcactacggcaccaaaaacaaactatacgag

SEQ ID NO: 28277 - DNA, 260 bp, Unknown
  Description of Unknown: RightRegion for integrase B2278 sequence
tatgcaaaacacgagattgttattgcgattcttgcggctcgtccgcagaaaataaggtgagggcatttgccctcaccttgtttttatctctccacgatcccgtgatagtacgcactcagtttctcctccggtcccggcccgtccttgtcgaacagaaaggcctttgccatttccgcatagaattccgccttgttgcagttgtttttctgcgccacgccggaatagtcagagtacatcatgttcatggcgacgttccacat

SEQ ID NO: 28278 - DNA, 180 bp, Unknown
  Description of Unknown: RightRegion for integrase B2279 sequence
aaaagtcctcgaaatcgtctgatttcgaggacttttgctttttataagttccgtttttgaggtaccgcttttttctggcccaaacgctgaccccaacgggagcggatagcggaaaggactataccgcacgggataggatattgcccatcgtctgggcagctttgagttgagcgtcagtgg

SEQ ID NO: 28279 - DNA, 260 bp, Unknown
  Description of Unknown: RightRegion for integrase B2280 sequence
caaaatttttcgcatacgggcggcagcggtctacccctgccaaaagcacagcggttgtgatacagatgtatcgaaaactgctgtgctttttgtttgcggttcgattcgttaaaatccgaagggtttcaaggagaataagttggagaaaattatcgtaatggcacccggccatgaactgtgggatgggaccatcgcttttgcagcaggctgcccatggaaagcagcagcatttttggggcagagaagatggagccaaacga

SEQ ID NO: 28280 - DNA, 260 bp, Unknown
  Description of Unknown: RightRegion for integrase B2281 sequence
tatgcaaaacacgagattgttattgcgattcttgcggctcgtccgcagaaaataaggtgagggcatttgccctcaccttattttcatctctccacgatcccgtgatagtacgcactcagcttctcctccggccccggcccgtccttgtcgaacagaaaggcctttgccatttccgcataaaactctgccttgttgcagttgtttttttgcgccacgccggaatagtcagagtacatcatgttcatggcgacgttccacat

SEQ ID NO: 28281 - DNA, 260 bp, Unknown
  Description of Unknown: RightRegion for integrase B2282 sequence
ggtccacagacagcacctcgatgttgttttcgagatagattcagctgcgaccagccgtgaggaaataggcaatccgccgcactacggcaccaaaaacaaactatacgaggagcatattcctctaattccacaccgcgcgagacagatgacacgcgatgattatttgtactatgaccttctgattggaatggacactgcaaatatcaggaatatgacaagaattgcaggtggcagtgacagtcagcagaagatatttaaga

SEQ ID NO: 28282 - DNA, 260 bp, Unknown
  Description of Unknown: RightRegion for integrase B2283 sequence
aatgtacccaacatttttgttgttgcggcgttttccgttttgcgcgaacgtaaaaaataaggagagggttaaaccctctccttatttttattccgccacaatcccgtggtaatacgctgccagcttggcttccggccccggcccgtccttatcgaacagaaatgcctttgccatctccgcatagaactcaggcttgttgcacccgaacttcgttgctaccgcgcagtagtcggaatacatcatattcatggtaacattcc

SEQ ID NO: 28283 - DNA, 260 bp, Unknown
  Description of Unknown: RightRegion for integrase B2284 sequence
aaaagtcctcgaaatcgtctgatttcgaggatttttgctttttataagttccgtttttagggtgttgcttttttctgacccaaacgctgaccccaacgggagcgggtagcggaaaccgtcagacagcacgggagaggatgttccccatcgtttgcgccgctttgagctgcgcgtcagtggtgacgtgggcgtaggtgtccagcgtgaaccccgccgagtagtggcccagcatactgctgacggtcttgacgtccacgccg

SEQ ID NO: 28284 - DNA, 260 bp, Unknown
  Description of Unknown: RightRegion for integrase B2285 sequence
aaaggcttgcagtatcatgtcgctccgtatactatacgagtgaaacttaagtgcgaatagcattggggtcaatttggtccccattcatacggggtcacttcatcccaatggctatatatcaagggttggagaaaaagaaaaggggctgttttacttgcggctgccccttctcctaatacattttgatttttatcgatcaatcagatactcttgcaattcgtctcttctagcggtcagcttgtcgacattattgcccgtaa

SEQ ID NO: 28285 - DNA, 260 bp, Unknown
  Description of Unknown: RightRegion for integrase B2286 sequence
tggcaccggtctcccggcctatcgcatttcgagttaatctttgaaaaggcaatatggtgataaccaaggctgatacaggctggcttgtccgctgattttgggcgatgtttgtggagaaagcactgataaaccagcaaaaaacaatgtaggtacgaaaagaataaaaaacgcccgttttggggcaaaaatggcgacttttggggaaaaatgcaagataagatgcaagataagccctgccccaaaagccagataatagtgcg

SEQ ID NO: 28286 - DNA, 260 bp, Unknown
  Description of Unknown: RightRegion for integrase B2287 sequence
actaaggaggttgttattgatattatgggtagccaagagaattgctccccatctgggtaagtttgctattatgtcgcaatatagtaaaacatgcacatgccagcctttatgacgttaacaggattgagggagctgtaagagattatatcaaatctttaggaatagtaattcacatggagaaaagagttagagatgttgaatttgatggacataagataaaaggtttatacttagctgatgatagctttgtagacggggat

SEQ ID NO: 28287 - DNA, 260 bp, Unknown
  Description of Unknown: RightRegion for integrase B2288 sequence
gatactggggatttaactattaattttataggttcaggtgagtctaaaaaaaaacaatagactccctgaactctattttaggggataataaaaaatcgcattttagtatcattagcaccataatctaataaacattcatagcaactttgacaagctcctgcaaatataactaattcatcataacttccattataatttcttaatgcctttactgattcaatataatattttgaatttctataacaatttaaatctaaata

SEQ ID NO: 28288 - DNA, 260 bp, Unknown
  Description of Unknown: RightRegion for integrase B2289 sequence
aaaggtttacgctactacactccaccttataagataacgattgagcttaagtgtgactaatttagggaacatttaagcccacactcatagggtagtaattgataccgatggctttatagcaatccattttgaagtaaaaagaagaggccctgtcgtagtgacggagcctctttgagtttagtcgatgatctctacaatattagttcgtgtaatttcagttatctcgacagttacatttccgtttttatgctcaaccagat

SEQ ID NO: 28289 - DNA, 260 bp, Unknown
  Description of Unknown: RightRegion for integrase B2290 sequence
aaaagtcctcgaaatcgtctgatttcgaggacttttgcttttcataagttccgtttttaggaggtcgctttttcctgacccaaacgctgaccccaacgggagcggatagcggaaaccatcagacagcacgggagaggatgttccccatcgtttgcgccgccttgagctgtgcgtcggtggtaacgtgggcgtaggtgtccagcgtaaaacccgccgagtagtggcccagcatcgaggacaccgttttcacgtccacgccg

SEQ ID NO: 28290 - DNA, 260 bp, Unknown
  Description of Unknown: RightRegion for integrase B2291 sequence
aaaaaacctgctaaattcgcaagaatttggcaggttttttgtatttttcgaagcaattagaaaaatctcaatgctgcaaaattcaactttagttcaactcgctttcaaaagttcacgcctttttcaaaaagatatctcccaggatatcggcgttcctttggtctgcttccgcgattacatggctgtaaatatcgcaggtcgtcgaaacttgagcgtgccccagcctcttggagatcgacacagaatcgacgccgttgaaa

SEQ ID NO: 28291 - DNA, 260 bp, Unknown
  Description of Unknown: RightRegion for integrase B2292 sequence
ggtccacagacagcacctcgatgctgttttcgagatagattcagctgcgaccagccgtgaggaaataggcaatccgccgcactacggcaccaaaaacaaactatacgaggagcatattcctcttattccacaccgcgcgagacagatgacacgcgatgattatttgtactatgacattttgattggaatggacactgcaaatatcaggaatatgacaaggattgcaggtggcagtgacagtcagcagaagatatttaaga

SEQ ID NO: 28292 - DNA, 260 bp, Unknown
  Description of Unknown: RightRegion for integrase B2293 sequence
ggcattcagatcgacttcaatatctccgaggcgcagtatttgaatgggatggagctgtaagcgggctgcatggatgtgtgcaacatcttcggtttaggacatcatgaaagctgaaaccttacaaggtgcaatctgattgagagaagtaggcaaagtcaactactatattttacaaaattgtcattgatttctgccttaaaatgttatattatgtatattgaaaattggaaaggtcacgtttttgcttgaggaggactatt

SEQ ID NO: 28293 - DNA, 260 bp, Unknown
  Description of Unknown: RightRegion for integrase B2294 sequence
gcatttgggttcgtatttctttgtccattaccaagcagcaaaaaagaggcagacgtgtaaagcgtctgcctcttttactataacgaagttcgttataatctaccatcttcctgcgaaatgagaaaatacttgttatattttctcgtaaaggagcatggctatgattaggattttactgtccacgcgcctcggcgaaaggcgctggacgcaggctgatctcgctcgcgcaactggcatacgtccgtctaccatcaacgact

SEQ ID NO: 28294 - DNA, 260 bp, Unknown
  Description of Unknown: RightRegion for integrase B2295 sequence
gatggtcattctgtaacggagcattggccaataccaaggaggaaaaaatgccaaaaataacgaaaatacctgcatcaatcagccgatacacatcagcaccgattgatgcacctgtcaagcgtaaggttgctgcctatgctcgtgtgtcaactgacagcgaagaacagttaacttcatacgctgctcagataagctattacactgaatacataaaaggacgtgaggactgggagtttgttggggtgtacactgatgagggt

SEQ ID NO: 28295 - DNA, 190 bp, Unknown
  Description of Unknown: RightRegion for integrase B2296 sequence
gacacgatccgcatccaatttagagactccgatgtggtgctcgagcaaggattacaataagaaggaaaggcgaaaaaagatggcaatttttatgaccggtgacacccacggtgattttggtaggctacgccctgcggcattccgcgagcaagggggcctgaccaaagacgattacctcatcatctgtggc

SEQ ID NO: 28296 - DNA, 260 bp, Unknown
  Description of Unknown: RightRegion for integrase B2297 sequence
agaaaaaatgcacacggaaatgcacacgaaaaccggactacttgtccgggtgaaggatagcctccagcccttcctcaatgacatcgtcatataaacgttcgtcctcgcggaaaatgtgctggtatgtggtcttgagcatgttgggcgtggcatgccccatgcgcttggcgctgtacttgtccggtatcttcgcctccagcataacagaggcgttcacatggtgcaggtcatggaaccgataatgcggaatgcccgccttt

SEQ ID NO: 28297 - DNA, 109 bp, Unknown
  Description of Unknown: RightRegion for integrase B2298 sequence
aatcagcttttttattttcctattttgattattttacgacctcatagggccagtccatgatgccgccgatgctgtagacgttggtatagccctgttctgtcagcgccgc

SEQ ID NO: 28298 - DNA, 260 bp, Unknown
  Description of Unknown: RightRegion for integrase B2299 sequence
atcctcatcgcagattttggtatcgtgttgctctgtccgctgccacgcggacaaaaataagcagtcgttttgtacgactgcttattttttatacactcatgcgcaggtgccaaatcggcggctgctttttttgtttttctccaccgcatagcgtaataatcttccgatttcaagaaaaaccttagaattactggtagattgttacgaaaggagcgagggcaaatgattaagattctcctgtccaagaagttgggcgaact

SEQ ID NO: 28299 - DNA, 157 bp, Unknown
  Description of Unknown: RightRegion for integrase B2300 sequence
catctgcggacgctgacaatgcagtccgtctggccttatcgacgctcaaacccaagatagcgggtgccctgaaaactcagctttccaatgtcgccctccacaagcattccgtagtccgaaccacttacggtaagctccatgcggtcgccgctctcta

SEQ ID NO: 28300 - DNA, 260 bp, Unknown
  Description of Unknown: RightRegion for integrase B2301 sequence
accaaaagtcctcgaaatcgtcaggagtgtgttgataaagaagtatctagaaagcattgaaaatactaactttattgacagacgcccaaggaaacaggtcgagaaaggacactatctgaaaaggtagtgtccttttttcatgcccttttccaaaaataaggaggaacacaagatggcggagagcatgatatacgattattactacggagacgaaagcagtcaattttctttttaccgcatcccccgccagcttgtcaccg

SEQ ID NO: 28301 - DNA, 260 bp, Unknown
  Description of Unknown: RightRegion for integrase B2302 sequence
aatcggaccctgctgttccggttttattctagagaaaataaagaggtgcaattgccatgaaaaaagtgcaggttataccagctacactacagaattacacagaaaagcctattcatagccagaaaaagagaagggtcgccgggtatgcacgcgtttcaaccgaccgggatgaacagcttacaagttatgaagcacaggttgactattatacaaattatataaagggacgcagcgactgggaattcgctgggatgtatacg

SEQ ID NO: 28302 - DNA, 260 bp, Unknown
  Description of Unknown: RightRegion for integrase B2303 sequence
catctgcggacgctgacaatgcagtccgtctggccttatcgacgctcaaagccgagatagcgggtgccctgaaaacttagctttccaatgtcgccctccacaagcattccgtagtccgaaccatctacttcgagttccatgcggtcgccgctctctacctgaaaggttacataataggtcgtgaacgtatgcatcatcgtattgtccgtatggtggcgagaaacttccgtgcgctttgccaccaccgcagccggaacggt

SEQ ID NO: 28303 - DNA, 260 bp, Unknown
  Description of Unknown: RightRegion for integrase B2304 sequence
tttggtgaaccagtaacaaggatttatcctgctggtgatatggaagaggtggacgcttagtatctcttattagggttaatagaaaacttcttcaaagtactacctgtaccagcattattaagcactttcgaagcttgctcattagcggcatctgagaaggtgctttttccattcttaactctgacatttttaccacaattgatacgggcttgaagttgctcattagtgagttcactcgtagagcgattatatagctcctg

SEQ ID NO: 28304 - DNA, 260 bp, Unknown
  Description of Unknown: RightRegion for integrase B2305 sequence
ggtatccaaatcgacttcaatatttccgaggcgcagtatttgaatgggatggagctgtaagtgggttgcatggatgtgtgcaacatgtgaaaagataggcgaaaggagtgattgccacttgtcaacaaaaattagacatcaactttgtagaaaatttgcatatatttttgtggaaaatgatgatatacttttaatgggagtatattctcttaaaatgtttgtatggttttgagaatacacctgccaagcataagaaggga

SEQ ID NO: 28305 - DNA, 260 bp, Unknown
  Description of Unknown: RightRegion for integrase B2306 sequence
ggcttagtggcgtcgttgccgtactgtatctcgaaaaaaggaacagcgttgctgcgatagcgttcgatgagtttctgaacgccgccgcagatgacgatggctcttcagatgttgtagctcggtgccgagagcgcgaattcggcggagaccttttccttgcctctgcaaaggaaatgacggccgtcgtcgtagtgcttgatggtgccgaagggatgttcgctggtctgctggcggagcttctgctggcgaatgtctctccg

SEQ ID NO: 28306 - DNA, 260 bp, Unknown
  Description of Unknown: RightRegion for integrase B2307 sequence
agtgaagaagcagggacttgcagacaaattttatgtagattcagcagctacatcctatgaggaaattggaaatccggttcatccgggttcaagaaggaagctggcggaggctggaatttcctgtgcggggaagtatgcccgccatatggagaaatgcgattatgctgaatttgattatttaatagggatggatcgtgcgaatatccgtaacatgacaaggattgcagggggagatcccgataggaaaatatataaaatga

SEQ ID NO: 28307 - DNA, 260 bp, Unknown
  Description of Unknown: RightRegion for integrase B2308 sequence
agcaaaagagcgatacagcaaacgctgtatcgctctttttacgttaacggtaatcagtaattcagaccgaagccgctgcggtagtagttgccgtcggcatcgcagtaggcgtagctgccgcccttgacgttggcgaggatagcgggatcaatgtactgatccttatcgtagccgggcacgtcgttgggagaggcgcagatctcgcgcaccacaccgtcgatctcctgctcggtgatggcaatgacggcggggtcagagac

SEQ ID NO: 28308 - DNA, 260 bp, Unknown
  Description of Unknown: RightRegion for integrase B2309 sequence
catctgcggacgctgacaatgcagtccgtctggccttatcgacgctcaaagccgagatagcgggtgccctgaaaactcagctttccaatgtcgccctccacaagcattccgtagtccgaaccatctacttcgagctccatgcggtcgccgctttccacctgaaaggtcgcataataggtcgtgaacgtatgcatcatcgtattgtctgtatggtggcgagaaacttccgtgcgctttgccaccaccgttgccggaacggt

SEQ ID NO: 28309 - DNA, 260 bp, Unknown
  Description of Unknown: RightRegion for integrase B2310 sequence
aaaagtcctcgaaatcgtctgatttcgaggacttttgcttttcataagttccgtttttagtgtgccgcttttttctgacccaaacgctgaccccaacgggagcgggtagcggaaagcatcagacggcacgggagaggatatttcccatggtttgcgccgctttgagttgggcgtcggtggtgacgtgggcgtaggtgtccagcgtgaagcctgcggagtagtgacccagcatcgaggacaccgtttttacatccacgccg

SEQ ID NO: 28310 - DNA, 260 bp, Unknown
  Description of Unknown: RightRegion for integrase B2311 sequence
gatacgatccgtatccaatttagagactccgatatcgtgctcgagcagggattacaatgaaaagggaaggcgaaaaaagatggcaatttttatgaccggtgacacccacggtgatttcagcaggctccgccctgtggcattccgcgagcaagggggcctgaccaaagacgattacctcatcatctgtggcgactttggcggcgtctgggatggcagtgagattgaacaacaatggctcgactggctggaggacaggtcat

SEQ ID NO: 28311 - DNA, 260 bp, Unknown
  Description of Unknown: RightRegion for integrase B2312 sequence
tttggtgaaccagtaacaaggatttatcctgctggtgatatggaagaggtggacgcttagtattttttattagggttcactgagtactttttaagctttgaagctactcgaccagcgttactattagcattggtgacgttggttttttcagcttctgttaagtctgaatagtccagcttccaagccttattacacttaatctgagcatcgagaatatcatttctgatagctggagcgtaaccggatacatcgctaatact

SEQ ID NO: 28312 - DNA, 94 bp, Unknown
  Description of Unknown: RightRegion for integrase B2313 sequence
agtgaggggatagtagtagaaaaaactcagtatgtatctaggcagaaacggcagcggtaaaaccacctttatcaagcttatgtgccgtctttat

SEQ ID NO: 28313 - DNA, 260 bp, Unknown
  Description of Unknown: RightRegion for integrase B2314 sequence
atagtagtagagaaaactcagtatgatccactacttagaggattatatgtactgtactagaaagctggggctttatgtgcagttagtagcataaattatataggggttatctaaatatatttacctcctgtgattaggttatataaagactaaatcacaggaggtttatttttatgataacagtagaaaaactggaaaagggtacttattttgatgatgcttttaaaatctcatttagatacgatcccactactgtagct

SEQ ID NO: 28314 - DNA, 260 bp, Unknown
  Description of Unknown: RightRegion for integrase B2315 sequence
tttggtgaaccagtaacaaggatttatcctgctggtgatatggaagaggtggacgcttaggaattggtattgttaccaatcaataagtgcccttcttattcggattcacactaaacttccgtaaagcattacccgacttgagtacctttgcagcacctgaattagctgagtctgtgaaggtgctttcaccattcttaacactaacgttcttagaacatgctacacgggcttttagcgcttcatctgatagctcacttgcc

SEQ ID NO: 28315 - DNA, 260 bp, Unknown
  Description of Unknown: RightRegion for integrase B2316 sequence
gagcaatggaacatagaaaaactgaacaaatcagaatcggaacatagaaaaggagcatagaaaaagtgacttatttggtggacactgaccgtatgcatactcacaccgctaaaaaagtccgattggaatgggagtttttgggtaatatggtgggttattctgtgtacggttatatgatttatattgtgttgttttatacttcataaatgattcttgttttgccttaaaaactgcataaatattggaataattgtataata

SEQ ID NO: 28316 - DNA, 260 bp, Unknown
  Description of Unknown: RightRegion for integrase B2317 sequence
gagcaatggaacatagaaaaactgaacaaatcagaatcggaacatagaaaaggagcatagaaaaagtgacttatttggtggacactgaccgtatgcatactcacaccgctaaaaaatccgattggaatgggagtttttgggtaatatggtgggttattctgtgtacggttatatgatttatattgaagcattttttactacataaatgattatcgttttgtctaaaacaccgcatagatataggaattatcataaacaga

SEQ ID NO: 28317 - DNA, 260 bp, Unknown
  Description of Unknown: RightRegion for integrase B2318 sequence
agtaaaggttttgttagatgcactgggagtctggtgtgtgattgcaatctgtggaaataatcctgagaaggggattaagtatcgccacacatggaatatcgtaaaaataggaggtacatattatcatctggatgcgacctttgataataccctggggaaagatcgtgagacttctgaaatccgctatgattatttcaatctggatgattcacagattttcagggatcatgagcctcttattgcgccggcgcctcactgcg

SEQ ID NO: 28318 - DNA, 260 bp, Unknown
  Description of Unknown: RightRegion for integrase B2319 sequence
tttacaccaagaaacaaaaaatatctacaagatattaaacaaaacaatatcagtgtgtgaccaataatatcgagaagcggacccgaaatgcggttgaggtagcgttttatcttctgttccgaacaggtgcattttcttgtcggatcaccgtaatatccgcacggacatgggttcattgcggcaaccaccataatcgaacacggataggtgcatttctgacctgctcttgaaattgtgatagagccgtcctcaatcggctg

SEQ ID NO: 28319 - DNA, 260 bp, Unknown
  Description of Unknown: RightRegion for integrase B2320 sequence
gaacggttaagctataaaagaacaagagtaacgatagcagatgagcagcacaataattaaaatgatctgtatgtgttctcgtttaaatatgatagaccacttacagacaaaataaggctacaaaaatcccaaactgtgttgtcgaactgtgctgtcgaatcttgtcgaacgattctgcttgcaattatcgacagagtatgctattttataactgtacaaaagagaacaagccatgcccgctaaacaaggctaaaacgtac

SEQ ID NO: 28320 - DNA, 260 bp, Unknown
  Description of Unknown: RightRegion for integrase B2321 sequence
aaaggtacgaaatactacaatcctccttataagataacgatcgaacttaagtgcgattaatttagggtacatttaaaccctcattcatggggtactacttgataccgatagcgtcatatcaatggtttgtaaagcaaaaaagaaaaggccctgtcgtaatgacggagcctttttcttatttaattctttatatggagttcttccatttcctctttcatatgttctaccataccattaccacccaatcctttgtaggcgtg

SEQ ID NO: 28321 - DNA, 260 bp, Unknown
  Description of Unknown: RightRegion for integrase B2322 sequence
ggtgttttggggaaaatcgggtgtaaatatactaccaatttcagctgtattgtgctataatggaagcgaaaacggcggagggggaacggaaaatgaaaaagctgcttgctgtgtgcctgacggcgctcgtttgctgggtttgcgcggggtacgcggaagaaacgcgggtcggcgatacggtcattttcgggcaatatgaacaggatggcaatcttgataacggcagtgagcccattgcgtggcaggtgctggatgtgcag

SEQ ID NO: 28322 - DNA, 260 bp, Unknown
  Description of Unknown: RightRegion for integrase B2323 sequence
gcaattcccatttttcaggcgagaaagaccatttccgttgaatctgtaaccagtttgtaatatttgtgacaacaaaaaatcccccgccagctttcctttcggattgccagcgggggattttcatttcagtgcagaagcatcgtcagttcataggccacaaggccggaaaccaacgccgcaattacagcccaccaaagtttgttcccaaatgttccggggactttttccagcgcggtcaggcggtcgtcctgctttttgtt

SEQ ID NO: 28323 - DNA, 260 bp, Unknown
  Description of Unknown: RightRegion for integrase B2324 sequence
gatggttgttcaggcgggagatttgttcgtacagccccacttccgccgcataaaaaatgacctcaagctcaggcttggggtcatttttttatcttgcggagaagaggggtcgaacagcacggccgcccgacggttcgtaccatgatatggacaaataatccccttgatgcatcaggccgctgtctctgttttacggagacggcggcctgattcattatttttgactactttttgtcccggggagcccccggaaaaatcct

SEQ ID NO: 28324 - DNA, 260 bp, Unknown
  Description of Unknown: RightRegion for integrase B2325 sequence
gcctctaaaaacctgagctttgaagagcaggaaaatttaatttataatcgtttgatctaatattgctttaattcttggggatgtaagattaatacctctgattatgttttgaacatattttcctttgtatacattatttttaattattttttgtttacactccacattttcaatgaccatagaaactagattcccctgactgtctaagataggtgaaccagaacatcctcgcacatgttccttatcaggattatccgggg

SEQ ID NO: 28325 - DNA, 260 bp, Unknown
  Description of Unknown: RightRegion for integrase B2326 sequence
tttttctctgtaccgaaacacagatgcaaaatcgccgttttccctaatgaagtacgctaacagtactccgctgtggtatggctctgccagtccaggcggccccacagccaccccaacaagcacacagaggccgactctgtttgacaaacctacatttcgtgcaaattccccgctgggaccgtcccgtctcccggcgggttgcggcccggggcaaaaagagggttgacaaaccgccgcagcggtggtagagtacggataat

SEQ ID NO: 28326 - DNA, 260 bp, Unknown
  Description of Unknown: RightRegion for integrase B2327 sequence
gagcaatggaacatagaaaaactgaacaaatcagaatcggaacatagaaaaggagcatagaaaaagtgacttatttggtggacactgaccgtatgcatactcacaccgctaaaaaatccgattggaatgggagtttttgggtatgtggtgagttattctgtgtacggttgcataatttatattgtgttgttttatacttcataaatgattcttgttttgccttaaaaactgcataaatattggaataatcatataataaa

SEQ ID NO: 28327 - DNA, 260 bp, Unknown
  Description of Unknown: RightRegion for integrase B2328 sequence
aaaggtatgcagtactacaatcctccttataaaataaccatcgaacttaagtgcgactaatttagggtacatttaagtcctcattcatagggatataattgataccgaaagtgatatatcaaggtttatagagcaaaaagaagagggcttgttagtcctcttccagctttttgagcttcaaggtcaacttcacacatttcatggtatgtcttgttgtcttattaccccaatatatattatcgtctgcattccattcatca

SEQ ID NO: 28328 - DNA, 260 bp, Unknown
  Description of Unknown: RightRegion for integrase B2329 sequence
gtagaaaaatctcagtatgtatctagggagaaacggcgctggaaaaacaacgctgtttaactgtttgaacagggatttgaaggcggacagcggcaatttctatatagaagatgaaaacggcgttcgtcgtgaggtagccgcagaggatattggatatgtactctctacccctactgtaccggaatttcttacaggcagggagtttttgaaattctttatggacatcaacgagaagtctatcaaaaatccgaaaagcattg

SEQ ID NO: 28329 - DNA, 260 bp, Unknown
  Description of Unknown: RightRegion for integrase B2330 sequence
agtaaaggttttgttagatgcactgggagtctggtgtgtgattgcaatctgtggaaataatcctgagaagggaattaagtatcgccacacatggaatattgtaaaaataggaggtacatattatcatctggatgcgacctttgataataccctgggaaaagatcgtgaaacttctgaaatccgctatgattatttcaatctggatgattcacagattttcagggatcatgagcctcttattgcgccggcgcctcactgcg

SEQ ID NO: 28330 - DNA, 260 bp, Unknown
  Description of Unknown: RightRegion for integrase B2331 sequence
tttacaccaagaaacaaaaaatatctacaagatattaaacaaaacaatgtcagtgtgtgaccaataatatcgagaagcggtcccgaaatgcggttgaggtagcgttttatcttctgttccgaacaggtgcattttcttgtcggatcaccgtaatatccgcacggacatgggttcattgcggcaaccaccataatcgaacacggataggtgcatttctgacctgctcttgaaattgtgatagagccgtcctcaatcggctg

SEQ ID NO: 28331 - DNA, 260 bp, Unknown
  Description of Unknown: RightRegion for integrase B2332 sequence
agtgaaagttcttctcgatgcgctgggagtctggtgtgtgatcgcaatatgcgggaataatccggaaaaaggaattaaataccgtcatacctggaacattgtccggatcggcggtgcatattatcatctggatgcaacatttgataatacacttggaaagagtgataaagtcgaagatatccgttatgattactttaatctggatgatggacatatttttaaagatcacgaaccactgatcgcggcggcaccgcactgta

SEQ ID NO: 28332 - DNA, 109 bp, Unknown
  Description of Unknown: RightRegion for integrase B2333 sequence
ccaatgaaaaatcccacttgtttttcggaaaaagcgggattttattttttgatatcatgaaatagttttgataaaaaattgtcgtactactgactttatgtgcatttgt

SEQ ID NO: 28333 - DNA, 260 bp, Unknown
  Description of Unknown: RightRegion for integrase B2334 sequence
ttaaggcgttttaagcccgttggggtactcgtgtacccctcgggctttttcgtgccttaaatcgcctctgaagcggtctgaggacgttcgagcgcccatgtgcatctcgcatccgctcgatgcaagggtggccgccctgcgggcggcggttggatgtgggcggacgtacagaaggggtgcggcatgggcttgggaggttatgccgatttgcgcgttccgtcgttcgtgcacactaccctgcacaccatgcacactatcct

SEQ ID NO: 28334 - DNA, 260 bp, Unknown
  Description of Unknown: RightRegion for integrase B2335 sequence
gatgattgttcagacgggagatttgttcgtacagccccacttccgccgcataaaaaatgacctcaagctcaggcttgaggtcattttttatcttgcggagaagaggggtcgaacagcacggccgcccgacggttcgtaccatgatatggacaaataatccccttgatgaatcaggccgctgtctctgttttacggagacggcggcctgattcattatttttgactactttttgtcccggggaacccccggaaaaaccctg

SEQ ID NO: 28335 - DNA, 260 bp, Unknown
  Description of Unknown: RightRegion for integrase B2336 sequence
gagcaatggaacatagaaaaactaaacaaatcagaatcggaacatagaaaaggagcatagaaaaagtgacttatttggtggacactgaccgtatgcatactcacaccgctaaaaaatccgattggaatgggagtttttgggtatatggtgggttgttctgtgtacggttatatgatttatattgaagcattttttactacataaatgattatcgttttgtctaaaacaccgcatagatatgggaattatcataaacagaa

SEQ ID NO: 28336 - DNA, 260 bp, Unknown
  Description of Unknown: RightRegion for integrase B2337 sequence
atcgtcagattgaaaggcggtttggaaattaaaaaggcccttgatggagaaagagattaaattgaaagtgtatatcttaaagaggctcaccctaaaatgtagggcgagcctcctttgcggtttagctaactatgaggagaagtaagtgccttttgcagcctgcttatctccatgtctaccattcgttttctgttgtaaagcaacaggccttttgtcgctttcaccaaatcttttgttccggaatgaaataccgcaaccaa

SEQ ID NO: 28337 - DNA, 260 bp, Unknown; identical to SEQ ID NO: 28321
  Description of Unknown: RightRegion for integrase B2338 sequence

SEQ ID NO: 28338 - DNA, 260 bp, Unknown; identical to SEQ ID NO: 28335
  Description of Unknown: RightRegion for integrase B2339 sequence

SEQ ID NO: 28339 - DNA, 260 bp, Unknown
  Description of Unknown: RightRegion for integrase B2340 sequence
gagcaatgggacatagaaaaactgaacaaatcagaatcggaacatagaaaaggagcatagagaaagtgacttatttggtggacactgaccgtatgcatactcacaccgctaaaaaatccgattggaatgggagtttttgggtatatggtgggttattctgtgtacggttatatgatttatattgaagcattttttactacataaatgattatcgttttgtctaaaacaccgtatagatatgggaattatcataaacagaa

SEQ ID NO: 28340 - DNA, 260 bp, Unknown; identical to SEQ ID NO: 28335
  Description of Unknown: RightRegion for integrase B2341 sequence

SEQ ID NO: 28341 - DNA, 260 bp, Unknown
  Description of Unknown: RightRegion for integrase B2342 sequence
tgtgccaaaaagacccgaaaccttacggtttcgggtctttttgtttgcataagttgctaatttcggatgctactttttcctgacccaaacgctgacccaaacgggcgtaaactataccccataaagcggacacaggaatttgacccatgtccccataggatggatacgcgcatggcccaaggtgtcgaacgaacgtgctctctcgttcctgacggttttttgtccgttcggcaaaccacgtatctaaatctttcttacag

SEQ ID NO: 28342 - DNA, 260 bp, Unknown
  Description of Unknown: RightRegion for integrase B2343 sequence
aaaggtatgcagtactacaatcctccttataaaataaccatagaacttaagtgtaactaatttagggtacatttaagtcctcattcatggggtactacttgataccgatagcttgatatcaagggttgcaaagcaaaaagaagaggccctgtcgtagtgacggagcctttttcttatttaattctttatatggagttcttccatttcctctttcatatgctctaccataccattaccacctagccctttgtaggcgtgat

SEQ ID NO: 28343 - DNA, 260 bp, Unknown
  Description of Unknown: RightRegion for integrase B2344 sequence
aaaggtatgcagtactacaatcctccttataaaataaccatagaacttaagtgtgactaatttagggtacatttaagtcctcattcatggggtactacttgataccgatagcttgatatcaagggttgtaaagcaaaaagaagaggccttgtcgtagtgacgaagcctctttatcttaattttttatatgcagttcttccatttcctctttcatatgctctaccataccattaccacctagccctttgtaagcgtgatac

SEQ ID NO: 28344 - DNA, 109 bp, Unknown
  Description of Unknown: RightRegion for integrase B2345 sequence
tgtgccaaaaagacccgaaaccttacggtttcgggtctttttgtttgcataagttactaatttcggatgctgcttttttctgacccaaacgctgaccccaacgggagcg

SEQ ID NO: 28345 - DNA, 260 bp, Unknown
  Description of Unknown: RightRegion for integrase B2346 sequence
gatggttgttcaagcgggagatttgttcgtacagccccacttccgccgcataaaaaatgacctcaagctcaggcttgaggtcattttttatcttgcggagaagaggggtcgaacagcacggccgcccgcaggcggcaagcaatcagcccggtgcaacggcgacgaccgcagccagcggctgaaacagggaggagctgttggggccgcgttctgatttttcaaagccctgccaaggggctgcggaaaaatcagctaacgca

SEQ ID NO: 28346 - DNA, 260 bp, Unknown
  Description of Unknown: RightRegion for integrase B2347 sequence
cggttggtggaggcgatgggagtcgaaccatcatttatgatttcacgagcaatacgatagcgaaaaaaccttaaaactacggcaattttcttttgactaatatcattttataaatcaacactcattcgtaagatgtaaaagtgcgtgagtaagtgcgtgagtgccttgcaagcaaaacagccccgaggaaccgtcaggctccccggggctggtgctatactatgactttattggcgttaacattttcgtgatgccgcgaa

SEQ ID NO: 28347 - DNA, 260 bp, Unknown
  Description of Unknown: RightRegion for integrase B2348 sequence
gatggttgttcaagcgggagatttgttcgtacagtcccacttccgccgcataaaaaatgacctcaagctcaggcttgaggtcattttttatcttgcggagaagaggggtcgaacagcacggccgcccgacggttcgtaccatgatatggacaaataatccccttaatgaatcaggccgctgtctctgttttacggagacggcggcctgattcattatttttgactactttttgtcccggggagcccccggaaaaaccctg

SEQ ID NO: 28348 - DNA, 260 bp, Unknown
  Description of Unknown: RightRegion for integrase B2349 sequence
gagcggtcccgggtgtcatatccgggaccgctgctgttcaaagctgattttacacgttaaagcggaagtagatcatgtcgccgtcctggaccacatactccttgccctcgctgcggagctggcccttttccttggcggcgttgacgctgccgtacttgatcatatcgtcgtaggcaatgacctccgcccggatgaagccccgctcgatgtcggagtggatcttgccggcggcctggggggccttggtgccctttttgatg

SEQ ID NO: 28349 - DNA, 260 bp, Unknown
  Description of Unknown: RightRegion for integrase B2350 sequence
tgtgccaaaaagacccgaaaccgtaaggcttcgggtctttttgtttgcataagttgctaatttcggatgctactttttcctgacccaaacgggacgtaaactgtacccaagaaaatggacacggaaatttgacccatgtccccagagggatggacacgtgcgtgactcaaggcgtcaaacgaatgtgccctcttgtttctgaaggtttttgtccgtttgacaaacagtgtatctaaatcttttttatcggatgtctaata

SEQ ID NO: 28350 - DNA, 260 bp, Unknown
  Description of Unknown: RightRegion for integrase B2351 sequence
tgtgccaaaaagacccgaaaccgtaaggtttcgggtctttttgtttgcataagttgctaatttcggatactgctttttcctgacccaaacgctgacccaaacggaacgtaaactgtacccaagaaaatggacacggaaatttgacccatgtccccagagggatggacacgtgcgtgactcaaggcgtcaaacgaatgtgccctcttgtttctgaaggtttttgtccgtttgacaaacagtgtatctaaatcttttttatc

SEQ ID NO: 28351 - DNA, 260 bp, Unknown
  Description of Unknown: RightRegion for integrase B2352 sequence
gagcaatggaacatagaaaaactgaataagtccgaaacggaacatagaaaaggagcatagaaaaaagggacttatttggtggacactgaccgtatgcatactcacaccgctaaaaaatccgattggaatgggagttttggggtaatatggtgggttattctgtgtacgattatatgatttatattgaagcattttttactacataaatgattcttgttttgccttaaacactgcataaatattggaataatcatatacta

SEQ ID NO: 28352 - DNA, 260 bp, Unknown
  Description of Unknown: RightRegion for integrase B2353 sequence
aggccatctgcctttggcagatggccttatttttgggcttcgctcgcgcggctcgcgtgaccctgctttactcgatggcgtgcaggaagtcctcccaggcgttgtccacggcgttacccatgtgctgcatggtgcggcccacgcaggtcttcatggacctttgccggggtgagacggccatgcccaccgctgcgccgagcaccatgccggcgccgataccgcaccagaacgcggtattttccatttcactcacactcctt

SEQ ID NO: 28353 - DNA, 260 bp, Unknown; identical to SEQ ID NO: 28316
  Description of Unknown: RightRegion for integrase B2354 sequence

SEQ ID NO: 28354 - DNA, 260 bp, Unknown
  Description of Unknown: RightRegion for integrase B2355 sequence
cggttggtggaggcgatgggagtcgaaccatcatttatgatttcacgagcaatacgatagcgaaaaaaccttaaaactacggcaattttcttttgactaatatcattttataaatcaacactcattcgtaagatgtaaaagtgcgtgagtaagtgcgtgagtgccttgcaagcaaaacagccccgaggaaccgtcaggctccccggggctggtgctatactatgactttgttggcgttaacattttcgtgatgccgcgaa

SEQ ID NO: 28355 - DNA, 260 bp, Unknown; identical to SEQ ID NO: 28333
  Description of Unknown: RightRegion for integrase B2356 sequence

SEQ ID NO: 28356 - DNA, 260 bp, Unknown
  Description of Unknown: RightRegion for integrase B2357 sequence
gtttcgttgtctgatgggtcgcacttctgtagtgattgtagaagctatatctatgagtgataaaataatagtattatcaaaaagaccagcttctgtaaaaagtgttcatgaaataaaccttgtaacagaaggagaaaaaactcctctaaaaactcgtaaggtgccacaattccaatactactttgacattctatggaaggagttggattcttatgaaatcaaacaataactactcagaaggatatgccaactaccttaaa

SEQ ID NO: 28357 - DNA, 260 bp, Unknown
  Description of Unknown: RightRegion for integrase B2358 sequence
aaaggtacaaaatattgtaaccctccttataagataacgatcgagcttaagtgtgactaatttagggtacatttaagccctcattcatgaggacctatatgataccgatggctttatatcaaggtaaaaagaagaggccctgtcgtagtgacggagcctcttttaattaaattagcattcgatatcaacgatacgatacttatgctttttgctatttttcatcttctcatctccatgtcatcaatttcgaactcgactct

SEQ ID NO: 28358 - DNA, 260 bp, Unknown
  Description of Unknown: RightRegion for integrase B2359 sequence
ttacgttccaaaaatacattaattctttttgagaaacttgaaacttatttaattgcataattctctttttctcgtatcatgcatggcatagggatttgtttatgcttgaatgtgaaaaattaaaatttgaaaaagctgaattgttaaaacagcgtgttaaaaagatgtgcgctctttcgtttttgcatattggaataaatactttaaacgataatattaatattgagttaaaccaaaaagaagcgactctggaagtttta

SEQ ID NO: 28359 - DNA, 260 bp, Unknown
  Description of Unknown: RightRegion for integrase B2360 sequence
gagcaatggaacatagaaaaactaaacaaatcagaatcggaacatagaaaaggagcatagaaaaaagggacttatttggtggacactgaccgtatacatactcacaatactaaaaatgcgattggaatgggaattttttatatgtggtgggttattctgtgtacggttatatgatttatattgaagcattttttactacataaatgattatcgttttgtctaaaacaccgcatagatataggaattatcataaacagaaa

SEQ ID NO: 28360 - DNA, 260 bp, Unknown
  Description of Unknown: RightRegion for integrase B2361 sequence
atagtcttaataggatctgatgaaaagagacctacaataaacccgctctttcacctttaggtgataagagcagacgatctaaaaaaaggtaaagtaactctttctatgctttcattatatattatcccaacatcaattagacctatcattctaaagggttgtagtccgtaaatattggccctgaaactatcaggatatattttcattataccgattgaattggccacaatatatgcctccctattttatcttttgaaata

SEQ ID NO: 28361 - DNA, 109 bp, Unknown
  Description of Unknown: RightRegion for integrase B2362 sequence
gcgcacaaggtatactctgatggagcaaaaaagcgcacggacacggattcatcgcactgattaaaataaaatcggcaggatacgtcaggctggcattcacgcgtgatat

SEQ ID NO: 28362 - DNA, 260 bp, Unknown
  Description of Unknown: RightRegion for integrase B2363 sequence
aagctgattatccagtttcagtcgggaatcgttatggagcaggaaatcagatatgagtaagtgatgggcagggatgacaactgaatagggaaacggaattcctgcctgtaaaataaatccgtgggatttatggtaagaataaaatgcccgatgggttcgggtgttttattgttggtgtaaacgacaggaagtttaaaaatgaagattgtggaaacctgttgatatcaagtataattaaaataaaggtaactgttcagcag

SEQ ID NO: 28363 - DNA, 260 bp, Unknown; identical to SEQ ID NO: 28321
  Description of Unknown: RightRegion for integrase B2364 sequence

SEQ ID NO: 28364 - DNA, 260 bp, Unknown
  Description of Unknown: RightRegion for integrase B2365 sequence
aaaggtatgcagtactacaatcctccttataaaataaccatagaacttaagtgtaactaatttagggtacatttaagtcctcattcatggggatatacatgataccgatagcggaatagcaaggtttataggagaaaaagaagaggccttgtcgtaatgacggagcctcttttacacttatagtctttcttcgggatgatctaagaaatacaacaactcttctctttgatattcatagtcaccctgggtaatcatcgccc

SEQ ID NO: 28365 - DNA, 260 bp, Unknown
  Description of Unknown: RightRegion for integrase B2366 sequence
ggtcagaggacacaggaggttaagattatttacaattttgttggggaaatgtcaaggtagaatttagacgctaaatacttttaatttatatcaaaagtgatacaacaattttcttttaatgctatcaggcaataaagttattcctttggccagagtaaaagggataactttattttgctaaagcatactaaaaagggcgcgttgcagaaaattatccgcaacacgccctcttctataagtccttatgtcaaaatcaaatt

SEQ ID NO: 28366 - DNA, 260 bp, Unknown
  Description of Unknown: RightRegion for integrase B2367 sequence
aaaggtttacgctactacactcccccttataaaatagccatcgagcttaagtgtgactaatttagggtacatttaagcccttactcatagggtattaattgataccgaaagagatgcagcaaggatttaagtaatatgcgttttataaattaagaataacaaaaggaaatatatgtatttttgtcgaatgtagtaagtatgaaaggagggattgttatgaaaaaatttgaaattctctattgcttcgacaaagaccatta

SEQ ID NO: 28367 - DNA, 260 bp, Unknown
  Description of Unknown: RightRegion for integrase B2368 sequence
gggggccatgacgcttcctctgtgccgatatcggtcagcaggcccttgagctcggggtagggcatggagtagcgctgggagaggtagcgcagtgacgcgccgagctctccgtccgggcctccatatatcaattaaccataaaatgagcatggctaaaggacgaggcggtagtggatggtgagggtgttggcggctttgctccaggtgatattgtcggcaacgctgcggacggcggcgttcttctcggcgacggtggcgtc

SEQ ID NO: 28368 - DNA, 260 bp, Unknown
  Description of Unknown: RightRegion for integrase B2369 sequence
gttttgcattgcagcaggaaaacacaaaaaaatttctgcccactgccgcaacctgcgtgaaacgggctgttttgtgcgcgaatggcagaccacggaaggcagaacttgtgctataatataaaaaaacagggaagcagaaggaacagggggtgcagctatgaacctgcggacggcgatcgtagaagacagcaagccggatgccgaacggttgaaacagctgctgaaaaaggcatttgaaaatgagaacatatcctgcagct

SEQ ID NO: 28369 - DNA, 260 bp, Unknown
  Description of Unknown: RightRegion for integrase B2370 sequence
aaaggtttacgatactacactcctccttataagatagacatcgatcttaagtgcgagtaatttcgggatgatgtaacgcctcactcatggggtactatttgatgcctaaatagatttaccaatggtttgaacgcaaaaaagaaagagagcctgttaagactctcccgcggtaaagaatttttccacctcttcgagattatgtagtatcttttcttcaggaacacccattatacgtgcgtgttctacgctgaatatcaaag

SEQ ID NO: 28370 - DNA, 260 bp, Unknown
  Description of Unknown: RightRegion for integrase B2371 sequence
gggggccatgacgcttcctctgtaccgatgtcggtcagcaggcccttaagctcggggtagggcatggagtagcgctgggagaggtagcgcagcgacgcgccgagctcgccgtccgggcctccatatatcaattaaccataaaatgagcatggctaaaggacgaggcggtagtggatggtgagggtgttggcggctttgttccaggtgatattgtcggcgacgctgcggacggcggcgttcttttcggcaacggtggtgtc

SEQ ID NO: 28371 - DNA, 260 bp, Unknown
  Description of Unknown: RightRegion for integrase B2372 sequence
ggtaatactcaaaatgtaacagtatatttcattggaagtggagacgtaaaaaaaaagtagatcctctacttccagatttataccaattgttgcaaattcaaccacacagcatgacctgtatctaacagaacaatattttcagcaaactcttttaaggcgtattgctgacaaacttttgtgtcaagttttttataattaatatcctcttttggaatcttaagaacaactactcctttttcatttaattcttttctaatatc

SEQ ID NO: 28372 - DNA, 260 bp, Unknown
  Description of Unknown: RightRegion for integrase B2373 sequence
ggggttcatgacgcttcctcggtgccgatgtcggtcagcaggcccttgagctcggggtagggcatggagtagcgctgggagaggtagcgcagcgacgcgccgagctcgccgtccgggcctccatatatcaattaaccataaaatgagcatggctaaaggacgaggcggtagtggatggtgagggtgttggcggctttgttccaggtgatattgtcggtgacactgcggacggcggcgttcttttcggcaacggtggtgtc

SEQ ID NO: 28373 - DNA, 260 bp, Unknown
  Description of Unknown: RightRegion for integrase B2374 sequence
ccagctgggctgttgctgttttacatagcacgaccaaggcaaagagaccgtagatcgtaatctgcggtctcttcttttttggggggcgggggattaatgctgcactacatagcagtagtacgccgcggccttgtcctcgacggcgtccttgtcatcgagccaagcgtgcgccatgtccgcgtaaaactcggcgttgccgccgagaccgtactttttcgcgacctcgcaaaaatcggagtacatcgcgcacattatcgcgt

SEQ ID NO: 28374 - DNA, 260 bp, Unknown
  Description of Unknown: RightRegion for integrase B2375 sequence
ggggtccatgacgcttcctctgtaccgatgtcggtcagcaggcccttgagctcggggtagggcatggagtaacgctgggagaggtagcgcagcgacgcgccgagctcgccgtccgggcctccatatatcaattaaccataaaatgagcatgactaaaggacgaggcggtagtggatggtgagggtgttggcggctttgttccaggtgatattgtcggtgacgctgcggacggcggcgttcttttcggcaacggtggtgtc

SEQ ID NO: 28375 - DNA, 160 bp, Unknown
  Description of Unknown: RightRegion for integrase B2376 sequence
acctgggacggcaaaaacgtgtccatcgaagtattcggagaaaaaacgctcccaaaatagcgggggcgttgccgtcgtggaaaggtaggtttatccaccgtaatgacgcccttgccgatgtactctacgcagcgactatccacgaagaggatgtcgatgg

SEQ ID NO: 28376 - DNA, 260 bp, Unknown
  Description of Unknown: RightRegion for integrase B2377 sequence
aacccggtgtactttttcaagaaagtgttcgccgtggtggtaaacttcacgcggagatagtgaaaaataaaagcgtcagggcttaggctctggcgcttttgttatgcccggtcgtctctcgatagggctcgagaaatagagcctgctcagctcggcagctatcaccgttcctctctggcctcctcggccgcgtggctattgtttacgggttgcacgggactggctgcggcgcctgctgccttcttgtctcgttttaaggt

SEQ ID NO: 28377 - DNA, 260 bp, Unknown
  Description of Unknown: RightRegion for integrase B2378 sequence
agcggtgaaggttcttctggatgcgctgggagtatggtgtgtgatcgcaatttgcggtaacaatccggaaaaaggaatcaaataccggcacacctggaatattgtaaagataaatggcatatattatcatttagatgccacttttgataacagtctgggaaaagatcacgaaaacacggaaatccgctatgactatttcaacctggatgatcagcagatctttcgcgatcatgagcccttgatcgcacctgcgcctcatt

SEQ ID NO: 28378 - DNA, 260 bp, Unknown
  Description of Unknown: RightRegion for integrase B2379 sequence
aacccggtgtactttttcaagaaagtgttcgccgtggtggtaaacttcacgcggaaatagcgaaaaataaaagcgtcagggcttaggctctggcgcttttgttatgcccggtcgtctctcgatatggctcgagaaatagagcctgctcagctcggcagctatcaccgttcctctctggcctcctcggccacgtggctattgtttacgggttgcacgggactggctgcggcgcctgctgccttcttgtctcgttttaaggt

SEQ ID NO: 28379 - DNA, 260 bp, Unknown
  Description of Unknown: RightRegion for integrase B2380 sequence
gaaatccattacacggatattggcgtggttgggaatatgaacatcacgaaaagtgcataaaggaaaaggcaggtgatgccaaagcaacacctgcctatccttaaaatacacaaacgattttccaaaacaggcttgaagtgttgcaataatcgtagaaaacagtacgaaacaaggcaatttaggacaatgacagttcaaataccagacatggcattttgaatcttacaccagttttacaccaaatgaaaaaagactcgatg

SEQ ID NO: 28380 - DNA, 260 bp, Unknown
  Description of Unknown: RightRegion for integrase B2381 sequence
gttttgcattgcagcaggaaaacacacaaaaatttctgcccactgccgcaacctgcgtgaaacgggctgttttgtgcgcgaatggcagaccacggaaggcggaacttgtgctataatataaaaaacagggaagcagaaggaacaagggggtgcagcaatgaacctgcagacggcgatcgtggaagacagcaagccggatgccgaacggttgaaacagctgctgaaaaaggcatttgaaaatgagaacatatcctgcagct

SEQ ID NO: 28381 - DNA, 260 bp, Unknown
  Description of Unknown: RightRegion for integrase B2382 sequence
tttttttattccggcaaaaagatcaggggtgcaccgctcgccatgcaggcgggccagtgacacccccgatctcaatcgaaaccgttatctgatttaacacctgcagtgttttccgcgccgtgccgccagctccatgccaaggcccgccagcgtatctctacgctggcggtctttttatgggcgcgggtggattacgcaagccgcgcatctaaaaaagccccgcaggggcttttttccccgccggactgttcggcgggtcg

SEQ ID NO: 28382 - DNA, 260 bp, Unknown
  Description of Unknown: RightRegion for integrase B2383 sequence
aagagagtcatacgaaccaggaagccaccatctacatggttggtggcgtgttcgtattgacttgtccgctcaaagcggaaaaataaaaaaggctaccgtttaggggttcgcccctattcggtagccttttttcatgtttcgtaacctatttcgttatttcctaacaaaagcctgcgggattctaaaattgctgttagaatttaacgaaaaggagcatggctatgattaggattttactgtccacccggcttggcgagcgg

SEQ ID NO: 28383 - DNA, 260 bp, Unknown
  Description of Unknown: RightRegion for integrase B2384 sequence
ccagctgggctgttgctgttttacatagcacgaccaaggcaaagagaccgcagatcgtagtctgcggtctcttctttttttggggcgggggattaatgctgcactacatagcagtagtacgccgcggccttgttttcgacggcgtccttgtcgtcgagccaagcgtgcgccatgtccgcgtaaaactcggcatttccgccgagaccgtacttttttgcgacctcgcaaaaatcggagtacatcgcgcacatgatcgcgtg

SEQ ID NO: 28384 - DNA, 260 bp, Unknown
  Description of Unknown: RightRegion for integrase B2385 sequence
gacactgaagaagcagaacttaaactatatgagcctggagaaataaaaaaaattaactaatagcttgtacttaaatggtaacatgcaaggtgaaaacaatatgttgcattttagaacaccttgcatgcccagtatctaaaagaacaatattttctgcaaattcccttaaagcatattgctgacataccttttgctttaacttatctgtattaacatcctctggtggaacctttaaaacaacaactccagtttcctctaac

SEQ ID NO: 28385 - DNA, 260 bp, Unknown
  Description of Unknown: RightRegion for integrase B2386 sequence
tcaaaagagaaaatcaaggtggtcttcattggaggacttgaagtaactcaaaagctctgatcctattcatctaaaccacgagtttatagtttgcgcgggaatatcaaaaacctcttttgttcaacacggcataagcataagaggttatgaatttttgagtggacatcaatcaaatatataagcagggaatcatgtcgttgttattccggcaattccaaatactaaccggcatagtacgatctttgcacatgggtgattgt

SEQ ID NO: 28386 - DNA, 260 bp, Unknown
  Description of Unknown: RightRegion for integrase B2387 sequence
gagtctgagtgtaccaagtcggagcaagctttgtatcgcttgctccgacttattttataagtcagagcgcgctcacaccgctgcgcctccttttcaccccgcaaacgctttgccggtttgcggggcgaggagacggggactttggaatgtgggcatctttttattggtgccccttcgatttgcggtcaaggtattctgcggtgagtttggcgttttacacatagtcgaaagtatttccttagtcaaaacggaaaaacaaa

SEQ ID NO: 28387 - DNA, 260 bp, Unknown
  Description of Unknown: RightRegion for integrase B2388 sequence
aacccggtgtactttttcaagaaagtgttcgccgtggtggtaaacttcacgcggaaatagtgaaaaataaaagcgtcagggcttaggctctggcgcttttgttatgcccggtcgtctctcgataaggctcgagaaatagagcctgctcagctcggcagctatcaccgttcctctctggcctcctcggccgcgtggctattgtttacgggttgcacgggactggctgcggcgcctgctgccttcttgtctcgttttaaggt

SEQ ID NO: 28388 - DNA, 260 bp, Unknown
  Description of Unknown: RightRegion for integrase B2389 sequence
cagtgtcatcaaggctttccgggctttttcagctcggaaatttttttatttttccattgatgacagacgcggtttttacgcagcgttgcggacttgaaccgcgacaaagccattttatgtgcagcttgcagtgtggtaagcacacttgtcgtatgaaagcactgcgattctcaaaaaataaatatcacaagaatttaagcgccgggtcgttggttttgcagaatcaacgctccggcgcttttgtcatatctggaggtgag

SEQ ID NO: 28389 - DNA, 260 bp, Unknown
  Description of Unknown: RightRegion for integrase B2390 sequence
tccaaagagaagatcaaggtggtcttcgtcggcggtctcgaagtaacacaactcatgtgattgcttcataccctcctttcacacataccgccccgccttatgacagtagccataaggcggggcggtatgcactaaataagccttgataacttaaatctaaaaaccatattcttttgccctgctaccaatattgaaatatgccatatttctttttccctctctcattgaactattccccagcttatggtataattatattg

SEQ ID NO: 28390 - DNA, 260 bp, Unknown
  Description of Unknown: RightRegion for integrase B2391 sequence
aacccggtgtactttttcaagaaagtgttcgccgtggtggtaaacttcgcgcggagataacgaaaaataaaagcgtcagggcttaggctctggcgcttttgttatgcccggtcgtctctcgatatggctcgagaaatagagcctgctcagctcggcagctatcaccgttcctctctggcctcctcggccgcgtggctattgtttacgggttgcacgggactggctgcggcgcctgctgccttcttgtctcgttttaaggt

SEQ ID NO: 28391 - DNA, 260 bp, Unknown
  Description of Unknown: RightRegion for integrase B2392 sequence
aacacttttgtcgaacacggctcgatcttgttgcgaacgaagtactacccgttcccgtgagggaacgggtagtttcttttactttaagtttctcagtcttcgtcgccacaaacgaccgccctgtaatagtttgccaatttccccggtgctgcgtccggatcgtcgaggaaagcagcagccatagcggtgtagaaatcaactgtattcacgttgaactttttggcgacattgctgaaatcggaatacatcatgttgagcgc

SEQ ID NO: 28392 - DNA, 260 bp, Unknown
  Description of Unknown: RightRegion for integrase B2393 sequence
acctgggacggcaaaaacgtgtctatcgaagtattcggagaaaaaacgctcccaaaatagcgggggcgttgccgtcgcggaaaggtaggtttatccaccctcccacagcggcaacgcccctctacaccgccacgcaaaacctacttgcttccagtctccctgccgataccattgagcagcgcctcaaatatgcccgccttcatgccggcttgagcggcgaggctctcgcaagccttatgggtatcaataaggattcctac

SEQ ID NO: 28393 - DNA, 260 bp, Unknown
  Description of Unknown: RightRegion for integrase B2394 sequence
aacccggtgtactttttcaagaaagtgttcgccgtggtggtaaacttcacgcggaaatagcgaaaaataaaagcgtcagggcttaggctctggcgcttttgttatgcccggtcgtctctcgatagggctcgagaaatagagcctgctcagctcggcagctatcaccgttcctctctggtctcctcggccgcgtggctattgtttacgggttgcacgggactggctgcggcgcctgctgccttcttgtctcgttttaaggt

SEQ ID NO: 28394 - DNA, 260 bp, Unknown
  Description of Unknown: RightRegion for integrase B2395 sequence
tccaaggagaagatcaaggtggtcttcgttggcggcctcgaagtcactcaaaccatatgaatttctcataaacctctgttacacggaataaaaaagccggacgaaatcgcccagcggggtagtagcacacaaaatcctctctatgagtgatgatatattaaaacgcttccaataagtccgtttgaacagcgtttttctcataattcgcgttgataccagaatcaattttgcgcatagtacttgacactaccaggatataa

SEQ ID NO: 28395 - DNA, 260 bp, Unknown
  Description of Unknown: RightRegion for integrase B2396 sequence
acttgggacggcaaaaacgtgtccatcgaagtattcggagaaaaaacgctcccaaaatagcgggggcgttgccgtcgcggaaaggtaggtttatccaccgtaatgacgcccttgccgatgtactctacgcagcgactatccaccaacaggatgtcgatgggtacgtcgatcttgcagcgcacgcgggcgaagcagggacggtcgcacaggcgttccacggaaaggttacggatggtaccttccgtagtggtggagcggca

SEQ ID NO: 28396 - DNA, 260 bp, Unknown
  Description of Unknown: RightRegion for integrase B2397 sequence
cgggtacgttttttgtttatcggcggttttgcggaaagagtacacagagcggtaaaatgagatacattttcgttatagcttaaaatcgccgcacagagcaattatacaatttactctgtgcggcgattttaatatatttttgtgattacgccagaagcataatcaagtgagttccagcctgaagaagtaactggaagctgatttatattaaagtatagcatttttaaaaattgattgtgagaacaaatcagaacagtgtg

SEQ ID NO: 28397 - DNA, 260 bp, Unknown
  Description of Unknown: RightRegion for integrase B2398 sequence
gggggccatgacgcttcctctgtgccgatgtcggtcagcagtcccttgagttcggggtagggcatggagtagcgctgggaaagatagcgcagcgatgcacccaattctccgtctgggccaccggataccaattaaccataaaaatggcaggctaaaggacgaggcggtagtggacggtcagggtgttggcggctttgttccatgcgatagtatcgacgacgctgcggacggcggcgttcttttcggcggcggtggcgtcg

SEQ ID NO: 28398 - DNA, 260 bp, Unknown
  Description of Unknown: RightRegion for integrase B2399 sequence
ggggttcatgacgcttcctctgtaccgatgtcggtcagcagtcccttgagttcggggtagggcatggagtagcgctgggaaagatagcgcagcgatgcaccaagctccccgtctgggcctccatataccaattaaccataaacatgacaggctaaaggacgaggcggtagtggacggtcagggtgttggcggctttgttccatgtgatattttcggcaacgctgcggacggcggcgttcttttcggcgacggtggcgtcg

SEQ ID NO: 28399 - DNA, 260 bp, Unknown
  Description of Unknown: RightRegion for integrase B2400 sequence
aacccggtgtactttttcaagaaagtgttcgccgtggtggtaaacttcacgcggaaatagcgaaaaataaaagcgtcagggcttaggctctggcgcttttgttatgcccggtcgtctctcgatagggctcgagaaatagagcctgctcagctcggcagctatcaccgttcctctctgacctcctcggccgcgtgactattgtttacgggttgcacgggactggctgcggcgcctgctgccttcttgtctcgttttaaggt

SEQ ID NO: 28400 - DNA, 260 bp, Unknown
  Description of Unknown: RightRegion for integrase B2401 sequence
tttttttgttccagcaaaaagatcaggaatgcacagctcgccatgcaggcgggccagtgacacccccgatctcaatcgaaaccgttatctgatttaacgcttgcagtgttttccgcgccgcgccgacagctccatgccaagaaccgcctgcgtatctctacgctgacggtctttttatgggcgcgggtggattacgcaagccgcgctgctaaaaacagcccactgggctgtttttgcgctgtcttccacgacagcgccgc

SEQ ID NO: 28401 - DNA, 260 bp, Unknown
  Description of Unknown: RightRegion for integrase B2402 sequence
gtgaagattcaaatggtcggaagggtgttcgtattagttttttatttcgattttctgtgatactgagcctctatgcccttgtggtgtaggggcttttgtcgtacttatcgaaaaatgatataatatacctgtatttgatataatccaacaaaagcaagcgaagaaatcctttgtggtgctacaatctaacacaaaggagaaatgaccatgatcaggattcgattgtccactcttcttggcgagaagaagtggactcaggc

SEQ ID NO: 28402 - DNA, 260 bp, Unknown
  Description of Unknown: RightRegion for integrase B2403 sequence
aaaggtctacaatactacaaccctccctataaaatagacatcgaccttaagtgcgattaatttcgggatgatgtaacgtctcactcatggggcactacttgatgccgatactattatatcaaggaaaaagaagagcctttgtcgtaatgacgcgggctcttcttgatattacttatatctttcttcgagattctttatctcttcgtcgattacagcatcatgcttctcgagcttgtagactcgctcaataacgctgttgt

SEQ ID NO: 28403 - DNA, 260 bp, Unknown
  Description of Unknown: RightRegion for integrase B2404 sequence
agtaatactcaaaatgtaacagtatatttcattggaagtggagacgaaaaaaaaaagtaggttctctacttccagatttattacatttgttgcaaatccaaccacacagcatgaccagtatcaagtaaaactatattctctgcaaactccttaagtgcatattgttgacatacctttgtactaagcttaccatagtttacatcttcatcaggaacctttaaaacaactacccctgttttatccagttgctctctaatttc

SEQ ID NO: 28404 - DNA, 260 bp, Unknown
  Description of Unknown: RightRegion for integrase B2405 sequence
aacccggtgtactttttcaagaaagtgttcgccgtggtggtaaacttcacgtggagatagtgaaaaataaaagcgtcagggcttaggctctggcgcttttgttatgcccggtcgtctctcgatagggctcgagaaatagagcctgctcagctcggcagctatcaccgttcctctctggcctcctcggccgcgcggctattgtttacgggttgcacgggactggctgcggcgcctgctgccttcttgtctcgttttaaggt

SEQ ID NO: 28405 - DNA, 260 bp, Unknown
  Description of Unknown: RightRegion for integrase B2406 sequence
aaaagcatacaattcggccgctgctttggggaaatatatttttctttgcagcccacttgattttttcttttgttatagtataattaactccgcgcttaagcaaaacagggtgccaaccacccacttttttacttttgcgcgttgttttgtgtggaaaaatgatcttgttgagggaacgcatatgaccaaagatttaacgagcggaaatccgttcaaaatcatcctgttgttcaccctgccgctgatgctgggcaacctgt

SEQ ID NO: 28406 - DNA, 260 bp, Unknown
  Description of Unknown: RightRegion for integrase B2407 sequence
gatatagaaaattttgatgaagaagctaaaaaacttttggatatggagttgacattgtaaggtgaaaggagcaatgcagatggtcttacgcaccggcagaacgagctttagaaattgcgaaaacttttaggaaaaagaatataccatgtgacacaatttatttagatattgattatatggatggttttagagtgtttacatgggataataaaaagtttgaaaatcctaaagattttacaaatcaattaaaggaaatggga

SEQ ID NO: 28407 - DNA, 260 bp, Unknown
  Description of Unknown: RightRegion for integrase B2408 sequence
ggcaatactcaaaatgtaacaatatattttattggaagtggagacgaaaaaaaaaagtaggttctctacttccagatttattacatttgttgcaaatccaaccacacagcatgaccagtatcaagtaaaactatattctcagcaaactccttaagtgcatattgttgacatacctttgtactaagcttaccataatttacatcctcatcaggaacctttaaaacaactacccctgttttatctagttgctctctaatttc

SEQ ID NO: 28408 - DNA, 260 bp, Unknown
  Description of Unknown: RightRegion for integrase B2409 sequence
aaatacgaaccgcaggtgtttttcatcaaagaaacgttcgggttggtgtttgagagataaagttcacggctgttgcatcaagcaacagccgcttttctttggcttactccaagcccagttcttttttcagcaatcgaatgccttcggttacagcattcacgcgctgcgttcccatagcagccgcgcacttctcaatatcttcgatctcctgctttgacaggcgaaagccgattttctcggtgcgcgggttatctgtgggc

SEQ ID NO: 28409 - DNA, 260 bp, Unknown
  Description of Unknown: RightRegion for integrase B2410 sequence
ccagctgggctgttgctgttttacatagcacgaccaaggcaaagagaccgcagatcgtagtctgcggtctcttctttttttggtgcgggggattaatgctgtactacatagcagtagtacgccgcggccttgtcctcgacggcgtccttgtcatcgagccaagcgtgcgccatgtccgcgtaaaactcggcgttgccgccaagaccgtactttttcgcgacctcgcaaaaatcggagtacatcgcgcacattatcgcgtg

SEQ ID NO: 28410 - DNA, 260 bp, Unknown
  Description of Unknown: RightRegion for integrase B2411 sequence
gttcggcgactgcgaatcgtctggaattgtattggtgaattcacaccgccacagctttaaatggacagaaaaacggcatagccgcaaaatacgcctatgccgaatttttcaggaattacaaaatccctaagttgtaccgcctttcggagtggattttttatattcagttgtattttattcgactgttatatttggagaaactctcaaaacgctactacagttattacacttgaattcatgcgataacgaaatactttttg

SEQ ID NO: 28411 - DNA, 260 bp, Unknown
  Description of Unknown: RightRegion for integrase B2412 sequence
aaaagcatacaattcagccgctgctttgggggaatatatttttctttgcagcccacttgattttttgttttgttatagtataattaactccgcacttgagcaaaagagggtgccaaccaccctcttttttacttttgcgcgttgttttgtgtggaaaaatgatcttgttgagggaacgcatatgaccaaagatttaacgagcggaaatccgttcaaaatcatcctgttgttcaccctgccgctgatgctgggcaacctgt

SEQ ID NO: 28412 - DNA, 260 bp, Unknown
  Description of Unknown: RightRegion for integrase B2413 sequence
cccctctcccatcaacctctttccgccgacacgtcgtccagcatctcatcgtttcgataacagccgctttttacacgttcttccacgtccactttaattaaacaaacaaaatccccctctcagcaagtcaacgctgaaaaagggggatatgtatcattatatttttttgccggtacgctttttgtcaatcaatttataaattgattccaaagaattttgaacttctttccaaaaatttttttgctctcctcctaaagaca

SEQ ID NO: 28413 - DNA, 260 bp, Unknown
  Description of Unknown: RightRegion for integrase B2414 sequence
gggggccatgacgcttcctctgtgccgatgtcggtcagcagtcccttgagttcggggtagggcatggagtagcgctgggaaagatagcgcagcgatgcacccaattctccgtctgggcctccttataccaattaaccataaaaatggcaggctaaaggacgaggcggtagtggacggtcagggtgttggcggctttgttccatgtgatattttcggcaacgctgcggacggcggcgttcttttcggcggcggtggcgtcg

SEQ ID NO: 28414 - DNA, 260 bp, Unknown
  Description of Unknown: RightRegion for integrase B2415 sequence
ttttttattccagcaaaaaaatcagggggtgcaccgctcgccatgcaggcgggccagtgacacccccgatctcaaacgaaaccgttatttgatttaacgcttgcagtgttttccgcgccgcgccagcagtaaggcaagctgggcggcgaaacggcaagagcgactggatgccgttaacaacgatttgacggcgttgcgtcaatctggtaaaatcaaattgaccggaactgctgttacccctcctgcgttgccaaacaccc

SEQ ID NO: 28415 - DNA, 260 bp, Unknown
  Description of Unknown: RightRegion for integrase B2416 sequence
ttgttttggggtaaaatcgggtgcgaatcaactaccaatttcagctgtattgtgctataatggaagcgaaaacggcggagggggaacggaaaatgaaaaagctgcttgctgtgtgcctgatggcgctcgtttgctgggtttgcgcggggtacgcggaagaaacgcgggtcggcgatacggtcatttttgggcagtatgagcaggatggcaatcttgataacggcagtgagcctattgcgtggcaggtgctggatgtgcag

SEQ ID NO: 28416 - DNA, 163 bp, Unknown
  Description of Unknown: RightRegion for integrase B2417 sequence
agcgaggggatagtagtagagaaaactcagtatgtatctagggagaaatggcgcaggtaaatctaccacattgaaaatgctgaccggtatgatgaaaccaactgcaggcaagatttactttgatggaaaacttttggataggaaagatttatcaaaaatagga

SEQ ID NO: 28417 - DNA, 100 bp, Unknown
  Description of Unknown: RightRegion for integrase B2418 sequence
agcgaggggatagtagtagagaaaactcagtatgtatctagggagaaatggcgctggtaaatctaccacattgaaaatgctgaccggtatgatgaaacca

SEQ ID NO: 28418 - DNA, 260 bp, Unknown
  Description of Unknown: RightRegion for integrase B2419 sequence
ttgttttgggggaaaaacggctgcgaatcaactaccaatttcagctgttttgtgctataatggaagcgaaaacggcggagggggaacggaaaatgaaaaagctgcttgctgtgtgcctgatggcgctcgtttgctgggtttgcgcggggtacgcggaagaaacgcgggtcggcgatacggtcatgttcgggcaatatgaacaggatggcaatcttgataacggcagtgagcccattgcgtggcaggtgctggatgtgcag

SEQ ID NO: 28419 - DNA, 101 bp, Unknown
  Description of Unknown: RightRegion for integrase B2420 sequence
gaaaaccccgcagtcaaaatgctgcggggttcgagtgaagattgtttggtgacccggtagggattcgaaccctagacctactgattcgtagtcagtcactc

SEQ ID NO: 28420 - DNA, 260 bp, Unknown
  Description of Unknown: RightRegion for integrase B2421 sequence
ttttcggaactacaaaatttttcgcatacgggcggcagcggtctacccctgccaaggtaagccgtacactttcgggtgtgcggcttttcttgttggctgttcggcgtgagctccagtggcgctgtaaaagcatacaattcagccgctgctttggggaaatatatttttctttgcagcccacttgattttttgttttgttatagtataattaactccgcgcttgagcaaaacaggctgccaaccaccctgttttttacttt

SEQ ID NO: 28421 - DNA, 123 bp, Unknown
  Description of Unknown: RightRegion for integrase B2422 sequence
agcgaggggatagtagtagagaaaactcagtatgtatctagggagaaatggcgctggtaaatctaccacattgaaaatgctgaccggtatgatgaaaccaactgcaggaaagatttactttga

SEQ ID NO: 28422 - DNA, 100 bp, Unknown
  Description of Unknown: RightRegion for integrase B2423 sequence
gaaaaccccgcagtcaaaatgctacggggttcgagtgaagattgtttggtgacccggtagggattcgaaccctagacctactgattcgtagtcagtcact

SEQ ID NO: 28423 - DNA, 260 bp, Unknown
  Description of Unknown: RightRegion for integrase B2424 sequence
ttgttttgggggaaaaacggctgcgaatcaactaccaatttcagctgtattgtgctataatggaagcgaaaacggcggagggggaacggaaaatgaaaaagctgcttgctgtgtgcctgatggcgctcgtttgctgggtttgcgcggggtacgcggaagaaacgcgggtcggcgatacggtcattttcgggcaatatgaacaggatgccaatcttgataacggcagcgagcccattgcgtggcaggtgctggatgtgcag

SEQ ID NO: 28424 - DNA, 260 bp, Unknown
  Description of Unknown: RightRegion for integrase B2425 sequence
agcgaggggatagtagtagagaaaactcagtatgtatctagggagaaatggagctggtaaaagcacattgctccacaatatccgtgaaaaacttaagaaagaagacattccaactttcatttatgataacgagaaagacggtggacataattccattggagaaagtatgttttacggcgatgttgcattaggagcaaccgcattgtgttcttctgaaggtgagaacatcacaataaaccttggcaagattgcctcgaaac

SEQ ID NO: 28425 - DNA, 260 bp, Unknown
  Description of Unknown: RightRegion for integrase B2426 sequence
ttttccgtcaaaaatggggagccagtcattttgcaaccgctgcgttcgcataccgcataaaaaagttcgggataatccgaattttatcggattatcccgtatttggtggacctgaagagactcgaactctcgacctctcggatgcgaaccgaacgctctcccagctgagctacaggcccttattgacttttttggcggcatagatgcgaaccatctgccggacgcttgcgctacatccccaaatttgggggcatagaatt

SEQ ID NO: 28426 - DNA, 260 bp, Unknown
  Description of Unknown: RightRegion for integrase B2427 sequence
atcaacatccgtttcaaaatgggcatagaaattgctgaagaattgaagtatgaggaataaccgcatagcctgcgccaccatgagcggcgcgggctttttatatgctcgatgctccaaaccggcgatttgcctagctttttggatcgacattgagattttggacattttatttgggaagtcccaaaccgcagtgtctttctttttatccgtttaactgcgcagcatatacttcttcgacctgatatggggttttcatcgca

SEQ ID NO: 28427 - DNA, 260 bp, Unknown
  Description of Unknown: RightRegion for integrase B2428 sequence
gggccacgcttcccgcacagggaatgggagatgcaggagggggctatggcccctccttagaccgtggattgttgctccatccttgtgcaggcgcagaaggtttcgggcctgcgggcgcgaccaaaaggctttccaatcgccctttggaagccttcggccatcatacttggttggagcttttgtaagccaagatgccgggaggctcttctttggcgtctcagcttgaagaaataggcttttttcagcaggtgaaaggggaa

SEQ ID NO: 28428 - DNA, 260 bp, Unknown
  Description of Unknown: RightRegion for integrase B2429 sequence
agcgaggggatagtagtagagaaaactcagtatgtatctagggagaaacggagcaggtaagactacttttttaagattagtcacagggcttgcgtttccaacaagtggtacactttctttatggggaaattctggaacagaagaattgcagaaacagcgtaaacgaattggaagtatgattgaaacgcctgctctattcccgtcaatgactgcctatcaaaatatggaagtacagcgtattcaacgaggcatctgttgct

SEQ ID NO: 28429 - DNA, 100 bp, Unknown
  Description of Unknown: RightRegion for integrase B2430 sequence
agtgaggggatagtagtagagaaaactcagtatgtatctagggagaaatggcgcaggtaaatctaccacattgaaaatgctgaccggtatgatgaaacca

SEQ ID NO: 28430 - DNA, 260 bp, Unknown
  Description of Unknown: RightRegion for integrase B2431 sequence
ttgttttgggggaaaaacggctgcgaatcagctaccaatttcagctgtattgtgctataatggaagcgaaaacggcggagggggaacggaaaatgaaaaagctgcttgctgtgtgcctaacggcgctcgtttgctgggtttgtgcggggtacgcggaagaaacgcgggtcggtgatacggtcatgttcgggcaatatgaacaggatggcaatcttgataacggcagtgaacctattgcgtggcaggtgctggatgtgcag

SEQ ID NO: 28431 - DNA, 260 bp, Unknown
  Description of Unknown: RightRegion for integrase B2432 sequence
agtgaggggatagtagtagagaaaactcagtatgtatctagggagaaacggagccggtaaaacaacctgtcttaagatgattagcggactgtcaacaccgtcttatggcgaaatagaaatgtttgggtataagagaaaggacttacaaaaggtacgttcaagagtagggtgtcttatagaagctcccggactttatggcaatatgtcggcatatgacaatctgaacattaaatgtaagcttacggggattaagaaaaaag

SEQ ID NO: 28432 - DNA, 260 bp, Unknown
  Description of Unknown: RightRegion for integrase B2433 sequence
gacggtgagcttattcagaagctcgatgtttactataaattcgtcggcagactggattaattttttgttactatgagatgttccgttgggtgggatcaacagaagcaggcacgcttgatgaaccctgacgcacatacacaccgtccggtctgattcctctggatttgagataataaggctttcctgcgccagatgaaacctcaatcctgatcagctatattgactcagataaatcaagagtaaagtgtatttatttggca

SEQ ID NO: 28433 - DNA, 206 bp, Unknown
  Description of Unknown: RightRegion for integrase B2434 sequence
agcgaggggatagtagtagagaaaactcagtatgtatctagggagaaatggtgctggtaaatctactacattgaaaatgctgaccggtatgatgaaaccaactgcaggaaagatttaccttgatggaaaactatggaataggaaggatttgtcaaaaataggagcgttaattgaaaatccgcctatttatgaaaatctttccgcca

SEQ ID NO: 28434 - DNA, 260 bp, Unknown
  Description of Unknown: RightRegion for integrase B2435 sequence
ttgttttggggaaaaatcggctgcgaatcaactaccaatttcagctgttttgtgctataacggcagcgagcccttgcgtggctggtgttggatgtgcagggcggcgattgccccggtgacgctggcggatacggcggcggatgggaatccggaatggcagaatacggatgctgaaccggcggaaacgcgcgtttttttgctcagctacgcacaggtgatgcaatatcttccggagcaggagcagcggaaagtcagcggca

SEQ ID NO: 28435 - DNA, 109 bp, Unknown
  Description of Unknown: RightRegion for integrase B2436 sequence
tccaacaaggaaatcgaaatcgagttcgagtgcggaataacggtaagagaaactttataagcaaacgaccgactgtgttcataagagtgtggtcggtcattttttcgtt

SEQ ID NO: 28436 - DNA, 260 bp, Unknown
  Description of Unknown: RightRegion for integrase B2437 sequence
ttgttttgggggaaaaacggctgcgaattaactaccaatttcagctgttttgtgctataatggaagcgaaaacggcggagggggaacggaaaatgaaaaagctgcttgctgtgtgcctgacggcgctcgtttgctgggtttgcgcggggtacgcggaagaaacgcgggtcggcgatacggtcatgttcgggcaatatgaacaggatggcaatcttgataacggcagcgagcccattgcgtggcaggtgctggatgtgcag

SEQ ID NO: 28437 - DNA, 260 bp, Unknown
  Description of Unknown: RightRegion for integrase B2438 sequence
gtatgggatgggaataatatagatattatattattcggttcaaaacctatagataaatgaagagaaatgtttccacaatgtgagtatagaattttcaatacatctagcagcatatgttgctagctttgtccctttggatgtatcaaaagaggtaatccccttaataagtccaatagttcctgtagaaataaggtcgtccatatctttatttaaattactatactttttaacaatgtgtgccactaatcttaaattacgtt

SEQ ID NO: 28438 - DNA, 260 bp, Unknown
  Description of Unknown: RightRegion for integrase B2439 sequence
agcgaggggatagtagtagataaaactcagtatgtatctagggagaaatggtgccggtaagacaacaacaatcaattctatactagatattatacatcgagatagagggaacattaaatttttcggaaaatctttagctggaaatgaaaaagaaattaaaaatcgtataggaattgtttttgatgatggctatttttacgatgaattaagtatggaagagatgaaaagtattattgctccttcatatagcagatggtctg

SEQ ID NO: 28439 - DNA, 260 bp, Unknown
  Description of Unknown: RightRegion for integrase B2440 sequence
ttgttttgggggaaaaacggctgcgaatcaactaccaatttcagctgtattgtgctataatggaagcgaaaacggcggagggggaacggaaaatgaaaaagctgcttgctgtgtgcctgatggcgctcgtttgctgggtttgcgcggggtacgcggaagaaacgcgggtcggcgatacggtcattttcgggcaatatgaacaggatggcaatctggacaacggcagcgagcccattgcgtggcaggtgctggatgtgcag

SEQ ID NO: 28440 - DNA, 260 bp, Unknown
  Description of Unknown: RightRegion for integrase B2441 sequence
aaggacggaacaataaaggtgataacgaaattcggaacagaagcaaccgaaactgtataaatgaaagccggcagtctgactgtcggctttttacataggcaaatgaatttcttgcatttacggttgatttaatgtataataacaaacaagaaaaccaatgcgattaaacaatgggaattgtgctatttcgtcccgacaaatatgagagacgaatagatatatgcaatgagccgaaaagtgcttgttttaagggttgaaac

SEQ ID NO: 28441 - DNA, 260 bp, Unknown
  Description of Unknown: RightRegion for integrase B2442 sequence
aacattgtttggtttggtcatgtgtttaagatcagaataagactgccggaaagctattaatgccgtttcggcggtcttattctattaacaataaaaaacagcacgaatgcgatatatgttgcattcgtgctgttttttttcgcgaaacaaatgtctttacacttaaaatacttattatgtatttggcgcaatgatattttttgctctcactttatctactacggtttgataaacatcaatgttgtattccggagccatct

SEQ ID NO: 28442 - DNA, 260 bp, Unknown
  Description of Unknown: RightRegion for integrase B2443 sequence
agcgaggggatagtagtagagaaaactcagtatgtatctagggagaaatggagcaggtaaatcaacattaatcaagtgcatgtgcggagtaattgatgcagatgagggacaacttgaagtagatgatcaggtggtaaaaaaattagacgatgttttggttcttggatttatgaatcaggatcaaaatgtttacaatgaaatcaaaattcgagatttgacgaattttgtaaaagatgtgatgaagaaaaaatttgatcagg

SEQ ID NO: 28443 - DNA, 260 bp, Unknown
  Description of Unknown: RightRegion for integrase B2444 sequence
agcgaggggatagtagtagagaaaactcagtatgtatctagggagaaatggggccggtaagaccacactgtttaactccatcagcggtgcccacaccctgacagaaggaaatgtgatttttaagggtaaggacatcaccagcatgaagccttacgacatatgtaaactgggaatcggaaggacattccagattccccagtccttaaacgatatgatggtttacgaaaatgttctggtgggcgccctgtgcaagcgccata

SEQ ID NO: 28444 - DNA, 260 bp, Unknown
  Description of Unknown: RightRegion for integrase B2445 sequence
agtgaggggatagtagtagagaaagctcagtatgtatctagggagaaatggatcaggtaaatctactattatgaatataatgtcagatgttttggatatgagttcaggcaaaattttatataatggaactgatataaaagaattagatgacagatatagggaaaaaattggttttttgccacaaaatgtaggttattatccaaatttcacagcaaaaaaaaccatagagtattttgggtatcttagaggtgtaaataaaa

SEQ ID NO: 28445 - DNA, 260 bp, Unknown
  Description of Unknown: RightRegion for integrase B2446 sequence
ttttcggaacttcaaaatttttcgcatacgggcggcagcggtctacccctgccaaggtaagccgtacaccttcgggtgtgcggcttttcttgttggctgttcggcgtgagctccagtggcgctgtaaaagcatacaattcagccgctgctttgggggaatatatttttctttgcagcccacttgattttttgttttgttatagtataattaactccgcgcttgagcaaaacagggtgccagccaccctcttttttacttt

SEQ ID NO: 28446 - DNA, 260 bp, Unknown
  Description of Unknown: RightRegion for integrase B2447 sequence
agcgaggggatagtagtagagaaaactcagtatgtatctagggagaaatggatctggtaaatctactattatgaatataatgtcagatgttttggatatgagttcaggcaaaattttatataatggaactgatataaaagaattagatgacagatatagggaaaaaattggttttttgccacaaaatgtaggttattatccaaatttcacagcaaaaaaaaccatagagtattttgggtatcttagaggtgtaaataaaa

SEQ ID NO: 28447 - DNA, 260 bp, Unknown
  Description of Unknown: RightRegion for integrase B2448 sequence
agcgaggggatagtagtagagaaaactcagtatgtatctagggagaaacggagcaggtaagactacttttttaagattagtcacagggcttgcgtttccaacaagtggtacactttctttatggggaaattctggaacagaagaattgcagaaacagcgtaaacgaattggaagtatgattgaaacgcctgctctattcccgtcaatgactgcctatcaaaatatggaagtacagcgtattcaacgaggcataccagata

SEQ ID NO: 28448 - DNA, 260 bp, Unknown
  Description of Unknown: RightRegion for integrase B2449 sequence
tccaacaaggaaatcgaaatcgagttcgagtgcggaataacagtaagagaaactttataagcaaacgaccgactgcgttcataagagtgcggtcggtcattttttcgttgattaagacagaagaaatcatacgctccttatcgtgcaaaaatcctttttgtgcaatcgttaaaggtttgaggtttttcaaagcgagtgaagaacaaatccctacggcgatgagcgaagaaacaacaaaaagggtaaactaccacaaaaac

SEQ ID NO: 28449 - DNA, 101 bp, Unknown
  Description of Unknown: RightRegion for integrase B2450 sequence
agtgaggggatagtagtagagaaaactcagtatgtatctagggagaaatggcgctggtaaatctaccacattgaaaatgctgaccggtatgatgaaaccaa

SEQ ID NO: 28450 - DNA, 137 bp, Unknown
  Description of Unknown: RightRegion for integrase B2451 sequence
agcgaggggatagtagtagaaaaagctcagtatgtatctagggagaaacggggcaggtaagacaaccactataaaagcgtgtacagggatcctgaattttgaggagggagatatccttatagatggtgtgtccataa

SEQ ID NO: 28451 - DNA, 260 bp, Unknown
  Description of Unknown: RightRegion for integrase B2452 sequence
ttgttttgggggaaaaacggctgcgaatcaactaccaatttcagctgtattgtgcaataacggcagcaagcccttgcgtggctggtgttggatgtgcagggcggcgattgccccggtgacgctggcggatacggcggcggatgggaatccggaatggcagaatacggatgctgaaccggcggaaacgcgcgtttttttgctcagctacgcgcaggtgatgcagtatcttccggagcaggagcagcggaaagtcagcggca

SEQ ID NO: 28452 - DNA, 260 bp, Unknown
  Description of Unknown: RightRegion for integrase B2453 sequence
agcgaggggatagtagtagagaaaactcagtatgtatctagggagaaacggagccggtaaaacgacctgtcttaagatgattagcggactgtcaacaccgtcttatggcgaaatagaaatgtttgggtataagggaaaggacttacaaaaggtacgttcaagagtagggtgtcttatagaagctcccggactttatggcaatatgtcggcatatgacaatctgaacattaaatgtaagcttacggggattaagaaaaaag

SEQ ID NO: 28453 - DNA, 100 bp, Unknown
  Description of Unknown: RightRegion for integrase B2454 sequence
agcgaggggatagtagtagaaaaaactcagtatgtatctagggagaaatggcgctggtaaatctaccacattgaaaatgctgaccggtatgatgaaacca

SEQ ID NO: 28454 - DNA, 260 bp, Unknown
  Description of Unknown: RightRegion for integrase B2455 sequence
ttgttttgggggaaaaacggctgcgaatcagctaccaatttcagctgtattgtgctataatggaagcgaaaacggcggagggggaacggaaaatgaaaaagctgcttgctgtgtgcctaacggcgctcgtttgctgggtttgtgcggggtacgcggaagaaacgcaggtcggcgatacggtcatgttcgggcaatatgaacaggatggcaatctggacaacggcagcgagcccattgcgtggcaggtgctggatgtgcag

SEQ ID NO: 28455 - DNA, 260 bp, Unknown
  Description of Unknown: RightRegion for integrase B2456 sequence
tccaacaaggaaatcgaaatcgagttcgagtgcgggataacagtaagagaaactttataagcaaacgaccgactgcgttcataagagtgtggtcggtcattttttcgttgattaagacagaagaaatcatacgctccttatcgtgcaaaaatcctttttgtgcaatcgttaaaggcttgcgactttccaaagcgagtgaagaacaaatccccacggcgatgagcgaagaaacaacaaaaagggtaaactaccataaaaac

SEQ ID NO: 28456 - DNA, 100 bp, Unknown
  Description of Unknown: RightRegion for integrase B2457 sequence
agcgaggggatagtagtagaaaaagctcagtatgtatctagggagaaatggcgctggtaaatctaccacattgaaaatgctgaccggtatgatgaaacca

SEQ ID NO: 28457 - DNA, 260 bp, Unknown
  Description of Unknown: RightRegion for integrase B2458 sequence
tccaacaaggaaatcgaaatcgagttcgagtgcgggataacggtaagagaaaccttataagcaaacgaccgactgcgttcgcaagagtgcggtcggtcatttttttcgttgattaaggcagtgagaatcatacgctccttatcgtgcaaaaatcctttttgtgcaatcgttaaaggcttgcgacttttcaaagcgagtgaagaacaaatccctacggcgataagcgaagaaacgacaaaaagggtaaattaccacaaaaa

SEQ ID NO: 28458 - DNA, 260 bp, Unknown
  Description of Unknown: RightRegion for integrase B2459 sequence
tccaacaaggaaatcgaaatcgagttcgagtgcggaataacggtaagagaaactttataagcaaacgaccgactgcgttcataagagtgcggtcggtcattttttcgttgattaagacagaagaaatcatacgctccttatcgtgcaaaaatcctttttgtgcaatcgttaaaggcttgtgacttttcaaagcgagtgaagaacaaatccctacggcgatactcgaagaaacaacaaaaagggtaaactgccacgaaaac

SEQ ID NO: 28459 - DNA, 260 bp, Unknown
  Description of Unknown: RightRegion for integrase B2460 sequence
ttgtttttggggaaaaacggctgcgaatcaactaccaatttcagctgtattgtgcaataacggcagcaagcccttgcgtggctggtgttggatgtgcagggcggcgatttccccggtgacgctggcggatacggcggcggatgggaatccggaatggcagaatacggatgctgaaccggcggaaacgcacgttttcctgctcagctacgcgcaggtgatgcaatatcttccggagcaggagcagcggaaagtcagcggca

SEQ ID NO: 28460 - DNA, 260 bp, Unknown
  Description of Unknown: RightRegion for integrase B2461 sequence
ttgtttttggggaaaaacggctgcgaatcaactaccaatttcagctgttttgtgctataatggaagcgaaaacggcagagggggaacggaaaatgaaaaagctgcttgctgtgtgcctgacggcgctcgtttgctgggtttgcgcggggcacgcggaagaaacgcgggtcggcgatacggtcatttttgggcagtatgagcaggatggcaatttggataacggcagtgagcccattgcgtggcaggtgctggatgtgcag

SEQ ID NO: 28461 - DNA, 81 bp, Unknown
  Description of Unknown: RightRegion for integrase B2462 sequence
agtgaggggatagtagtagagaaaactcagtatgtatctagggagaaatggcgctggtaaatctaccacattgaaaatgat

SEQ ID NO: 28462 - DNA, 260 bp, Unknown
  Description of Unknown: RightRegion for integrase B2463 sequence
agcgaggggatagtagtagagaaaactcagtatgtatctagggagaaatggtgccggtaagactacaacgataagaattcttatggatgtattccgtgccaattcaggagaagttcttcttgatggagaaaagtttaaccagagaaagcatcttataggttatcttccggaagagagaggtctttatcctaagaagaaagtaattgaacagatggtttatcttggaagaatcagaggaatatcaaaatccgaggccgttg

SEQ ID NO: 28463 - DNA, 260 bp, Unknown
  Description of Unknown: RightRegion for integrase B2464 sequence
aaactgatgatacagtttaaatcaggtatcgtagtagaacaggagatccgatacgactgagattacggcgggaatggcagcaagtgaataagaaacgttattcctgccggttgcggtaagaataaaatgcccgatgcggatcgggcgttttattgttgctgcaaatgcacacaggaaggagaaaagaacaatggattggaaaaaatggaatttccggtgaacgcataaaggaagcaataggcgaaattgaaagataccgg

SEQ ID NO: 28464 - DNA, 86 bp, Unknown
  Description of Unknown: RightRegion for integrase B2465 sequence
agcgaggggatagtagtagagaaaactcagtatgtatctagggagaaatggagcaggtaaaacaacaacgctgcggacgcttttag

SEQ ID NO: 28465 - DNA, 260 bp, Unknown
  Description of Unknown: RightRegion for integrase B2466 sequence
agcgaggggatagtagtagagaaaactcagtatgtatctagggaaaaacggagccggtaaaacaacctgtcttaagatgattagcggactgtcaacaccgtcttatggcgaaatagaaatgtttgggtataagggaaaggacttacaaaaggtacgttcaagagtagggtgtcttatagaagctcccggactttatggcaatatgtcggcatatgacaatctgaacattaaatgtaagcttacggggattaagaaaaaag

SEQ ID NO: 28466 - DNA, 100 bp, Unknown
  Description of Unknown: RightRegion for integrase B2467 sequence
gaaaaccccgcagtcaaaatgctgcggggttcgagtgaaaatcatttggtgacccggtagggattcgaaccctagacctactgattcgtagtcagtcact

SEQ ID NO: 28467 - DNA, 260 bp, Unknown
  Description of Unknown: RightRegion for integrase B2468 sequence
agcgaggggatagtagtagagaaaactcagtatgtatctagggagaaatggtgcaggtaagagtactactatcaaatcggtagtgggagtgttagaatttactgagggagagatttatattgatggacattcggtaaaaaaggagcctatggaatgtaagagtataacggcatatattccagataatccagatatatatgaatttcttacaggtattcagtatcttaattttgttgcagatatattcgggattgaacaga

SEQ ID NO: 28468 - DNA, 260 bp, Unknown
  Description of Unknown: RightRegion for integrase B2469 sequence
ttgtatgacggaacggaaattgatcagacagtagggcatggcaacagtatcattgactaaaaccaaaagacgggaaagaaggagaaaatttgatggagaaaaacagtgctcccatcggcggcgtaagtctggctcgggtcgaacagagccgggaacagatgcatcagaagatcgatgatctgtatgacgagctggttcaaaagattcttatggaggaaaagaggctgacaatggacgacggtgaacaactgttgtcactg

SEQ ID NO: 28469 - DNA, 260 bp, Unknown
  Description of Unknown: RightRegion for integrase B2470 sequence
agcgaggggatagtagtagaaaaagctcagtatgtatctagggagaaacggagcaggtaagactacttttttaagattagtcacagggcttgcgtttccaacaagtggtacactttctttatggggaaattctggaacagaagaattgcagaaacagcgtaaacgaattggaagtatgattgaaacgcctgctctattcccgtcaatgactgcctatcaaaatatggaagtacagcgtattcaacgaggcataccagata

SEQ ID NO: 28470 - DNA, 260 bp, Unknown; identical to SEQ ID NO: 28446
  Description of Unknown: RightRegion for integrase B2471 sequence

SEQ ID NO: 28471 - DNA, 260 bp, Unknown
  Description of Unknown: RightRegion for integrase B2472 sequence
agcgaggggatagtagtagaaaaagctcagtatgtatctagggagaaacggagccggtaaaacgacctgtcttaagatgattagcggactgtcaacaccgtcttatggcgaaatagaaatgtttgggtataagggaaaggacttacaaaaggtacgttcaagagtagggtgtcttatagaagctcccggactttatggcaatatgtcggcatatgacaatctgaacattaaatgtaagcttacggggattaagaaaaaag

SEQ ID NO: 28472 - DNA, 260 bp, Unknown
  Description of Unknown: RightRegion for integrase B2473 sequence
aaactgctgatacagttccagtcaggcatagtcatggaacaggagattcgatatgagtaaggctgcggcaggaatggcagcaagtaaataggaaacgttgttcctgccagtttatggtaagaataaaatgcccgatgatccgggcgttttattgttggcataaaaataggaaaggacagcaggagcagaaagcatataacggaaaatgagtaaaagaaagtggatataaaaaagtacatgaagtaagtgtgcgacaggag

SEQ ID NO: 28473 - DNA, 260 bp, Unknown
  Description of Unknown: RightRegion for integrase B2474 sequence
agtgaggggatagtagtagaaaaagctcagtatgtatctagggagaaacggagcaggtaagactacttttttaagattagtcacagggcttgcgtttccaacaagtggtacactttctttatggggaaattctggaacagaagaattgcagaaacagcgtaaacgaattggaagtatgattgaaacgcctgctctattcccgtcaatgactgcctatcaaaatatggaagtacagcgtattcaacgaggcataccagata

SEQ ID NO: 28474 - DNA, 260 bp, Unknown
  Description of Unknown: RightRegion for integrase B2475 sequence
gcggcctgtaactgctggaattgctcaaaggaaacgttgaactcgacctctagcgtatagtcgcggtaaacgcggacggacttgataaactgcgacacgatcactttcttagctgcaaagctgcagttatcgtagaggtctgcccacgttttcagcttgtcatattcctgctgttctgtctccatgtctgcggtacggctctcaagttcctgccgtgccgcttccgctgtctgtgacagagcttctacgtcggtctgcgc

SEQ ID NO: 28475 - DNA, 260 bp, Unknown
  Description of Unknown: RightRegion for integrase B2476 sequence
ttgttttgggggaaaaacggctgcgaatcaactaccaatttcagctgtattgtgctataatggaagcgaaaacggcggagggggaacggaaaatgaaaaagctgcttgctgtgtgcctgatggcgctcgtttgctgggtttgcgcggggtacgcggaagaaacgcgggtcggcgatacggtcatgttcgggcagtatgagcaggatggcaatcttgataacggcagcgagcccattgcgtggcaggtgctggatgtgcag

SEQ ID NO: 28476 - DNA, 260 bp, Unknown; identical to SEQ ID NO: 28446
  Description of Unknown: RightRegion for integrase B2477 sequence

SEQ ID NO: 28477 - DNA, 260 bp, Unknown
  Description of Unknown: RightRegion for integrase B2478 sequence
tccaacaaggaaatcgaaatcgagttcgagtgcgggataacagtaagaaaaactttataagcaaacgaccgactgcgttcgtaagagtgcggtcggtcattttttcgttgattaagacagaagaaatcatacgctccttatcgtgcaaaaatcctttttgtgcaatcgttaaaggtttgagattttccaaagcgagtgaagaacaaatccctacggcgatactcgaagaaacaacaaaaagggtaaactgccacgaaaac

SEQ ID NO: 28478 - DNA, 260 bp, Unknown
  Description of Unknown: RightRegion for integrase B2479 sequence
ttttcggaactacaagatttttcgcatacgggcggcagcggtctacccctgccaaggtaagccgtacaccttcgggtgtgcggcttttcttgttggctgttcggcgtgagctacagtggcgctgtaaaagcatacaattcagccgctgctttgggggaatatatttttctttgcagcccacttgattttttcttttgttatagtataattaactccgcgcttgagcaaaacagggtgccaaccaccctcttttttacttt

SEQ ID NO: 28479 - DNA, 134 bp, Unknown
  Description of Unknown: RightRegion for integrase B2480 sequence
agcgaggggatagtagtagagaaaactcagtatgtatctagggagaaatggcgctggtaaatctaccacattgaaaatgatgaccggtatgatgaaaccaactgcaggaaagatttactttgatggaaaacttt

SEQ ID NO: 28480 - DNA, 100 bp, Unknown
  Description of Unknown: RightRegion for integrase B2481 sequence
gaaaaccccgcagtcaaaatgctgcggggttcgagtgaagattgtttggtgacccggtagggattcgaaccctagacctactgattcgtagtcagtcact

SEQ ID NO: 28481 - DNA, 260 bp, Unknown
  Description of Unknown: RightRegion for integrase B2482 sequence
aagctgctgatacagttccaatcaggtattgtcatggaacaggagattcgatatgagtaaggctgcggcaggaatggcagcaagtaaataggaaacgttgttcctgccagtttatggtaagaataaaatgcccgatgatccgggcgttttattgttggcataaaataggaaaggacagcagaaagcatataacggaaaatgagtaaaagaaagtggatatagaaaaagcacatgaagtaagtgtgcgacaggaggagaaa

SEQ ID NO: 28482 - DNA, 260 bp, Unknown
  Description of Unknown: RightRegion for integrase B2483 sequence
tcattctttttcgtgaagcactgtgtcggatttgttttcatagtagaggacgtaggttaaaccgcgtcctcttttttgggtgtctcgtaagtaagagcctgtttggaatctccaatgccagcagtggtcgggtcagtcacgataccgagaatcgtgaggactgcgaacagggcatttacgactgccaacagcttgtctcccagctcacccaaatcgagagtgtaaccgaagacagcggcaatcacctgtaccagcagaag

SEQ ID NO: 28483 - DNA, 109 bp, Unknown
  Description of Unknown: RightRegion for integrase B2484 sequence
cgtaaaagagtacatctatgttgcaagcatgctgtttggcttgttcttcggcgcaggtaacctcatcttccccactgcagtgggtcagcttgccggccgcaatatgtgg

SEQ ID NO: 28484 - DNA, 260 bp, Unknown
  Description of Unknown: RightRegion for integrase B2485 sequence
ttgttttgggggaaaaacggctgcgaatcagctaccaatttcagctgtattgtgctataatggaagcgaaaacggcggagggggaacggaaaatgaaaaagctgcttgctgtgtgcctaacggcgctcgtttgctgggtttgtgcggggtacgcggaagaaacacaggtcggcgatacggtcatgttcgggcaatatgaacaggatggaaatctggacaacggcagtgagcccattgcgtggcaggtgctggatgtgcag

SEQ ID NO: 28485 - DNA, 260 bp, Unknown
  Description of Unknown: RightRegion for integrase B2486 sequence
agcgaggggatagtagtagagaaagctcagtatgtatctagggagaaatggatctggtaaatctactattatgaatataatgtcagatgttttggatatgagttcaggcaaaattttatataatggaactgatataaaagaattagatgacagatatagggaaaaaattggttttttgccacaaaatgtaggttattatccaaatttcacagcaaaaaaaaccatagagtattttgggtatcttagaggtgtaaataaaa

SEQ ID NO: 28486 - DNA, 101 bp, Unknown
  Description of Unknown: RightRegion for integrase B2487 sequence
agcgaggggatagtagtagagaaaactcagtatgtatctagggagaaatggcgctggtaaatctaccacattgaaaatgctgaccggtatgatgaaaccaa

SEQ ID NO: 28487 - DNA, 260 bp, Unknown
  Description of Unknown: RightRegion for integrase B2488 sequence
tctgacactgaagaagcagaacttaaactatatgagcctggagaaataaaaaaaaattaactaatagcttgtacttaaatggtaacatgcaaggtgaaaacaatatgttgcattttagaacaccttgcatgcccagtatctaaaagaacaatattttctgcaaattcccttaaagcacataatggcttttaaaatatccttatatgaaaatttctgtttacatttagcacatgtcataatatttctccttcttaaactta

SEQ ID NO: 28488 - DNA, 260 bp, Unknown
  Description of Unknown: RightRegion for integrase B2489 sequence
ttgtttttggggaaaaacggctgcgaatcaactaccaatttcagctgtattgtgcaataacggcagcaagcccttgcgtggctggtgttggatgtgcagggcggcgattgccccggtgacgctggcggatacggcggcggatgggaatccggaatggcagaatacggatgctgaaccggcggaaacgcacgttttcctgctcagctacgcgcaggtgatgcaatatcttccggagcaggagcagcggaaagtcagcggca

SEQ ID NO: 28489 - DNA, 260 bp, Unknown
  Description of Unknown: RightRegion for integrase B2490 sequence
accatcgtcctcaccgtgaacggattcgtattactcagcccactttctgtttgtgggtaattaaaagcagcagctttttcggctgctgctttttgctgcataaaataatccccaccagcgtttttatgcgcgccggtggggatgctttttgcataacgtattccgttataatctaccatcttcctgcaaaatgagaaaatacttgttatattttctcgtaaaggagcatggctatgattaggattttactgtccacgcgc

SEQ ID NO: 28490 - DNA, 260 bp, Unknown
  Description of Unknown: RightRegion for integrase B2491 sequence
ttgtttttggggaaaaacggctgcgaatcaactaccaatttcagctgtattgtgcaataacggcagcaagcccttgcgtggctggtgttggatgtgcagggcggcgattgccccggtgacgctggcggatacggcggcggatgggaatccggaatggcagaatacggatgctgaaccggcggaaacgcgcgtttttttgctcagctacgcgcaggtgatgcagtatcttccggagcaggagcagcggaaagtcagcggca

SEQ ID NO: 28491 - DNA, 99 bp, Unknown
  Description of Unknown: RightRegion for integrase B2492 sequence
agtgaggggatagtagtagagaaaactcagtatgtatctagggagaaacggagcaggtaagactacttttttaagattagtcacagggcttgcgtttcc

SEQ ID NO: 28492 - DNA, 260 bp, Unknown
  Description of Unknown: RightRegion for integrase B2493 sequence
agtgaggggatagtagtagagaaaactcagtatgtatctagggagaaacggtgcgggtaaaactacatctatccgaattttaatggatgtgtttcctgcaaacagcggtgaagtgctgatcgacggtcagcccatcgattacaataagatcggcatcggatatcttcccgaagaaagaggtttgtatccgaaaaagattatcatcgatcagcttacctattttgcagagctgaaaggcatgagccgcaaagccgccgtgg

SEQ ID NO: 28493 - DNA, 89 bp, Unknown
  Description of Unknown: RightRegion for integrase B2494 sequence
ccaaatcatattgcctatgttgaggactgcacggtcacgggttctgcgctgtgcacataataaaattagcaggaaaagtaagcgatgcc

SEQ ID NO: 28494 - DNA, 260 bp, Unknown
  Description of Unknown: RightRegion for integrase B2495 sequence
tatatgacggaaatacttgaatattcgtatattaaaccggaaattaaaggtaccatatagttaccgatatcggcacggaagagtctgcaccgccatgttgtcatgggttgagaacccaagttattccggggtttttggatatacgtgaatgaatactttcgcatcttttttggtgaaagggacgttcttttcttctttcaggtaatcaatgtggtcaatcagttctttcagtatccggtttttctccggtgcatcgagtg

SEQ ID NO: 28495 - DNA, 260 bp, Unknown
  Description of Unknown: RightRegion for integrase B2496 sequence
aaggagatggaggataatgcagagaaaattgaaatcttcgaagcaagccaatgcatttgaaacgttgttacatagtgattttaaatgaagtgacatatttggtgtggactggcaggagaaggtgcttaagcaagtgaaacggttgaaaaagctcttctttatcttatgctattttgaaatttgaaatctgcttttatatttataaaaggtggtatgcggtaaccactttacggttttgcatgaaaatgctgtcttttcga

SEQ ID NO: 28496 - DNA, 260 bp, Unknown
  Description of Unknown: RightRegion for integrase B2497 sequence
gaaggaggaaagctcaccatcatcttcggaggcggctatgagatagaggaacagatctgatcagagatcgtcctcttcgacttcggagtcgtcattccagtcctcatccgatacggacgaatcctccaagccggagaagatagaagactcccgtgcatgcagcttattgatcgaaagccgctgtgcggggcttttcttcttgccgttatattcaatcagcatcgcctccgcatagcccatcgaaccggcatgtctctctt

SEQ ID NO: 28497 - DNA, 260 bp, Unknown
  Description of Unknown: RightRegion for integrase B2498 sequence
ccaaatcatattgcctatgttgaggactgcacggtcacgggttctgcgctgtgcacataataaaattagcaggaaaagtaagcgatgcctgtacgcggctgattgtcacacaaccatcttccagcggctgacgcagcacctccaaagcagtacgcgaaaattcaggaaactcatctaaaaataaaacaccatgatggctcaacgtcacttctccaggccgcggcacactgcctccacctataagcgcgcttgaagaaatc

SEQ ID NO: 28498 - DNA, 89 bp, Unknown
  Description of Unknown: RightRegion for integrase B2499 sequence
ccaaatcatattgcctatgttgaggactgcacggtcacgggttctgcgctgtgcacataataaagttagcaggaaaagtcagcgacgcc

SEQ ID NO: 28499 - DNA, 260 bp, Unknown
  Description of Unknown: RightRegion for integrase B2500 sequence
caaatggtcggtaatgtgttcgttttgttttgcgagattccaaatgtcaccctgacatgaaaaaagcgcccacgttaccatcatcggtagcgtgggcgcttttctatcttaatttaccgaaaatcggaaaaaactcccgaaatatgaagttttctgccaaaatgcagacaagccgggtacatatcggctaaaatttcggtaaaaggagacaaaaggctatgattagaattttgctgtctacccgcctcggcgaaaggcgg

SEQ ID NO: 28500 - DNA, 260 bp, Unknown
  Description of Unknown: RightRegion for integrase B2501 sequence
ggtgtgctggtgtttactattcctcgtagcatactcgcccttttgaatttttcagcctaatattctataactttgcgtaatgaatagatattacgatttttttgtagtacttttaaggatagtgttttagtgttacaatattatttaatgctctaataggttacaacttactgtaagtgcagtttattcctttctgcagtgagggataaattaaaaaaaactcacgttaaattaaacgttgcaaacgcaatgtatgaggt

SEQ ID NO: 28501 - DNA, 260 bp, Unknown
  Description of Unknown: RightRegion for integrase B2502 sequence
caaatggtcggtaatgtgttcgttttgttttgcgagattccaaatgtcaccctgacatgaaaaaagcgcccacgttaccatcatcggtagcgtgggcgcttttctgtcttaatttaccgaaaatcggaaaaaactcccgaaatatgaagttttctgccaaaatgcagacaagccgggtacatatcggctaaaatttcggtaaaaggagacaaaaggctatgattagaattttgctgtctacccgcctcggcgaaagacgg

SEQ ID NO: 28502 - DNA, 260 bp, Unknown
  Description of Unknown: RightRegion for integrase B2503 sequence
ccaaatcatattgcctatgttgaggactgcacggtcacgggttctgcgctgtgcacataataaaattagcaggaaaagtaagcgatgcctgtacgcggctgatcgtcacataaccatcttccagcggctgacgcagcacctccaaagcagtacgcgaaaattcaggaaactcatctaaaaataaaacaccatgatggctcaatgtcacttctccaggccgcggcacactgccgccacctataagcgcgcttgaagaaatc

SEQ ID NO: 28503 - DNA, 260 bp, Unknown; identical to SEQ ID NO: 28502
  Description of Unknown: RightRegion for integrase B2504 sequence

SEQ ID NO: 28504 - DNA, 260 bp, Unknown
  Description of Unknown: RightRegion for integrase B2505 sequence
ttcgatatcgcctctaaaaacctgagcttcgaagagcaggagaaaaaagtatttaattaaaagaaaaaaaatttaatgcttcaacaactctttcttttatctgttcatctggttcttcatgtcttgctagagttaaataatagttttggttatctttccgatataatacaatccaatcacctgtaagtcttttttcttcatgacgctttagatatccatcatctgtaaaaatttgccccatccttccaagggcatattga

SEQ ID NO: 28505 - DNA, 260 bp, Unknown
  Description of Unknown: RightRegion for integrase B2506 sequence
atcgagatggttggttcagtgttcgtcttgttttgttccctaccgaaaataagaaagtaagtaaaaaagacccaaacctcgcatgaaatgaggtttgggtcttttttgttttatttcctgttagatttttccgaaatacggaaaaacttgccggaatagagggtttcttgccaaaatgcagacaagccgaccatgaatcggctaaaatcagcaacaaaggagaccaaaggctatgattagaattttgctgtctacccgcc

SEQ ID NO: 28506 - DNA, 260 bp, Unknown
  Description of Unknown: RightRegion for integrase B2507 sequence
ccaaatcatattgcctatgttgaagactgcacggtcacgggttctgcgctgtgcacataataaaattagcaggaaaagtaagcgatgcctgtacgcggctgatcgtcacataaccatcttccagcggctgacgcagcacctccaaagcagtacgcgaaaattcaggaaactcatctaaaaataaaacaccatgatggctcaatgtcacttctccaggccgcggcacactgccgccacctataagcgcgcttgaagaaatc

SEQ ID NO: 28507 - DNA, 260 bp, Unknown
  Description of Unknown: RightRegion for integrase B2508 sequence
gagtctgagtgtaccaagtcggagcaagctttgtatcgcttgctccgacttattttataatcccaatttcatttcgtgtccctttgcagaagaactatcagtgttcccccaatgtcattaagctaagggctttgtcattgcgagccagtccgcagactggcgcggcaatccgctttttctaacgttttagatgcggattcccacggcagtgacatcggtcactgcctcggaatgacaggtttttcttaactaaatgacat

SEQ ID NO: 28508 - DNA, 260 bp, Unknown
  Description of Unknown: RightRegion for integrase B2509 sequence
cccggcggcaagctggaaatcatcttcggtggcggttaccttgtcgaagaatccgtctaagcgtaggagattgagggatcatccctctttctctttctttatttcatcgtggatgttcttctgaatcgcatcgagaagggcgaccttttgctctgttgaacattccaaccttgagatgtaattataaatcaactgtgcatggacagttgcaacgcgcttggcaagttcctcctgactttcctttgagcgcagcaaatgaa

SEQ ID NO: 28509 - DNA, 260 bp, Unknown
  Description of Unknown: RightRegion for integrase B2510 sequence
caaatggtcggtaatgtgttcgttttgttttgcgagattccaaatgtcaccctgacatgaaaaaagcgcccacgttaccatcatcggtagtgtgggcgcttttctgtcttaatttaccgaaaatcggaaaaaactcccgaaatatgaagttttctgccaaaatgcagacaagccgggtacatatcggctaaaatttcggtaaaaggagacaaaaggctatgattagaattttgctgtctacccgcctcggcgaaaggcgg

SEQ ID NO: 28510 - DNA, 260 bp, Unknown
  Description of Unknown: RightRegion for integrase B2511 sequence
ccccctaagtgttcggatagcttaactattggttcaccaacaataaaaggacggctttagccgtccttttattgttgaataaccgatattgcgactcgaactccctcaatccgctgtcaagcgggaaacggtcatgcccgggtcaaggtgcgcagcagcttgacgggcgaggaaacgggaagaaaaaactttcgggagcgtgattccgagcctctttgcggaaagataaacataaaaatctgcaatcattataccgcaaa

SEQ ID NO: 28511 - DNA, 260 bp, Unknown; identical to SEQ ID NO: 28509
  Description of Unknown: RightRegion for integrase B2512 sequence

SEQ ID NO: 28512 - DNA, 118 bp, Unknown
  Description of Unknown: RightRegion for integrase B2513 sequence
caaatggtcggtaatgtgttcgttttgttttgcgagattccaaatgtcaccctgacatgaaaaaagcgcccacgttaccatcatcggtagcgtgggcgcttttctatcttaatttacc

SEQ ID NO: 28513 - DNA, 109 bp, Unknown
  Description of Unknown: RightRegion for integrase B2514 sequence
ttcaacatcgactttaagcaattcagcttggggttggacattgctgaaattgccgcataaacgaaaaaacccgtttcacaaggaaacgagtttttcgctgcttcttata

SEQ ID NO: 28514 - DNA, 260 bp, Unknown; identical to SEQ ID NO: 28508
  Description of Unknown: RightRegion for integrase B2515 sequence

SEQ ID NO: 28515 - DNA, 260 bp, Unknown; identical to SEQ ID NO: 28509
  Description of Unknown: RightRegion for integrase B2516 sequence

SEQ ID NO: 28516 - DNA, 260 bp, Unknown
  Description of Unknown: RightRegion for integrase B2517 sequence
tttatcacgatgataggtaatgtgttcgttttgttttgtccgtttccgggcctgaaatagaaataaattaagtctaatttgtgaacaaatagaacatcattagagacacattacaacaaaataagcggcgggcaatccctgaaaagaggaaaagcccgccgctttaattatggattatttaacttgctggtaacttgctggtcagttgcctttgccgatctgcttaataacctgatccgtgccggtcgcagccaggccgg

SEQ ID NO: 28517 - DNA, 260 bp, Unknown
  Description of Unknown: RightRegion for integrase B2518 sequence
cctggcggcaagctggaaatcatcttcggtggcggataccttgtcgaagaatccgtctaagtgtaggagattgagggatcatccctctttctctttctttatttcatcgtggatgtttttctgaatcgcatcaagaagggcgactttttgctctgttgaacactccaatcttgagatgtaattataaatcagccgtgcatggacagttgcaacgcgcttggcaagttcctcctgaccttcctttgagcacggcaaatgaa

SEQ ID NO: 28518 - DNA, 260 bp, Unknown; identical to SEQ ID NO: 28509
  Description of Unknown: RightRegion for integrase B2519 sequence

SEQ ID NO: 28519 - DNA, 109 bp, Unknown
  Description of Unknown: RightRegion for integrase B2520 sequence
ccaaatcatattgcctatgttgaggactgcacggtcacgggttctgcgctgtgcacataataaaattagcaggaaaagtaagcgatgcctgtacgcggctgatcgtcac

SEQ ID NO: 28520 - DNA, 260 bp, Unknown
  Description of Unknown: RightRegion for integrase B2521 sequence
cctggcggcaagctggaaatcatcttcggtggcggataccttgtcgaagaatccgtctaagtgtaggagattgagggatcacccctctttctctttctttattttatcgtagatgttctcctgaatcgcatcgagaagggcgactttttgctctgttgagcactccaaccttgagatgtaattataaatcaactgtgcatggacagttgcaacgcgcttggcaagttcctcctgaccttcctttgagcgcggcaaatgaa

SEQ ID NO: 28521 - DNA, 260 bp, Unknown
  Description of Unknown: RightRegion for integrase B2522 sequence
atcgaaatggttggttcagtgttcgtcttgttttattccctgccgaaaatcagaaagtaagtaaaaaagacccaaacctcgcatgaaatgaggtttgggtcttttttcgtttcatttcctgttagaatttaccgaaatacggaaaaacttgccgaaatagagggtttcttgccaaaatgcagacaagccgaccatgaatcggctaaaattatcggcaaaggagaccaaaggctatgattaggattttgctgtcaacccgc

SEQ ID NO: 28522 - DNA, 260 bp, Unknown; identical to SEQ ID NO: 28509
  Description of Unknown: RightRegion for integrase B2523 sequence

SEQ ID NO: 28523 - DNA, 260 bp, Unknown
  Description of Unknown: RightRegion for integrase B2524 sequence
cctggcggcaagctggaaatcatcttcggtggcggttaccttgtcgaggaatccgtctaagcgtaggagattgagggatcatccctctttctctttctttatttcatcgtggatgtccttctgaatcgcatcgagaagggcgaccttttgctctgttgaacattccaaccttgagatgtaattataaatcaactgtgcatagacagttgcaacgcacttgccaagttcctcctgaccttcctttgaacccagcaaatgaa

SEQ ID NO: 28524 - DNA, 260 bp, Unknown; identical to SEQ ID NO: 28502
  Description of Unknown: RightRegion for integrase B2525 sequence

SEQ ID NO: 28525 - DNA, 109 bp, Unknown
  Description of Unknown: RightRegion for integrase B2526 sequence
aaaaatccattaaaacgcaattatcaaccaagtagtaaacaaaatattcacgggttttgagcggttattaaaatcagccgtgcggggaaagacaagcttgcctgtacgc

SEQ ID NO: 28526 - DNA, 260 bp, Unknown
  Description of Unknown: RightRegion for integrase B2527 sequence
cctggcggaaaactggagattatcttcggaggaggctaccttgtagaagaaacagtctaaatatcagaataggaagaaagaggaatctaccctctttctccctttcatatcatcttggatagattcctctttgaataaataggtaaaccaaaagcacattgacaatatgtgatataacacatataatggacatagagagaaagcggtgagtgtatggaaaacttctcggtggaatactatgaaacagaagatggtacacg

SEQ ID NO: 28527 - DNA, 260 bp, Unknown
  Description of Unknown: RightRegion for integrase B2528 sequence
aaggaagcagaattaaaagagatagtaaagtggttggcacttatagatttgcataaataatagttgacaatgcaactaaagttcacaatattaggaggacctatagtaccaacattagatagtgagtattgtaaaataagaacaagagacgggaaagtttatacaggtacttttttaagtactagtccagcggcacatgtttttgaagatagcaaaagtaaaactagagatgaaaaaaacatggaagttagaattgatga

SEQ ID NO: 28528 - DNA, 109 bp, Unknown
  Description of Unknown: RightRegion for integrase B2529 sequence
gaaaaccccgcagtcaaaatgctgcggggttcgagtaaagattgtttggtgacccggtagggattcgaaccctagacctactgattcgtagtcagtcactctatccagc

SEQ ID NO: 28529 - DNA, 260 bp, Unknown
  Description of Unknown: RightRegion for integrase B2530 sequence
aaatcgctgggttctgcgggatttttgtttgtggagaagggagcggaaggatactcttgacaatagaggatatatccgctatactggatatgagataaatccgctatttgaaggaagtacggccatgcaggaatatgaaattgaattttacgataagcccgatggctctgagcctgcaaaagagtttatcctgagtctggataagaaaatgcaggccaaggttttgcgtacagtcgccctgctccgtgaagaagggccat

SEQ ID NO: 28530 - DNA, 260 bp, Unknown
  Description of Unknown: RightRegion for integrase B2531 sequence
cttttctttttgctgaagctggtttttggggctgcatcgcttcgcctgcaccgtttttaggcttttgcaggcggttcctatacaacccccaacttttgactttacaccgttttcaaaaaggaatgtttgcaggccggtttttcagcaggctgctgcatcatccccttcaatgtacggcgtaaggtcgaacttgaaagtaatgttgagctgatacccacgataaacataaactaaaaaatccgccgaggactcctcccgaa

SEQ ID NO: 28531 - DNA, 109 bp, Unknown; identical to SEQ ID NO: 28519
  Description of Unknown: RightRegion for integrase B2532 sequence

SEQ ID NO: 28532 - DNA, 260 bp, Unknown
  Description of Unknown: RightRegion for integrase B2533 sequence
cctgcaaacggtcaattcggggaatcatacttaaaacaatatcaaatcacaacaaaataaaaaaatccccactttatttcatataaaacggggaaatattcggggaaaatgacttgaaatgacaaaatcacgaatattcagtgtgatttcatttgtaataagtgctatattctaaaacaaaaatccacagtctttcagcaaatttgcataaaactgtggattgggtggtcgaggtgacaggacttgaacctgcggcatct

SEQ ID NO: 28533 - DNA, 260 bp, Unknown
  Description of Unknown: RightRegion for integrase B2534 sequence
agacttgtcaatgtgaacggtataggtcaaatcgaagctgccgctggcagactgcggtgaagcagtccaatctgcggaatagtattgcatctccggtacatcgggaagaccgcttgtatcgtcaccgtcaagaacggggccgccaacaataacaatacgctgccagttatagctggctggagggaagaatgcatatgtgtagtaacctgtatcccccggagcgtaggggacagcggaaagcgagtcgtcacttataccca

SEQ ID NO: 28534 - DNA, 260 bp, Unknown
  Description of Unknown: RightRegion for integrase B2535 sequence
tttatcacgatgataggtaatgtgttcgttttgttttgtccgtttccgaacttgaaatagaaataaatgaagtctaatttgtgaacaaataaaacgtcactagcgatcaaatacaacaaaataagcggcgggcaatccctgaaaattgggaaagcctgccgcttttattatggactatttaacttgccggtcagttgtccttgccggcctgtttgataacctgatccgcaccggtagccgcaaggccggaaacaatacca

SEQ ID NO: 28535 - DNA, 260 bp, Unknown
  Description of Unknown: RightRegion for integrase B2536 sequence
atcgagatggttggttcagtgttcgtcttgttttgttccctaccgaaaataagaaagtaagtaaaaaagacccaaacctcgcatgaaatgaggtttgggtcttttttgttttatttcctgttagatttttccgaaatacggaaaaacttgccggaatagagggtttcttgccaaaatgcagacaagccgaccatgaatcggctaaaatcagcaacaaaggagaccaaaggctatgattaggattttgctgtcaacccgcc

SEQ ID NO: 28536 - DNA, 109 bp, Unknown
  Description of Unknown: RightRegion for integrase B2537 sequence
tgggttcggatttattgttttgtccgccgtcccggcataattttccccgccgccgcataatagacaggggaggggaacgctatgaagcctgctgtttatctgtacggtg

SEQ ID NO: 28537 - DNA, 260 bp, Unknown
  Description of Unknown: RightRegion for integrase B2538 sequence
ttttttgttgttaccgaccaaaggagaaactatgagctacgcgatcgtattcagcagtaaaacaggcaacacaaaattattggcagacacgctgcacgcctgtctgccacaggaaaactgctgctattttggcaccccggaccctgctgccatggaagcagacgacctctatgtgggcttctggacagacaagggaaacgctgacgaaagcactttggactttttgaagcagctgcacggcaaaaatatcttcctttttg

SEQ ID NO: 28538 - DNA, 260 bp, Unknown
  Description of Unknown: RightRegion for integrase B2539 sequence
tccgggtacttttcactcgttgagcaccaattttcggctcgttggtggcgcaccgcgtaatctgtaattattttgtaacctttgtgcaaacaaaaaatgccccgccagcaatccgtcaggatgccagcggggcattgctttacttagtggagataccttgccaattcagatgcaacaaagcctgcgatcactgccgcaatgactgcccaccagagtttgtttccaaatactccgggggctttttccagcgcagtcaagcg

SEQ ID NO: 28539 - DNA, 81 bp, Unknown
  Description of Unknown: RightRegion for integrase B2540 sequence
cggttccgtctttccagcggccataccgactacgtgccgcggggcattcccctcaaatgacaccttgcccggttcggggaa

SEQ ID NO: 28540 - DNA, 260 bp, Unknown; identical to SEQ ID NO: 28502
  Description of Unknown: RightRegion for integrase B2541 sequence

SEQ ID NO: 28541 - DNA, 260 bp, Unknown
  Description of Unknown: RightRegion for integrase B2542 sequence
tatctttcattcttttccaaaatagctttgaagcataggccacattattttcatatatgacacaaagctcagctctacttgtgcttcattaaaccatccaaccataaagctatttatctcttcaaataatacttttgaaagtttctgaataataattgtgttatccacttcttcagtataatctttcgcatacattttacatatagaacgcactccaaaataattatatagcacacctaccgttgtttttaatgcttcaa

SEQ ID NO: 28542 - DNA, 260 bp, Unknown
  Description of Unknown: RightRegion for integrase B2543 sequence
ttatatcattccgaactgcagccgcaaggccgtgactcttcaaaacttgaagagtcataactctattactactttggatttttgaagagtgacgaaaaagaagcgtatctatgtttgaaagctcactcttcaagatgaagagtcatggcctgaaaacgcagttttctttgctttttgttcatgactcttcaaaacccctgtgggtcataggagacttttgaagagtcacccttgccgggaaaactcccccagtctgctgc

SEQ ID NO: 28543 - DNA, 260 bp, Unknown; identical to SEQ ID NO: 28509
  Description of Unknown: RightRegion for integrase B2544 sequence

SEQ ID NO: 28544 - DNA, 260 bp, Unknown
  Description of Unknown: RightRegion for integrase B2545 sequence
atcgagatggttggttcagtgttcgtcttgttttgttcactaccgaaaataagaaagtaagtaaaaaagacccaaacctcgcatgaaatgaggtttgggtcttttttgttttatttcctgttagatttttccgaaatacggaaaaacttgccggaatagagggtttcttgccaaaatgcagacaagccgaccatgaatcggctaaaatcagcaacaaaggagaccaaaggctatgattaggattttgctgtcaacccgcc

SEQ ID NO: 28545 - DNA, 260 bp, Unknown
  Description of Unknown: RightRegion for integrase B2546 sequence
cctggcggaaagctggagatcatcttcggagggggctaccttgtagaagaagcagtctgaatataggggagaaagaggaatccttcctctttctctttcttcatatcatctcggatagatccctacttgaaaaatgggaaaccaacaacgcattgacaatatgtgatataacacatataatgagcatagagagaaagcggtgagtgtatggaaaacttctcggtggaatactatgaaacagaagatggtactcgaccggc

SEQ ID NO: 28546 - DNA, 260 bp, Unknown
  Description of Unknown: RightRegion for integrase B2547 sequence
tatatgacggaaatacttgaatattcgtatattaaatcggaaattaaaggtaccatatagttaccgatatcggtatatcggtaactatatggtacccattacaaagcacaccgcaaaaatataacttcattgatttggcgatatatgacaaaataaacagaggcgatatattttgaataaaaataagcaagataaatacaggtataatcataagacaaccaaaatcttttaacataaataaagaatacaattacgcctct

SEQ ID NO: 28547 - DNA, 260 bp, Unknown
  Description of Unknown: RightRegion for integrase B2548 sequence
aaggaggtggaggataatgcagagaaaattgaaatcctcgaagcaagccaatgcatttgaactaagtgcaatgcagaaagtcggatatcgctgggctttgttagcacttattatgtataatccgctaattcgctgtgaatttcaagaatgtcatctatgcttatcttcttgccggtagagcgttcatttgtcataaagaaaacaaattttcgttcaacgggatcaacctaccgcaccttccctatgaactttcggcatga

SEQ ID NO: 28548 - DNA, 260 bp, Unknown
  Description of Unknown: RightRegion for integrase B2549 sequence
ggatattttttacagcataaatccacaacaaagaaattcgaattcgtttccgattggtaatgggttcgaatttattctttttcaaaataattataggtaattgggcatttaaacttaatatgttatattaagtttaaatggaggtaaattatgatagattttgaaaaagaattactaaagctagcttctccacacattattcattattgtttaataaaacataaaattactaaatttgatgatgtagactttataagaca

SEQ ID NO: 28549 - DNA, 260 bp, Unknown
  Description of Unknown: RightRegion for integrase B2550 sequence
accataaaaataaccacaccgaagggtgtggttatttttatggatgccttaagaaattgaaacgctcgggcgaagtcaattcgccctgcgcaaggtttttgccttgaaacttcctcaccggatgaaccggggcactcccaaatctccatcccgggtacagcggtgcaggaccactacgaaccaggcaaacaccacaaggcccttggcaatgctggaaatgctgatgctccaccacacgccatccagtcccagcacggtgg

SEQ ID NO: 28550 - DNA, 260 bp, Unknown
  Description of Unknown: RightRegion for integrase B2551 sequence
tttgtttttgttttagaggatgtggatcagtccacatcctcttttttcggcgcatcgtaagtaagcacctgtttagcattccagatgtcagccgtggtcgggtcgctcccgccaacccgcgggccgcatatatgcggcccctacgacgcagcaaaaaacaaaaagccgcttacctcaaacgagataagcggcttttggcaggggtagaaggattcgaaccctcggcacgcggttttggagaccgctgctctaccaactga

SEQ ID NO: 28551 - DNA, 260 bp, Unknown; identical to SEQ ID NO: 28502
  Description of Unknown: RightRegion for integrase B2552 sequence

SEQ ID NO: 28552 - DNA, 109 bp, Unknown; identical to SEQ ID NO: 28519
  Description of Unknown: RightRegion for integrase B2553 sequence

SEQ ID NO: 28553 - DNA, 260 bp, Unknown
  Description of Unknown: RightRegion for integrase B2554 sequence
accatcgtcctcaccgtgaacggattcgtattactcagcccactttctgtttgtgggtaattaaaagcagcagccgaaaagctgctgctttttgctgcataaaaataatccccaccagcgtttccatgcgcgccggtggggatgctttttgcataacgaagttcgttataatctaccatcttcctgcaaaatgagaaaatacttgttatattttctcgtaaaggagcatggctatgattaggattttactgtccacgcgc

SEQ ID NO: 28554 - DNA, 260 bp, Unknown
  Description of Unknown: RightRegion for integrase B2555 sequence
gacggcgagcttattcagaaactcgatgtttactataaattcgtcggcagactggattaattttttgttactatgagatgttccgttgggtggggtcaacagatgatggctcatatgtaacattatgtggcagctcccagggaaaaattaacgaaatcaagaattgccttcgcaacacgcctgctataatcaagatttccaacaacatagctccttattattatacatatattgttgttgtctttcgtgataatatgctt

SEQ ID NO: 28555 - DNA, 260 bp, Unknown
  Description of Unknown: RightRegion for integrase B2556 sequence
ccaaatcatattgcctatgttgaggactgcacggtcacggattctgcgctgtgcacataataaaattagcaggaaaagtaagcgatgcctgtacgcggctgatcgtcacataaccatcttccagcggctgacgcagcacctccaaagcagtacgcgaaaattcaggaaactcatctaaaaataaaacaccatgatggctcaacgtcacttctccaggccgcggcacactgcctccacctataagcgcgcttgaagaaatc

SEQ ID NO: 28556 - DNA, 260 bp, Unknown; identical to SEQ ID NO: 28541
  Description of Unknown: RightRegion for integrase B2557 sequence

SEQ ID NO: 28557 - DNA, 260 bp, Unknown; identical to SEQ ID NO: 28541
  Description of Unknown: RightRegion for integrase B2558 sequence

SEQ ID NO: 28558 - DNA, 260 bp, Unknown
  Description of Unknown: RightRegion for integrase B2559 sequence
cacttatccgaacacatcatatttataaatggtgttattgggatgatcgtgcaaagatgaaaattccctctccggtttggagagggaatttttttatttcgcgatattctcgtaatactccatcagtttccgctccgggccggggccgtccttatcgagcagaaatgctttcgcgagggcggcgtagaattccgggcggtttaggccgaactctacggcgacggggtagtagtccgagtacatcatattcatggtcacgc

SEQ ID NO: 28559 - DNA, 260 bp, Unknown
  Description of Unknown: RightRegion for integrase B2560 sequence
ttttccatcgtaggcgggctactaagattcagcataccgcgaaagaaacgctggggttgatccccggcgttttctttttgaaaaattttctttttccaaaacttcttattgacatgtcaccaaattggtggtagtataataagcgtaaggaagaaaaacacagatgggcaaagccccggaaaggaacaaaaaatgaaatttgaaatcatcgacaaccgcgagttcgacctcaccggcaaaggttacaaatggtcgaacga

SEQ ID NO: 28560 - DNA, 260 bp, Unknown
  Description of Unknown: RightRegion for integrase B2561 sequence
cacttatccgaacacatcatatttgtaaatggtgttattgggatgatcgtgcagagatgaaaataccctctccggattggagagggtatttttttattttgcgatatgctcataatactccatcagctttcgctccgggccggggccgtccttgtcgagcaaaaacgcctttgccagggcggcgtagaattccgggcggttgagaccgaattctacggctacttggtagtaatccgagtacatcatgttcatggttacgc

SEQ ID NO: 28561 - DNA, 260 bp, Unknown
  Description of Unknown: RightRegion for integrase B2562 sequence
atagcaatagttgttagttgttcggtgtttgttttttcagtaaaaatgccggaggcgtaaagcctccggcttttcttatttctccacattctccactttgacatctatccatcctagatgtgcgtgtttgatggcgacggggaatacaccctctttcgggcggtagacctgtgcgccggatagcgaaatgtggatgagggtcaaatcctccgtcctgtatatcattgcctcaccgctttgccccacggcccgcgcagtag

SEQ ID NO: 28562 - DNA, 260 bp, Unknown
  Description of Unknown: RightRegion for integrase B2563 sequence
tttttcatcgcaggcgggctactaaaattcagcataccgcgaaagaaacgccggggttaatccccggcgttttctttttgaaaaattccctttttccaaaatttcttattgacatatcaccaacttggtggtaatataatagacgcaaacagaaaatacagaggggttgagccccggaaaggaacaaaaaaatgaaatttgaaatcatcgacaaccgcaagctctacctcaccggcaaaggttacaaatggacggacgat

SEQ ID NO: 28563 - DNA, 260 bp, Unknown
  Description of Unknown: RightRegion for integrase B2564 sequence
atttttcttgggaaaaatccgccaaaaagttgcaattttttcggttttatgttacaatgaaagaggaaaaagatttttgggaggaataccaatgaaagcaattgtttttgatatggatgggattttgttcgatacggagcgtgtcggcgatcaggcatggcggcagactgcggaggagatgcagtttgcggacatcgaagctgcaatcgagggctgccgtggactgaaccgtgcagacacccgtgcatttttcgagtcgc

SEQ ID NO: 28564 - DNA, 260 bp, Unknown
  Description of Unknown: RightRegion for integrase B2565 sequence
ggggagtctgagtgtaccaaaaagccacaccaatttggatattttaagcgcaacgcttagaataccaaagggttgccgcctttttttatttcaaattttgcactcaggaaaaaagatattttcgcgttattttggtaactggggagattcgaactcccccttttgcgatttcaagggcagaattcaaagaagcgccctttttgcgggcgcagaatagagcgttatttcctcaaaatttcatacgatctttcaggcgcctg

SEQ ID NO: 28565 - DNA, 260 bp, Unknown
  Description of Unknown: RightRegion for integrase B2566 sequence
aagataaaggtagtattcaaaaacgggacagagatttgggcgaggtgggactgtgagtaggcattttgcagttagcggctggtatctatccataaagatatcgagttttcatcatctttttcaaataggcatatgaagagatgatgtgatagcgttataacacatatcctgtgttacagtagtcatgagggatttgcacttccgttcggtctttgtcgttacatcaaacttacaataattgatttggccgggtccattca

SEQ ID NO: 28566 - DNA, 260 bp, Unknown
  Description of Unknown: RightRegion for integrase B2567 sequence
cacttatccgaacacatcatatttgtaaatggtgttattgggatgatcgtgcagagatgaaaataccctctccggattggagagggtatttctttattttgcgatatgctcgtaatactccatcagctttcgctccgggccaggtccgtctttatcgatcaaaaacgcctttgccagagcagcgtagaactccgggcggttgaggccgaattctacggcgacggggtagtagtccgagtacatcatgttcatggtcacgc

SEQ ID NO: 28567 - DNA, 260 bp, Unknown
  Description of Unknown: RightRegion for integrase B2568 sequence
tttttcatcgcaggcgggctactaagattcagcataccgcgaaagaaacgccggggttaatccccggcgttttctttttgaaaaatttcctttttccaaaatttcttattgacatatcaccagtttggtggtaatataatatacgtaaagaggaaatacagagggggctaaaccccggaaaggaacaaaaaaatgaaatttgaaatcatcgacaaccgcgagcttgacctcaccggcaagggctacaagtggacaaatga

SEQ ID NO: 28568 - DNA, 260 bp, Unknown
  Description of Unknown: RightRegion for integrase B2569 sequence
catttatccgaacacatcatatttgtaaatggtgttattgggatgatcgtgcaaagataaaaagattcctctccaagtcggagagggatctttttattattttaccacatgctcatagtatttcatgagcttgcgctccgggccggggccgtctttgtcgagcaggaatgcctttgccagggcggcgtagaattccgggcggttgaggccgaattctaccgcgacggggtagtagtccgagtacatcatgttcatggtcg

SEQ ID NO: 28569 - DNA, 260 bp, Unknown
  Description of Unknown: RightRegion for integrase B2570 sequence
gatcgcatggaaatacacttcaaatgtggagtgaatatcgaacagaaatatgtgaaatgaaagatgccctcggagccggacaacaccggtagccgagggcaatttttactttgcccgtttttgccagacaacaccccggaagaaccggagtgcatctggcccttgacgggcatcgattattattctgttattttatattgccgcaggatagactttaagttcctgaccattgcaatgagtatgtcgaattcttcaggaga

SEQ ID NO: 28570 - DNA, 260 bp, Unknown
  Description of Unknown: RightRegion for integrase B2571 sequence
ttttccatcgtaggcgggctactaagattcagcataccgcgaaagaaacgctggggttaatccccagcgttttcttgcttataaatcgtttagtttgttcatgaccgcggcgtaggtcttgggctgcatcacgctcaggctctccatcagctcatccatcacccgccatgcgtctcgcggctctttatccgagatggtgcggagaaattcgctgtttccgtaggccgcgccggaataggccgggatggactgccctcgcg

SEQ ID NO: 28571 - DNA, 260 bp, Unknown
  Description of Unknown: RightRegion for integrase B2572 sequence
gcaaggaataaaacccaaaaaatagaaatctactacaaattcgttggcgtgattaactgatttactgtcctatataacggatacgggtgtgagcatccatccgatgggctttctggtgtgcggcaggaacggcgtgcggctgttgagcgcgggcagcgcctcgccgatggagcgcgtggcggaactgatcccacaggcgcttgaaaactggaagcggctgggcgacgagcaggaaaacgcgaaaccgtctccagtgcggg

SEQ ID NO: 28572 - DNA, 260 bp, Unknown
  Description of Unknown: RightRegion for integrase B2573 sequence
ggggagtctgagtgtaccataaggtggcaacaatttggatattttaagcgcaacgcttagaatgccaaagggttgccgcctttttttatttcaaattccgcactcagaaaaaaagatattttcgcgttattttggtaactggggagattcgaactccctcttttgcgatttcaagggcagaattcaaagaaacgccctttttgcgggcgcaaattagagcgttctttcctcaaaattttatacgatctttcgggcgtctg

SEQ ID NO: 28573 - DNA, 260 bp, Unknown
  Description of Unknown: RightRegion for integrase B2574 sequence
ttttccatcgcgggcgggctgctgagattcagcataccgcgaaagaaacgctggggttaatccccagcgttttcttgcttataggtcgtttagtttgttcatgaccgcggcgtaggtcttaggctgcatcacgctcaggctctccatcagctcatccatcacccgccatgcgtctcgcggctctttgtccgagatggtgcggagaaagtcgctgttaccgtaggctgcgccggaataagccgggatggactgcacaaccg

SEQ ID NO: 28574 - DNA, 260 bp, Unknown
  Description of Unknown: RightRegion for integrase B2575 sequence
cacttatccgaacacatcatatttgtaaatggtgttattgggatgatcgtgcaaagataaaaagatccctctccaagtcggagagggatctttttattgtataaagaaaaccaccggcaatgccggtggttccaaaaagctttagctatgcatagaaaaaatgtcctcctttgataaaatgaagatggtctgccaaccaggaacaaaaatcaaaggaggaatcaagtccaaatgaaacttgatgtcagtagtttagcaca

SEQ ID NO: 28575 - DNA, 260 bp, Unknown
  Description of Unknown: RightRegion for integrase B2576 sequence
tatagcatacaaacagataaaagaaatagcgtagatgtggggattaaaatagccgcataaaacaatttatacaggttttgtctaaaatctcaatgcctctttggttattactaaatattcaaagtaatagctaaggaggtttttttttatgattaaacttgaaaaactggaaaaaggtgaattttttaaggatgcttttcttgtatcctacaggtacaacaaagattatttaaacaagatgagatcactcaaatataaaa

SEQ ID NO: 28576 - DNA, 260 bp, Unknown
  Description of Unknown: RightRegion for integrase B2577 sequence
tatagcatacaaacagataaaagaaatagcgtagatgtggggattaaaatagccgcataaaacaatttatacaggttttgtctaaaatctcaatgcctctttggttattactaaatattcaaaataatagctaaggaggtttttttttatgattaaacttgagaaactggaaaaaggtgaattttttgaggatgcttttcttgtatcctacaggtacaacaaagattatttaaacaagatgagatcactcaaatacaaaa

SEQ ID NO: 28577 - DNA, 260 bp, Unknown; identical to SEQ ID NO: 28560
  Description of Unknown: RightRegion for integrase B2578 sequence

SEQ ID NO: 28578 - DNA, 260 bp, Unknown
  Description of Unknown: RightRegion for integrase B2579 sequence
cacttatccgaacacatcatatttataaatggtgttattgggatgatcgtgcaaagataaaaagattcctctccaagtcggagaggaatctttttattattttaccacatgctcatagtatttcatgagcttgcgctccgggccggggccgtctttatcgagcaggaatgcctttgccagggcggcgtagaattccgggcggttgagtccgaattctaccgcgacggggtagtagtccgagtacatcatgttcatggtta

SEQ ID NO: 28579 - DNA, 260 bp, Unknown
  Description of Unknown: RightRegion for integrase B2580 sequence
cacttatccgaacacatcatatttgtaaatggtgttattgggatgatcgtgcaaagataaaaagatccctctccaagtcggagagggatctttttattttaccacatgctcatagtatttcatgagcttgcgctccgggccggggccgtctttgtcgagcaggaatgcctttgccagggcggcgtagaattccgggcggttgagtccgaattctaccgcgacggggtagtagtccgagtacatcatgttcatggttacac

SEQ ID NO: 28580 - DNA, 260 bp, Unknown
  Description of Unknown: RightRegion for integrase B2581 sequence
tttttcatcgcaggcgggctactaagattcagcataccgcgaaagaaacgctggggttaatccccagcgttttctttttgaaaaatttcctttttcccaaatttcttattgacatatcaccaacttggtggtaatataatagacgtaaacagaaaatacagaggggttgagccccggaaaggaacaaaaaaatgaaatttgaaatcatcgacaaccgcgagcttgatctgaaaggcaaggggtacaaatggagcgacgca

SEQ ID NO: 28581 - DNA, 260 bp, Unknown
  Description of Unknown: RightRegion for integrase B2582 sequence
cacttatccgaacacatcatatttgtaaatggtgttattgggatgatcgtgcagagatgaaaataccctctccggattggagagggtatttttttattttgcgatatgctcataatactccatcagctttcgctccgggccggggccgtccttgtcgagcagaaacgcctttgccagagcagcgtagaactccgggcggttgaggccgaattctaccgcgacggggtagtagtccgagtacatcatgttcatggttacgc

SEQ ID NO: 28582 - DNA, 260 bp, Unknown
  Description of Unknown: RightRegion for integrase B2583 sequence
ttttccatcgcaggcgggctactaagattcagcataccgcgaaagaaacgctggggttaatccccagcgttttcttgcttatagatcgtttagtttgttcatgaccgcggcgtaggtcttgggctgcatcacgctcaggctctccatcagctcatccatcacccgccatgcgtctcgcggctctttgtccgagacggtgcggagaaattcgctgttttcgtaggctgcgccggaataggccgggatggactgcactcgcg

SEQ ID NO: 28583 - DNA, 260 bp, Unknown
  Description of Unknown: RightRegion for integrase B2584 sequence
cacttatccgaacacatcatatttgtaaatggtgttattgggatgatcgtgcagagatgaaaataccctctccggattggagagggtatttttttattttgcgatatgctcataatactccatcagctttcgctccgggccggggccgtccttgtcgagcaaaaacgcctttgccagggcggcgtagaattccgggcggttgaggccgaactctacggcgacggggtagtagtccgagtacatcatgttcatggtcacgc

SEQ ID NO: 28584 - DNA, 260 bp, Unknown
  Description of Unknown: RightRegion for integrase B2585 sequence
cacttatccgaacacatcatatttgtaaatggtgttattgggatgatcgtgcaaagataaaaaatccctctccggtttggagagggatttttttattttaccacatgctcatagtatttcatgagcttgcgctccgggccggggccgtctttgtcgagcaaaaacgctttggcgagggctgcgtagaattccgggcggttgaggccgaattctaccgcgacggggtagtagtccgagtacatcatgttcatggtcacgct

SEQ ID NO: 28585 - DNA, 260 bp, Unknown
  Description of Unknown: RightRegion for integrase B2586 sequence
ttttccatcgcaggcgggctactaagattcagcataccgcgaaagaaacgctggggttaatccccagcgttttcttgttataggtcgtttagtttgttcatgaccgcggcgtaggtcttaggctgcatcacgctcaggctctccatcagctcatccattaccctccatgcgtcccgcggctctttgtccgagacggtgcggagaaattcgctgtttccgtaggccgcgccggaatagaccgggatggactgcactcgcgg

SEQ ID NO: 28586 - DNA, 260 bp, Unknown
  Description of Unknown: RightRegion for integrase B2587 sequence
ttttccatcgcaggcgggctactaagattcagcataccgcgaaagaaacgctggggttaatccccagcgttttcttgcttataggtcgttaagtttgttcatgaccgcggcgtaggtcttaggctgcatcacgctcaggctttccatcagctcatccatcacccgccatgcgtcacgcggctctttgtccgagacggtgcggagaaattcgctgctgccgtaggctgcgcctgaataggccgggatggactgcactcgtg

SEQ ID NO: 28587 - DNA, 260 bp, Unknown
  Description of Unknown: RightRegion for integrase B2588 sequence
cacttatccgaacacatcatatttgtaaatggtgttattgggatgatcgtgcaaagataaaaaatccctctccggtttggagagggatttttttattgtataaagaaaaccaccggcaatgccggtggttccaaaaagctttagctatgcatagaaaaaatgtcctcctttgataaaatgaagatggtctgccaaccaggaacaaaaatcaaaggaggaatcaagtccaaatgaaacttgatgtcagtagtttagcacac

SEQ ID NO: 28588 - DNA, 260 bp, Unknown
  Description of Unknown: RightRegion for integrase B2589 sequence
gcaattcccatttttcaggcgagaaagagcatttccgttgaatctgtaaccaacttgtaatatttgcaacaacaaaaaatcccccgccagctttcctttcggattgccagcgggggattttgtctgttattcttctgtgtagctgttcttgatgggcagtgctttggctcggttatacaattccgtacccgttccgttctctcccagcgcatggtagctgttgtaaagatagccaatgttcgtcaggcccaccgtgtcaa

SEQ ID NO: 28589 - DNA, 260 bp, Unknown
  Description of Unknown: RightRegion for integrase B2590 sequence
ttttccatcgcaggcgggctgctaaaattcagcataccgcgaaagaaacgctggggttgatccccggcgttttctttttgaaaaattttctttttcccaaatttcttattgatatatcaccaacttggtggtaatataatagacgtaaacagaaaatacagaggggttgagccccggaaaggaacaaaaaaatgaaatttgaaatcatcgacaaccgcgagctcgacctcaccggcaaaggttacaaatgggcgcacgat

SEQ ID NO: 28590 - DNA, 260 bp, Unknown
  Description of Unknown: RightRegion for integrase B2591 sequence
cacttatccgaacacatcatatttataaatggtgttattgggatgatcgtgcaaagataaaaaatccctctccggtttggagagggatttttttattttaccacatgctcatagtatttcatgagcttgcgctccgggccggggccgtccttgtcgagcagaaacgcctttgccagggcggcgtagaattccgggcggttgaggccgaattctaccgcgacggggtagtagtccgagtacatcatgttcatggttacgcc

SEQ ID NO: 28591 - DNA, 260 bp, Unknown
  Description of Unknown: RightRegion for integrase B2592 sequence
cacttatccgaacacatcatatttgtaaatggtgttattgggatgatcgtgcagagatgaaaataccctctccggattggagagggtatttttttattttgcgatatgctcataatactccatcagctttcgctccgggccggggccgtccttgtcgagcagaaacgcctttgccagagcagcgtagaattccgggcggttgaggccgaactctaccgcgacggggtagtagtccgagtacatcatgttcatggttacgc

SEQ ID NO: 28592 - DNA, 105 bp, Unknown
  Description of Unknown: RightRegion for integrase B2593 sequence
atattgagcgaggggatagtagtagagaaaactcagtatgtatctagggagaaatggtgaaggtaaaagtacctttatgaatattgtgacaggaacacttgcgcc

SEQ ID NO: 28593 - DNA, 260 bp, Unknown
  Description of Unknown: RightRegion for integrase B2594 sequence
ttcaacattgactttgagcagttcagcgctggactggacatttcggcaatcgccgcataaaaaaagcccgcttcaaaagggaagcggacataaaacaaaaaacttgcttttttcaaagcaagcatttattaagaatactcagcgcacccgattggtggagataagcgggatcgaaccgctgacctcttgactgccagtcaagcgctctcccggttagtgcggttacatacccctctaaaccgggtcaaataagcgcttca

SEQ ID NO: 28594 - DNA, 260 bp, Unknown
  Description of Unknown: RightRegion for integrase B2595 sequence
aaaaatccattaaaacgcaattatcaaccaagtagtaaacaaaatattcacgggttttgagcggttattaaaatcagccgtgcggggaaagacaagcttgcctgcacgcggctgattgttacaacgccgtcttccaacggctggcgcagaacctccagcgcctggcgtgaaaactccggcagttcatccaaaaacaatacgccgttatggctgagcgtaacttcgcccggcttcggcacgctgccgccgccaattaacgc

SEQ ID NO: 28595 - DNA, 260 bp, Unknown
  Description of Unknown: RightRegion for integrase B2596 sequence
gcaattcccatttttcaggcgagaaagagcatttccgttgaatctgtaaccaacttgtaatatttgcaacaacaaaaaatcccccgccagctttcctttcggattgccagcgggggattttgtctgttattcttctgtgtagctgttcttgatgggcagtgctttggctcggttatacaattccgtacccgttccgttccctcccagcgcatggtagctgttgtaaagatagctaatgttcgtcaggcccaccgtgtcaa

SEQ ID NO: 28596 - DNA, 260 bp, Unknown
  Description of Unknown: RightRegion for integrase B2597 sequence
ggggagtctgagtgtaccaaaaagccacaccaatttggatattttaagcgcaacgcttagaataccaaagggttgccgcctttttttatttcaaattctgcgctcagaaaaaaagatattttcgcgttattttggtaactggggagattcgaactcccccttttgcgatttcaagggcagaattcaaagaagcgccctttttgcgggcgcagaatagagcgttatttcctcaaaatttcatacgatctttcaggcgcctg

SEQ ID NO: 28597 - DNA, 109 bp, Unknown
  Description of Unknown: RightRegion for integrase B2598 sequence
cgtaaaagagtacgtctatgttgccagcatgctgtttggcttgttcttcggcgcaggtaacctcatcttccccactgcagtgggtcagcttgccggccgcaatatgtgg

SEQ ID NO: 28598 - DNA, 260 bp, Unknown
  Description of Unknown: RightRegion for integrase B2599 sequence
tgcccacgttgccgtcgatgccgccatataccaccatcgagatgggcgccgcaacaatagagttccacagcgacacaagaaccgtggcgattatgacgtgcaaaatgttcttatacttgccatagcgcgccatatagcccacaatgaggccagagccaatattgcacaggccgaacagcgaggccatgatattgccctgcaccagcgacgaaatgatgttgtacagcacgccggacgtggcaccgatccacgggcccatg

SEQ ID NO: 28599 - DNA, 260 bp, Unknown
  Description of Unknown: RightRegion for integrase B2600 sequence
ggggagtctgagtgtaccaaaaagccacaccaatctggatattttaagcgaaacgcttagagtaccaaggggtgtggctttttatatttctaaaatttcaccattttttcaatggatattttcggagttccccacggtttgaagggattcgaactcccccttttgcgatttcaagggcagaattcaaagaagcgccctttttgcgggcgcagaatagagcgttctttcctcaaaatttcatacgatctttcaggcgtctg

SEQ ID NO: 28600 - DNA, 260 bp, Unknown
  Description of Unknown: RightRegion for integrase B2601 sequence
cacttatccgaacacatcatatttgtaaatggtgttattgggatgatcgtgcaaagataaaaagattcctctccaagtcggagagggatctttttattattttaccacatgctcatagtatttcatgagcttgcgctccgggccggggccgtctttatcgatcaaaaacgcctttgccagcgcggcgtagaattccgggcggttgaggccgaactctacggcgacggggtagtagtccgagtacatcatgttcatggtca

SEQ ID NO: 28601 - DNA, 260 bp, Unknown
  Description of Unknown: RightRegion for integrase B2602 sequence
ttcaacattgactttgagcagttcagcgctgggctggacatttcggcaatcgccgcataagaaaagcccgcttcaaaagagaagtgggcataaaacaaaaaacttgcttttttcaaagcaagcatttattaagaatactcagcgcacccgattggtggagataagcgggatcgaaccgctgacctcttgactgccagtcaagcgctctcccagctgagctaaacccccatcggttcaaggctttcgcgctcggaacaatg

SEQ ID NO: 28602 - DNA, 260 bp, Unknown
  Description of Unknown: RightRegion for integrase B2603 sequence
ggggagtctgagtgtaccatcaagccacaccaatctggatattttaagctgaacgcttagagtaccaatgggtgtggctttttgtttttctaaaatttcacattttttccaatagatattttcggtgtcccccactgtttgaagggattcgaactccccttttcacagattcaaaggcaaaatcctgagaagcgccctttttgcgggcgcaaaatagagcgatctttcctcaaaattttatacgatctttcgggcgtctg

SEQ ID NO: 28603 - DNA, 260 bp, Unknown
  Description of Unknown: RightRegion for integrase B2604 sequence
tatagcatacaaacagataaaagaaatagcgtagatgtggggattaaaatagccgcataaaacaatttatacaggttttgtctaaaatctcaatgcctctttggttattactaaatattcaaagtaatagctaaggaggttttttttatgattaaacttgagaaactggaaaaaggtgaatattttgaggatgcttttcttgtatcctacaggtacaacaaagattatttaaacaagatgagatcactcaaatataaaag

SEQ ID NO: 28604 - DNA, 260 bp, Unknown
  Description of Unknown: RightRegion for integrase B2605 sequence
cacttatccgaacacatcatatttataaatggtgttattgggatgatcgtgcaaagatgaaaattccctctccaatccggagagggaattttttattttactacatgctcatagtatttcatgagcttgcgctccgggccggggccgtctttatcgatcaaaaacgcctttgtcagcgcggcgtagaattccgggcggttgaggccgaactctacggcgacggggtagtagtccgagtacatcatgttcatggtcacgcc

SEQ ID NO: 28605 - DNA, 260 bp, Unknown
  Description of Unknown: RightRegion for integrase B2606 sequence
tatagcatacaaacagataaaagaaatagcgtagatgtggggattaaaatagccgcataaaacaatttatacaggttttgtctaaaatctcaatgcctctttggttattactaaatattcaaagtaatagctaaggaggttttttttttatgattaaacttgagaaactggaaaaaggtgagttttttgaggatgcttttcttgtatcctacaggtacaacaaagattatttaaacaagatgagatcactcaaatacaaa

SEQ ID NO: 28606 - DNA, 260 bp, Unknown
  Description of Unknown: RightRegion for integrase B2607 sequence
tccgcgtgcgtgtcggcgcacggcagtgcgccgagcgatcctcttcgtctccaccaatgacacgaatactgcttttgcggtgttcgtgttatttttatacccacgcccgatttcctaatcttcgtttaatctttacacgctatgataaaatctgtataattatactggagggtgatccaatgcgtattctgcttgccgaggacgagaagagtctcaacaggataatcacaaagcagctcaaggctgccggctacagcgtg

SEQ ID NO: 28607 - DNA, 72 bp, Unknown
  Description of Unknown: RightRegion for integrase B2608 sequence
gaaagttcgaccgagaagcgtttggtccgagtggcgagaatcgaactcacggcctcttgaaccccattcaag

SEQ ID NO: 28608 - DNA, 260 bp, Unknown
  Description of Unknown: RightRegion for integrase B2609 sequence
tttttcatcgcaggcgggctactaagattcagcataccgcgaaagaaacgctggggttaatccccagcgttttctttttgaaaaatttcctttttcccaaatttcttattgacatatcaccaatttggtggtaatataatagacgtaaacagaaaatacagaggggttgagccccggaaaggaacaaaaaaatgaaatttgaaatcatcgacaaccgcgagcttgatctcaccggcaagggctacaaatggacgaacgag

SEQ ID NO: 28609 - DNA, 241 bp, Unknown
  Description of Unknown: RightRegion for integrase B2610 sequence
ggggagtctgagtgtaccaaaaagccacaccaatctggatattttaagcgaaacgcttagagtaccaaggggtgtggctttttgtatttctaaaatttcgccatttttccaatggatattttcggagttccccacggtttgaagggattcgaactccccctttcacagattcaaaggcaatatcctgagaagcgccctttttgcgggcgcagaatagagcgttttttcctcaaaatttcat

SEQ ID NO: 28610 - DNA, 260 bp, Unknown
  Description of Unknown: RightRegion for integrase B2611 sequence
aagagcaacaccagatacgtatgtcctttccggtggggagatgcagctgagcttttataatgattcttcggtcgtgtaccggatcaaagtaaagcagcacgctactctgaaaggtctggaagtggatgggctgatggaccaggcgtttgaccggaatcagaagacttaccatgcctatgtggagaagggtgcagagagtgtcaggatcactccttctgcttatctgaacagctatacgatccggataaacggaacagaag

SEQ ID NO: 28611 - DNA, 260 bp, Unknown
  Description of Unknown: RightRegion for integrase B2612 sequence
ttttccatcgcaggcgggctgctaaaattcagcataccgcgaaagaaacgctggggttaatccccagcgttttcttgcttatagatcgtttagtttgttcatgaccgcggcgtaggtcttgggctgcatcacgctcaggctctccatcagctcatccatcacccgccatgcgtctcgcggttctttgtccgagacggtgcggagaaagtcgctgttaccgtaggctgcgccggaataggccggaatggactgcacaaccg

SEQ ID NO: 28612 - DNA, 260 bp, Unknown
  Description of Unknown: RightRegion for integrase B2613 sequence
ttttccatcgtaggcgggttgctaaaattcagcataccgcgaaagaaacgctggggttgatccccggcgttttctttttgaaaaatttcctttttccaaaatttcttattggcatatcaccaatttggtggtagtataataagcgcaaggaaaaaaacacagaggggcaaagccccggaaaggaacaaaaaaatgaaatttgaaatcatcgacaaccgcgagcttgatctcaccggcaaaggttacaagtgggcgaacga

SEQ ID NO: 28613 - DNA, 260 bp, Unknown
  Description of Unknown: RightRegion for integrase B2614 sequence
cttaacggtatcgatggagtttccgaatgtgatacaagtgagctgtccatagcacaataagccctcgcccatgtcacaccagtggcatggggtacatatcctaagagatatggccagttgacaacataaatcctccatgttaatataagtgagcaaattgaattgttgcgcgggtgtggagatgagcgctgtcccaaactatcagggggtgtgcctaccagatggttcgggagagcgcttgaatggcattcaagaggtca

SEQ ID NO: 28614 - DNA, 260 bp, Unknown
  Description of Unknown: RightRegion for integrase B2615 sequence
gcgagtgttcttgcagcatttgaaaggctgttaagaacactcgcttttttcatacagtgagttggtttgaggcgtagttgacgactacgccttttttgtattcaccgacaactgcggtgccggaagtgggaacacatcgggaatgaagatggctcccacacagtagcttcccctgtctgcggcaaagccgccaatcgtagcgcagggaaagttccctgtgcggagattaagccctcggcagagcgcacacgccctttagg

SEQ ID NO: 28615 - DNA, 260 bp, Unknown
  Description of Unknown: RightRegion for integrase B2616 sequence
tcgaaaaacaaacttcaaattcagctaaggacaggcatggtattggatgtgaatctgtgattaaaagtaaagaggatgttcgtattaataatagagaaattaaaataaaagaacaaagggaggccatgtatagatgccgaaaattgagttgagctttgatatagataggctggggcaggatgtcttgaaaagattatatgccatgacggacgaaatatttgagtctgagggtttgaaatgtgtagacaggggagtggtcc

SEQ ID NO: 28616 - DNA, 260 bp, Unknown
  Description of Unknown: RightRegion for integrase B2617 sequence
ctgaatggtatcgacagcatcaacgaatgcgctacctatgaactgcccatggcgcaataagctctcaccctcgccacgaccacggcgaggggtacatatcaaagtttgatatggccagttgacaacatataccttccatgctatactgcaatttgtctctcatcaattgccggggcgggatattcaagtcctttcccaagccatcagggggtgcatacccgatggttcgggagagcgcttgaatggcattcaagaggtag

SEQ ID NO: 28617 - DNA, 260 bp, Unknown
  Description of Unknown: RightRegion for integrase B2618 sequence
tatagcatacaaacagataaaagaaatggcgtagatgtggggattaaaatagccgcataaaacaatttatacaggttttgtctaaaatctcaatgcctctttggttattactaaatattcaaagtaatagctaaggaggttttttttttatgattaaacttgaaaaactggaaaaaggtgaattttttgaggatgcttttcttgtatcctacaggtacaacaaagattatttaaacaagatgagatcactcaaatacaaa

SEQ ID NO: 28618 - DNA, 64 bp, Unknown
  Description of Unknown: RightRegion for integrase B2619 sequence
cacttatccgaacacatcatatttgtaaatggtgttattgggatgatcgtgcaaagataaaaag

SEQ ID NO: 28619 - DNA, 260 bp, Unknown
  Description of Unknown: RightRegion for integrase B2620 sequence
ggggagtctgagtgtaccaaaaagccacaccaatttggatattttaagcgcaacgcttagaataccaaagggttgccgcctttttttatttcaaattttgcactcaggaaaaaagatattttcgcgttattttggtaactggggagattcgaactcccccttttgcgatttcaagggcagaattcaaagaagcgccctttttgcgggcgcaaattagagcgttctttcctcaaaatttcatacgatctttcaggcgtctg

SEQ ID NO: 28620 - DNA, 260 bp, Unknown
  Description of Unknown: RightRegion for integrase B2621 sequence
ggggagtctgagtgtaccaaaaagccacaccaatctggatattttaagcgaaacgcttagagtaccaaggggtgtggctttttgtatttctaaaatttcgccatttttccaatggatattttcggagttccccacggtttgaagggattcgaactccccctttcacagattcaaaggcaatatcctgagaagcgccctttttgcgggcgcagaatagagcgttttttcctcaaaatttcatacgatttttcaggcgtctg

SEQ ID NO: 28621 - DNA, 260 bp, Unknown; identical to SEQ ID NO: 28583
  Description of Unknown: RightRegion for integrase B2622 sequence

SEQ ID NO: 28622 - DNA, 260 bp, Unknown; identical to SEQ ID NO: 28578
  Description of Unknown: RightRegion for integrase B2623 sequence

SEQ ID NO: 28623 - DNA, 260 bp, Unknown
  Description of Unknown: RightRegion for integrase B2624 sequence
gtttgggatggcaataatatcaatatttttattaaaggtatttcagaattatcagaataagccaattgaaatacctaagaaaatcatttccgtcatgtgtcaacagcagttgcagttgaagaggctatgaagtaaggttttaagccacttcacaaatcttgtaatgtgaacaacgataagacttcgtgttcaaaagaatatcaataaggcgttagattttgttctaacgccttatttttatgcacaaaaagacctcccca

SEQ ID NO: 28624 - DNA, 260 bp, Unknown
  Description of Unknown: RightRegion for integrase B2625 sequence
gtttgggacggcaataatatcaatatttttattaaaggtatttcagaattatcagaataagccaattgaaatacctaagaaaatcatttccgtcatgtgtcaacagcagttgcagttgaagaatcgtggaaacgataatcacaggcttgttacccgcatcgcaaaagcaaggataaataatggtttatctataactgaaatatgtaaactaacaggattgagttatgataattacatcaagtatgaacgtgacgaagtaa

SEQ ID NO: 28625 - DNA, 260 bp, Unknown
  Description of Unknown: RightRegion for integrase B2626 sequence
agttttatatttgtattctatgtatggaagcagggcttccgtatgcttacgtttatgtaagtgtacggaagcctttttttattgtctaaacgaaaggaaagaacgaaatggaaaaagatatgaaaagctaccccaacaaccttctcagacagatattccccggagaacaatttgacgatcttgccgatgacagcggaattgcacttgactatataatttccgaaactatgagcgagagtgatgctcttttgctcaaaatg

SEQ ID NO: 28626 - DNA, 157 bp, Unknown
  Description of Unknown: RightRegion for integrase B2627 sequence
gtttgggacggcaataatatcaacatttttattaaaggtatttcagaattatcagaataagccaattgaaatacctaagaaaatcatttccgtcatgtgtcaacagcagttgcagttgaagaggctatgaagtaaggttttaagccacttcacaaat

SEQ ID NO: 28627 - DNA, 260 bp, Unknown
  Description of Unknown: RightRegion for integrase B2628 sequence
aagaacaagcggttgaccttcaacttcaaggtgggaataagcaaaacgataacaatataaaacgagagtcggtggagcaaaatccatcggctcttttttgctttacaagggtgcaaaccgacaaaaagaaggatgcaagaattgagggaaacgggatcttcctttaaggcaaaacctcttgattttcctatgatttttggcattttgaatgggaaggatgcaagatcccgcggtgtaccatttgcaagtttttcaaagaa

SEQ ID NO: 28628 - DNA, 260 bp, Unknown
  Description of Unknown: RightRegion for integrase B2629 sequence
ttagaagaggctccggagtgggtaaaagagatggaagagcaacctagtcagccgctgtgaaaagtttgcttaacctcttgcgagtagatgaactagaatgcttgaaaatctggatgttgagggcaattgatggtgaagtctccggtaattcagcttagaaatatgattcattctggcactgtaggaatgcagcctattttgatgcaggcgataattattgcaaaaaaactcggtcaaaaggattttggagattggcttga

SEQ ID NO: 28629 - DNA, 260 bp, Unknown
  Description of Unknown: RightRegion for integrase B2630 sequence
ggacattacacgaacacctattattttaaaggcggtttcgccgtattggtgtggctgtagtgtcaaaacagaaaccgagggtcaaggcattgtaccttgaccctcggtttttatcgttcttgccaatcccgtttttcgagcatgtcctcaaattgttttttttgcctccgcaacgggaagcaacaattcaacaaatattttgcaaaaatgcaaatacgcttgagcgagagagataagcgtatcattatatcgggctggaa

SEQ ID NO: 28630 - DNA, 260 bp, Unknown
  Description of Unknown: RightRegion for integrase B2631 sequence
tccgtggctgcaaaacgggtaaagcagtttcgctgtgaaatattcgctccgcaaatatgaaatatgcatacggcatatgagaatcgaattttattttactttccgctttcctaagacaaatgtgcccggatatgtttctatgtcagcccggtgaaatcagggcagcggcaagccgggattcatttcattttcctccgcttcggactcttgttttcgcagtacctttatcaatggaaaagccgtccgtgcggtgaaaaaaa

SEQ ID NO: 28631 - DNA, 260 bp, Unknown
  Description of Unknown: RightRegion for integrase B2632 sequence
gcaccagaaagatgggaaccggcatacccaacgcgatatacaccagcaacaggccgatgaggttgccggtcaggccgatttgacggacgatcacaataagcgcaaccatgtagacctgaaagggcacgaacagggtggacatgatgaccagcgtcaacccgtttgaaaagcggcatttccagcgtgcaagcgcgtaaccggccatcgctgcgatcaggcaggtcaacgaagtagtagccgccaccatcaggacgctggtg

SEQ ID NO: 28632 - DNA, 260 bp, Unknown
  Description of Unknown: RightRegion for integrase B2633 sequence
cgtgaagacattcctccaatttggcaagatcaacgtataaaatatggatttgttaaataatttccacaatattgtgcacaaaagaatttattaataaaagcatataaaagctagatttttatttaatctcaacttttagttgtttattatgtattgtacatcaaaaattttagaaagacaatagacctctaatccattagtttaagaggtttatttttaatgaaacacatttttgacggactacctgagtatgtccgcat

SEQ ID NO: 28633 - DNA, 260 bp, Unknown
  Description of Unknown: RightRegion for integrase B2634 sequence
tacgtccagaaaatccagattttctaccgctttatcggcccattggatgccatcgagtaacaatgtcagaaaagtcacctccgagaactatccaacagatgcgggccacataggggatgaccagcatggagagggcggtcataacgacggcgatgacgccgatgaggcgaaggctcttggagtagaggttgttcagctcggcgtggttgcgtgcgccgtagtggtagctgacgatgggggcgctgccgacggcatagccc

SEQ ID NO: 28634 - DNA, 260 bp, Unknown
  Description of Unknown: RightRegion for integrase B2635 sequence
ctttatttccgcggtgttgtgagttttgtctttaactggaaagtgttcgccgagcactaaaaaacacccagcaggtgatggtcctgctgggcttttttgttttatcgtttgtgtttattcacgaggcgtcgcgtcggacgcttcggctgcgagttgctggactgcagtggatgcgacagttgccgccacactggcagcagtggtcgctgcttcaactgtgtgatctgcctccggcttttctgttttattcgctcggactt

SEQ ID NO: 28635 - DNA, 260 bp, Unknown
  Description of Unknown: RightRegion for integrase B2636 sequence
catattttattcgtttactcaaacaacaccttcggcgcggtgatccgtatcgaaagatagcccccattactcatccagtcccggctcctccatcgtcagccgtttgtcatacgcaagcctttgcggcgatctcatttcgtaattatccgatacctgcaaatcgtgtcgtttcatttcaactaacgtgtttttgcccgcttcttctttttctttttctgcgcattcgaccgcggcaccgaaatcgaagaaaaacttttgta

SEQ ID NO: 28636 - DNA, 260 bp, Unknown
  Description of Unknown: RightRegion for integrase B2637 sequence
tgtgaggggtttgtggtagataaagctcagtatgtatctagggagaaacggcgccggtaaaagcactactatccgtaccctgctcggacttatcgcgcccacaagcggctcggctgaagtattcgggaaggatattcggaagcaaaggaccgacattcttgcggatataggataccttccctcggaaaccatgttttacagcggtatgcgggtaaaggacgttctgcgtctgtccgcgcggctgcgcaaaaccgactgct

SEQ ID NO: 28637 - DNA, 109 bp, Unknown
  Description of Unknown: RightRegion for integrase B2638 sequence
ccgatattgagcgaggggatagtagtagagaaaactcagtatgtatctagggagaaatgaaacgagaaatgtattatggcaaaaagtataaaacaaaagaagaattaat

SEQ ID NO: 28638 - DNA, 260 bp, Unknown
  Description of Unknown: RightRegion for integrase B2639 sequence
gtttgggacggcaagaatatcaatatttttattaaaggtatttcagaattatcagaataagccaattgaaatacctaagaaaatcatttccgtcatgtgtcaacagcagttgcagttgaagaggctatgaagtaaggttttaaaccacttcacaagtcttgtaatgtggacaacgataagacttcgtgttcaaaagaatatcagtaaggcgttagattttgttctaacgccttatttttatgcacaaaaagacctcccca

SEQ ID NO: 28639 - DNA, 260 bp, Unknown
  Description of Unknown: RightRegion for integrase B2640 sequence
tttttcatcgcgggcgggctgctgagattcagcattccgcgaaagaagcgccggggttgatctccggcgctttctttttgaaaaaaatttttttgtttttcttgactttgtacgtacaatggtgtacgatttgatcgtaagggcaagggatgaacgcccgaagaaaggaagaacaaccatgaaaaacgaatttacgaaagaaaacgcccacgagtggacagagcttgaccacgtttacattgtccaggacgagccgatca

SEQ ID NO: 28640 - DNA, 71 bp, Unknown
  Description of Unknown: RightRegion for integrase B2641 sequence
tttggggagtctgagtgtaccatgcgaaagaggcagtctataagactgcctctttcgtgattttattcatc

SEQ ID NO: 28641 - DNA, 260 bp, Unknown
  Description of Unknown: RightRegion for integrase B2642 sequence
cagcatatctgctgcggtggatttttttgttgccaacgcagcgaaaatatggtaagctaaatcaaaaataatgaaataagatgaaatgagatatcaaaaatgacagaatcgctgttttacattcaaagaatccgcgcgcaatacgacaccggcattttttccaagtccgataagcgcatagccgactatctgctcgagcaccctggcgcagttgacggtgaaactgcaagctcgatcgccgagaaggtgggaacaagccc

SEQ ID NO: 28642 - DNA, 260 bp, Unknown
  Description of Unknown: RightRegion for integrase B2643 sequence
gtttgggacggcaataatatcaatatttttattaaaggtatttcagaattatcagaataagccaattgaaatacctaaaaaaatcatttccgtcatgtgtcaacagcagttgcagttgaagaggctatgaagtaaggttttaagccacttcacaagtcttgtaatgtgaacaacgataggacttcgtgttcaaaagaatatcagtaaggcgttagattttgttctaacgccttatttttatgcacaaaaagacctcccca

SEQ ID NO: 28643 - DNA, 260 bp, Unknown
  Description of Unknown: RightRegion for integrase B2644 sequence
catattttgtttatctactcaaacaacgccttcggcgctgtgatccgcatcgataaatgatcctctgcagctactcctaccaccctccatttttataaatatctgttctcactttgtaaattttcgttttcatttccctttctccttcttttttttgcagtatttatcccattcctccgggtacgtttcggcgtaccattttaggtaatcgccatatatgtgcgcttcggccgccttccgcgcggcgatcgctgaatcaa

SEQ ID NO: 28644 - DNA, 260 bp, Unknown
  Description of Unknown: RightRegion for integrase B2645 sequence
tttttcatcgcgggcgggctgctgagattcagcattccgcgaaagaagcgccggggttaatcttctgcgcatttgaaaattttctattttttcgctttctggttgacattgtacgcgcaatggtttacaatgcaatcacaggggcgagagatgaacgccagaagaaaggaagaacaaccatgaaaaacgaatttacgaaagaaaacgcccacgagtggacagagcttgaccacgtttacattgtccaggatgaaccgatc

SEQ ID NO: 28645 - DNA, 122 bp, Unknown
  Description of Unknown: RightRegion for integrase B2646 sequence
gtttgggacggcaataatatcaatatttttattaaaggtatttcagaattatcagaataagccaattgaaatacctaaaaaaatcatttccgtcatgtgtcaacagcagttgcagttgaaga

SEQ ID NO: 28646 - DNA, 260 bp, Unknown
  Description of Unknown: RightRegion for integrase B2647 sequence
atggtgcttttcttttttattccggcaaaaagatcagggggtgcaccgctcgccatgtaggcgggccagtgacacccccgatctcaaacgaaaccgttatttgatttaacgcttgcagtgttttccgcgccgccagcgtatctctacgtcggcggtctttttatgggcgcggatgggttacgcaagccgcgctgctaaaaacagcccaccgggctgtttttgccccttcttctgcgacggggccgcagctgttcgaatcc

SEQ ID NO: 28647 - DNA, 260 bp, Unknown; identical to SEQ ID NO: 28624
  Description of Unknown: RightRegion for integrase B2648 sequence

SEQ ID NO: 28648 - DNA, 260 bp, Unknown; identical to SEQ ID NO: 28638
  Description of Unknown: RightRegion for integrase B2649 sequence

SEQ ID NO: 28649 - DNA, 109 bp, Unknown
  Description of Unknown: RightRegion for integrase B2650 sequence
gtttgggacggcaataatatcaatatttttattaaaggtatttcagaattatcagaataagccaattgaaatacctaaaaaaatcatttccgtcatgtgtcaacagcag

SEQ ID NO: 28650 - DNA, 260 bp, Unknown
  Description of Unknown: RightRegion for integrase B2651 sequence
atcctgttgacgaatgtcaatgggatttttaattttgtactattcattcttcatcattaattattaatcattcatttcaggatttttgtaatgaatagtgaataatgaagtcgctttgctgatgaataatgaataattgcaattattcggcgtttctgatataatctaacatggtgatgcctgtgaaagacaacattcttatagataagtcgatcgcctttgctgcgaggataataaagcttaatcaatacctcgttcaa

SEQ ID NO: 28651 - DNA, 260 bp, Unknown
  Description of Unknown: RightRegion for integrase B2652 sequence
agacaggaaatcgaaatctattattcttttgtcggcaaggtagaactgcccgacacctaaccgcccgacctatccgacatacctcatgtgccggataggaacggcaaaattttttacacttctattacttctttatcacacataagcaaaggccgccggtatcactctttcgatgtaaatatccgggtttttccagccctccacctcaaacgtctgcattttcgtcgcctcggtcatgtcatacggcctgcggctcctcc

SEQ ID NO: 28652 - DNA, 260 bp, Unknown
  Description of Unknown: RightRegion for integrase B2653 sequence
gtttgggatggcaagaatgttaatatttttattaaaggtatttcagaattatcagaataagccaattgaaatacctaaaaaaatcatttccgtcatgtgtcaacagcagttgctgttgaagaatcgtggaaacgataaccacaggcttgttacccaaatcacaaaagcaaggataaataatggtttatctataactgaaatatgtaaactaacaggattgagttatgataattacatcaagtatgaacgagacgaagtaa

SEQ ID NO: 28653 - DNA, 109 bp, Unknown
  Description of Unknown: RightRegion for integrase B2654 sequence
gtttgggacggcaataatatcaatatttttattaaaggtatttcagaattatcagaataagccaattgaaatacctaagaaaatcatttccgtcatgtgtcaacagcag

SEQ ID NO: 28654 - DNA, 260 bp, Unknown
  Description of Unknown: RightRegion for integrase B2655 sequence
ggtgagggggtaatggtagaaaaatctcagtatgtatctagggagaaacggagcgggtaaaactacacttatccgtgttatatgcggtctgcaaaaccctgcaaatggctcgtattcgctgtacgggatcgacaatagcagcggctcaataataaaatcccgcagaagaatgggcgcagttgtggaaacgcccgctatttatactggattgtccgcaagggataatcttaaacagcaatatcgcgttttaggcttgccgt

SEQ ID NO: 28655 - DNA, 260 bp, Unknown
  Description of Unknown: RightRegion for integrase B2656 sequence
gtttgggacggcaataatatcaatatttttattaaaggtatttcagaattatcagaataagccaattgaaatacctaagaaaatcatttccgtcatgtgtcaacagcagttgcagttgaagaggctatgaagtaaggttttaagccacttcacaaatcttgtaatgtgaacaacgataagacttcgtgttcaaaagaatatcagtaaggcgttagattttgttctaacgccttatttttatgcaaaaaaagacctcccca

SEQ ID NO: 28656 - DNA, 109 bp, Unknown
  Description of Unknown: RightRegion for integrase B2657 sequence
acatggaatggtgaaactcaagaagcaaatttaagtattcttgatagtaaaaaaaaataattgaaagattggaagctaaaagtaaaaaaacgcttttagcttgtccaag

SEQ ID NO: 28657 - DNA, 260 bp, Unknown
  Description of Unknown: RightRegion for integrase B2658 sequence
gtttgggacggcaagaatatcaatatttttattaaaggtatttcagaattatcagaataagccaattgaaatacctaagaaaatcatttccgccatgtgtcaacagcagttgcagttgaagaggctatgaagtaaggttttaaaccacttcacaagtcttgtaatgtgaacaacgataagacttcgtgttcaaaagaatatcagtaaggcgttagattttgttctaacgccttatttttatgcaaaaaaaacctccccat

SEQ ID NO: 28658 - DNA, 260 bp, Unknown
  Description of Unknown: RightRegion for integrase B2659 sequence
aatggtttggagctggaagagtcactggaggaaggagacatggcggatggcaggaactaaacagcaaaggcatttgccaatcggatatcgaattcaaaatggcagggcagagataattccagaagaggcagaattgatacaacgcatttttcaggattatcaggagggagccaccatctatggaattgcaaagtggatgacagagatgggagtgctgaatgcaaacggacatccttcatggaatcatggttctatcggaa

SEQ ID NO: 28659 - DNA, 260 bp, Unknown
  Description of Unknown: RightRegion for integrase B2660 sequence
gtttgggatggcaagaatgttaatatttttattaaaggtatttcagaattatcagaataagccaattgaaatacctaaaaaaatcatttccgtcatgtatcaacagcagttgctgttgaagaggctatgaagggttgatctgacagcctaaaataacataaccgaataatatcattcaccccgcgaagccccgctttccgcggggtgaattttttctcccgcactacttgtaattcatcaaaaaatgtgttataataaat

SEQ ID NO: 28660 - DNA, 260 bp, Unknown
  Description of Unknown: RightRegion for integrase B2661 sequence
ctggacaggcgcttcgttgattacaggcgtctcttaaaggaaaccgaccccgaatcctgaaggaatttataaactcggtaagctccaacttttgtataaaaaacgggcgaatcgagtccataaccttcaaaaacggcataattcacgaatttgtgtacgccgacgaagaacctgttgccgaggcttcagagggctaaaaacaccgaaaaatccccgaaatacgctgatttcgaggatttttcttttggctcaaggacctt

SEQ ID NO: 28661 - DNA, 260 bp, Unknown
  Description of Unknown: RightRegion for integrase B2662 sequence
gtttgggacggcaataatatcaatatttttattaaaggtatttcagaattatcagaataagccaattgaaatacctaagaaaatcatttccgtcatgtgtcaacagcagttgcagttgaagaggctatgaagtaaggttttaagccacttcacaaatcttgtaatgtgaacaacgataagacttcgtgttcaaaagaatatcaataaggcgttagattttgttctaacgccttatttttatgcacaaaaagacctcccca

SEQ ID NO: 28662 - DNA, 260 bp, Unknown
  Description of Unknown: RightRegion for integrase B2663 sequence
gtttgggacggcaataatatcaatatttttattaaaggtatttcagaattatcagaataagccaattgaaatacctaagaaaatcatttccgtcatgtgtcaacagcagttgcagttgaagaggctatgaagtaaggttttaaaccacttcacaagtcttgtaatgtggacaacgataagacttcgtgttcaaaagaatatcagtaaggcgttagattttgttctaacgccttatttttatgcacaaaaagaccttccca

SEQ ID NO: 28663 - DNA, 260 bp, Unknown
  Description of Unknown: RightRegion for integrase B2664 sequence
gtttgggacggcaataatatcaatatttttattaaaggtatttcagaattatcagaataagccaattgaaatacctaagaaaatcatttccgtcatgtgtcaacagcagttgcagttgaagaggctatgaagtaaggttttaaaccacttcacaagtcttgtaatgtgaacaacgataagacttcgtgttcaaaagaatatcagtaaggcgttagattttgttctaacgccttatttttatgcaaaaaaaacctccccat

SEQ ID NO: 28664 - DNA, 260 bp, Unknown
  Description of Unknown: RightRegion for integrase B2665 sequence
gtaaaaaaaaagtcaataaccgagcgggataaaccgggctgttctgaatattttttttaaataagttctcagaacgacacgccgtattttacaggaaaatcaactatgtggatggatgcgaaaaggaatttaactacacttacgcatttgcaatctaaataatatacaaaagatgaacggaagagcagagatgtaattttttgacatttaagagaatatctgatagtatgaaaacatactaatgacgacatcggttccaa

SEQ ID NO: 28665 - DNA, 260 bp, Unknown
  Description of Unknown: RightRegion for integrase B2666 sequence
gtttgggacggcaataatatcaatatttttattaaaggtatttcagaattatcagaataagccaattgaaatacctaagaaaatcatttccgtcatgtgtcaacagcagttgcagttgaagaggctatgaagtaaggctttaagccacttcacaagtcttgtaatgcgaacaacgataagacttcgtgttcaaaagaatatcagtaaggcgttagattttgttctaacgccttatttttatgcacaaaaagacctcccca

SEQ ID NO: 28666 - DNA, 260 bp, Unknown
  Description of Unknown: RightRegion for integrase B2667 sequence
aaatcctattccaaagcaggcagcgatatgtgcctaaccctttaccccctcactgattgatttgccgccttcccttttcaggtctacaattatgtgggccgcatgaatgtggcccacgtaattgtagataccaacaagcgccgaagcgagttgttcgcttcggcgcttattttaagattcccagaataatttgcaggatcacgcagagctgttccagtgttgcttcgtttagtaataagtcgattcttttccgtgtcttt

SEQ ID NO: 28667 - DNA, 260 bp, Unknown
  Description of Unknown: RightRegion for integrase B2668 sequence
ctttatttccgcggtgttgtgagttttgtctttaactggaaagtgttcgccgagcactaaaaaacacccagcaggtgatggtcctgctgggcttttttgttttatcgtttgtgattattcacgaggcgtcgcgtcggacacttcggctgcgagttgctggactgcagtggatgcgacagttgccgccacactggcagcagtggtcgctgcttcaactgtgtgatccgtctccggcttttctgttttattcgctcggactt

SEQ ID NO: 28668 - DNA, 163 bp, Unknown
  Description of Unknown: RightRegion for integrase B2669 sequence
acttgggatggtgaaaatcttgaagctaaactaacaatgtttggagataaaaaaaaataatagaaagattggaagctaaaagcaaaaaatcgcttttagcttgtccaaggacatgcttgagttacctaaacgcacctttttggtacaagctagaaatagactt

SEQ ID NO: 28669 - DNA, 260 bp, Unknown
  Description of Unknown: RightRegion for integrase B2670 sequence
catgaacgaaaacaaaaatgccgtgctgtatgcaagattcagctcagatatgcagcatgaaacctcaattgaagcgcaggaagaagctatccgcaagtatgccagggagaacggatataccatcattgcggagtacatcgaccgtgcaaaatcagctactacaacggcaaagcgtgacagattcaatcagatgatagaggacagcaaggacggcggattcagtgtcgtaatagtccataagtacgacagattcgcaagaa

SEQ ID NO: 28670 - DNA, 260 bp, Unknown
  Description of Unknown: RightRegion for integrase B2671 sequence
gtttgggacggcaataatatcaatatttttattaaaggtatttcagaattatcagaataagccaattgaaatacctaagaaaatcatttccatcatgtgtcaacagcagttgcagttgaagaggctatgaagtaaggttttaagccactttacaagtcttgtaatgtgaataacgataagacttcgtgttcaaaagaatatcagtaaggcgttagattttgttctaacgccttatttttatgcataaaaagacctcccca

SEQ ID NO: 28671 - DNA, 260 bp, Unknown
  Description of Unknown: RightRegion for integrase B2672 sequence
gtttgggacggcaataatatcaatatttttattaaaggtatttcagaattatcagaataagccaattgaaatacctaagaaaatcatttccgtcatgtgtcaacagcagttgcagttgaagaggctatgaagtaaggttttaagccactttacaagtcttgtaatgtgaacaacgataagacttcgtgttcaaaagaatatcagtaaggcgttagattttgttctaacgccttatttttacgcacaaaaagacctcccca

SEQ ID NO: 28672 - DNA, 260 bp, Unknown
  Description of Unknown: RightRegion for integrase B2673 sequence
ttcaacattgactttgagcagttcagcgctggactggacatttcggcaatcgccgcataaaaaaagcccgcttcaaaagggaagcggacataaaacaaaaaacttgcttttttcaaagcaagcatttattaagaatactcagcgcacccgattggtggagataagcgggatcgaaccgctgacctcttgactgccagtcaagcgctctcccagctgagctatacccccatgtaaggggtgcgctgagtaatttcttattc

SEQ ID NO: 28673 - DNA, 109 bp, Unknown
  Description of Unknown: RightRegion for integrase B2674 sequence
cggttcggtctttcccgcggccataccgactacgtgccgcggggcattcccctcaaatgacaccttgcccggttcggggaagcaccggggtcggtgatcaccaaaaact

SEQ ID NO: 28674 - DNA, 260 bp, Unknown
  Description of Unknown: RightRegion for integrase B2675 sequence
ttagaagaggctccagagtgggtgaaagagattgaagcgcaacctaatcagccgctatgaaaagtttgcttacatcattctgaatgtttagtaaaattactttaaaaatgtcaacaaggttaatcaatgaaaacttcgccagttcatgagttgcagggtttggcttctgacgtcagtaatgacattgttggggttttaataaaagccaaaatgattgcagtgaagttaaacttgcccgaattggccgaatggtttgatta

SEQ ID NO: 28675 - DNA, 260 bp, Unknown
  Description of Unknown: RightRegion for integrase B2676 sequence
gcaattcccatttttcaggcgagaaagagcatttccgttgaatctgtaaccgacttgtaatatttgcaacaacaaaaaatcccccgccagctttcctttcggattgccagcgggggattttgtctgttattcttctgtgtagctgttcttgatgggcagtgctttggctcggttatacaattccgtacccgttccgttccctcccagcgcatggtagctgttgtaaagatagccaatgttcgtcaggcccaccgtgtcaa

SEQ ID NO: 28676 - DNA, 260 bp, Unknown
  Description of Unknown: RightRegion for integrase B2677 sequence
gtttgggacggcaagaatatcaatatttttattaaaggtatttcagaattatcagaataagccaattgaaatacctaagaaaatcatttccgtcatgtgtcaacagcagttgcagttgaagaggctatgaagtaaggttttaagccacttcacaaatcttgtaatgtgaacaacgataagacttcgtgttcaaaagaatatcagtaaggcgttagattttgttctaacgccttatttttatgcacaaaaagacctcccca

SEQ ID NO: 28677 - DNA, 260 bp, Unknown
  Description of Unknown: RightRegion for integrase B2678 sequence
tacgtccagaaaatccagattttctaccgctttatcggcccattggatgccatcgagtaacaaagtcagaaaagtcacctccgagaactatcctacagacgcagggcgcgagggagaactgatcttccgcttggtgtaccagcaagcgggatgcaaaaagccctttacccgcctgtggctgtccagcatggaggaaaacgccatccgggaaggattcgcccatctcaaaccgtcaactgaatacgatgcgctgtacaacg

SEQ ID NO: 28678 - DNA, 260 bp, Unknown
  Description of Unknown: RightRegion for integrase B2679 sequence
gtttgggacggcaataatatcaatatttttattaaaggtatttcagaattatcagaataagccaattgaaatacctaagaaaatcatttccatcatgtgtcaacagcagttgcagttgaagaggctatgaagtaaggttttaagccacttcacaaatcttgtaatgtgaacaacgataagacttcgtgttcaaaagaatatcagtaaggcgttagattttgttctaacgccttatttttatgcacaaaaagacctcccca

SEQ ID NO: 28679 - DNA, 260 bp, Unknown
  Description of Unknown: RightRegion for integrase B2680 sequence
gatgagattctggtgcggatcaagagcggcgcggaaatcaaacagcgattggagcgatgaaaatgatttacgcaaccggcgaccttcacggaaacattctccgattccagccgcaatactttctggagcaagcggagatgaccaaagacgactacatgatcgtctgtggcgactttggctgcgtctggaacggagacaagagcgacgatccgcagctcgattggctggaatccctgccatttacggttctgttcgtggac

SEQ ID NO: 28680 - DNA, 109 bp, Unknown; identical to SEQ ID NO: 28653
  Description of Unknown: RightRegion for integrase B2681 sequence

SEQ ID NO: 28681 - DNA, 260 bp, Unknown
  Description of Unknown: RightRegion for integrase B2682 sequence
catattttgtttatctactcaaacaacgccttcggcgcggtgatccgcatcgagaaatgatcctctgcagctactcctaccactccggctcttgcattgtcagcttctgatcatatgcaagcctttccggcgttgtgattttataatcgtccggcacatccaacgtgcgtggcaacagttttatcattgcgatctcttccttcccttctttttcatatttttctttttgttcatattccgcagcttttgcggcatcaaaa

SEQ ID NO: 28682 - DNA, 109 bp, Unknown
  Description of Unknown: RightRegion for integrase B2683 sequence
gcccaaacggcgatttttctctgtaccaaaacacagatgcaaaatcgacgttttccctaatgaagtacgcagtaacagtgctccgctgcggtatggccctgacagtcca

SEQ ID NO: 28683 - DNA, 260 bp, Unknown
  Description of Unknown: RightRegion for integrase B2684 sequence
gtttgggacggcaataatatcaatatttttattaaaggtatttcagaattatcagaataagccaattgaaatacctaagaaaatcatttccgtcatgtgtcaacagcagttgcagttgaagaggctatgaagtaaggttttaaaccacttcacaagtcttgtaatgtggacaacgataagacttcgtgttcaaaagaatatcagtaaggcgttagattttgttctaacgccttatttttatgcacaaaaagacctcccca

SEQ ID NO: 28684 - DNA, 260 bp, Unknown
  Description of Unknown: RightRegion for integrase B2685 sequence
ggggagtctgagtgtaccacaaaggaagcatccgaaccggatgcttcctttttactataaacaatccgctgaattgattttcctttttgtgaagcatgaccgtgaacttcgttgctatgctgagcacagaaattggcgcaggggcgcagaaacggggcagcggatgtatttgtgggtgatcgcggcagtgaccgcatattttatcaaggggttgtgcggctttgccaacacgctggtactgacctcgatcctgagcttcg

SEQ ID NO: 28685 - DNA, 260 bp, Unknown
  Description of Unknown: RightRegion for integrase B2686 sequence
aaatcctattccaaagcaggcagcgatatgtgcctaaccctttaccccctcactgattgatttgccgccttccctttcaggtctacaattacgtgggccgcatgaatgtagcccacgtaattgtagataccaacaagcgccgaagcgaacaactcgcttcggcgcttattttaagattcccagaataatttgcaggatcacgcagagctgttccagtgttgcttcgtttagtaataagtcgattcttttccgtgtctttt

SEQ ID NO: 28686 - DNA, 260 bp, Unknown
  Description of Unknown: RightRegion for integrase B2687 sequence
gtttgggacggcaataatatcaatatttttattaaaggtatttcagaattatcagaataagccaattgaaatacctaagaaaatcatttccgtcatgtgtcaacagcagttgcagttgaagaggctatgaagtaaggttttaagccacttcacaagtcttgtaatgcgaacaacgataagacttcgtgttcaaaagaatatcagtaaggcgttagattttgttctaacgccttatttttatgcaaaaaaagacctcccca

SEQ ID NO: 28687 - DNA, 260 bp, Unknown
  Description of Unknown: RightRegion for integrase B2688 sequence
aaccggcaagaaatagagatagaattcgaatgcggaataaaagtgaaggaaaccctgtaaagaaaaagccaactgcacaaaagtgtggttggcaattttttttgcactttgaaaaaaatcctttttgtagccttacccccgaaaaaccctttttgttgcgccgtgctaattttttagagaaaagcctcgtcaaaggaacaataccagacgcaaaggaagcacaaacaacaataagggtaaaaaatggcagaaaaacgcga

SEQ ID NO: 28688 - DNA, 109 bp, Unknown
  Description of Unknown: RightRegion for integrase B2689 sequence
atacccgacatcgctacgcgagtagttcaccgcacggacagggattcatcgctgcaataagcatgatctttgatgggtacgtaatagatgcattggctcttgcaattgt

SEQ ID NO: 28689 - DNA, 74 bp, Unknown
  Description of Unknown: RightRegion for integrase B2690 sequence
aaaaagctgcaggataccaatgatatgtacccagttttctggacaccgctaaaaatttgaataattatatttac

SEQ ID NO: 28690 - DNA, 260 bp, Unknown
  Description of Unknown: RightRegion for integrase B2691 sequence
aaatcctattccaaagcaggcagcgatatgcgcgtgacgctatatccccttaccgattgattccgtgcgttccactatacttcgctatctactattacacggtacacatgaatgtggcccacgtaattgtagatatcaacaagcgccgaagcgagttgttcgcttcggcgcttattttatgattcccagaatgatttgcaggatcacgcagagctgttccaatgttgcttcgtttagtaataagtcgattctttcccgtg

SEQ ID NO: 28691 - DNA, 260 bp, Unknown
  Description of Unknown: RightRegion for integrase B2692 sequence
gtttgggacggcaataatatcaatatttttattaaaggtatttcagaattatcagaataagccaattgaaatacctaagaaaatcatttccgtcatgtgtcaacagcagttgcagttgaagagtctatgaagtaaggttttaaaccacttcacaagtcttgtaatgtggacaacgataagacttcgtgttcaaaagaatatcagtaaggcgttagattttgttctaacgccttattttcatgcacaaaaagacctcccca

SEQ ID NO: 28692 - DNA, 260 bp, Unknown
  Description of Unknown: RightRegion for integrase B2693 sequence
gtttgggacggcaataatatcaatatttttattaaaggtatttcagaattatcagaataagccaattgaaatacctaagaaaatcatttccgtcatgtgtcaacagcagttgcagttgaagaggctatgaagtaaggttttaagccacttcacaaatcttgtaatgtgaacaacgataagacttcgtgttcaaaagaatatcagtaaggcgttagattttgttctaacgccttatttttatgcacaaaaaaagacctccc

SEQ ID NO: 28693 - DNA, 260 bp, Unknown
  Description of Unknown: RightRegion for integrase B2694 sequence
aaggacaagcggttgaccttcaacttcaaggtgggaataagcaaaacgataacaatataaaacgagagtcggtggagtaaaatccatcggctctttttttactttataagggtgcaaaccgacaaaaagaagggtgcaagaattggataaaacgagatcttcctataaggtaaaactccttgattttcctatgatttccgacatttttaacgggaaggatgcaagatcccatggtgtaccatttgcaagtttttcaacgg

SEQ ID NO: 28694 - DNA, 260 bp, Unknown
  Description of Unknown: RightRegion for integrase B2695 sequence
ttttccattgcgggcgggctgctgagattcagcattccgcgaaaaaagcgccggggttaatctcctcggcgcttctttcgcgttagtttataacgccgacaatttagccatgacggcggcgtaggttctgggctgcatcacgctaaggctctccataagctcatccatcacccgccatgcgtcccgcggctctttgtcggagacggtgcggaggaagtcgctgttgccgtatgccgcgccggaataagccgggatagact

SEQ ID NO: 28695 - DNA, 260 bp, Unknown
  Description of Unknown: RightRegion for integrase B2696 sequence
catgagcgaaaacaagaatgccgtactgtatgcaagattcagctcagatatgcagcatgaaacctcaatcgaagcacaggaagaagctatccgcatgtatgccagagagaacggatatgccatcattgcggagtacatcgaccgtgccaaatcagctactacaacggcaaagcgtgacagattcaatcagatgatagaggacagcaaggacggcggattcagtgtcgtaatagtccataagtacgacagattcgcaagga

SEQ ID NO: 28696 - DNA, 260 bp, Unknown
  Description of Unknown: RightRegion for integrase B2697 sequence
gttcacagagaaagccaaaaagagcgatacagcaaacgctgtatcgctctttttggttaacggcaatcagtaattcagaccgaagccgctgcggtagtaattgccgtcggcatcgcagtaggcgtagctgccgcccttgacgttggcgaggatagcgggatcgatgtactgatccttatcgtagccgggaacgtcgttgggagaggcgcagatctcgcgcaccacaccgtcgatctcctgctcggtgatggcaatgacgg

SEQ ID NO: 28697 - DNA, 260 bp, Unknown
  Description of Unknown: RightRegion for integrase B2698 sequence
gggtcaaagtccaccacgtcggagcaagctttgtatcgcttgctccgacttattttataagtcagagcgcgctcacgccgctgctcctcctttccaactgcgacccgctattgctgggctcgcagttggtgtgccgccctgcgggcggtatgtttcgtttctgacagaaatatcgattttcaccttctcttccaaaaagaaagacatgaccgcaggtcatgtctttctttttgatttccgctcctgttggtcgttccact

SEQ ID NO: 28698 - DNA, 260 bp, Unknown
  Description of Unknown: RightRegion for integrase B2699 sequence
ttcaacattgactttgagcagttcagcgctgggctggacatttcggcaatcgccgcataagaaaagcccgcttcaaaagagaagtgggcataaaacaaaaaacttgcttttttcaaagcaagcatttattaagaatactcagcgcacccgattggtggagataagcgggatcgaaccgctgacctcttgactgccagtcaagcgctctcccagctgagctatacccccgtataaggggtgcgctgagtaatttcttattc

SEQ ID NO: 28699 - DNA, 260 bp, Unknown
  Description of Unknown: RightRegion for integrase B2700 sequence
ccgatgcgctttttcattgatgggccatttgttttgtccaaaaagctgtttaccgcataattgtaatcgaattgcaatcgtttgtaaacagaaaaatcccccgccagcattccactttggactgccagcgggggattttctatgccttattcagttgttcggcaagttagtgtacctgctttttcaggttttccatcactccgtctgcctggattgcagcctgagtaaagctgttgttgttccaccatgcgatcagggcg

SEQ ID NO: 28700 - DNA, 260 bp, Unknown
  Description of Unknown: RightRegion for integrase B2701 sequence
gacggcacccgcgaacaagaagtcgaaatcttctaccgcttcatcggtaaaatcgattgaacaaccggtatctttatttacgtgataccaaggcttcatgcaattaaagataccacacccaacacccacgcttccgtcacttgcttcacatccaaaaacaaaaaaatggggagagcccgccaagctctccccacatattttttattctatattcgtcttctcaagtccttttacggcagcttcgatcatcccgtcaacaa

SEQ ID NO: 28701 - DNA, 260 bp, Unknown
  Description of Unknown: RightRegion for integrase B2702 sequence
gacggcgttgtggtcgaattcaaatgcggcgtggcaatcgagcaggaatacgtgaaatgagaaaacgaaccgccggtgggaaaagcacaacccgctggcggttatcattttggcgtttttccataggttttcgtatcattacggcgctctttcacatcgtaaaacgaatctttttcccgttctcctttgtgtgtactgccctaagcaaaactgtttttaatgcctttccatccccggtaaaaatcagatcttttttcttt

SEQ ID NO: 28702 - DNA, 260 bp, Unknown
  Description of Unknown: RightRegion for integrase B2703 sequence
acgggcaaaagcaagacgcaaactcatgcatttgagtttgcgtcttgcttttttacataaggatagagcttgacaggagcaatgtcgacggtcggagttttcaggtgcatcccgataaaatgctgtgctttcaaggttttgcgggttttcgccggatttgcagcaaattgccgaactttcgcaaaagtattgaaagcactgggcaaaacagctttttcggaatcgcaggcagtagtagtcaaatagtagtcatgcgcagg

SEQ ID NO: 28703 - DNA, 260 bp, Unknown
  Description of Unknown: RightRegion for integrase B2704 sequence
gtcaccattcaaatggtcggcaacgtgttcgttttgttttgtgagattccaagcgtttaagcaagttttaatcaagttctaagcaagatcgcacaaacaaaaaatgcccgcactttccattttggattgtgcgggcattttccttttgtgttagaattttccgtatttcggaaaaacttgccgaaatagagagtttcctgccaaaatgcagacaagccgaccacaaatcggctaaaatcagcaacaaaggagaccaaagg

SEQ ID NO: 28704 - DNA, 260 bp, Unknown
  Description of Unknown: RightRegion for integrase B2705 sequence
cgattccgtgacggcgtggaaattgagactttcgcacattcccaggaacatatggcataatcagcagagcataacaaaagaccagtcactgacggctggcctttttgcgtgtgcagctgttctctggtcagatttcgcttatcacagctttgaattcatccgacgcaataaagaaagaacgggaatatccagtctttcctgcttatactggatcatggaatccctcgctttgcatatccgcatacatgatttccacatgc

SEQ ID NO: 28705 - DNA, 260 bp, Unknown
  Description of Unknown: RightRegion for integrase B2706 sequence
gaggaagttcaggtggcttttctgtttatatcattccgaaccacagccgcaaggccgtgactcttcaaaacttgaagagtcataactctattaccactttggatttttgaagagtgacgaaaaagaagcgcatcagcgtttaaaagttcactcttcaagatgaagagtcatggcctgaaaacgcagttttctttgctttttgttcatgactcttcaaaacccctgtgggtcatagggaacttttgaagagtcacccctgc

SEQ ID NO: 28706 - DNA, 260 bp, Unknown
  Description of Unknown: RightRegion for integrase B2707 sequence
aatatccgttatttcccgcttggtatcgtttgtttggattccaaaaggccgtttcattgaaagaaccggccttctttttgtttttatttaattgaaccacttgacgggcatcggcacgaaatgagcgccgttctttaacgcaggtattcggcatatatattgcatatgctttgcgcgtcgctgattgtgtggatgttttcaaagaatttccgatccaggatagctttttgagcgacggttaccatgcagcactgtgcggc

SEQ ID NO: 28707 - DNA, 260 bp, Unknown
  Description of Unknown: RightRegion for integrase B2708 sequence
gacggaagccgggaacaggaggtagaaatcttctaccgctttatcggcaaaattgattaaatgacatcaatatctttaactatgtgataccgggaaaagctatccagatattcctatcttaagaaaaatagaagaggtttatgggataccatatgataggcttatttttttgcctcttgacttcggtttaaccgaaaacaaggaataagagaaaggagaggcatgataaagaagataaaagcaaagctcaaggagccgta

SEQ ID NO: 28708 - DNA, 260 bp, Unknown
  Description of Unknown: RightRegion for integrase B2709 sequence
gatggcaccagagaacaggaagttgaaattttttaccgttttatcggcaaagtcgagtgacgcattataaaagggtgtgcaatcgaacggttgcacacctagtacataaccaatatctttaagtgagggattctccagtcgctttccccgaaattcgtataggccagctggcagaaataccgccttgctatcatgtcgttatacttctgctgcgcaatggatgccgtcagttctcttttgcggcgggtgctcgcggtgtg

SEQ ID NO: 28709 - DNA, 260 bp, Unknown
  Description of Unknown: RightRegion for integrase B2710 sequence
ttcgacaacttcgagctgctgctgtaccccaaactgccgccctccggcctcagggaataacggaaataatttaaagccgtccatttcgggcggcttttctttgtgacaaccttgcaggcgtgatttatcattgctgcaaggttatcacaaataagcctaaaaaaatcgcgcccggctgtcctgcgaaaagtgtccggcgcaaaagccaagaatctgatatgcgcgtgagattttaccaacggccatgtctatcaggttcc

SEQ ID NO: 28710 - DNA, 72 bp, Unknown
  Description of Unknown: RightRegion for integrase B2711 sequence
accaaaatcctcgaacatttgttcggggatttttttgttttagtgatttgtttgggatgacaagcatcgtcc

SEQ ID NO: 28711 - DNA, 260 bp, Unknown; identical to SEQ ID NO: 28699
  Description of Unknown: RightRegion for integrase B2712 sequence

SEQ ID NO: 28712 - DNA, 260 bp, Unknown
  Description of Unknown: RightRegion for integrase B2713 sequence
gacggaagccgggaacaggaagtggaaatcttctaccgctttatcggcaaaatcgaatgacacatcttgagatacccaacaatatctttaactaagggaaacgggtactgccaatccagatatggagaatctgaaaatactctccagaagcttgcaggtcagcattgatgagctgctgggaaataaaatccccctggaaaaagaggttgttaaggagaaggaagttatttatgtgcataaccgctatacatatgaaaagc

SEQ ID NO: 28713 - DNA, 260 bp, Unknown
  Description of Unknown: RightRegion for integrase B2714 sequence
gattttagggagtctgagtgtaccatgacgagtgttcttatagcatttgaaaagctgtaagaacactcgtcttttttgtttttatccggcgatctctgctggggcgtagttgacgaacacacccttccgggtattgacggtcacatcaggaattggcagcggcagcattttagggattgtgatttctcccacgcagttataatggatgcgaagccgctgctcccacgccccatcaattttctcggcattgtaaacttcga

SEQ ID NO: 28714 - DNA, 260 bp, Unknown
  Description of Unknown: RightRegion for integrase B2715 sequence
caccaaaatcctcgaacgtttgttcggggattttttgttttagtgatttgtctgggataacaagcatcgtcccccgcaccgtaggggcggattccatatccgcccgcggagccttgccattactgcaaacgtcccgggtcgctggcgagcattgacccctgcggcgctgtaggcgtgatgccctatgcaactgcgaaatgtacgcggtacaaatacacctatcccgcgcacaaaaacattttttgcaatttttttcccac

SEQ ID NO: 28715 - DNA, 260 bp, Unknown
  Description of Unknown: RightRegion for integrase B2716 sequence
gcaaatgaggtgctggttcagctcaaaggcgggaaagagattcacaaaagattggagtgatacgatgatctacgcaaccggcgatcttcacggcaacgcgcttcgctttcagccggaatacttcccggagcaagccgaaatgacgaaggacgattatatgatcgtctgcggagattttggcttcgtctggaacggcgacaaaagtgatgacgcgcagctaggcaaactggaaacgctgccgtttaccatcctgtttgtag

SEQ ID NO: 28716 - DNA, 109 bp, Unknown
  Description of Unknown: RightRegion for integrase B2717 sequence
gattttggggagtctgagtgtaccatgacgagtgttcttatagcatttgaaaagctgtaagaacgctcgtctttttttgtttttatccggcgatctctgctggggcgta

SEQ ID NO: 28717 - DNA, 260 bp, Unknown
  Description of Unknown: RightRegion for integrase B2718 sequence
gtcaccattcaaatggtcggcaacgtgttcgttttgttttgtgagattccaagcgtttaatcaagttttaatcaagatttaatcaagttctaagcaagattgcacaaacaaaaaatgcccgccctttccattttggattgtgcgggcatttttcttttttgtgttagaattttccgtatttcggaaaaacttgccgaaatagagggtttcttgccaaaatgcagacaagccgaccacaaatcggctaaaatcagcaacaa

SEQ ID NO: 28718 - DNA, 260 bp, Unknown
  Description of Unknown: RightRegion for integrase B2719 sequence
ggggacaaagaaatagaaatagagttcgaatgtgggattaaggtaaccgaaaaactgtaaattatattataataaaataagaccgactgtggcaatcatgccgtggtcggtctatttttttatgaattacgctacttatcgttcaatgagtacaaaaatcctttttgttgcgtttaagtctgatttttaggacggtgcaggaaaattgaaatcaagtcctaccaagaaaggcgaatgaatgaacaaaaagggtaatcaat

SEQ ID NO: 28719 - DNA, 260 bp, Unknown
  Description of Unknown: RightRegion for integrase B2720 sequence
gaggtgttcttcatctgcggtgtgtttggtatttgtgtccccagattttcccgctggtaggtttgcagttgactgcaaaatgggaaaagaaaagatttgccccacggcacccaaaagggtagccgtggggttctttttgcggttttattccatttctacccgccgcacggcgtcggcggtggattctgcggtcaacggcttcttaaatgcttcgttaaattcagccacagccgcctcaatcagaatctgcatttcttcgg

SEQ ID NO: 28720 - DNA, 260 bp, Unknown
  Description of Unknown: RightRegion for integrase B2721 sequence
tcccaaaaggaaatccaaatagacttcaagtgcggtataacggtaaaagaaactctataaacaacggataagaccgacggcgtaaaaaaccgtcggtcttgattgttgaatttaatataataatggctcccacagattagaataataaatattttgaaaatattttgaaaatattaacaatatacctagtgatttatatttgttaaaatcgaaatataataaaaatattttgaaaatatgcttgacatttgtcgaataat

SEQ ID NO: 28721 - DNA, 260 bp, Unknown
  Description of Unknown: RightRegion for integrase B2722 sequence
ataacgatagttgttggctgttcggtgtttgtttttacagtaaaaatgccggaggcgtaatgcctccggcttttcttatttttccacctttagtcatactggcagggacaatagactgtgccgctaaagcagtacagaaatacagggcaaagtttgtgcagcttgcctattgaaagcgtaccgctaaagcggtacaatatagccatcgaaaggcaaacaagtcacacaaaaaggagaacaaaatcatggacgaaatcaga

SEQ ID NO: 28722 - DNA, 260 bp, Unknown
  Description of Unknown: RightRegion for integrase B2723 sequence
accaaaatcctcgaacgtttgttcggggatttttttgttttagtgatttgtttgggatgacaagcatcgccctgcggcgctggcggttcgcgcttttctgctatagatacagcaacagccccggtcctgcactggaaccggggctgtacgattttatatcaactttacgccatgaaatccggcaggggcttgccctccttcagccattggtgatactcggcggtagcggcaaactcaacgtcgccagcggagttcagcgc

SEQ ID NO: 28723 - DNA, 260 bp, Unknown
  Description of Unknown: RightRegion for integrase B2724 sequence
gacggcagccgggagcaggaagtagagattttctatcgctttataggcaaaatcgactgacacatcttttttacccaacaatatctttaactaagggaaaatggcggcggtgctcccgatatttcgctcctcccgttgttatcacaggctctcggcgtggacaccgaagccctgctgagaggcgatctggaggaaaacgatatgactaacggcaatatgaagaaaatgcggttttaccgctgtccgacctgcggcaatct

SEQ ID NO: 28724 - DNA, 260 bp, Unknown
  Description of Unknown: RightRegion for integrase B2725 sequence
gacggaagccgtgagcaggaagtagaaatctactaccgcttcatcggcaaaatcgactgacctttcttttttacccaacaatatctttaattaagggagacgggatcttcattaccagatattttgctattgccacaactagcatcttactttgatataagcattgacgagttgataggatatcaaccgcaaatggaacaagaggatattaaaaaactgtatatccgtctttctaaagatttttctatgttgtcctttga

SEQ ID NO: 28725 - DNA, 260 bp, Unknown; identical to SEQ ID NO: 28722
  Description of Unknown: RightRegion for integrase B2726 sequence

SEQ ID NO: 28726 - DNA, 260 bp, Unknown
  Description of Unknown: RightRegion for integrase B2727 sequence
aatatccaatatttcccgcttggtatcgtttgtttggattccaaaaggccgtttcattaaacgaaccggccttcttttttgtttttatttgaattggccacttgacgggcatcggcgcgaaatgagcgccgttctttaacgcaagtattcagcatataggtggcaaacgcactgtgctgtgcttattgtgtaaatgtttttaaagaattttcgatccaggatagctttttgagcgacggttaccatgcagcactgtgcgg

SEQ ID NO: 28727 - DNA, 260 bp, Unknown
  Description of Unknown: RightRegion for integrase B2728 sequence
attcgcgaagatattcctccaatttgggctgaacaacgcaaactttatggggtaatctagttttgcacagtattttgcacagtattattttcttatttttgctttataatacctacacaatagtcgttttctatttgttgttgtgttttaagtagcttgtttatcagcagtttaaatttgaaaataaacctctaatcaatagttttagaggtttatttatgaagccccccatttttaacggactacccgagtacgtccga

SEQ ID NO: 28728 - DNA, 109 bp, Unknown
  Description of Unknown: RightRegion for integrase B2729 sequence
gattttggggagtctaagtgtaccatgacgagtgttcttatagcgtttgaaaagctgtaagaacgctcgtctttttttgtttttatccggcgatctctgctggggcgta

SEQ ID NO: 28729 - DNA, 260 bp, Unknown
  Description of Unknown: RightRegion for integrase B2730 sequence
ttcgataacttcgagctgctgctgtaccccaagctgccgccctccggcctcggagaataacggaaataattaaagccgtccatttcgggcggcttttctttgtgacaaccttgcaggtgtgatttatcattgctgcaaggttatcacaaataagcctaaaaaaatcgcgcccggctgtcctgcgaaaagtgtccggcgcaaaagccaagaatctgatatgcgcgtgagattttaccaacggccatgtctatcaggttccg

SEQ ID NO: 28730 - DNA, 260 bp, Unknown
  Description of Unknown: RightRegion for integrase B2731 sequence
gattttggggagtctgagtgtaccatgacgagtgttcttatagcatttgaaaagctgtaagaacactcgtcttttttgtttttatccggcgatctctgctggggcgtagttgacgaacacacccttccgggtattgacggtcacatcaggaattggcagcggcagcattttagggattgtgatttctcccacgcagttataatggatgcgaagccgctgctcccacgccccatcaattttctcggcattgtaaacttcga

SEQ ID NO: 28731 - DNA, 98 bp, Unknown
  Description of Unknown: RightRegion for integrase B2732 sequence
cggttcggtctttcccgcggccataccgactacgtgccgcggggcattcccctgaaatgacaccttgcccggttcggggaagcaccggggtcggtgat

SEQ ID NO: 28732 - DNA, 260 bp, Unknown
  Description of Unknown: RightRegion for integrase B2733 sequence
agccttgaaaaatgggggtttcccttgcgctgttctgacgatatgattttaaccatataaccacctacactaccattctgtttggaagtaaggtttccgttgtatccgtctgtaagcggcacacccagctcatttgcaacctcaaatttgaaacgatttaatgcgccctttgcttctggtacagctgctttgttagaagaagtattgtttgacataatcattttcctccttggttaattgttgttttgtttgatgttaca

SEQ ID NO: 28733 - DNA, 260 bp, Unknown
  Description of Unknown: RightRegion for integrase B2734 sequence
acgggcaaaagcaagacgcaagctcatgcatttgagtttgcgtcttgcttttttacataaggatagagcttgacaggagcaatgtcgacggtcggagttttcaggtgcatcccgataaaatgctgtgctttcaaggttttgcgggttttcgccggatttgcagcaaattgccgaactttcgcaaaagtattgaaagcactgggcaaaacagctttttcggaatcgcaggcagtagtagtcaaatagtagtcatgcgcagg

SEQ ID NO: 28734 - DNA, 260 bp, Unknown
  Description of Unknown: RightRegion for integrase B2735 sequence
gtcaccattcaaatggtcggcaacgtgtttgttttgttttgtgagattccaagcgtttaatcaagttttaatcaagttctaagcaagatcgcacaaacaaaaaatgcccgcactttccattttggattgtgcgggcattttcctttttgcgttagaattttccgaaatacggaaaaacttgccgaaatagagggtttcttgccaaaatgcagacaagccgaccacaaatcggctaaaatcagcaacaaaggagaccaaag

SEQ ID NO: 28735 - DNA, 260 bp, Unknown
  Description of Unknown: RightRegion for integrase B2736 sequence
ataacgatagttgttagctgttcggtgtttgttttttcagtaaaaatgccggaggcgtaatgcctccggcttttcttatttttccacaatctctactttgacatctatccagcccagatgcgcgtgtttgatagcgacagggaatactccgtcctttgggcggtagacttgtgcgccggacggggaaacatgaacgacactcaaatcctccgtcttatatatcatcgcctcgccgctttgtcccacggctctcgcagtag

SEQ ID NO: 28736 - DNA, 109 bp, Unknown
  Description of Unknown: RightRegion for integrase B2737 sequence
gtgctgtttacggctgcaatattgtgcaaattccgacagattaccgtatatatctattgaaatgtgtcttacttttgtgataaaatgatatgtctaaacatcaaaatac

SEQ ID NO: 28737 - DNA, 260 bp, Unknown
  Description of Unknown: RightRegion for integrase B2738 sequence
gtcaagaaccctatcgttttatcttgcctttgtttttccttgtgtttattggctttttgaaaacagagggtgcatttttgttttccggttgaagcctcaaatcggtttgcaaatggctcgttttgccgttttggagcgaaatcccgaaaagctatcgtgtagaatggggctatcgtgtggacgcaggggctatcgtgtaacgggcattttttacgcgcgaacggcagctcttcgtgaataaagatgcaagaaaagacccg

SEQ ID NO: 28738 - DNA, 260 bp, Unknown
  Description of Unknown: RightRegion for integrase B2739 sequence
gtcaccattcaaatggtcggcaacgtgttcgttttgttttgtgagattccaagcgtttaagcaagttttaatcaagttctaagcaagatcgcacaaacaaaaaatgcccgcactttccattttggattgtgcgggcattttttgtttgtgttagaattttccgtatttcggaaaaacttgccgaaatagagagtttcctgccaaaatgcagacaagccgaccacaaatcggctaaaatcagcaacaaaggagaccaaagg

SEQ ID NO: 28739 - DNA, 260 bp, Unknown
  Description of Unknown: RightRegion for integrase B2740 sequence
gacggcactcgtgagcagttggtagagattcactaccgctttattggaaaaatcgactgatggttcatcagtaaaacaatatctttaactaagggaaacgggtgcatcccttccggatatgtacaagttggttgatatcgccaatctctttgacgtgagcatcgacgaccttgtttgcggtaatcatttgggcggtttggattcgctgcctgcggttgatagcaaactgggtgaaattatttccgtgttggacaatattg

SEQ ID NO: 28740 - DNA, 64 bp, Unknown
  Description of Unknown: RightRegion for integrase B2741 sequence
cggttcgatctttatcgaagtcataccgtccacgtgcttcgatgcagtcccctaaaatgacgtc

SEQ ID NO: 28741 - DNA, 260 bp, Unknown
  Description of Unknown: RightRegion for integrase B2742 sequence
ggaaaacacgatatcgagttccaattcaaatgcggagtcgatatccatgaaaccatataagcgaagaccactatccaataaaacgggtagtggccttttttatttgcacagaggcggagaactattgaaaaaagtggaggaatacggtataataaaaataacaatcggcacagtcggctgaacacggagtacaatatgtcaaacaacaactcgataatagatttaatgtcattagagtacgaacaaaagtattttgaaga

SEQ ID NO: 28742 - DNA, 260 bp, Unknown
  Description of Unknown: RightRegion for integrase B2743 sequence
aggggttcggatttcttgtttttatcaaggatattgaagcttagtttcggaatagaataacatcaaattcaggaggatatacccatgaaaaagctcataagctgtgcgttcaatatagataccgcctgcgtggaacttcatttcacggatgggagtatttactccataaattgcaccgccgtggagaacgaggcggcggacaaccgcttccagcgctctgagctggactacctcatctacaacgacccgctggcctatgc

SEQ ID NO: 28743 - DNA, 260 bp, Unknown
  Description of Unknown: RightRegion for integrase B2744 sequence
gaacctgtttccgattggagaagggttcggatttttcgttttcttcgggtacgacaatgaaggctcccctatttgaagaatttttatgtggatttcatgagttgttctaaaaaatgtattgaaatccacatgatttggtgtatactgtttaataagggaatcatatgaattgaatatgtgcggtaatactatgaaggatggtgttttcaatatgatgacactatatagaaacatatacaaaaattcagctccgcttcata

SEQ ID NO: 28744 - DNA, 260 bp, Unknown
  Description of Unknown: RightRegion for integrase B2745 sequence
ctggaagcacttactggtatggtaagtgctttttgtgtatctgcgtattatatcagataatgatgagtgtccatatagtgaagattatatgggcaggaatttggagcaaagcttaagtagttatattattgatagctggattataaataggtgtattaaaaatgcgcaaagcaggaaagtatataatcgtacccacttatatcattacaggaaaatataataatccccatcctcatccgagaatttcttataagtagtgt

SEQ ID NO: 28745 - DNA, 260 bp, Unknown
  Description of Unknown: RightRegion for integrase B2746 sequence
ccggaaaagacaagcctttgttcaggttggctggggaacctggactcgaaccaagactaacggagtcagaggacataatctcttggttgcgcggtgattgacctgaatggtttgttattcgttttcttatttgaaatcaataacttacttcaaagccccgttcatttttcttaatcttcttttatgtcgatttgttttgtcggttgaccgcgggttgaccggaaggagaagaaaaatgaaagttctgtttactgaaaaat

SEQ ID NO: 28746 - DNA, 260 bp, Unknown
  Description of Unknown: RightRegion for integrase B2747 sequence
attgaattcagtcgcgaaaatgatgtagaattcatattagacatagacctacaccaataaagtgtgggttaacttttacccttcgtgtatatcattatggtgttatttttatagcgccccgatgatatacacgttgacaaaacaacgtttggaggaactataaatgagaatagtatggaaagatacagcagtagaaagagcagacttcaaataccgcggatattggattgagggttataagaatggttggaccataacga

SEQ ID NO: 28747 - DNA, 260 bp, Unknown
  Description of Unknown: RightRegion for integrase B2748 sequence
caattccgctttactttatgtaaggcggtttttttattgccgctcatcaattttatctaaaacccaaccattgtttcgccgtggcggacatttcccgtcaagtttttttgtaaacacacaaagtcaccgctgtgataatttgtgtgtcacttttacaaattcaggggcgtacccctgcacccgatccgctttactttatgtaaggcggttttttattgccgctcatggatcattatttataaacccaactttgttatttc

SEQ ID NO: 28748 - DNA, 260 bp, Unknown
  Description of Unknown: RightRegion for integrase B2749 sequence
ggaaaacacgatatcgagttccaattcaaatgcggagtcgatatccacgaaactatataagcgaagaccactatccaataaaacgggtagtggtctttttttatttacacaggggagcaaaaagtacttatcgtcatacacacttccgaaaagtgccttaaaaacgagattttgtcatacatacacaagataaaagtcgacatttttgtagaaaaagcaagtgtcggcttttttgtcgtcccaaaatgtgttataatgtc

SEQ ID NO: 28749 - DNA, 260 bp, Unknown; identical to SEQ ID NO: 28746
  Description of Unknown: RightRegion for integrase B2750 sequence

SEQ ID NO: 28750 - DNA, 62 bp, Unknown
  Description of Unknown: RightRegion for integrase B2751 sequence
cgcgtttcacttggtggagctgacgggagtcgaacccgtgtccgaaaagaaatcggttagag

SEQ ID NO: 28751 - DNA, 260 bp, Unknown
  Description of Unknown: RightRegion for integrase B2752 sequence
attacttggaacggcgaaaatgaaaatattgatatatatatagattttgacaacgaataattatatcttaacgtttccacgtaatggcttgcgctgttgctgttgaggaatcgtggaaacgctctaatgactaattcgcatcagtaaaacttgtaaaagagcaggctcgtatatagagtctgctcttttttgttataccacattataaaaatcgtaaaaaatagggaataacaaactaattaaagtctgttattccctat

SEQ ID NO: 28752 - DNA, 260 bp, Unknown
  Description of Unknown: RightRegion for integrase B2753 sequence
tttttcccatttcataagcattttgcattgtcctgctttgctttatacatctatcgttaattgccacaacacatcaattcttcacacaaataactttttcataacaaatcaccctttttattctatcgtagctgtcctaatctctgtttagtaaaccacttaaacgttgattttttacaaaaagcacgtccgaaacgtgcttgacataatttttatactatgttatactttagatacaagataagggcaacagcagttgt

SEQ ID NO: 28753 - DNA, 260 bp, Unknown
  Description of Unknown: RightRegion for integrase B2754 sequence
attgaattcagtcgcgaaaatgatgtagaattcatattagacatagacctacaccaataaagtgggggttaacttttacccttcgtgtatatcgttatggtgttatttttatagcgccccgatgatatacacgttgacaaaacaacgcttggaggaactataaatgagaatagtatggaaagatacagcagtagaaagagcagacttcaaataccgcggatattggattgagggttataagaatggttggaccataacga

SEQ ID NO: 28754 - DNA, 260 bp, Unknown
  Description of Unknown: RightRegion for integrase B2755 sequence
tttttcccatttcataaacattttgcattgtcctgctttgctttatacatctatcgttaattgccacaacacatcaattcttcacacaaataactttttcataacaaatcaccctttttattctatcgtagctgtcctaatctctgtttagtaaaccacttaaacgttgattttttacaaaaagcacatctaaaacgtgcttgacataatttttatactatgttatactttagatatagagaagagcggtaaacagcttt

SEQ ID NO: 28755 - DNA, 260 bp, Unknown
  Description of Unknown: RightRegion for integrase B2756 sequence
ccgttcgacaattttgaccttttgctttatcccaagctgccgccctccatcgtggagtgagggtataatttaagccgtccatttcgggcggcttttctttgtgataaccttgcaaacgtgatatatttttccgctttcacggtcaccgtaacggtgaagggtttggcatccgttccctcgccctgtacatcgccgacggtgaagctgccttcgagcacatcgtattcttgtttgtgatccgcattcgtattgcagacgac

SEQ ID NO: 28756 - DNA, 260 bp, Unknown
  Description of Unknown: RightRegion for integrase B2757 sequence
cccacgatctatttcgtgggtgcgttcttcgtcctgaccatgccgctccctgagcggtaaagaaataggcactcggccttgatagccgggtgcctatttctttttgccctgctgacaatataaacaacatagtgcggtcaataattgtgcagtatacaccttgataaccatgcgcgcgtatggtaatatatagccacagtaaaggaaaggtggacaacaaaatgaaaatgattaaggtcgaggaactgcacaaggaaacc

SEQ ID NO: 28757 - DNA, 260 bp, Unknown
  Description of Unknown: RightRegion for integrase B2758 sequence
caattccgctttactttatgtaaggcggtttttttattgccgctcatcaattttatctaaaacccaaccattgtttcgccgtggcggacatttcccgtcaagtttttttgtaaacacacaaagtcaccgctgtgataatttgtgtgtcacttttacaaattcaggggcttgcccctgcacccgatccgctttactttatgtaaggcggttttttatttccgctcatggatcattatttataaacccaactttgttatttc

SEQ ID NO: 28758 - DNA, 260 bp, Unknown
  Description of Unknown: RightRegion for integrase B2759 sequence
accattgaaatttatttcaatggaataggtgcattcgactacgatagctgcaattcataagcagtagcttcgtagagtgacttcaacgccagtggacttccctctgcgaagttagggtaccgagccgcaaacttacggttcggacaaaagctaaaacgacatacctgcgggggttccccgcctctggacacccaccaccctttaaaaagcgtggacgtaaattttgattctttgtgtaattgcagctttttgtgttattg

SEQ ID NO: 28759 - DNA, 260 bp, Unknown
  Description of Unknown: RightRegion for integrase B2760 sequence
ttacaggccgcgtgcagcggcggcgcaaacgagagaacaaatgtctgcatcaaggcataagaaaagcagacctgcctaaacaagtctgctttcatggtggacgatagctccccaaatccgaacccttccccggaaggagagtcagcgttgttgctgacccggaaagtcttggttttgcaggaagtgaggttgtatgcggtggtgattttatatccgtcaggttcgtcccatactgtcacggagtttaccagaaggtcgat

SEQ ID NO: 28760 - DNA, 260 bp, Unknown
  Description of Unknown: RightRegion for integrase B2761 sequence
gaaccggtttccgattggagaagggttcggatttttcgttttcttcgggtacgacaatgaaggctcccctatttgaagaatttttatgtggatttcatgagttgttctaaaaaatgtattgaaatccacatgatttggtgtatactgtttaataagggaatcatatgaattgaatatgtgcggtaatactatgaaggatggtgttttcaagatcggaagagcgtcgtgtagggaaagagtgtagatctcggtggtcgccg

SEQ ID NO: 28761 - DNA, 260 bp, Unknown
  Description of Unknown: RightRegion for integrase B2762 sequence
atcaaaatggttggttcagtgttcgtcttattttgtcccctgccgaaaatcaggaagtaagcaaaaaagacccaaacctcgcatgaaatgaggtttgggtcttttttcgtttcgtttcttggtagaatctaccgaaattcggaataatttgccggaatatagggttttccgccaaaatgcagacaagccgagtacatatcggctaaaattatcggcaaaggagaccaaaggctatgattaggattttgctgtctacccgc

SEQ ID NO: 28762 - DNA, 260 bp, Unknown
  Description of Unknown: RightRegion for integrase B2763 sequence
caattccgctttactttatgtaaggcggtttttttattgccgctcatcaattttatctaaaacccaaccattgtttcgccgtggcgggcatttcccgtcaaggttttttgtaaacacacaaaatcaccgctgtgataatttgtgtgtcacttttacaaattcaggggcgtgcccctgcacccaatccgctttactttatgtaaggcggttttttattgccgctcatggatcattatttataaacccaactttgttatttc

SEQ ID NO: 28763 - DNA, 260 bp, Unknown
  Description of Unknown: RightRegion for integrase B2764 sequence
actatagacggagaaacaaagaaaataggcattgatttatggggatctaaaaaaaaatagacccctgtatggaatatgataccaaaacatcgcaattatataaagcatgtacatgcatgattgatataattgcgataatccctccaaatattaactttaccttagataaattatacactatatctgaaaatgatactataggagaacgtataagaaaattaaggaaactgaaaaatataactgctaaagagttaggaaaa

SEQ ID NO: 28764 - DNA, 260 bp, Unknown
  Description of Unknown: RightRegion for integrase B2765 sequence
aaaggcaatcaactaacgttcaatttcaaggtgggaattgtaaaaactgcgacgatataaaaacagggtcggtggatgataagtccatcggcctttttttgttgtgaaaaaacactcgaattgacaaagtgcaacattcgtggtataatcctatatatgaataagtataaaaaagagttgcttcacctttggggtaaagtcggtttaatagtcaatctatcgcaaatgatagaatacacgctggcaaatgtgttggcttt

SEQ ID NO: 28765 - DNA, 109 bp, Unknown
  Description of Unknown: RightRegion for integrase B2766 sequence
tttgatgctccgccctttaaaattgattacattgaaaactacacggtgaaactcttgtaataggtggtttaatcaatgaagaagaacaaaaacgtctgcaaaaagtacc

SEQ ID NO: 28766 - DNA, 260 bp, Unknown
  Description of Unknown: RightRegion for integrase B2767 sequence
ggaaaacacgatatcgagttccaattcaaatgcggagtcgatatccacgaaaccatataaacgaagaccactatccaataaaacgggtagtggtctttttttatttacacaggggcggattggttcttaaaacttttgcaaaaaagtacttatcgtcctacacactcccgaaaagtgccttaaaaacgagattttgtcatacatacacaaaaaaactaaaaaatgaccgtgtttttccgaaacacggtcattttcttaaa

SEQ ID NO: 28767 - DNA, 260 bp, Unknown
  Description of Unknown: RightRegion for integrase B2768 sequence
tttgccagaatcgggggcttttctgcgcaaggtttgcatagcctgctttcctttgcataaaaagaagaaattttaggcgaacaaggctctcgtcaattctctgcgttcgtctgcgtccatcagccggatggcttcaaggatctccctgccggagatttttgttgccgccggcttttcattttgccggggctggggtgctgccggggtcaggtcttgggaatagaagttcgcttcgatcttctctgccagttccagccggg

SEQ ID NO: 28768 - DNA, 260 bp, Unknown
  Description of Unknown: RightRegion for integrase B2769 sequence
ttacaggccgcgtgcagcggcggcgcaaatgagagaacgaacgtctgcatcgaggcataagaaaagcagacctgcctaaacaagtctgctttcatggtggagctgacgagtccctcgtcgaactcaccgccctcgatgtttgagaggtccgctgacttgagttttccgtcttcgctactgatattaaagtagataagaagccggtcgtcgtataagtagacttctgaaacaaagtcagagatgattctccgacggtagtc

SEQ ID NO: 28769 - DNA, 260 bp, Unknown
  Description of Unknown: RightRegion for integrase B2770 sequence
tttttcccatttcataagcattttgcattgtccttctttgctttatacatctatcgttaattgccacaacacatcaattcttcacacaaataactttttcataacaaatcaccctttttattctatcgtagctgtcctaatctctgtttagtaaaccacttaaacgttgattttttacaaaaagcacatctaaaacgtgcttgacataatttttatactatgttatactttagatatagagaagagcggtaaacagcttt

SEQ ID NO: 28770 - DNA, 260 bp, Unknown
  Description of Unknown: RightRegion for integrase B2771 sequence
aaaggaaatcaactaacgttcaacttcaaggtgggaattgtaaaaactgcgacgatataaaaacagggtcggtggatgataagtccatcggccttttttgttgtgaaaaaacactcgaattgacaaagtgcaacatttgtggtataatcctatatatgaataagtataaaaaagagttacttcacctttggggtaaagtcggtttaatagtcaatctatcgcaaatgatagaatacacgctggcaaatgtgttggctttt

SEQ ID NO: 28771 - DNA, 260 bp, Unknown; identical to SEQ ID NO: 28747
  Description of Unknown: RightRegion for integrase B2772 sequence

SEQ ID NO: 28772 - DNA, 260 bp, Unknown
  Description of Unknown: RightRegion for integrase B2773 sequence
ttgatagaagaaaaagaagtcttagctttaaggcttctttttttctgtatacaggtttgacattacagggaaactggaatataatgtaggatacttgtgagaacttaacggaaaacacagatattgtttaggaggtagtcggcgatggctgaaaagaaacaggtagttacctatacaggacttaaaaaaattgaagaagaacttcaggatctgaaagtaaataaacgtagagagattgctgccaagatcaaggaagcaag

SEQ ID NO: 28773 - DNA, 260 bp, Unknown
  Description of Unknown: RightRegion for integrase B2774 sequence
tctgcccaggtccaccaagaacgagttgatgaaagtcagctcgttctttttgttttgtagtggtttggaaaatgtaagcgatacgccggtggtgtatcagagccgctctgcggcctgcgtcgagatcacactttcgtcgttttaccacaaaagcaaaaatatcgagctgcccttaggctggctcgatattttctttctctctattttttcgcgtccgtccttttcagggcggcgcgttttctttttctgctgcggggatc

SEQ ID NO: 28774 - DNA, 77 bp, Unknown
  Description of Unknown: RightRegion for integrase B2775 sequence
ttcgattttggggagtctgagtgtccctggcgggattcgaacccacggcctttcgcttaggaggcgaacgctctatc

SEQ ID NO: 28775 - DNA, 260 bp, Unknown
  Description of Unknown: RightRegion for integrase B2776 sequence
ttgtacttctgtgacggagtctttgcagcgcttctaatcgcaaaaagagacaaggtatagtttcggctataccttgtctcttttttgcatccttcgggctagcgccatgacagaacgctattttcataacgtaatcggttatttcctaacaattccatgcgaaattctaaaattactgttagaatttatcacaaaggagcatggctatgattaggattttactttccacacgcctaggcgaaaggcgctggacacaagcg

SEQ ID NO: 28776 - DNA, 260 bp, Unknown
  Description of Unknown: RightRegion for integrase B2777 sequence
gaggaaactcaggtggcttttctgtttatatcattccgaaccacagccgcaaggccgtgactcttcaaaacttgaagagtcataactctattaccactttggatttttgaagagtgacgaaaaagaagcgcatcagcgtttaaaagttcactcttcaagatgaagagtcatggcctgaaaacgcagttttctttgctttttgttcatgactcttcaaaacccctgtgggtcatagggaacttttgaagagtcacccctgc

SEQ ID NO: 28777 - DNA, 260 bp, Unknown
  Description of Unknown: RightRegion for integrase B2778 sequence
aggggttcggatttcttgtttttatcaaggacattgaagtttagtttcgggatagaataacatcaaattcaggaggatatacccatggaaaagctcataagctgcgcgttcaatatggataccgcctgtgtggagcttcgcttcacggacgggagcatttgctccatcgactgcaccgccgtggagaacgaggtggcaaacagtatgtaccagcggtcggagctggactggctaatctgcaacgatccgctggcctatgc

SEQ ID NO: 28778 - DNA, 109 bp, Unknown
  Description of Unknown: RightRegion for integrase B2779 sequence
aattttaccctcataccgtcaaaaacgggcatgcttgacccatacaggcaaggattttgagcagcgcataaaataaacttgctcgggaaggtcattgccgccctgacgc

SEQ ID NO: 28779 - DNA, 260 bp, Unknown
  Description of Unknown: RightRegion for integrase B2780 sequence
agggctttttatttttgcaagctattaataactataaaaccacttagaacaaaaagctgatgcctgcatgtaagcatgacgcatcagcttttttattcttaaggtggctcaaatcattatgtctaaagtataataatacttgcgcacttcaaatcattgcccagattgtatactctgccggaatcgacaccgacaacagttggtcggagaatgtagtactcactgttttttacaactcttgccttttcaccattgctaag

SEQ ID NO: 28780 - DNA, 260 bp, Unknown
  Description of Unknown: RightRegion for integrase B2781 sequence
ggaaaacacgatatcgagttccaattcaaatgcggagtcgatatccacgaaaccatataaacgaagaccactatccaataaaacgggtagtggtctttttttatttacacaggggcggattggttcttaaaacttttgcaaaaaagtacttatcgtcctacacactcccgaaaagtgccttaaaaacgagattttgtcatacatacacacaaaaggaacttaagtttgtctcaacgataaatttaagttctttttcattt

SEQ ID NO: 28781 - DNA, 260 bp, Unknown; identical to SEQ ID NO: 28747
  Description of Unknown: RightRegion for integrase B2782 sequence

SEQ ID NO: 28782 - DNA, 260 bp, Unknown
  Description of Unknown: RightRegion for integrase B2783 sequence
cctatgcggatcgtcgcatctgcttacggcttttcagtttactttaagctcgccggatgacgccaaattgaaaagcacctgctggttttcagcaggtgcttttgtttcacctatttacttctttttctccccttctaccaccgcaacaacatcaaccttagtctcctccgtcatctccgccagccagtgtgccagcttgtccttcaagcccgccggaaccggcagatcgcacagcagcatattcttgatgatactcgtcg

SEQ ID NO: 28783 - DNA, 260 bp, Unknown; identical to SEQ ID NO: 28769
  Description of Unknown: RightRegion for integrase B2784 sequence

SEQ ID NO: 28784 - DNA, 260 bp, Unknown
  Description of Unknown: RightRegion for integrase B2785 sequence
attacttggaacggagaaaatgaaaatattgatatatatttagacttcgacaacgaataattataccttaacgtttccacgaaatggcttgcgctgttgctgttgaggaagctatgaaagcgtaaacaataacgtacctacgttgtttaacgaataaataaaatctctccctaaatttaattagggggagatttttgcttatatagacattttgtcacccaaatttttttagggtgacaaatggatgacaatatatttat

SEQ ID NO: 28785 - DNA, 260 bp, Unknown
  Description of Unknown: RightRegion for integrase B2786 sequence
gttgagtactttacttataatagtgatacaaaacaaattaaatttaagataagactataaagatattgcaaaaggagacagattaaacaataactctgcctccttttttaaaattattcctctattaattttatatcatctataactggtggaagaattaatggaatattattattcatacttttagtaattgtccccaataaataactaacttctgaagctactggatccattagctcttcaatattagaaataatatc

SEQ ID NO: 28786 - DNA, 260 bp, Unknown
  Description of Unknown: RightRegion for integrase B2787 sequence
aaagtcttcttttttgaaggacttcttgtggcactcacttatgcgcaaagaaaatcctgagctttgagctcaggattttttctatgctcctatacgaaaaataacgtaaatcgttataatctaacatttcaaagacaagtacatctcttgatgttagaatataacgaaaggagcatgcatggctatgattagaattctattgtccagaaagcttggcgagctgaaatggacgcaggctgaccttgcacgagctaccggta

SEQ ID NO: 28787 - DNA, 260 bp, Unknown
  Description of Unknown: RightRegion for integrase B2788 sequence
aacaccgaacagcaaattgatatttatttccgttatatcggcaatacagccggattataacgaaaaaagccaacggacaggcaacgcataagcatcacctgtccgctggctccccgattaacaaaggtgtctttatgggaaccttgttaaatcaaggttttcaccattccagagcacaaatgtaccccaccacagagcgattctgcggcggggttttctgcgttttacagtttttacggcattttgagacgaagtaatcg

SEQ ID NO: 28788 - DNA, 260 bp, Unknown
  Description of Unknown: RightRegion for integrase B2789 sequence
aacgcaaactttatccttgacgtttatcctaaaatcccccgcaaatcaccattatcttgaatgggggtaaacctacgggccgcctatggccgtagctcctattccatctgtgagacgtgtccttgaatacgcggtgacagagatccctccggagaagatatctatgggcataccaaattacggatatgactggcctctgccctttgtccggggcgagacagccgccgtgagcattggcaaccaggaagccgtggctattg

SEQ ID NO: 28789 - DNA, 260 bp, Unknown
  Description of Unknown: RightRegion for integrase B2790 sequence
tcccatcagccgtcaaagcgtcctcaaatcggacggcttgggtgccatccttgtagttgaacgtaatcagcatccggtcatcgtgcaggaaaatggcatttacaaaaatttcaatcagtgctttccgctgttttttctgcgaaatatcgaactttctaaatttcatcagccagaatcggatgaaatcctcattgaagctgggcttcttcaatttttcatctgcgatttttacagtcagctcatctttctggctttccagc

SEQ ID NO: 28790 - DNA, 260 bp, Unknown
  Description of Unknown: RightRegion for integrase B2791 sequence
cccacgatctacttcgtgggtgcgttcttcgtcctgaccatgccgctccctgagcggtaaaaaataggcactcggccttgatagccgggtgcctatttctttttgtcctgctgacaatataaacaacatagtgcggtcaataattgtgcagtatacatcttgatagtcatgcgtatgtatggtaatatatagccacagtaaaggaaaggtggacaacaaaatgaaaatgattaaggtcgaggaactgcacaaggaagtca

SEQ ID NO: 28791 - DNA, 260 bp, Unknown
  Description of Unknown: RightRegion for integrase B2792 sequence
acgggaaaaggggaatatttcaaaacagaaattttagaaacatcttttattgaaaagtaacgtgtgcaatatcggtacagatgtaccgatatccgtaagtgttgcggtcacctctttatatggcatggtataccgctgagataaataccgcattgatgcagcgagctccccgtccggtccaccaaataacaataacctataatatttctacatattataaatatacacgaaaatgatacaatattcaccccctcagagag

SEQ ID NO: 28792 - DNA, 260 bp, Unknown
  Description of Unknown: RightRegion for integrase B2793 sequence
gagcaacaaatttgggagaaacagtccggtggactgtttcgtagaattcctgtttcttaaaagagtcctgtcacctcgaccaaataataaaagacatccattagggtgtctttttattttttatataattttaacaggactcgaacctgtggcggaattatccaaatttggcgactgcaaagagcaacaaatttgggagaaacagtccggtggactgtttcgtagaattcctgtttcttaaaagagtcctgtcacctcga

SEQ ID NO: 28793 - DNA, 260 bp, Unknown
  Description of Unknown: RightRegion for integrase B2794 sequence
acgggaaaaggggaatatttcaaaacagaaattttagaaacatcttttattgaaaagtaacgtgtgcaatatcggtacagatgtaccgatatccgtaagtgttgcggtcacctctttatatggcatggtataccgctgagataaataccgcattgatgcagcgagctccccgtccggtccaccaaataacaataacctataatatttctacatattataaatatacacgaaaatgatacaatattcacccctcagagagc

SEQ ID NO: 28794 - DNA, 260 bp, Unknown
  Description of Unknown: RightRegion for integrase B2795 sequence
cgaattgcaaacacttcgttggtttgcaattcggttcttgtctcacggccgcttcactgagccccgattcaaggtttataaaataacttttcccggaggtctccccgtgtcccattccagatttcaaaccgcccggaagcttctgatcttctggacgttcttcatcggcctcggcgccgtggccggcgcagccgccatgctgatcgaccccagcggccgcgcgctgggcatggacgccatgctgccgtattttcaggtcc

SEQ ID NO: 28795 - DNA, 260 bp, Unknown
  Description of Unknown: RightRegion for integrase B2796 sequence
tgtgtgttcgcacaaggtcgtttatgctccaccagtaaaaaaagccacctgaaaacgtaagttttcgggtggcttttgctatacggagcgatgttgtattgttacgccagatccggtaggatatccgaccacagagcctgctcctgccgcaaggcatcgaagcagcagtccagatacatcttattgaccgccgcaaaaatggtgctgcgcagcagcagacgctcgtcgttgagcacagtctccggctgggctgccttgcc

SEQ ID NO: 28796 - DNA, 260 bp, Unknown
  Description of Unknown: RightRegion for integrase B2797 sequence
cccacgatctacttcgtgggtgcgttcttcgtcctgaccatgccgctccctgagcggtaaagaaataggcactcggccttgatagccgggtgcctatttctttttgccctgctgacaatataaacaacatagtgcggtcaataattgtgcattgtacaccttgataacaatgcgcatgtatggtaatatatagccacagtaaaggaaaggtggacaacaaaatgaaaatgattaaggtcgaggaactgcacaaggaagcc

SEQ ID NO: 28797 - DNA, 260 bp, Unknown
  Description of Unknown: RightRegion for integrase B2798 sequence
cgcaggcaggacattgagatttattacagctttgtcggcaagattgacttgcccgaataaccgcccgacctatccgacacaatggccaagtgtcggataggaacggcaaaattttttgcacttctattgcttctttatcacacataagcaaaggccgaggcgatccagcagcttgagacacagcgggatgtgcagatcatgcgggccattgatgccgccgcggatgagattggggcggacatccagagcgccacggtacg

SEQ ID NO: 28798 - DNA, 109 bp, Unknown
  Description of Unknown: RightRegion for integrase B2799 sequence
agaataccaagaattattttatgtaaaacactacatttgaatgatgttgtaatattataagtaaagtgcctacacttttaattagtataggcacttttttatttgcatt

SEQ ID NO: 28799 - DNA, 260 bp, Unknown
  Description of Unknown: RightRegion for integrase B2800 sequence
cccacgatctacttcgtgggtgcgttcttcgtcctgaccatgccgctccctgagcggtaaagaaataggcactcggccttgatagccgggtgcctatttctttttgccctgctgacaatacaaacaacatagtgcggtcaataattgtgcagtatacaccttgataaccacgcgcgcgtatggtaatatatagccacagtaaaggaaaggtggacaacaaaatgaaaatgattaaggtcgaggaactgcacaaggaagcc

SEQ ID NO: 28800 - DNA, 124 bp, Unknown
  Description of Unknown: RightRegion for integrase B2801 sequence
gggttcgattttggggagtctgagtgtaccataagaaatcaccgacccgatcgccggtgattttctatacggcccgttggtcaagtggttaagacagaggcctctcacgcctttaacatcggtt

SEQ ID NO: 28801 - DNA, 260 bp, Unknown
  Description of Unknown: RightRegion for integrase B2802 sequence
acaggaaaaggggaatatttcaaaacagaaattttagaaacatcttttattgaaaagtaacttgtgcaatatcggtacagatgtaccgatatccgtaagtgttgcggtcacctctttatatggcatggtgtaccgctgagataaataccgcatcgatgcagcgagctccccgtccgggccaccaaatagcaataacctataatatttttacatattataaatatacacgaaaatgatacaatattcgcccctcagagagc

SEQ ID NO: 28802 - DNA, 260 bp, Unknown
  Description of Unknown: RightRegion for integrase B2803 sequence
ccatccgatgaacaatcgggtggcttttctgttttgttttctgccgatttcacgcagtgaacacaccgcactgtaccaaaggtctttgggcaaatcaaacacccgcaccgcattcccttttcttgggagatgcagtgcgggtgcttttttcgtttgtcagccagcgggctgaatcatcttacaggatgctgatgcggcctgcaccgtagggattctcgtagtccagcaggtagccggggtactctgccagcacactgttg

SEQ ID NO: 28803 - DNA, 260 bp, Unknown
  Description of Unknown: RightRegion for integrase B2804 sequence
gatcacgaagaacgcgacattcacatctactacaattttgtcggatatatcgaagcataagccgtcattctttattcgaggttgactaacgagtattatgcgaaagacatttccaagaagcgacggattgtgaacaagatgaaaggaaatgcaggcgttccgctttctccgccgccctacggttacatcaaaaacccagacgatccccgcttttgggtggtagagccggaggctgccgaggtggtgcgccggatctaccg

SEQ ID NO: 28804 - DNA, 260 bp, Unknown
  Description of Unknown: RightRegion for integrase B2805 sequence
gggttcgattttgaggagtctgagtgtgccgcctgctgcaaaaggcggcagaggaactgaaggcttcggcgctggagcgctgctgcggtgagacacgggagagtaaccttgctatgcggcgggtgtttgagcgctgcggctaccggctgaacaaaacggaagaaagctactacgaaaacccgaccgaaagcgcctgcaagtatgtgctgcggcgggaggagttggagtaaaatcaaataacgccccccggcaccgccaat

SEQ ID NO: 28805 - DNA, 260 bp, Unknown
  Description of Unknown: RightRegion for integrase B2806 sequence
acaggaaagggggaatatttcaaaacagaaattttagaaacatcttttattgaaaagtaacgtgtgcaatatcggtacagatgtacctatatcggttagcgttcctgttacttccttatacggcatagtatatctttgagagagatagcgcatagatgcggccagttctccgtcgggacctccgaattgactgatgatgatctttgcaattttaggattggtttgtgtgatttttaccggatattgaagacgtttttcat

SEQ ID NO: 28806 - DNA, 106 bp, Unknown
  Description of Unknown: RightRegion for integrase B2807 sequence
ctattccacaaagagttgtacaatttgcacagaaataaaataaggcgcaaaaaaaagtaaaaaatccggcatttcgaggaaaatttctctgctgtgtagatcggaa

SEQ ID NO: 28807 - DNA, 260 bp, Unknown
  Description of Unknown: RightRegion for integrase B2808 sequence
aagaccgaaatattggtgattttcaagggcggatatgaggtgagaactgaaattgaataacgatcaaaatttacggcttgcgatatattcgcaggctgtttttgttgggaggtgtaacattgtcatcaaattttaacggcataaaaacgagaaaatacggcattgagatcgaaatgactggacttacacgaagtcaggcggcaaaggctatggcaaatgtccttgacgggcgtgttgaacacgagggtggaagctatgac

SEQ ID NO: 28808 - DNA, 260 bp, Unknown
  Description of Unknown: RightRegion for integrase B2809 sequence
aagaccgaaatattggtgattttcaagggcggatatgaagttaaagcagaaattgaataacgattaaaatttacagcttgcggagaaatctgcaggctgtttttgttgggaggcggttatttggcaggcaattttgatgggataaaaacaagaaattttggcattgagatagaaatgacaggcttaactcgctgtcaggcggcaaaagcactttcaggtgttctgggaggagaggttgtccatgagggtggcgcttatga

SEQ ID NO: 28809 - DNA, 260 bp, Unknown
  Description of Unknown: RightRegion for integrase B2810 sequence
cccacgatctacttcgtgggtgcgttcttcgtcctgaccatgccgctccctgagcggtaaagaaataggcactcggccttgatagccgggtgcctatttctttttgccctgctgacaatataaacaacatagtgcggtcaataattgtgcattgtacaccttgataacaatgcgtatgtatggtaatatatagccacagtaaaggaaaggtggacaacaaaatgaaaatgattaaggtcgaggaactgcacaaggaagcc

SEQ ID NO: 28810 - DNA, 260 bp, Unknown
  Description of Unknown: RightRegion for integrase B2811 sequence
acaaagtcaggaagaatgaaactttttaacagtaaaaaaaaaaggcgctctttaatgtagcgcccaaatgctcctgcagtagctgcaaaatctatatttgtaaccatatttgcatctgtctttggaatgattccattttgcttcatagcatattctagtgccatagctggaactcctgcaagactcttcaaatacatattaattttccaattgcttggagatttaaatctaatataaaaaatgacagtataattaacacc

SEQ ID NO: 28811 - DNA, 260 bp, Unknown
  Description of Unknown: RightRegion for integrase B2812 sequence
acaacaaatatattctttgtgagtggtcttttcggaataataacaacgcctcatgattgatttcatgaggcgtttattcttacttaataattttgattacctgtcctgcatagataagattagcattttttatgttgttgtccttaacgatttttgcgactgtcgttttatatcttgcggctatcgccgaaagagtatcaccctttttgactgtatatctagttactttctttttaggtgtgtcttttttcggctccgac

SEQ ID NO: 28812 - DNA, 260 bp, Unknown
  Description of Unknown: RightRegion for integrase B2813 sequence
cccacgatctacttcgtgggtgcgttcttcgtcctgaccatgccgctccctgagcggtaaaaaataggcactcggccttgatggccgggtgcctatttctttttgtcctgctgacaatataaacaacatagtgcggtcaataattgtgcagtatacaccttgataacaatgcgtatgtgtggtaatatacagacacaataaaggacggaggtaaatccaaaatgaccgctaaatactttgcaaactctgcaaaatatcag

SEQ ID NO: 28813 - DNA, 260 bp, Unknown
  Description of Unknown: RightRegion for integrase B2814 sequence
gatcacgaggaacgcgacattcacatctactacaattttgtcggatatatcgaagcataaagcgtcattctttattcgaggttgactaacgagatgtacgcccgggacatcagccgcaaggtgcggtctgcccatcgtatccggggcaattccggcgaaccgctgggccagccgccctacggctacaggaaagacccgctgaacaaaaagcactggatcattgacccggaggccgctcaggtggtgcgggacattttccg

SEQ ID NO: 28814 - DNA, 260 bp, Unknown
  Description of Unknown: RightRegion for integrase B2815 sequence
ctgaaactgacggagaggggaggcggacaggatgcagtggcacatgccaatcggctataaggttgtggatggaaaaatcaccatctgtgaagaacagagaaaaattgtggaacagatatttacagactatgacagcggagtggcggcaggcaggatcgcccagaacctgaaagggagaaaaatatgcaatgcaaaagggaaagtgtcctggacccatgcatccattggcaggatactggaaaacccaagctaccttggca

SEQ ID NO: 28815 - DNA, 260 bp, Unknown
  Description of Unknown: RightRegion for integrase B2816 sequence
gataaagtaatatgggatggaaatgaagcccatatttttatcaagggtatttcagattgagtcctatgagatacccgaaaatagtaatattagttcaattgctgtatctataaaagacattgctatgaatagtcaacagcagttgcagtcgaagaatcgtggaaacgataatcattgcaatattactaacttgcacgaacttcgcgtaagtaaaggacttactatagctgacatctgtaaaaaaaccggtttaagttatg

SEQ ID NO: 28816 - DNA, 260 bp, Unknown
  Description of Unknown: RightRegion for integrase B2817 sequence
ctgtctgcttttgccgggtactttgtagtcagaatcgtagtcagaaaaagtaggccatagcaggatttttccggggtttcccggggacaaaaagtagtcaaaaataatgaatcaggccgccgtctccgtaaaacagagacagcggcctgattcatcaaggggattatttgtccatatcatggtacgaaccatcgggcggccgtgctgttcgacccctcttctctgcaagataaaaaatgaccccaagcctgagcttgagg

SEQ ID NO: 28817 - DNA, 260 bp, Unknown
  Description of Unknown: RightRegion for integrase B2818 sequence
acagaaatgtgtggtgcttttttgttttatctgccgttcaccttacgttccctttcatgaaaaaagcgtttgtcgcagcccgcaggccgtgacaaacgctttttattttactgtgcgcccaagcgcattttgaagtcctgatagccaaagtgcaccagctcccggcaattgccgtctgcgcccagcagccagataggcggcaggggcatcccattgaaggtgttgttcttgcaggtggtgtagatggccatatcgccgaa

SEQ ID NO: 28818 - DNA, 260 bp, Unknown
  Description of Unknown: RightRegion for integrase B2819 sequence
gaagaaaacaacaatttgacattgtattataatgagcttgttgatgctttaaaaatataatgtaccttttgcaacgtggtggtcccgcaggggaacttgctgccgcatggcaatatttagatcaaagatatattatgcctgatgaaagaggaaaagcgcttttaactgatattggtacagaagaacttgctcatgttgaaattatttcagccatgatttatcaattaatgaaaggtgcttcattagaagaattaaaagag

SEQ ID NO: 28819 - DNA, 260 bp, Unknown
  Description of Unknown: RightRegion for integrase B2820 sequence
gattcggtcacattcaaatttaccgattttctggaacgtgaagtgcctttaattgaataaaaagagccataaaatttgagccgattgggtagccagtcggctcttgttttgtttctaaattagtggagattttttgcgtattaccgaaagaggactttgtctattgacactgatttgtctaatggtagtcgggtagtctttgaggcctttttgtcagacttttttgactatcgaaacaactcgacaccgccatcaacccg

SEQ ID NO: 28820 - DNA, 233 bp, Unknown
  Description of Unknown: RightRegion for integrase B2821 sequence
acgggaaaaggggaatatttcaaaacagaaattttagaaacatcttttattgaaaagtaacatgtgcaatatcggtacagatgtaccgatatccgtaagtgttgcggtcacctctttatatggcatggtgtaccgctgagataaataccgcatcgatgcagcgagctccccgtccgggccgccaaattgtgaaatgatcactttggcaatctgtgggttcgtttgtgtaatct

SEQ ID NO: 28821 - DNA, 260 bp, Unknown
  Description of Unknown: RightRegion for integrase B2822 sequence
aagaccgaaatactggttatttttaaagggggatacgaggtcaaagcggagattgaataacgattaaaatttacggcttgcggtatattcgcaggctgttttttgttgggaggtgtaacattggcaggaaactttgaaggcataaaaacaagaaagttcggcattgagatagaaatgaccggcttgactcgttgtcaagcggcgaaggcaatttcaagagttttaggcggtgatgttgtccatgagggcggaagttatga

SEQ ID NO: 28822 - DNA, 260 bp, Unknown
  Description of Unknown: RightRegion for integrase B2823 sequence
acagaaatgtgtggtgcttttttgttttatctgccgttcaccttacgttccctttcatgaaaaaagcgtttgtcgcagcccgcaggccgtgacaaacgctttttattttactgtgcgcccaagcgcattttgaagtcctgatagccaaagtgcaccagctcccggcaattgccgtctgcgcccagcagccagataggcggcaggggcatcccattgaaggtgttgttcttgcaggtagtgtagatggccatatcgccgaa

SEQ ID NO: 28823 - DNA, 260 bp, Unknown
  Description of Unknown: RightRegion for integrase B2824 sequence
cccacgatctacttcgtgggtgcgttcttcgtcctgaccatgccgctccctgagcggtaaataaaagcactcggatttccgggtgctttttgttataaaaaaatattgtgcattgtcaaaaaacttttcaaaaactctttacatatgcaatcatatgtggtataataatggtgtcagaagaacacccacaaaacaaacggaggtaaatagtatgtggagttttgaaaacggtatcgaggtttacgagcatagcgagtatt

SEQ ID NO: 28824 - DNA, 260 bp, Unknown
  Description of Unknown: RightRegion for integrase B2825 sequence
tatgtctgcgggaaaaaacagcactgttttgttgagaacggcccgacactgccgatatgaacaggccgccgatcaaaacgaacaaaccgcttgcatcttgtgcctgcagcggcggtcagtgaccgccttgcacaggctaattgaactgtgtcagagcactggtgcaccgccgcaccacctgacgtgtcattgcgaggaggccgcaggccgacgcggcaatctcctgcaatagcctgcgtattcgccgagaccgccctgtt

SEQ ID NO: 28825 - DNA, 260 bp, Unknown
  Description of Unknown: RightRegion for integrase B2826 sequence
aagaccgaaatactggttattttcaaaggcggttacgaggttagaacggaaattgaataacgattaaaatttacggcttgcggagaaaatctgcaagctgtttttgttgggagctggttatttggcaggcaattttgaggggataaaaactcagcgtttcggtgtggaagtagaatgcacaggcttaacaaggtcggcagcggcaaaggcggtcgcaaaggttttaggcggcttgaccgagcattacggcggcagttatg

SEQ ID NO: 28826 - DNA, 260 bp, Unknown
  Description of Unknown: RightRegion for integrase B2827 sequence
acaggaaaaggggaatatttcaaaacagaaattttagaaacatcttttattgaaaagtaacgtgtgcaatatcggtacagatgtaccgatatctgttaaagtcgcagttacttctttatacggcatggtatatctctgagacaggtatctcatagatgctgccaattctccgtcaggtccaccatatagcaataacctataatatgcccgcaaacccccataaacagagggctcacgagatgtagaggtggaagatcagt

SEQ ID NO: 28827 - DNA, 260 bp, Unknown; identical to SEQ ID NO: 28799
  Description of Unknown: RightRegion for integrase B2828 sequence

SEQ ID NO: 28828 - DNA, 260 bp, Unknown
  Description of Unknown: RightRegion for integrase B2829 sequence
cgccagcgcattgatatttattacagctttgtaggcaagattgacttgcccgaagaataaagcccgacctatccgacaccctgcgcaagtgccggataggaacggcaaaattttttacacttctattacttctttatcacacataagcaaaggcaccgggcttcctgcggctccctggtttgaaatgctgtaccggcactttacgctggatgccaccagactctcgccagacgcgtcgaaaccggcgtcatcctttttgt

SEQ ID NO: 28829 - DNA, 260 bp, Unknown; identical to SEQ ID NO: 28802
  Description of Unknown: RightRegion for integrase B2830 sequence

SEQ ID NO: 28830 - DNA, 260 bp, Unknown
  Description of Unknown: RightRegion for integrase B2831 sequence
tccggctacttttcactggttgaacaccaattttcggcccgtttgtggcgcaccgcataatctgtaatcattttgtaatctttgcgcaaacaaaaaatgccccgccagcaatccgtcaggatgccagcggggcattgctttacttagtggagataccttgccaattcagatgcaacaaagcctgcgatcaatgccgcaatgaccgcccaccagagtttgtttccaaatactccgggggctttttccagcgcggtcaagcg

SEQ ID NO: 28831 - DNA, 109 bp, Unknown
  Description of Unknown: RightRegion for integrase B2832 sequence
gatttgaaagataacggacaagagaaaaattatgcggaaaccggtttttgtcatcggtaatgtatcatccgattgcagcttttccgagcaatagcaccgacgccgattg

SEQ ID NO: 28832 - DNA, 260 bp, Unknown; identical to SEQ ID NO: 26345
  Description of Unknown: RightRegion for integrase B2833 sequence

SEQ ID NO: 28833 - DNA, 260 bp, Unknown
  Description of Unknown: RightRegion for integrase B2834 sequence
ccatccgatgaacaatcgggtggcttttctgttttgttttctgccgatttcacgcagtgaacacaccgcactgcaccaaaggtctttgggcaaatcaaacacccgcaccgcattcccttttcttgggagatgcagtgcgggtgcttttttcgtttgtcagccagcgggctgaatcatcttacaggatgctgatgcggcctacaccgtagggattctcgtagtccagcaggtagccagggtactctgccagcacactgttg

SEQ ID NO: 28834 - DNA, 260 bp, Unknown
  Description of Unknown: RightRegion for integrase B2835 sequence
ggaactaaaatcagagttggagaattaaataacagagccgcagggctgctcattttttaatgagaaagtcttgcgggtttttgtcattttatttttatagaatgaaagataaccgaccaacttgacaaatttactttaatgcattagaataatattagcgttacatcttggtgaaatctgactttgctatgaattgaaagggaaaatatatgtgctttatttgtgataggataaagatgataggtcaaggaactaacccg

SEQ ID NO: 28835 - DNA, 109 bp, Unknown
  Description of Unknown: RightRegion for integrase B2836 sequence
acggatcttcttatcgctcatctccatgctgcttctggatttcttattcatccagtttaaatcgtcatttgtatataattcctttggtgtgatctcatacagagcacaa

SEQ ID NO: 28836 - DNA, 260 bp, Unknown
  Description of Unknown: RightRegion for integrase B2837 sequence
gtggacttcaactttgatcttgcacagtatttggagaatagcgatgaacttgcttgctgacaaacacaaaaacaccgttgacttcgatttgaaatcaacggtgtttgtaactcttatttgagccaatggtggagaataccgggatcgaaccggtgacctcttgcatgccatgcaagcgctctcccagctgagctaatcccccataattttccagaagtggaaacctctggaaaagagatgctcaaacaagaaacgtttta

SEQ ID NO: 28837 - DNA, 260 bp, Unknown
  Description of Unknown: RightRegion for integrase B2838 sequence
aacggcagcgtcacacaggaaattgatatttactttactcatattggaattgtaaagtagacaaaaagaaaacggagggcgttggtctgaatgactcagacggctctccgtgatacataactttagggacgttccctatttgtgccgcgataacacgggctttttaaggtgagtatccatttggtatcaccaatatggttgcgggagaccgcaacatatttttcccacgatacttttcaaatttttatacttttttcaaa

SEQ ID NO: 28838 - DNA, 260 bp, Unknown
  Description of Unknown: RightRegion for integrase B2839 sequence
ttaccacatctgcgacttcaagctcctcggctccaatctcctcttttctatcttcaatgagaatcagcgctttcggcgttgcccggaccgccatgacagtcgttgtgatcataccagcaataccaattccggtaagaatttcagggctgtgcttcgccatggatgttcgaactgacgacaaaacttttgatatgttcgatttcttcattatctcattcctccaaatatcacactgaatatcgttttaaccatgtcaagag

SEQ ID NO: 28839 - DNA, 260 bp, Unknown
  Description of Unknown: RightRegion for integrase B2840 sequence
tccggctacttttcactggttgaacaccaattttcggcccgtttgtggcgcaccgcataatctgtaattattttgtaatctttgtgcaaacaaaaaatgccccgccagcaatccgtcaggatgccagcggggcattgctttacttagtggagataccttgccaattcagatgcaacaaagcctgcgatcaatgccgcaatgaccgcccaccagagtttgtttccaaatactccgggggctttttccagcgcggtcaagcg

SEQ ID NO: 28840 - DNA, 260 bp, Unknown
  Description of Unknown: RightRegion for integrase B2841 sequence
acggaggtcgtatgtatcgccggtctataccggttcacggtcagcaggccctcccgataaaaacgggagggcctgcccttattacttgcggtacaatccctgcataatgccgacatcggcagcagcgtccagattgcggcagtgcaggtgctcgacaacggcctggatcttgccatcgtcgtcacggccggcgttgcgctcctggtccaggagccggaaggccatggcctgcagtctggccatgtgatccatttcctcgc

SEQ ID NO: 28841 - DNA, 260 bp, Unknown
  Description of Unknown: RightRegion for integrase B2842 sequence
tccggctacttttcactggttgaacaccaattttcggcccgtttgtggcgcaccgcataatctgtaattattttgtaatctttgcgcaaacaaaaaatgccccgccagcaatccgtcaggatgccagcggggcattgctttacttagtggagataccttgccaattcagatgcaacaaagcctgcgatcaatgccgcaatgaccgcccaccagagtttgtttccaaatactccgggggctttttccagcgcggtcaagcg

SEQ ID NO: 28842 - DNA, 260 bp, Unknown
  Description of Unknown: RightRegion for integrase B2843 sequence
tacgccaccaccaattctttctatatgcttctttcaaaccttactttttctcgtacatagtatccgctgcattatacagcatctccaaaaactgtcccgccgttggccgatgatccagcgggtatcccgccaacacctgcactttttccgggtcagttttccataccagctttgccgtcctgcgaacagcgctctccacagccctccaagcatgaccagaagcttccgccacaggcagataaacttccttctgcaaggct

SEQ ID NO: 28843 - DNA, 260 bp, Unknown
  Description of Unknown: RightRegion for integrase B2844 sequence
aacggcagtatcacgcaggaaatcgatatttactttactcatatcggaattgtaaagtagacaaaaagaaaacggagagcattagtctgaataaatcagatgactctccgtgatacataagtttagggtcgttccctatttgtgccgcgataatacgagcttttcgaggtgtgcatctattttattgcacaagtatggtgcgggtgacaggacttgaacctgctataatcagctttcaatgcacgattttacgctatttt

SEQ ID NO: 28844 - DNA, 260 bp, Unknown
  Description of Unknown: RightRegion for integrase B2845 sequence
gataaaaaaataacatctatcacattcaagaatggcttaaatatagggttttcttattaaagaaaatcctctttttttatactaacggacatccgaacgtatgaataaagaagagtttattttctccttctatttttaactcttcaagagatttattatcaaaattcttaatcatttatatacctccatttaaacaagtaatttaatttaacacataagagtatatcaaaaatattaaaatttttatatatgttttttac

SEQ ID NO: 28845 - DNA, 260 bp, Unknown
  Description of Unknown: RightRegion for integrase B2846 sequence
aacccttctgacgcaagaacttgtgggggttcggatatggccctcataagtccaccataaaaataaccacaccgaagggtgtggttatttttatggatgccttaagaaattgaaacgctcgggcgaagtcaattcgccctgcgcaaggtttttgccttgaaacttcctcaccggatgaaccggggcactcccaaatctccatcccgggtacagcggtgcaggaccactacgaaccaggcaaacaccacaaggcccttggc

SEQ ID NO: 28846 - DNA, 260 bp, Unknown
  Description of Unknown: RightRegion for integrase B2847 sequence
cgccagcgcattgatatttattacagctttgtaggcaagattgacttgcccgaagaataaagcccgacctatccgacaccctgcgcaagtgccggataggaacggcaaaattttttacacttctattacttctttatcacacataagcaaatattcaggagtttaaatgccttataaataaggcaaaaaaacaagctgacgaactgcaagatacaattaatcagcttgagtttttcaattttcattttaagtttgcgact

SEQ ID NO: 28847 - DNA, 260 bp, Unknown
  Description of Unknown: RightRegion for integrase B2848 sequence
attaccttcaacttcgaccttacgccgtacattgaaggggatgatacaacagcctgctgaaaaaacgggcggaaaacattcctttttgaaaatggtgtaaagtcaaacgttgggggttgtataggaaccgcctgcaaaagcctgaaaacggtgcaggcgaagcaatacagcccccaaaaatcggcttcagcaaaaagaaaagcaccatacttcctacgaagtacagtgcttttttggtggagcatgacgcacggtgtacg

SEQ ID NO: 28848 - DNA, 260 bp, Unknown
  Description of Unknown: RightRegion for integrase B2849 sequence
aacggcagtatcacgcaggaaatcgatatttactttactcatatcggaattgtaaagtagacaaaaagaaaacggagagcattagtctgaataaatcagatgactctccgtgatacataagtttagggtcgttccctatttgtgccgcgataatacgagcttttaagggtgagcatccatttagtctcaccaatatggttgcggaggaacacaacatatattacccgaaatactattctcatacaaaatagttatgcagt

SEQ ID NO: 28849 - DNA, 260 bp, Unknown
  Description of Unknown: RightRegion for integrase B2850 sequence
ttaacgttaacgaagtcaatgcttcgcaagaatagaatgcgttttcgcctatgcttataacggacgacggaatctctatatctgtcaacgcccagcaagaataaaacgcatttacgcctattgtttttacggacaacggcaaagttatggaagtcaatgccgagcaatagtaaaatgcatagtcgcctatttccgttacgttgccttccagttttaccgtcgtaagctttttgcagttattaaaagtataatacggtact

SEQ ID NO: 28850 - DNA, 260 bp, Unknown
  Description of Unknown: RightRegion for integrase B2851 sequence
tccgggtacttttcactcgttgagcaccaattttcggctcgttggtggcgcaccgcataatctataattgttttgtaaccattccgcaaataaaaaatcccccgccagctttcctctcggattgccagcgggggattttcatttcagtgcagaagcatcgtcagttcataggccacaaggccggaaaccagcgccgcaatcacagcccaccaaagtttgtttccaaatgttccgggggctttttccagcgcggtcaggcg

SEQ ID NO: 28851 - DNA, 260 bp, Unknown
  Description of Unknown: RightRegion for integrase B2852 sequence
tacgccacccccaattctttctacatacttctttcaaatcttactttttctcgtacatagtatccgctgcattatacagcatctccaaaaactgtcccgccgttggccgatgatccagcgggtatcccgccaacacctgcactttttccaggtcagttttccatgccagctttgccgtcctgcgaacagcgctctccacagccctccaagcatgaccagaagcttccgccacaggcagataaacttccttctgcaaggct

SEQ ID NO: 28852 - DNA, 260 bp, Unknown
  Description of Unknown: RightRegion for integrase B2853 sequence
tccgggtacttttcactcgttgagcaccaattttcggctcgttggtggcgcaccgcataatctgtaattgttttgtaaccattccgcaaataaaaaatcccccgccagctttcctctcggattgccagcgggggattttcatttcagtgcagaagcatcgtcagttcataggccacaaggccggaaaccagtgccgcaatcacagcccaccaaagtttgttcccaaatgttccgggggctttttccagcgcggtcaggcg

SEQ ID NO: 28853 - DNA, 260 bp, Unknown
  Description of Unknown: RightRegion for integrase B2854 sequence
ggcccattcgacaacttcgatttgctgctgtaccccaagctgccaccctccctcggttaagtgggcagaaagaaagccgtcctttgttggggcggcttatttttgtgataaccttgtaggtatgatttgtaacacctgtaaggttatcacaaataaacctaaaaaaatcgcgcccggctgtcctgcaaaaatcgcccggcgcagaagcccaaaatctgatatgcgcgtgaaatcttccccgctgccatatccagtttgtt

SEQ ID NO: 28854 - DNA, 260 bp, Unknown
  Description of Unknown: RightRegion for integrase B2855 sequence
gtggacttcaactttgatcttgcacagtatttggagaatagcgatgaacttgcttgctgacaaacacaaaaacaccgttgacttcgatttgaaatcaacggtgtttgtaactcttatttgagccaatggtggagctatcaggagtcaaaacgaacattttagcacccggtgacagcccgccatcgggcgggtcttctccggtctccaaaggaatttcgacactgttctggtctcccatgcaggaaaaaaccagcttcatg

SEQ ID NO: 28855 - DNA, 260 bp, Unknown; identical to SEQ ID NO: 28840
  Description of Unknown: RightRegion for integrase B2856 sequence

SEQ ID NO: 28856 - DNA, 260 bp, Unknown
  Description of Unknown: RightRegion for integrase B2857 sequence
gtggacttcaactttgatcttgcgcagtatttggagaacagcgatgaacttgcttgctgacaaatataaaaacaccgttgacttcgatttgaaatcaacggtgtttttaactctcatttgagccaatggtggagcaatcaggagtcaaaacgaacattttggcatctggcgaatcccctccgtctggcggatcttccccggtctccagaggaatctcaacgctgttgtccttgcccataaaggaaaagaccagcttcaga

SEQ ID NO: 28857 - DNA, 260 bp, Unknown
  Description of Unknown: RightRegion for integrase B2858 sequence
tccggctacttttcactggttgaacaccaattttcggcccgtttgtggcgcaccgcataatctgtaattgttttgtaatctttgcgcaaacaaaaaatgccccgccagcaatccgtcaggatgccagcggggcattgctttacttagtggagataccttgccaattcagatgcaacaaagcctgcgatcaatgccgcaatgaccgcccaccagagtttgtttccaaatactccgggggctttttccagcgcggtcaagcg

SEQ ID NO: 28858 - DNA, 260 bp, Unknown
  Description of Unknown: RightRegion for integrase B2859 sequence
gatggcttttttgttttgtctctcggtgcgtttttgggccggtgcgacacaaagctctgattttttctcgcctgccggggctatactgtttcttgatgcaacagggcaatacggaagataggagccaggcaaatgagcatttgggacgcattcggcaaaggacggtataagggcttctcccgggaggcggggcagctgctggataaggcggtggagctggccggagggctgggctgcaaaaaggcagacaccggccacct

SEQ ID NO: 28859 - DNA, 260 bp, Unknown
  Description of Unknown: RightRegion for integrase B2860 sequence
ctgagtcggcggtcaaagtatcctcaaaacggacggtttgggcgccatctttgtagttgaacgtgatcagcattcggtcatcatacaggaaaatggcattgacaaaaatttcaatcaatgcttttcgttgctttttctgcgaaatatcgaactttctgaatttcatcagccagaaccggatgaaatcctcattgaagctgggcttcttcaatttttcatccgcgatttttgcagtcagttcatctttctggatttccagc

SEQ ID NO: 28860 - DNA, 211 bp, Unknown
  Description of Unknown: RightRegion for integrase B2861 sequence
agaggggtcgcggcacttttttgtttttggggaaaatcgggtgtaaataatgtctactgaccaacccaaaaagcattgcgacacaaggcaatcccggcaatctgtgctataataggtgcaagggaaacgacaaaaagcgggcaaaacccttgcacttggagggaacgtgtatgtatcggtacagcaacggacagatcagtctgtcagattt

SEQ ID NO: 28861 - DNA, 260 bp, Unknown
  Description of Unknown: RightRegion for integrase B2862 sequence
gataacgaacgaatacaggaaatagagatatactaccgatttattggaaaaatagactgataaagaggttcatatctttaactaagggaaaccggtcagggaatgccggatatcggaatccttcctgaacttggaaaggcgcttggagtgacagttgatgaaattttaatgggagaacagattgaacaagagaaaagagcggaaactgccgtatcggatgaggataagaagcttttggaaattgtgttggagcgagccga

SEQ ID NO: 28862 - DNA, 260 bp, Unknown
  Description of Unknown: RightRegion for integrase B2863 sequence
attaccttcaacttcgaccttacgccgtacattgaaggggatgatgcagcagcctgctgaaaaaccgggcggcaaacattcctttttgaaaacggtgtaaagtcaaaaattggaggttatataggaaccgcctgcaaaagcctgaaaacggtgcaggcgaagcaatgcagcccccaaaaatcggcttcagcaaaaagaaaagcaccatacttcctacgaagtacagtgctttttggtggagcatgacgcacggtgtacga

SEQ ID NO: 28863 - DNA, 260 bp, Unknown
  Description of Unknown: RightRegion for integrase B2864 sequence
cctgaaatgttgattttcggagacgtatttgtgctcacatataaaacggcggaagtgtaaaacctccgctgttttgatttttgggagtgtgaacgagagcgctttgggttcacacgctgaatcagatgataccacggttcagggcatcatcgacaggatggggtgatggtgttttgccaccccatcctcaacacgcacctcaatcgtaagtcagcggcgtaatctataacgcgcaagatcattaacgttcctgcgctttt

SEQ ID NO: 28864 - DNA, 260 bp, Unknown
  Description of Unknown: RightRegion for integrase B2865 sequence
gcgatctacttcgtcggcccggtgttcatcctggcattgccgctgccccggcggcgctaaaaacaaaaggcatccggcttcgtgccgggtgcctttttctgttgctgcgcttcggaggtcaatcctccggggcgctttctttttccgccagctccggctcgatcagatcctcgatgtggcactccagcacctgggccaccttgtagagctggtagacgttcgggctggttctgatcctggccgaccatccctccagcgtc

SEQ ID NO: 28865 - DNA, 260 bp, Unknown
  Description of Unknown: RightRegion for integrase B2866 sequence
cccgccaaaatgaaacgccgttttagcagaaagcgtaatatccgcaacaaaaacagttgaattgtatctaataagtttatgaaaaaatagcgtcgctgtaaaggggaaaagtaaaggcgggggcgaaagcccctgcctttttgttttaacaatatgtaaaagggattgccgtgttactgtcttttgctatcgttccgttacatagttcgcatttaatatcgcacaaatggttttttgtcgggacggcaacaaacaatgat

SEQ ID NO: 28866 - DNA, 260 bp, Unknown
  Description of Unknown: RightRegion for integrase B2867 sequence
cgccagcgcattgatatttattacagctttgtcggcaagattgacttgcccgaagaataagcccgacctatccgacaccctgcgcaagtgccggataggaacggcaaaattttttacacttccattacttctttatcacacataagcaaatgctttcggcttcttgcgtaggagctaccacctccgtactcatcgtgtggataccgacgcggctgatacccagctctggaatagccgccatcttccattgcctcaatttt

SEQ ID NO: 28867 - DNA, 260 bp, Unknown
  Description of Unknown: RightRegion for integrase B2868 sequence
attaccttcaacttcgaccttacgccgtacattgaaggggatgatgcagcagcctgctgaaaaaacgggcggcaaacattcctttttgaaaatggtgtaaagtcaaaagttgggggttgtataggaaccgcctgcaaaagcctaaaaacggtgcaggcgaagcaatgcagcccccaaaaaccaacttcagcaaaaagaaaagcaccgtacttccaacgaagtacagtgcttttttggtggagctatcaggagtcaaaacg

SEQ ID NO: 28868 - DNA, 260 bp, Unknown
  Description of Unknown: RightRegion for integrase B2869 sequence
acagggttcgattttggggagtctgagtgtaccaaaggaaaagtgcttaattctttatgaattaggcactttcttttgtttttatagcaaaaaagttcagattttcaaaaattgcaaaagggtcttttcaccccaatttatcaactatttatcaacaagttcaacccgaaagggtcaagtgggggcaaaatgggggattgggggcttttttttcgaagtcctatatatatttatattattatacattcgtatatacttat

SEQ ID NO: 28869 - DNA, 260 bp, Unknown
  Description of Unknown: RightRegion for integrase B2870 sequence
cgcagacaggaaatcgagatatactattctttcgtcggcaaggtagacttgcccgaataacgcccgacctgtccggcacaatagctaagtgccggataggaacggcaaaaattttacacttctattgcttctttatctaacacaaactaagctccgcggcagctatcaaagcgatctgaaaagagcggaaaaccgggagtatcctgtgttcaaaaccgagagcgggacagaggtgcagaccgtgccgttctggacatggg

SEQ ID NO: 28870 - DNA, 260 bp, Unknown
  Description of Unknown: RightRegion for integrase B2871 sequence
acggaggtcgtatgtatcgccggtctataccggttcacagtcagcaggccctcccgctaaaaacgggagggcctgccctcattatttgcggtacaacccctgcataatgccgacatcggcagcagcgtccagattgcggcaatgcaggtgctcgacaacggcctggatcttgccgtcggcgtcgcggccggcgttgcgctcctgatccaggagccggaaggccatggcctgcagtctggccatgtgatccatctcctccc

SEQ ID NO: 28871 - DNA, 260 bp, Unknown
  Description of Unknown: RightRegion for integrase B2872 sequence
tacgccacccccaattctttctacatacttctttcaaatcttactttttctcgtacatagtatctgctgcattatacagcatctccaaaaactgtcccgccgttggccgatgatccagcgggtatcccgccaacacctgcactttctccgggtcagttttccacgccagctttgccgtcctgcgaacagcgctctccacagccctccaagcatgaccagaagcttccgccacaggcagataaacttccttctgcaaggct

SEQ ID NO: 28872 - DNA, 260 bp, Unknown; identical to SEQ ID NO: 28841
  Description of Unknown: RightRegion for integrase B2873 sequence

SEQ ID NO: 28873 - DNA, 260 bp, Unknown
  Description of Unknown: RightRegion for integrase B2874 sequence
tctccgttcgatattatcgtatataggaatatattttgtttagtatatcgctggaagtaaaaataacggcactgtatattgcgaaagcaatatacagtgccgttatttttatggaataggaaatctgcatatttgataggatcggttaggatagtgcttcttaaaaataggtcttgcaactgactatatgaattgataaaataatgagtgctgtgtgtggtatcaaaagatgccaacaatgaaaatgaggaatcggtagt

SEQ ID NO: 28874 - DNA, 260 bp, Unknown
  Description of Unknown: RightRegion for integrase B2875 sequence
attaccttcaacttcgaccttacgccgtacattgaaggggatgatgcagcagcctgctgaaaaaacgggcggcaaacattcttttttgaaaacggtgtaaagtcaaaagttgggggttgtataggtaccgcctgcaaaaagcctgaaaccggtgcaggagaagcaatgcagcccccaaaaaccggcttccgcaaaaagaaaagcaccatactttctacgaagtacagtgcttttttggtggagcaatcaggagtcaaaac

SEQ ID NO: 28875 - DNA, 260 bp, Unknown
  Description of Unknown: RightRegion for integrase B2876 sequence
gatggcttttttgttttatctctcggtgcgtttttgggccggtgcgacacaaagctctgattttttctcgcctgccggggctatactgtttcttgatgcaacagggtatgcaacagggcaatacggaagataggagccacgcaaatgagcatttgggatgcattcggcaaaggacggtacaagggcttttcccgggaggcggggcagctgctggacaaggcagtggagctggccggagggctgggctgcaaaaaggcaga

SEQ ID NO: 28876 - DNA, 260 bp, Unknown
  Description of Unknown: RightRegion for integrase B2877 sequence
tgttctagttgttttaaatggtggaggttaggagattcggtcttgctcgttcgcatttaacggcaattccgtgttttgcttcaatgactattcgtcattttgcaaaaacactccagcctcagctcactcgcgcaactcctagaaaatgctaaacgcatttttggaggttctcatcaatccataacactgcaaaataaaatacacgataactaaagtcatcgtgtattttatggtggactcaaagaggagacgttagaact

SEQ ID NO: 28877 - DNA, 260 bp, Unknown; identical to SEQ ID NO: 28841
  Description of Unknown: RightRegion for integrase B2878 sequence

SEQ ID NO: 28878 - DNA, 260 bp, Unknown; identical to SEQ ID NO: 28871
  Description of Unknown: RightRegion for integrase B2879 sequence

SEQ ID NO: 28879 - DNA, 260 bp, Unknown
  Description of Unknown: RightRegion for integrase B2880 sequence
gtggacttcaactttgatcttgcacagtatttggagaatagcgatgaacttgcttgctgacaaacacaaaaacaccgttgacttcgatttgaaatcaacggtgtttgtaactcttatttgagccaatggtggagaataccgggatcgaaccggtgacctcttgcatgccatgcaagcgctctcccagctgagctaatcccccataattttccagaagtagaaacctctggaaaagagatactcaaacaagaaacgtttta

SEQ ID NO: 28880 - DNA, 260 bp, Unknown
  Description of Unknown: RightRegion for integrase B2881 sequence
gataacgaaagaatacaggaaattgagatatattaccgatttatcggaaaagttgagtaatcaacaagagtaatatttttaactaagggaaaccggtcttagtatgcctaatgtcgtattactcataccaatagctgatatattagatgttaccgttacagaattgttacgtggagaaaaaatagatacacagaaaaatattgatacaaaagaagtcgaggaattggtagtaggctctctcgatatggctgttaggaatt

SEQ ID NO: 28881 - DNA, 260 bp, Unknown
  Description of Unknown: RightRegion for integrase B2882 sequence
attaccttcaacttcgaccttacgccgtacattgaaggggatgatacaacagcctgctgaaaaaacgggcggaaaacattcctttttgaaaatggtgtaaagtcaaaagttgggggttgtataggaaccgcctgcaaaagcctgaaaacggtgcaggcgaagcaatgcagcccccaaaaatcggcttcagcaaaaagaaaagcaccatacttcctacgaagtacagtgcttttttggtggagcaatcaggagtcaaaacg

SEQ ID NO: 28882 - DNA, 260 bp, Unknown
  Description of Unknown: RightRegion for integrase B2883 sequence
ttcaccttccgcgacgggcggcaggtcgaaatcacggcagaattatggagggcagcataatgaaggaggaagcaaggaaaacaatgcgggtggcggtctattgccgcctcgcccgcgcggatcaagaggataccttgttagagatgcagaaggaacggctgcgcgtatatgctaaagagcgcggctatgatattgtggcggaaatcgccgagatcggcagcggcctttccctgaaccgccccggcatccgggaaatggcc

SEQ ID NO: 28883 - DNA, 82 bp, Unknown
  Description of Unknown: RightRegion for integrase B2884 sequence
acagggttcgattttggggagtctgagtgtaccaaaaaccgtctcaaacatatcgcttgagacggtttttatatgcggtagg

SEQ ID NO: 28884 - DNA, 260 bp, Unknown
  Description of Unknown: RightRegion for integrase B2885 sequence
gatggaagtcgagagcaagaggtcgagattttctataagtttataggaaagatcgactgagagaccaatatctttaagtatgtgaatggggcgcttccgatccgagcacgacaaacctgatggcgctggcaaagctcttcggtgtaagcgcggaggacttactcaaggaagcacaataaacatcgtaaaaaatactaaggcgcgcatatggcaaaaaccatatgcgcgttttttgcttattattaaattatgcttcctgc

SEQ ID NO: 28885 - DNA, 260 bp, Unknown
  Description of Unknown: RightRegion for integrase B2886 sequence
tgctcagaatgggatggtttagcaacaatctttgaacagcaagacttgatagcacagtaaacgggagcttttctttgtgttcagtgtcattcctctcttttcagcataaaggcgatacgtcatcgttcagattatgcgctcacagatatttacacccggtgcgggcatttcggtatgtgagcgcaacatcggtagagcatgcggctgttaaccgcagtgtcgttggttcgagtccaacagggggagccaaatgaagaagc

SEQ ID NO: 28886 - DNA, 260 bp, Unknown
  Description of Unknown: RightRegion for integrase B2887 sequence
atggtttttgtcactgcggacttgctccggattgtggcgacaaaacaaagcacctcctgatatcgggaggtgctttgtttcgcttaatcggggttcagtcgtcattctccgtccacagaatcccgtcaatatcgctgtcaaaattaccggcgtccagccaggtgggaagctcgtccggccgcaacggggggcggcttttctaacaatcttcgtcgctttcgtaggaaagtatgccatcaatgttttccgcaaaatttccg

SEQ ID NO: 28887 - DNA, 260 bp, Unknown
  Description of Unknown: RightRegion for integrase B2888 sequence
atcaatggtgggctgctttgcttcagcctgccgaggcaaaaaaagaaccgagcggaataacccgctcggttctttttctatcctctgtgctatgcgccgggggcacgcccacatcattaccccgcgtaggtacgcaggccttcgactgcacgcggcatctgtcgcttattcgttctgggtttcgtccgactcgattattttaacgggcggctcgtgatctgaatctattttgtctttgtaatttctgagccacttcttga

SEQ ID NO: 28888 - DNA, 260 bp, Unknown
  Description of Unknown: RightRegion for integrase B2889 sequence
atcaatggtgggctactttgctttagtctgccgaggcaaaaaaagagccgagcggaataacccgctcggttcttttttgctctattcttttgtgtctgcgggtgcagcctatataactgcttccattttggaagcagttgctacccccgcgtaggtacgcaagccttcgactgcacgcggcgcgtgttgcttattcgttctgagtttcttccgactcgattatttcaacgggtggctcgtgatctgaatctatcttgtct

SEQ ID NO: 28889 - DNA, 109 bp, Unknown
  Description of Unknown: RightRegion for integrase B2890 sequence
gcgttgcggttggtggaggcgatgggagtcgaacccatgtccgaaaagagctcagtgtaggtgtctccgggtgcaggcgatctacaacattcccgccgcgccacgccga

SEQ ID NO: 28890 - DNA, 65 bp, Unknown
  Description of Unknown: RightRegion for integrase B2891 sequence
gcgttgcggttggtggaggcgatgggagtcgaacccatgtccgaaaagagttcagcgtaggtgtc

SEQ ID NO: 28891 - DNA, 109 bp, Unknown
  Description of Unknown: RightRegion for integrase B2892 sequence
aattttaccctactaccctctaaagcgggcatgttagacccatacaggcacgggttttgagcagcacataatatgaacttgctcggaaaggtcattgccgctctcacac

SEQ ID NO: 28892 - DNA, 65 bp, Unknown; identical to SEQ ID NO: 28890
  Description of Unknown: RightRegion for integrase B2893 sequence

SEQ ID NO: 28893 - DNA, 65 bp, Unknown; identical to SEQ ID NO: 28890
  Description of Unknown: RightRegion for integrase B2894 sequence

SEQ ID NO: 28894 - DNA, 63 bp, Unknown
  Description of Unknown: RightRegion for integrase B2895 sequence
gcgttgcggttggtggaggcgatgggagtcgaacccatgtccgaaaagagttcagcgtaggtg

SEQ ID NO: 28895 - DNA, 260 bp, Unknown
  Description of Unknown: RightRegion for integrase B2896 sequence
caacacatcatcttgatctgcggaatgttccgtataaccttcaacaggccctcccactaagggagggcctgttgacttacttatacagcttttgcagagtgaggaccttttctgcccgatcaatccacttgtcgtgttttgctttgtaccgggccagcgcttccggcgtggctgccttcccggcgttccgggcccgatccatctcccggacggccatctcgtgcagccgatcactgtgccttacctcctccttggagagc

SEQ ID NO: 28896 - DNA, 109 bp, Unknown
  Description of Unknown: RightRegion for integrase B2897 sequence
aattttaccctactatctgctaaaacggccatgttagacccatacaggcaaggattttgagcagcgcataaaataaacttgctcgggaaggtcattgccgccctgacgc

SEQ ID NO: 28897 - DNA, 260 bp, Unknown
  Description of Unknown: RightRegion for integrase B2898 sequence
atcaatggtgggctgctttgcttcagtctgccgagacaaaaaaagaaccgagcggaataacccgctcggttcttttttctctattcttttgtgtctgcgggtgcagcatatataactgcttccattttggaagcagttgctaccccgcgtaggcacgcaggccttcgactgcacgcggcgcgtgttgcttattcgttctgggtttcgtcgacctttattatttcaacaggcggctcatgatctgaatctatcttatcctt

SEQ ID NO: 28898 - DNA, 121 bp, Unknown
  Description of Unknown: RightRegion for integrase B2899 sequence
gatggaagtcgagagcaagaggtcgagattttctataagtttatagggaagatcgactgagagaccaatatctttaagtatgtgaatggggggattcacttagttaaagataccatttgaa

SEQ ID NO: 28899 - DNA, 260 bp, Unknown
  Description of Unknown: RightRegion for integrase B2900 sequence
atggtttttgtcactgcggacttgctccggattgtggcgacgaaacaaagcacctcctgatatcgggaggtgctttgtttcgcttaatcggggttcagtcgtcgccggtcgaaagaaccccatcaaagaattgcaggacatcgcggttagacgcccagtgggaatagtcgtccgccgtaaaggtgaaataggccgtccacgcaatatccccggtatcctgaccagccaatgacaacgggcaacactgggcttcgccgctc

SEQ ID NO: 28900 - DNA, 260 bp, Unknown
  Description of Unknown: RightRegion for integrase B2901 sequence
tcaggtaaaggcgaatattttaaaacagagattatagaaacatcgttcattgaaaaatgagatgcgcaataacggcaacgatatacctatgtcgttgagcaaagcagaagtcgttcggttcggcatggtaaaacgctgggaaagataacgcagggaagcgccgatctcaccgtccgggccaccggagtgcagtaccctataatagccccgcaaccccagtgtttatgcgggtttgcgggattttcaattctgaaaaaata

SEQ ID NO: 28901 - DNA, 260 bp, Unknown
  Description of Unknown: RightRegion for integrase B2902 sequence
gatggaagtcgagagcaagaggtcgagattttctataagtttgtaggaaagatcgactgaaagaccaatatctttaagtatgtgaatggggcttatcggtgccggatgccgagctgcttacaaggctggcggaggtgcttgaggtcccggtcagcacattgctcggctcggcgatccccgacgataaagagccggacgatatcgcccgtcagcttgcgcgtataaatgagcagcttgcagttaaaaaccgccgcagccgc

SEQ ID NO: 28902 - DNA, 260 bp, Unknown
  Description of Unknown: RightRegion for integrase B2903 sequence
ctcttcacctttactcggtttcatactttctttgtcatccatgagagaatatcgcgataaaccgtatcgcgacaggtttcgttgagtatttcgtggcgtgcgccttcatagagcttaattgtgaggtcacgcacaccggctttccggagcgtttcataaatttttgtaacacctgcaccgtagtcgccgacgggatccatagagccggagacaaggaatatcggtatgccggatatcgccatatggcggaaccactcacg

SEQ ID NO: 28903 - DNA, 109 bp, Unknown
  Description of Unknown: RightRegion for integrase B2904 sequence
aattttaccctactatctgctaaaacggccatgttagacccatacaggcacgggttttgagcagcacataatatgaacttgctcggaaaggtcattgccgccctcacac

SEQ ID NO: 28904 - DNA, 109 bp, Unknown; identical to SEQ ID NO: 28889
  Description of Unknown: RightRegion for integrase B2905 sequence

SEQ ID NO: 28905 - DNA, 260 bp, Unknown
  Description of Unknown: RightRegion for integrase B2906 sequence
gatggaagtcgagagcaagaggtcgagattttctataagtttgtaggaaagatcgactgagaggccaatatctttaagtatgtgaatgggatgagaaccacttccgcattgtattccagagcgacaagaaaacggcgttcatcacctttgaagggaaaagaaccaaaacaggatgccatttctctcacaccgaggctttcggtatgacaacgccggtaattggggcgttcatgaactttctgatcttcaaggtgtttttc

SEQ ID NO: 28906 - DNA, 105 bp, Unknown
  Description of Unknown: RightRegion for integrase B2907 sequence
gcgttgcggttggtggaggcgatgggagtcgaacccatgtccgaaaagagctcagtgtaggtgtctccgggtgcaggcgatctacaacattcccgccgcgccacg

SEQ ID NO: 28907 - DNA, 260 bp, Unknown
  Description of Unknown: RightRegion for integrase B2908 sequence
gcgttgcggttggtggaggcgatgggagtcgaacccatgtccgaaaagagttcagcgtaggtgtctccgggtgcaggcgatcaacaacattccctccgcgtcacgccggtcgccaggctaacgcattggtagcttcatgagttcctgccggtccgcaaagcttaggtccgttcaggtgctgtgtctaaaggacgccccggccccacacgacacaagagtgggcggaacgcgcagcactcaggctgcgagcaactgataat

SEQ ID NO: 28908 - DNA, 180 bp, Unknown
  Description of Unknown: RightRegion for integrase B2909 sequence
gcgttgcggttggtggaggcgatgggagtcgaacccatgtccgaaaagagctcagtgtaggtatctccgggtgcaggcgatctacaacattcccgccacgccacgccgatcgtcaggctagcgctttggtagcttcatgagttcctgccggtccgcaaagcttaggtccgttcaggtgct

SEQ ID NO: 28909 - DNA, 260 bp, Unknown
  Description of Unknown: RightRegion for integrase B2910 sequence
actcttctcttttcactaaaaattgtcatttccagtgaaaagataaaagagaagagataagagaagcggtggctttgcttcgcaaatcattgattataaaaacgatttatgatataatttgcaaaaaggcgacgccaatgaacagtccgttacttgataaatctcttgattttttgagtgaaattgcatattcaacagccaaaagagctgaccgatttttttaatcggtcagctctttccttttacaataattcaaacag

SEQ ID NO: 28910 - DNA, 260 bp, Unknown; identical to SEQ ID NO: 28841
  Description of Unknown: RightRegion for integrase B2911 sequence

SEQ ID NO: 28911 - DNA, 260 bp, Unknown
  Description of Unknown: RightRegion for integrase B2912 sequence
cccacaatctacttcgtgggcgcgttcttcgtcctgatcatgccgctccctgagcggtaacaaaagaaccactgcataaggtcaatgccttttgtagtggttctttttctgcgtcttcatcttctgcgtgcgcaaggagtgcgcaaattttcaaaaaactttgaagatcctctttacatctgcttgcagatgtgctataataaaatcacggaaagcaatacaacacacaacatcattgaggtacaaaattatgagaaacg

SEQ ID NO: 28912 - DNA, 175 bp, Unknown
  Description of Unknown: RightRegion for integrase B2913 sequence
gcgttgcggttggtggaggcgatgggagtcgaacccatgtccgaaaagagttcagcgtaggtgtctccgggtgcaggcgatcaacaacattccctccgcgtcacgccggtcgccaggctaacgcattggtagcttcatgagttcctgccggtccgcaaagcttaggtccgttcag

SEQ ID NO: 28913 - DNA, 260 bp, Unknown
  Description of Unknown: RightRegion for integrase B2914 sequence
ttacgagataatcagatttctgttttcttttggggtgtcggcatcatcgattttatatgagaaacggttccctaagttgggtacgactgcgtatgcagttcatcaaacacaactccgtggatgttgaagccgtgtttgctgtatgcttcagcggaaagtacctgataaaagctgtttgtaggaaggtatacgatgcgtttttgtgatgccaaaattttcactcgcttggagagtgccggacacattcgcaccatatctgc

SEQ ID NO: 28914 - DNA, 86 bp, Unknown
  Description of Unknown: RightRegion for integrase B2915 sequence
gcgttgcggttggtggaggcgatgggagtcgaacccatgtccgaaaagagttcagcgtaggtgtctccgggtgcaggcgatctaca

SEQ ID NO: 28915 - DNA, 64 bp, Unknown
  Description of Unknown: RightRegion for integrase B2916 sequence
gcgttgcggttggtggaggcgatgggagtcgaacccatgtccgaaaagagctcagtgtaggtgt

SEQ ID NO: 28916 - DNA, 260 bp, Unknown
  Description of Unknown: RightRegion for integrase B2917 sequence
gatggaagtcgagagcaagaggtcgagattttctataagtttgtaggaaagatcgactgagaggccaatatctttaagtatgtgaatggggcaattcctacccggaccttgacatgctggtgcacatcagcgacgcgctcgcgaccgatccgaacgagctgctttacccgaatcaaaaatgcaggagcggcggcgtgagccgccttgtggacgacgacttttttggcaagctcacggtcgtcatttggatcgtggggttc

SEQ ID NO: 28917 - DNA, 182 bp, Unknown
  Description of Unknown: RightRegion for integrase B2918 sequence
gcgttgcggttggtggaggcgatgggagtcgaacccatgtccgaaaagagctcagtgtaggtgtctccgggtgcaggcgatctacaacattcccgccgcgccacgccgatcgtcaggctagcgcattggtagcttcatgagttcctgccggtccgcaaagcttaggtccgttcaggtgctgt

SEQ ID NO: 28918 - DNA, 260 bp, Unknown
  Description of Unknown: RightRegion for integrase B2919 sequence
acacaaggacgagagataacagctaaacagttatttgaacaggccaatcaacataaatagatacagtatcagctctaggtaaaaggctactgccaacatgcggtagcctttaagtttcggaactgcgaaaacgaaattttgagcatgggcggaagaaattcttgaaataaacggggaaacggaaaacgagcatttaagatttaagtaaaataaaaaatccacgacgagaaaaaagttcatcgtggattgtatctaattaa

SEQ ID NO: 28919 - DNA, 91 bp, Unknown
  Description of Unknown: RightRegion for integrase B2920 sequence
gatggaagtcgagagcaagaggtcgagattttctataagtttgtaggaaagatcgactaagagaccaatatctttaagtatgtgaatgggg

SEQ ID NO: 28920 - DNA, 260 bp, Unknown
  Description of Unknown: RightRegion for integrase B2921 sequence
gatggaaatcgagagcaagaggtcgagattttctataagtttgtaggaaagattgactgagagaccaatatctttaagtatgtgaatggggggattcacttagttaaagataccatttgaagcaactcgcactttagcttacaaattattatattgagcttattataccagcgcgaaatggtgtcataacctgagtacaataacaaatgcgtaaaaaatagggtacagaaataaatctgtacccttaatttttgtttcct

SEQ ID NO: 28921 - DNA, 62 bp, Unknown
  Description of Unknown: RightRegion for integrase B2922 sequence
gcgttgcggttggtggaggcgatgggagtcgaacccatgtccgaaaagagttcagcgtaggt

SEQ ID NO: 28922 - DNA, 260 bp, Unknown
  Description of Unknown: RightRegion for integrase B2923 sequence
atcaatggtgggctgctttgcttcagtctgccgaggcaaaaaaagaaccgagcggaataacctgctcggttcttttttgctctattcttttgtgtctgcgagtgcactcggcgcgtgttgcttattcgttctgggtttcgtcgaccttgattatttcaacaggcggctcatgatctgaatctattttgtctttgtaattcctgagccacttcttaagccattccgggataggcgcgccgagctttcctgcattctcaatg

SEQ ID NO: 28923 - DNA, 109 bp, Unknown; identical to SEQ ID NO: 28889
  Description of Unknown: RightRegion for integrase B2924 sequence

SEQ ID NO: 28924 - DNA, 237 bp, Unknown
  Description of Unknown: RightRegion for integrase B2925 sequence
tttttcccatttcataagcattttgcattgtccttctttgctttatacatctatcgttaattgccacaacacatcaattcttcacacaaataactttttcataacaaatcaccctttttattctatcgtagctgtcctaatctctgtttagtaaaccacttaaacgttgattttttacaaaaagcacatctaaaacgtgcttgacataatttttatactatgttatactttagatat

SEQ ID NO: 28925 - DNA, 260 bp, Unknown
  Description of Unknown: RightRegion for integrase B2926 sequence
tcaggtaaaggcgaatattttaaaacagagattatagaaacatcgttcattgaaaaatgagatgcgcaataacggcaacgatatacctatgtcgttgagcaaagcagaagtcgtccggttcggcatggtaaaacgctgggaaagataacgcagggaagcgccgatctcaccgtccgggccaccggagtgcagtaccctataatagccccgcaaacccagtgtttatgcgggtttgtgggatttttaactcagaaaaaata

SEQ ID NO: 28926 - DNA, 260 bp, Unknown
  Description of Unknown: RightRegion for integrase B2927 sequence
gatggaagtcgagagcaagaggtcgagattttctataagtttgtaggaaagatcgactgagaggccaatatctttaagtatgtgaatggggcgactcgacgcccgacctcgacaagctgcgcgccatctgcacgtacttcggtgtgacgacggattatctgatctgggaaagatcggaggacgcgccgcaggcagccgagcagaagcagggtggcgatacgcgcgggcggagcggtatattcagcgatgcgctgctgttg

SEQ ID NO: 28927 - DNA, 260 bp, Unknown
  Description of Unknown: RightRegion for integrase B2928 sequence
tttttcccatttcataagcattttgcattgtcctgctttgctttatacatctatcgttaattgccacaacacatcaattcttcacacaaataactttttcataacaaatcaccctttttattctatcgtagctgtcctaatctctgtttagtaaaccacttaaacgttgattttttacaaaaagcacgtctaaaacgtgcttgacataatttttatactatgttatactttagatacaagataagggcaacagcagttgt

SEQ ID NO: 28928 - DNA, 260 bp, Unknown
  Description of Unknown: RightRegion for integrase B2929 sequence
gatggaagtcgagagaaagaggtcgagattttctataagtttataggaaagatcgactgagaaaccaatatctttaagtatgtgaatggggcgactcgacgcccgacctcgataagctgcgcgccatctgcacctatttcggcgtgacgacggattacctcatctgggaaaacgaagagggcgcgccgaaggcgaccgtgacggcgaaggagcgcgcctcgcgcggcaagaatgaggttttcagcaatgcgctgctgtcg

SEQ ID NO: 28929 - DNA, 62 bp, Unknown
  Description of Unknown: RightRegion for integrase B2930 sequence
gcgttgcggttggtggaggcgatgggagtcgaacccatgtccgaaaagagctcagtgtaggt

SEQ ID NO: 28930 - DNA, 109 bp, Unknown
  Description of Unknown: RightRegion for integrase B2931 sequence
gcgttgcggttggtggaggcgatgggagtcgaacccatgtccgaaaagagttcagtgtaggtgtctccgggtgcaggcgatctacaacattcccgccgcgccacgccga

SEQ ID NO: 28931 - DNA, 260 bp, Unknown
  Description of Unknown: RightRegion for integrase B2932 sequence
tcagatacaaagtcaggaagaatgaaactttttaacagtaaaaaaaaaggcgctctttaatgtagcgcccaaatgctcctgcagtagctgcaaaatctatatttgtaaccatatttgcatctgtctttggaatgattccattttgcttcatagcatattctagtgccatagctggaactcctgcaagactcttcaaatacatattaattttccaattgcttggagatttaaatctaatataaaaaatgacagtataatta

SEQ ID NO: 28932 - DNA, 64 bp, Unknown
  Description of Unknown: RightRegion for integrase B2933 sequence
gcgttgcggttggtggaggcgatgggagtcgaacccatgtccgaaaagagttcagcgtaggtgt

SEQ ID NO: 28933 - DNA, 260 bp, Unknown
  Description of Unknown: RightRegion for integrase B2934 sequence
atggtttttgtcactgcggacttgctccggattgtggcgacaaaacaaagcacctcctgatatcgggaggtgctttgtttcgcttaatcggggttcagtcgtcattctccgtctgcccttaaccctgggcggcgggattttttgggggcggctgccagttgcttacaaaaaagcagcagctgccttttcttttctatccgtctttggctatgttatcattccccgtgggaaaatgcaactgttttatgattccgtgtgtt

SEQ ID NO: 28934 - DNA, 260 bp, Unknown
  Description of Unknown: RightRegion for integrase B2935 sequence
gatggaagtcgagagcaagaggtcgagattttctataagtttgtaggaaagatcgactgagaggccaatatctttaagtatgtgaatggggggattcacttagttaaagataccatttgaaacaactcgcactttagcttacaaattattatattgagcttattataccagcgcgaaatggtgtcataacctgagtacaataacaaatgcgtaaaaaatagggtacagaaataaatctgtacccttaatttttgtttcct

SEQ ID NO: 28935 - DNA, 64 bp, Unknown; identical to SEQ ID NO: 28932
  Description of Unknown: RightRegion for integrase B2936 sequence

SEQ ID NO: 28936 - DNA, 65 bp, Unknown; identical to SEQ ID NO: 28890
  Description of Unknown: RightRegion for integrase B2937 sequence

SEQ ID NO: 28937 - DNA, 109 bp, Unknown; identical to SEQ ID NO: 28896
  Description of Unknown: RightRegion for integrase B2938 sequence

SEQ ID NO: 28938 - DNA, 260 bp, Unknown
  Description of Unknown: RightRegion for integrase B2939 sequence
gatggaagtcgagagcaagaggtcgagattttctataagtttataggaaagatcgactgagagaccaatatctttaagtatgtgaatggggggaatcacttagttaaagataccatttgaaacaactcgcactttagcttacaaattattatattgagcttattataccagcgcgaaatggtgtcataatctgagtacaataacaaatgcgtaaaaaatagggtacagaaataaatctgtacccttattgaaaagaaacc

SEQ ID NO: 28939 - DNA, 260 bp, Unknown
  Description of Unknown: RightRegion for integrase B2940 sequence
cgtcctctcactgttcgacagcaacaggcgcagaagaaacttaatccagcaaatatctgattatatcctggcactctaccggcaatagctgccgttgggttgtcaggattttttctaacctgcatcgagcagcactaagtaaattatatgcactttcttttgtcacacgcagatcagctgctatttcatatatcgaagcttccttgatataccataatttcaggatcctctcatccctgatttttaatcctgcagctggc

SEQ ID NO: 28940 - DNA, 260 bp, Unknown
  Description of Unknown: RightRegion for integrase B2941 sequence
gcgttgcggttggtggaggcgatgggagtcgaacccatgtccgaaaagagttcagcgtaggtgtctccgggtgcaggcgatcaacaacattccctccgcgtcacgccggtcgccaggctaacgcattggcgttatcgtgcaaccaatgcagcgagagccaatggccttaccggatgggtggataatctgtgggacggcagagtagagatggaggtacagggagagctttcccagattgaagaaatgatccaggaaatcca

SEQ ID NO: 28941 - DNA, 260 bp, Unknown
  Description of Unknown: RightRegion for integrase B2942 sequence
caacacatcatctcgatctgcggaatgtttcgtataaccttcaacaggccctcccactaagggagggcctgttgccttatttatacagcttttgcagggtgaggatcttttccgccttatcgatccacttgttgtgtttcgcgttgtaccgggccagcgcttccggcgtggctgcctttccggcgttccgggcccgatccatctcccggacggccatctcatgcagccgatcgctgtgccttacctcctccttggagagc

SEQ ID NO: 28942 - DNA, 260 bp, Unknown
  Description of Unknown: RightRegion for integrase B2943 sequence
cgcagacaggacattgatatttattactctttcgttggcaaggtagacctgcccgaatgaccgcccgacctatccggcgcaatgcgcaaacgccggataggaacggcaaaattttttacacttctactacttctttatcacacatcagcaaacaccgagggcatgttgcgtcgcatacttttcacgcaaaacctgcaattcgagctgttcagtaaatttaacatacaaaccgctaaaatcaccaaaagcaatagccattt

SEQ ID NO: 28943 - DNA, 64 bp, Unknown; identical to SEQ ID NO: 28932
  Description of Unknown: RightRegion for integrase B2944 sequence

SEQ ID NO: 28944 - DNA, 109 bp, Unknown; identical to SEQ ID NO: 28930
  Description of Unknown: RightRegion for integrase B2945 sequence

SEQ ID NO: 28945 - DNA, 109 bp, Unknown
  Description of Unknown: RightRegion for integrase B2946 sequence
gatggaagtcgagagcaagaggtcgagattttctataagtttgtaggaaagatcgactgagaggccaatatctttaagtatgtgaatggggcgactcgacgcccgacct

SEQ ID NO: 28946 - DNA, 260 bp, Unknown
  Description of Unknown: RightRegion for integrase B2947 sequence
gtaccgtgttcggattttaggacgcaacctgctccaaaattgcagcacgccctgccttgattggcagggcgtgctgctttatttattgtacatagcttgcagaactccgactcgcttagggcaacgccgcaatggggacacggttcccttacttgcggaaaggaatcgagcttccggattgtgacatatcctctcgcgaagaagatactgtcaaattacagagaaattgagtgccttgtgtgaaagggtggggaatattg

SEQ ID NO: 28947 - DNA, 260 bp, Unknown
  Description of Unknown: RightRegion for integrase B2948 sequence
atcaatggtgggctgctttgtttcagtctgccgaggccaaaaaagaaccgagcggaataacccgctcggttcttttttctctattctctatgtgacgcgcaacggtgcagcctacatcaataccccgcgtaggcacgcaggccttcgactgcacgcggcgcgtgttaataattattcgttctgagtttcgtcaactatggcctcgattatttcaacaggcggttctttgtctatcttgtctttataatttctaagccact

SEQ ID NO: 28948 - DNA, 260 bp, Unknown
  Description of Unknown: RightRegion for integrase B2949 sequence
gacggaagtcgagagcaagaggtcgagattttctataagtttataggaaagatcgactgaaagaccaatatctttaagtatgtgaacggggggaatcacttagttaaagataccatttgaaacaactcgcactttagcttacaaattattatattgagcttattataccagcgcgaaatggtgtcataatctgagtacaataacaaatgcgtaaaaaatagggtacagaaataaatctgtacccttattgaaaagaaacc

SEQ ID NO: 28949 - DNA, 260 bp, Unknown
  Description of Unknown: RightRegion for integrase B2950 sequence
gatggaagtcgagagcaagaggtcgagattttctataagtttgtaggaaagatcgactgaaagaccaatatctttaagtatgtgaatggggggattcacttagttaaagataccatttgaaacaactcgcactttagcttacaaattattatattgagcttattataccagcgcgaaatggtgtcataatctgagtacaataacaaatgcgtaaaaaatagggtacagaaataaatctgtacccttattgaaaagaaatc

SEQ ID NO: 28950 - DNA, 260 bp, Unknown
  Description of Unknown: RightRegion for integrase B2951 sequence
gatggaagtcgagaacaagaggtcgagattttctataagtttataggaaagatcgactgagagaccaatatctttaagtatgtgaatggggggtttcacttagttaaagataccatttgaaacaactcgcactttagcttacaaattattatattgagcttattataccagcgcgaaatggtgtcataatctgagtacaataacaaatgcgtaaaaaatagggtacagaaataaatctgtacccttattgaaaagaaacc

SEQ ID NO: 28951 - DNA, 260 bp, Unknown
  Description of Unknown: RightRegion for integrase B2952 sequence
ggtaaaattaatgatgaaacaaatacaagggatattgaaattaaatggaattttgaataatctctactatataaccaaatcttgaatgaaagaatgtgataagtaatgaatcaagaaaaactagaaacaatcgtagaattatttgaaggtaaagaaattagaagtatttgggatagtgaaaaggaagattattactttagtgttgttgatgttataaatgctttagcaaacccaaaagatgctagaaaatactggtcagt

SEQ ID NO: 28952 - DNA, 260 bp, Unknown
  Description of Unknown: RightRegion for integrase B2953 sequence
ttaactcccacaacagggaattgcacaaattgttatgcagtaataaccctaagtttatgactacctaaggctttttccttattttaaactcattttacttccgtcttctgcttatttctaatgcctgtttcaatttctttgctatgccccctaaggcatgttccaagtttatacctattacataatatcccttgaaaagacaagaggataaacgtatctacattcatcctcccataaaatactatatcattattttaatt

SEQ ID NO: 28953 - DNA, 217 bp, Unknown
  Description of Unknown: RightRegion for integrase B2954 sequence
gcgttgcggttggtggaggcgatgggagtcgaacccatgtccgaaaagagttcagcgtaggtgtctccgggtgcaggcgatcaacaacattccctccgcgtcacgccggtcgccaggctaacgcattggtagcttcatgagttcctgccggtccgcaaagcttaggtccgttcaggtgctgtgtctaaaggacgccccggccccacacgacacaaga

SEQ ID NO: 28954 - DNA, 64 bp, Unknown; identical to SEQ ID NO: 28932
  Description of Unknown: RightRegion for integrase B2955 sequence

SEQ ID NO: 28955 - DNA, 260 bp, Unknown
  Description of Unknown: RightRegion for integrase B2956 sequence
gctccaccaaactccgcatcgaaagatgcggagttttgctttatactcagcactttctgaactattttatgtgtttttataaaagcagcaccgactcacgcacgacaattttcgggcgcaagccggttctgttttttgtttttcccgcttcttctgaccgcgtgtcgtggtcagagccgtctggcctgctgtctttctctgagagacattgacgccaaccctgacgccaacgtcgatgggacgaaacgtgcctggttgga

SEQ ID NO: 28956 - DNA, 106 bp, Unknown
  Description of Unknown: RightRegion for integrase B2957 sequence
gcgttgcggttggtggaggcgatgggagtcgaacccatgtccgaaaagagctcagtgtaggtatctccgggtgcaggcgatctacaacattcccgccgcgccacgc

SEQ ID NO: 28957 - DNA, 64 bp, Unknown; identical to SEQ ID NO: 28932
  Description of Unknown: RightRegion for integrase B2958 sequence

SEQ ID NO: 28958 - DNA, 260 bp, Unknown
  Description of Unknown: RightRegion for integrase B2959 sequence
tctggaaaaggcgaatattttaaaacagagattatagaaacatcgttcattgaaaaatgagatgcgcaataacggcaacgatatacctatatcgttgagcaaagcagaagtcgtccggttcggcatggtaaaacgctgggaaagataacgcagggaagcgctgatttcaccatccgggccaccggagtgcagtaccctataatagtcccgcaaacccagtgtttatgcgggtttgcgggatttttaactcaggaaaaata

SEQ ID NO: 28959 - DNA, 260 bp, Unknown
  Description of Unknown: RightRegion for integrase B2960 sequence
gatggaagtcgagagcaagaggtcgagattttctataagtttgtaggaaagatcgactgaaagaccaatatctttaagtatgtgaatggggggattcacttaattaaagataccatttgaaacgactcgcactttagcttacaaattattatattgagcttattataccagcgcgaaatggtgtcataatctgagtacaataacaaatgcgtaaaaaatagggtacagaaataaatctgtacccttattgaaaagaaacc

SEQ ID NO: 28960 - DNA, 109 bp, Unknown
  Description of Unknown: RightRegion for integrase B2961 sequence
aactttaccctactaccatcaaaatcgggcatgttagacccatacaggcaaggattttgagcagcgcataaaataaacttgctcgggaaggtcattgccgccctgacgc

SEQ ID NO: 28961 - DNA, 260 bp, Unknown
  Description of Unknown: RightRegion for integrase B2962 sequence
atggtttttgtcactgcggatttgctccggattgtggcgacgaagcaaagcacctcctgatatcgggaggtgctttgctttgtttagtcgggtgtcagtcgtcgccctccgtccacaggatcccgtcaatgtcgctgtcaaacttgccagcggccagccaggcggaaagctcgtccggccacaacggattccaggcgatttccccgatctccccggggtgggagggggtggaacgtctgggctacaggcgtaaccataga

SEQ ID NO: 28962 - DNA, 260 bp, Unknown
  Description of Unknown: RightRegion for integrase B2963 sequence
atggtttttgtcactgcggatttgctccggattgtggcgacgaagcaaagcacctcctgatatcgggaggtgctttgctttgtttagtcgggtgtcagtcgtcgccctccgtccacaggatcccgtcaatgtcgctgtcaaacttgccagcggccagccaggcggaaagctcgtccggccacaacggattccaggcgatttccccgatctccccggggtgggaggggtggaacgtctgggctacaggcgtaaccatagac

SEQ ID NO: 28963 - DNA, 64 bp, Unknown; identical to SEQ ID NO: 28932
  Description of Unknown: RightRegion for integrase B2964 sequence

SEQ ID NO: 28964 - DNA, 109 bp, Unknown
  Description of Unknown: RightRegion for integrase B2965 sequence
agaataccaagaactattttatgtaaaacactacatttgaatgatgttgtaatattataagtaaagtgcctacacttttaattagtataggcacttttttatttgcatt

SEQ ID NO: 28965 - DNA, 86 bp, Unknown; identical to SEQ ID NO: 28914
  Description of Unknown: RightRegion for integrase B2966 sequence

SEQ ID NO: 28966 - DNA, 260 bp, Unknown
  Description of Unknown: RightRegion for integrase B2967 sequence
gaaccctacattgcgtggggaacggtatttgtccaaacaaaaagacactccttaccgtaatggtagggagtgttttctttgtatctaaggcacttaggtgagttaggtgagtaatcgggctaaaatccctataacttcttcttagtacgcgcgtatatagaaatagttatagggaaatgtacccgattactcaccttcctcacctaaactttttaaatttaggggcaattatagtcttacttcttccccttcaccacgaa

SEQ ID NO: 28967 - DNA, 260 bp, Unknown
  Description of Unknown: RightRegion for integrase B2968 sequence
ggtcgatgcggcccagcacccgagcatgatagttataagcggccattccccgcaggctgaacagcacaaagcatttcaggcttcgcacatccgggtcaggctcctgccagagctgctgcatatcatagtcctcggcaatgcccggacaggcggcgtggatcttctcgatcagctgcccgacggtgtgctcgtcaaaatttacattggtgatggtggtgaacagcccctgcatcagcagcaaagcctgctccggagccgga

SEQ ID NO: 28968 - DNA, 260 bp, Unknown
  Description of Unknown: RightRegion for integrase B2969 sequence
atcaatggtgggctgctttgtttcagcctgccgaggcaaaaaaagaaccgagcggaataacccgctcggttcttttttctctattcttttgtgtctgcgggtgcagcctatataactgcttccattttggaagcagttgctaccccgcgtaggtacgcaagccttcgactgtacccggcacctgtcgcttattcgttctgagtttcgtcagcctcgattatttcaacgggcggctcgtgatctgaatctattttgtcttt

SEQ ID NO: 28969 - DNA, 183 bp, Unknown
  Description of Unknown: RightRegion for integrase B2970 sequence
gcgttgcggttggtggaggcgatgggagtcgaacccatgtccgaaaagagctcagtgtaggtgtctccgggtgcaggcgatctacaacattcccgccgcgccacgccgatcgtcaggctagcgctttggtagcttcatgagttcctgccggtccgcaaagcttaggtccgttcaggtgctgtg

SEQ ID NO: 28970 - DNA, 260 bp, Unknown
  Description of Unknown: RightRegion for integrase B2971 sequence
gatggaagtcgagagcaagaggtcgagattttctataagtttataggaaagatcgactgagaaaccaatatctttaagtatgtgaatggggtgtgtcaatattggaaacaccaacaaatacgcaggcacacagacggaaaagaacctttgaaagcctcttgcctgagagccttagacccggaacaagtacacctgcttcgcagccaaggccaggaaggatggctatgagcagatggctgctctcttcctaaaagaccgcc

SEQ ID NO: 28971 - DNA, 260 bp, Unknown
  Description of Unknown: RightRegion for integrase B2972 sequence
tatgaagctaagactgctaaaatcaaacttttctgcagtaaaaaaaaaggcgctatttaatgtagcgcccaaatgctcactacatgaaaagacgatttttgataactatgttattactgtggatttgaataaggaatttaaaaatatgaaatgtaattcttttggtgagaagttaagaagatttagaacgttacatggtatgactcaggaggatgttgccaaagctattgggagcagtaaagctaatatttctaaatatg

SEQ ID NO: 28972 - DNA, 260 bp, Unknown
  Description of Unknown: RightRegion for integrase B2973 sequence
gatggaagtcgagagcaagaggtcgagattttctataagtttgtaggaaagatcgactgaaagaccaatatctttaagtatgtgaatggggggattcacttagttaaagataccatttgaaacagctcgcactttagcttacaaattattatattgagcttattataccagcgcgaaatggtgtcataatctgagtacaataacaaatgcgtaaaaaatagggtacagaaataaatctgtacccttattgaaaagaaacc

SEQ ID NO: 28973 - DNA, 260 bp, Unknown
  Description of Unknown: RightRegion for integrase B2974 sequence
aacctttccgtcaccgtctttccttcttattttcttcttacccgtcccctcttccattaaccccttctcaccagcgcattgtacagcatcaccaaaaactgcaccgcggacggtgtgccggtcagtgggtagcctgccagctgttgcacatgttccgggcttgtgttccatgcgatctgtgcggctcgacgaatcgtgctctgaatgactgtccagtagcagtgatattgttctgacagtggctcatatacttccttctg

SEQ ID NO: 28974 - DNA, 109 bp, Unknown
  Description of Unknown: RightRegion for integrase B2975 sequence
gctgagtctaaaactgcatcaattaagcttttctgcattaaaaaaaaaggcgctctttaatgtagcgcccaaatgctcctgcagtagctgcaaaatctatatttgtaac

SEQ ID NO: 28975 - DNA, 260 bp, Unknown
  Description of Unknown: RightRegion for integrase B2976 sequence
ataaaaacacccgccgtaccccggcgggtgtttttgttttggtgctccgtgagctgctgagaagtcgaacagggcggcagtaccgcagtaccagcccgatggccgatgcggaacgcggatgccgtgcgttcgtcatcctcggtggaatcactctcattataccagtggtttgcccagtgtttgaatgccctgcgaacagcccgcctgcccctcatacagggcaggcataaaaaaccacggtgcggttctgcatcgtggtt

SEQ ID NO: 28976 - DNA, 260 bp, Unknown
  Description of Unknown: RightRegion for integrase B2977 sequence
accgcgttgcggttggtggaggcgatgggagtcgaaccaattcccgccgttctatcgtgaaaaaatcgcaatttacaggctgaaaatgtggcgttgctatgggctgaaattctgcacatagaaccgcacccagttccctaaaatcgggaagtgtggtaaaaagtgtggtatttttcagccgtgcagcagcttcataaataccgcgttgacggcctgcgctgtggttacatcctcaccagtcagggcgtgggagtaaatgc

SEQ ID NO: 28977 - DNA, 260 bp, Unknown
  Description of Unknown: RightRegion for integrase B2978 sequence
tacgaactcttttggtttaggaatgtgttcggcctgacaagaaaactgccgcagaggtaattgtcctctgcggcagttttctatttgccggtgtagctctcacaccgcgcgttgctcataagtagccgtgatttctctttttcgcttcaatgtttgacagcacatcccggatttcaaaggcacctatcgcacagttccagtgatcgcacccaaacgagcggaagatgcagttttggcacccgtcctgctgcttgcagtag

SEQ ID NO: 28978 - DNA, 260 bp, Unknown
  Description of Unknown: RightRegion for integrase B2979 sequence
gctaaaagaggtggatggtattctcctccgttcaggcttgagattaagttcagattctgaaatcaggtaaaaaaagggctccaatcccagcagcagagccacagttatcattgtggcgccggttcttccgtgcctatatcagtcaatattcccgccacttccctgtatggcattgtgtatctctgtgacagatatcgcattgatgctccaagttcaccgtcagggccgccgtactggcttattaccatagctgccatcgc

SEQ ID NO: 28979 - DNA, 260 bp, Unknown
  Description of Unknown: RightRegion for integrase B2980 sequence
ctcgtcaacaatattgtttttaatgcagatggcgaagtcactatttcatttgccatttaactcttttctttttactttctgcacttctttactgttcaagtgatgatatacttgtatagtaaagaagtgcaatttttatctaactgtataatccagactaatccatcctgcgccagatttgagcttgccccactttgaggctccagtgccagacgcttcgtcaacgatggttaatgacatcgtttcggtgatcttgccgg

SEQ ID NO: 28980 - DNA, 260 bp, Unknown
  Description of Unknown: RightRegion for integrase B2981 sequence
ctcgtcaacaatattgtttttaatgcagatggcgaagtcactatttcatttgccatttaattcttttctttttactttctgcacttctttattattcaagtgatgacagcttagattggaaagactacggtgttcaatctatcattgatagaactgcattaaatcctgagctttcaaacggatctatcattttgatgcataatggtgccaaatatacaaaagatgcacttgaaactgttatttcaacacttcagtcaaag

SEQ ID NO: 28981 - DNA, 260 bp, Unknown
  Description of Unknown: RightRegion for integrase B2982 sequence
ataaaagcacccgccgtaccccggcgggtgtttttgttttggtgctccgtgagctgctgaggagtcgaacagggcggcagtaccgcagtaccagcccgatggccgatgcggaacgcggatgccgtgcgttcgtcatcctcggtggaagcactctcattataccagtggtttgcccggtgtttgaatgccctgcgaacagcccgcctgcccctcatacagggcaggcataaaaaaacacggtgcgtgtgcatcgtggtttc

SEQ ID NO: 28982 - DNA, 260 bp, Unknown
  Description of Unknown: RightRegion for integrase B2983 sequence
cgaacaccgaggcaatttcggggttcgtattattcttttctaacgattatttcggcataagaatagaattatgaatacttacgacaacagccgggcgaaaacaatcgctcggctgtttctatgctctaaaacaggtacatgctatgaaagatcgtataagtctataaaattttcagattaacatccgaaaaaagcttgtttatactcttgcgaggcgacttctatttttgccataagatcggcgcttttactctctatcg

SEQ ID NO: 28983 - DNA, 109 bp, Unknown
  Description of Unknown: RightRegion for integrase B2984 sequence
gctaaaagaggtggatggtattctcctccgttcaggcttgagattaagttcagattctgaaatcaggtaaaaaaaggccttcaatcccagcagcagagccacagttatc

SEQ ID NO: 28984 - DNA, 260 bp, Unknown
  Description of Unknown: RightRegion for integrase B2985 sequence
agaatcatggaggcaggcttaagtttgtttccttatcgcccgatgggtgattggttttgactgttttgctttcactaaggtctcccgcacaaaagtgcgggggattttttgtgttattttgcaggcgtgccgcgcacgtcccgtacttcaccttatgtgtgtctctccgtccggcagctcgtccgccgccgcgcatgagcgggatttctccgccggtcttgacaagggaaagaatatctgatacagtataaatgaaaagg

SEQ ID NO: 28985 - DNA, 260 bp, Unknown; identical to SEQ ID NO: 28984
  Description of Unknown: RightRegion for integrase B2986 sequence

SEQ ID NO: 28986 - DNA, 260 bp, Unknown
  Description of Unknown: RightRegion for integrase B2987 sequence
tacgaacttttttggtttaggaatgtgttcggcctgacaagaaaactgccgcagaggtaattgtcctctgcggcagttttctatttgccggtgtagctctctgtcggcaagagcttataggttttcagcgtcttcccgcacctgcggcatttataccgatagatcgtatcaatgtcgcctgcgctggaaccgatagtgaaatcggaatcaagcatcacccaactgtgcgattcacaggggcataggcgctcctcaagctc

SEQ ID NO: 28987 - DNA, 118 bp, Unknown
  Description of Unknown: RightRegion for integrase B2988 sequence
gcgttgcggttggtggaggcgatgggagtcgaacccatgtccgaaaagagctcagtataggtgtctccgggtgcaggcgatctacaacattcccgccgcgccacgccgatcgtcaggc

SEQ ID NO: 28988 - DNA, 158 bp, Unknown
  Description of Unknown: RightRegion for integrase B2989 sequence
ctcgtcaacaatattgtttttaatgcggatggagaagtcactatttcatttgccatttaactcttttctttttactttctgcacttctttactgttcacgtgatgacagcttagattggaaagactacggtgttcaatctatcattgatagaactgca

SEQ ID NO: 28989 - DNA, 260 bp, Unknown
  Description of Unknown: RightRegion for integrase B2990 sequence
tacgaactcttttggtttaggaatgtgttcggcctgacaagaaaactgccgcagaggtaattgtcctctgcggcagttttctatttgccggtgtagctcttacaccgcgcgttgctcataagtagccgtgatttctctttttcgcttcaatgtttgacagcacatcccggatttcaaaggcacctatcgcacagttccagtgatcgcacccaaacgagcggaagatgcagttttggcacccgtcctgctgcttgcagtag

SEQ ID NO: 28990 - DNA, 260 bp, Unknown
  Description of Unknown: RightRegion for integrase B2991 sequence
gatatagtaaactttcatgttatgtgtcgccccacaagggagcgacgtaagttgttataatttttcgtgtgttagtttatctttattaaaaatcaaacttgtattcaaaatagcgtaatcatcgccatcaaaaaacatttgctgacctaatgtttcgcggttaaagctcagcagataataaccgccacaatacatgttttcaactgaatagctgccgctgtttggagtcgcatgccaaaattcctgcgttatcgtcgcat

SEQ ID NO: 28991 - DNA, 260 bp, Unknown
  Description of Unknown: RightRegion for integrase B2992 sequence
ataaaagcacccgccgtaccccggcgggtgtttttgttttggtactccgtgagctgctgaggagtcgaacagggcggcagtaccgcagtaccagcccgatggccgatgcggaacgcggatgccgtgcgttcgtcatcctcggtggaatcactctcattataccagtggtttgcccggtgtttgaatgccctgcgaacagcccgcccgcccctcatacagggcaggcataaaaaacacggtgcgtgtgcatcgtggtttgg

SEQ ID NO: 28992 - DNA, 260 bp, Unknown
  Description of Unknown: RightRegion for integrase B2993 sequence
ccgtcaagcgcactaagatgtgagaaagccttgagagatcaaggcttttttgttatataaaatatggtataatgaagcatgctgatgcatgcgcaggtcatcaggctccgcctggtgacaatgtataatgaagcatgctgatgcacacaacaaaaaggataactatataaatatgaatattcaaaaacagtttataaaatatgtttcccagaatatctgtggaatgttggggatttcctgctatattatcgtggatacat

SEQ ID NO: 28993 - DNA, 260 bp, Unknown
  Description of Unknown: RightRegion for integrase B2994 sequence
cttgctccaccaaaatccgcactgaaaagtgcggatttttgctttatccgaactttttgaagaagaaccgaggatgccgacgcggcgtgtttttgcgcaggcaggcttgatttttcttcgtttcacgcggccgtcgtccgcaccgtaaggtcaaggcaacttgggctgatgtcctccactcagcgacattgacgccaaccctgacgccaacggcgatgggacgaaacgtgcctggttggacaaaatgagatgaaaacgag

SEQ ID NO: 28994 - DNA, 260 bp, Unknown
  Description of Unknown: RightRegion for integrase B2995 sequence
gtgacagggttcggttttggggagtctgagtgtgccaatcaccggatcaccgcatggtgatccggtgatttttttgctccgcgccagaaatgctccgccggcctgggccggcggagcattttcctgtcttatccctgcctcagcggcggtgctttttccccttgcgagccttttccggctcgatgccctcggcctcggccatagcgtccacggtcacctgcaggtcgtcgagctggtcgtgcacaggcttgagcgccttt

SEQ ID NO: 28995 - DNA, 260 bp, Unknown
  Description of Unknown: RightRegion for integrase B2996 sequence
caaatggaggttgaagtaaaaaaaataaattacagaagaacagaatatatctgtttgtaacaacaagtgaaaacctggcttccgtagataatgaggaagcccagacctgcctgtgccaccagaaattccccgacgattacaccgacaaaggaaagcccgacgttgattttcaaagcgttgaccatacaggggatattggcaggaaatacgacttttttcagaatctgccattttccgccgccaaaaatgcggatgagttt

SEQ ID NO: 28996 - DNA, 260 bp, Unknown
  Description of Unknown: RightRegion for integrase B2997 sequence
ttttatcgggcttttttgttgcccaaaggccgtttttcgaagtttcaaaatcgtagatgaaaaaacggcgttttccctttgaagatagatacgaacccaagtaacaaccgaatatagaacaaggacggcagatagtcacagacgctacctgccgatttttgttgccctcggagccaatcgttttgaaaagaaacggttggctctttttttatttcacagacaaggagcaagacaatgatcttttcagattcaccccagca

SEQ ID NO: 28997 - DNA, 260 bp, Unknown
  Description of Unknown: RightRegion for integrase B2998 sequence
atgatcgagtgcatcaaggtacataacgatggaaagctgacgatcattttccgggtatgagatcgaggaaacactatagaaagccagatcgcaagacacagaaaaaactggaggtatgcgcacacttttgcaaacgtttcctatggaagcttagtgttaaaatgtgataccaacctcctggagaggattgtatgtcaattgaaattgatgggttgcatcaaagtttacctcggtggtaacccgaaaaatcacctttagcg

SEQ ID NO: 28998 - DNA, 260 bp, Unknown
  Description of Unknown: RightRegion for integrase B2999 sequence
atatacatggcgtttggcctttttatcctgctctgtccctaccccagcaggcagggataggtcgttttgctcatctgttcacaaaaagtttacaatcaagttgcaacaaagggcgagggcgtcagcaatcagctggcgccctcaataaacaaaccggaggcagcaaaacgcctccgataggtattatagcacacgcggagatgtggcgcaagtgccacgtgtcaaaataccaatcgtcaatttttctgcgacgtttccgg

SEQ ID NO: 28999 - DNA, 260 bp, Unknown
  Description of Unknown: RightRegion for integrase B3000 sequence
cgcagacaggatattgagatttactattctttcgtcggcaaagtggacttgcccgaatgaccgcccgccctatccgatatcaaaggcaagtatcggataggaaaggcaaaattttttacacttctattacttctttatcacacataagcaaacctgtacggcatggctgtagctgcggccgtcaaggcgatgaactaccacgccggtcaggaaacgtgggcgctgatgccgcttgcgaccgtttctcctgcaaagctgac

SEQ ID NO: 29000 - DNA, 260 bp, Unknown
  Description of Unknown: RightRegion for integrase B3001 sequence
agcaccgcacagaaacgtgtggtgtttttttgttgttaccgaccaaaggagaaactatgagctacgcgatcgtattcagcagtaaaacaggcaacacaaaattattggcagacacgctgcacgcctgtctgccacaggaaaactgctgctattttggcaccccggaccctgctgccatggaagcggacgacctctatgtgggcttctggacagacaagggaaacgccgacgaaagcactttggactttttgaagcagctg

SEQ ID NO: 29001 - DNA, 260 bp, Unknown
  Description of Unknown: RightRegion for integrase B3002 sequence
ggtttccgtctaatcgcggtattgagcttgagaggggccacaaaaagaggctcgccctgatggacgagcttcttttttcagtcggtcaaaagttcttcaacggttgtccccagcgcccttgccagcttgagcgccgtggcggcctcaatgccgtccatttcccgcttgccggtttccagcttagcgatgttcggctggcgggttccaatcctccgcgccagctcggcctgtgtgaggccggctgcaatgcggaactgctt

SEQ ID NO: 29002 - DNA, 260 bp, Unknown
  Description of Unknown: RightRegion for integrase B3003 sequence
cgcagacaggatattgagatttactattctttcgtcggcaaggtggacttgcccgaatgaccgcccgccctatccgataccaaagacaagtatcggataggaaaggcaaaattttttacacttctattacttctttatcacacataagcaaaatcacagggtatcaaacacttagtgtcttctatgtgaaaagattttaaaggaaaaatgcacatcctacgtagataacatgacaatttcatgcaaagcgaaaggagaca

SEQ ID NO: 29003 - DNA, 61 bp, Unknown
  Description of Unknown: RightRegion for integrase B3004 sequence
ccgtcaagcgcattaagccttgtaggtatgagtatctacaaggcttttttgatgttataag

SEQ ID NO: 29004 - DNA, 260 bp, Unknown
  Description of Unknown: RightRegion for integrase B3005 sequence
tgcccctgcacccaattccgctttactttatgtaaggcggttttttattgccgctcatgaatcattatttataaacccaactttgttatttcaccatggcagacgctgatataataaaaaagagtgcattaccacctcatcagataatgcactcttatattttaccctatttctcctccagcccgctgagcgaaagcctgctctccattttctgaacagtcttgctctcctgctttgcgatctttgcttcaaaccagaag

SEQ ID NO: 29005 - DNA, 260 bp, Unknown
  Description of Unknown: RightRegion for integrase B3006 sequence
tcagatcctacaaattttatcataaatctatatccaaagataaataaagctaatgtttgatctttacataaaaacacataatttatataaatggtattgaagaataaaagaagaaaaatattttttttacccatcaagcgacctctttaggggcgaacgaattagcgcatttagaaatggttggtagtttagtgcatcaattgacagaaggcgtaaccatagaagaattagaaaaagcaggacttagtgcatattataca

SEQ ID NO: 29006 - DNA, 260 bp, Unknown
  Description of Unknown: RightRegion for integrase B3007 sequence
aggaaactcaggtggcttttctgtttgtatgattccgcgcggaaaaactattatagatagagcgaacccggaaagtccacaggactttccgggttcgccttttcacgggaaatataaatttacagaatggtaatgcggcctgcgccgtagggctgctcgtagttgagcaggtagccggggtatgcggccagcgggctgttggcgctggacaggtgcggcagacccgcagcatctgcgccgtcaaaggtcatggcgtaggt

SEQ ID NO: 29007 - DNA, 109 bp, Unknown
  Description of Unknown: RightRegion for integrase B3008 sequence
ccgtcaagcgcattgcggatcagagaagtcttagagataaggcttctttcttttttataaagaaaaaatataaggtgtagtgtaaagtgtgacaagtcatcaggagaga

SEQ ID NO: 29008 - DNA, 260 bp, Unknown; identical to SEQ ID NO: 28989
  Description of Unknown: RightRegion for integrase B3009 sequence

SEQ ID NO: 29009 - DNA, 260 bp, Unknown
  Description of Unknown: RightRegion for integrase B3010 sequence
accctggatttccacctcaaagtaggcatagtcgagagcataacaatcaccaggaaataagagttgccgaccatagggaaaaaccttgcggtcggcgatttttcttgctataatatagaggtaaagggcaacgagacctttcatggttacaccctttgaaaaggggctattttgagacctttcgtagtcatctgccaagtcaaaataatccgaaccttttggtaacaaccgattggttcggatttgtcgtttatctgaaa

SEQ ID NO: 29010 - DNA, 260 bp, Unknown
  Description of Unknown: RightRegion for integrase B3011 sequence
tacgaactcttttggtttaggaatgtgttcggcctgacaagaaaactgccgcagaggtaattgtcctctgcggcagttttctatttgccggtgtagctctctgtcggcaggagcttgtaggttttcagcgtctttccgcacctgcggcatttataccggtagatcgtgtcaatgtcgcctgcgctggaaccgacagtgaaatcggaatcaaccaccacccaactatgcgattcacaggggcacaggcgctcctccaactc

SEQ ID NO: 29011 - DNA, 260 bp, Unknown
  Description of Unknown: RightRegion for integrase B3012 sequence
tccgaacctgattccggttggaaacgggttcggatttctttatttcgtcaagaaggctgaaaatatgcaggggtaacttgaaccattgctacaactgagttgaagatgcaatcatgcccgctttatttcttacaataaagcgggcatgactatttggttacagagcaacatcacatgtgaggaaccagcttcccattggataaatttggaattccaccatactctccatccagatatgctttgcgaattcgcttgtcgaa

SEQ ID NO: 29012 - DNA, 260 bp, Unknown
  Description of Unknown: RightRegion for integrase B3013 sequence
gaggaggtgaccttcgtgttctccgattacctcgaacgcaccgtgccgataatcaaataaacctcaaaagcgaaagccgtctggtcgagtgccgggcggctatttttgttagatgtttttgtattgtgggcaatggacgctggactaaaaaccgcaaatatgatacctttatggaaaaaggagattttccaaatgaaaagtatcaccgatgaaatttttgatggagtcatcaatgaactcgaccgccgtaattttctcgc

SEQ ID NO: 29013 - DNA, 260 bp, Unknown
  Description of Unknown: RightRegion for integrase B3014 sequence
ctcgtcaacaatattgtttttaattcggatggagaagtcactatttcatttgccatttaactcttttctttttactttctgcacttctttactgttcaagtgatgacagcttagattggaaagactacggtgttcaatctatcattgatagaactgcattaaatcctgagctttcaaacggatctatcattttgatgcataatggtgctaaatatacaaaagatgcacttgaaactgttatttcaacacttcagtcaaag

SEQ ID NO: 29014 - DNA, 260 bp, Unknown
  Description of Unknown: RightRegion for integrase B3015 sequence
atatcgggcttttttgctgcccaaacggcgatttttctctgtaccaaaacgcagatgtaaaatcgccgttttccctttgcggatagacttgaactcccgaaaagtaaatatcagatacacaggcagatagaaagcaaaaatctatctgccttttttattaccctaaaagggagaaatcagatatgctgcagaaggaatgagccaaccggctcaaggctcggtacgacaccaagatggacggcaacgaatggatggaagtg

SEQ ID NO: 29015 - DNA, 109 bp, Unknown
  Description of Unknown: RightRegion for integrase B3016 sequence
ggctccttggatgacttcgagattaaaatttttcctaagcttccgcgtacccatcattgacaacatggtggtacgcaatcctcagtgccgatgtcattgagtacaccga

SEQ ID NO: 29016 - DNA, 260 bp, Unknown
  Description of Unknown: RightRegion for integrase B3017 sequence
ctcgtcaacaatattgtttttaattcggatggagaagttactatttcatttgccatttaactcttttctttttactttctgcacttctttactgttcaagtgatgacagcttagattggaaagactacggtgttcaatctatcattgatagaactgcattaaatcctgagctttcaaacggatctatcattttgatgcataatggtgccaaatatacaaaagatgcacttgaaactgttatttcaacacttcagtcaaag

SEQ ID NO: 29017 - DNA, 260 bp, Unknown
  Description of Unknown: RightRegion for integrase B3018 sequence
ataaaagcacccgccgtaccccggcgggtgtttttgttttggtgctccgtgagctgctgaggagtcgaacagggcggcagtaccgcagtaccagcccgatggccgatgcggaacgcggatgccgtgcgttcgtcatcctcggtggaatcactctcattataccagtggtttgcccggtgtttgaatgccctgcgaacagcccgcctgcccctcatacaggacaggcataaaaaaccacggtgcgtgtgcatcgtggtttc

SEQ ID NO: 29018 - DNA, 260 bp, Unknown
  Description of Unknown: RightRegion for integrase B3019 sequence
ggcgttgtcaggcagcatattactgtaaactataaatttgtagggcagttaaacgcataaaggactttggattatttatgggtggccttattgctggcacacaataaaaatccgaaagactttgaatctttcggatttttatgatatggcggagaaggagggatttgaaccctcgcgccagtcaccccagcctactcccttagcagtggaacaaaaaatggctaaatacctgcaaaacaatgatatctgtacgttatttg

SEQ ID NO: 29019 - DNA, 260 bp, Unknown
  Description of Unknown: RightRegion for integrase B3020 sequence
aaagcaccacacggaaacgtgtggtgcttttttgttgctgccaaacgagtgagggtttagctcacccaggagagtgccgtgcatggactgcaagagggtcaccgtgatcagaatcggcccggtaatctccaccagaatgaaagcactacacggaaacgtgtggtgcttttttgttttatctgccgttcaccttacgtcccctttcatgaaaaaagcgtttgtcgcagcccgcaggccgtgacaaacgctttttattttac

SEQ ID NO: 29020 - DNA, 260 bp, Unknown
  Description of Unknown: RightRegion for integrase B3021 sequence
aaagcaccacacggaaacgtgtggtgcttttttgttgctgccaaacgagtgagggtttagctcacccaggagagtgccgtgcatggactgcaagagagtcaccgtgattacagcagcccggcaatctccaccagaacaaaaaagcgtttgtcgcagcccgcaggccgtgacaaacgctttttattttactgtgcgcccaagcgcattttgaagtcctgatagccgaagtgcaccagttccctgcaattgccgtctgcgcc

SEQ ID NO: 29021 - DNA, 260 bp, Unknown
  Description of Unknown: RightRegion for integrase B3022 sequence
ttggctctccacaactgcaccaaaatcctcgaacgtttgttcggggattttttgttttagtgatttgtttgggatgacaagcatcgcccccccgcaccgtaggggcggattccatatccgcccgcggatccttgccattactgcaaacgtcctggggcgctggcgagcattgacccctgcggcgctgtagacttgttgccctatgcaactgcgaaatgtacgtggtgcaaatacacctatcccgcgcacaaaaacatttt

SEQ ID NO: 29022 - DNA, 260 bp, Unknown
  Description of Unknown: RightRegion for integrase B3023 sequence
gaaaggcatcacacattgtgtggtgccttttttgttgttgccaaacgagtgagggcttagctcacccaggagagcgccgtgcatggactgcaagagggtcaccgtgatcagaatcggcccggtattctccaccagaaagcactgtacttcgtaggaagtatggtgcttttctttttatgcagacgcagaaaaaggcgggagcttcccacaaaagggaaagccaccgcctttgttgatcatcggatgagccagccgtaatc

SEQ ID NO: 29023 - DNA, 260 bp, Unknown
  Description of Unknown: RightRegion for integrase B3024 sequence
gcactgtacttcgtaggaagtatggtgcttttctttttgctttcttggaggtcacactgaaaatcagccaaatgcctgattttgcaggcgtatggacggcaacccccaattcttgctgtttcgttgtttttgaaaatgcttgttcgatgcccgactgttttgcaggcggacgtatcactccccctcaatgtaaggagtgagatcgaagttgaacgagatgttgatctggtatccgcgatatacgtctaccctgcggatga

SEQ ID NO: 29024 - DNA, 260 bp, Unknown
  Description of Unknown: RightRegion for integrase B3025 sequence
ctaaacaaaaaatctcccgccctcaaccgagagcgggagaaaatttttacatcaccttaataaatgcgcctggataatattttttgacctttgccaaatatgcctcggcattttccctggaactaaaagcccctacctgcacataaaacatctcctcagattttgacgttttcgatgaaaacattttctgaaactttctccagtcctcaagctctgcctccgaatgtgtccacatagcagggcacagcttgccggtcacc

SEQ ID NO: 29025 - DNA, 260 bp, Unknown
  Description of Unknown: RightRegion for integrase B3026 sequence
ttagctctccacaaccgcaccaaaatcctcgaacgtttgttcggggattttttgttttagtgatttgtttgggatgacaagcatcgtcccccgcggcgctggcggttcgcgcttttccgctatagatacagcaacagccccagtcctgcactggaaccggggctgtacgattttatggcaattttacgccatgaaatccggcaggggcttgccctccttcagccattggtgatactcggcggtagcggcaaactcaacgt

SEQ ID NO: 29026 - DNA, 260 bp, Unknown
  Description of Unknown: RightRegion for integrase B3027 sequence
ttagctctccacaaccgcaccaaaatcctcgaacgtttgttcggggattttttgttttagtgatttgtttgggatgacaagcatcgtcccccgcaccgtaggggcggattccacatccgcccgcggagccttgccattactgcaaacgtcccgggtcgctggcgagcattgacctccacagcgctggcggttcgcgcttttccgctatagatacagcaacagccccggtcctgcattggaaccggggctgtacgatttta

SEQ ID NO: 29027 - DNA, 260 bp, Unknown
  Description of Unknown: RightRegion for integrase B3028 sequence
ttggctctccacaactgcaccaaaatcctcgaacatttgttcggggattttttgttttagtgatttgtttgggatgacaagcatcgtcccctgcaccgtaggggcggattccgtatccgcccgcggagccttgccattactgcaaacgtcccgggtcgatgacaagcgttgacccctgcggcgctgtagacttgttgccctatgcagccgcaaaatgtacgtggtacaaatacacctatcccgcgcacaaaaacattttt

SEQ ID NO: 29028 - DNA, 260 bp, Unknown
  Description of Unknown: RightRegion for integrase B3029 sequence
gaaaggcatcacacattgtgtggtgccttttttgttgttgccaaacgagtgagggcttagctcacccaggggagcgccgtgcatggactgcaagagggtcaccgtgatcagagtcggcccggtattctccaccagaaggaaaagcaccgcacggaaacgtgtggtgcttttctttttatacagacgcagaaaaaggcgggagcttcccacaaaagggaaagccaccgcctttgttgatcatcggatgagccagccgtaat

SEQ ID NO: 29029 - DNA, 260 bp, Unknown
  Description of Unknown: RightRegion for integrase B3030 sequence
ttagctctccacaaccgcaccaaaatcctcgaacgtttgttcggggattttttgttttagtgatttgtttgggatgacaaacatcgtcccctgcaccgtaggggcggattccgtatccgcccgcggagccttgccattactgcaaacgtcccgggtcgctggcgagcattgacccctgcggtgctgtaggcgtgatggcctatgcagctgcaaaatgtgcgcgacacaaatacacctatcccgcacgtgaaaacattttt

SEQ ID NO: 29030 - DNA, 99 bp, Unknown
  Description of Unknown: RightRegion for integrase B3031 sequence
tcagagggcctaagcggtgaaaagtaccatacaacacccgaaaacgggtcaggagcatgacggctccccatatctttttcggcccgttcccagccgatg

SEQ ID NO: 29031 - DNA, 260 bp, Unknown
  Description of Unknown: RightRegion for integrase B3032 sequence
aaagcactacacggaaacgtgtggtgcttttttgttgctgccaaacgagtgagggtttagctcacccaggagagtgccgtgcatggactgcaagagggtcaccgtgatcagaatcggcccggtaatctccaccagaacaaaaaagcgtttgtcgcagcccgcaggccgtgacaaacgctttttattttactgtgcgcccaagcgcattttgaagtcctgatagccaaagtgcaccagctcccggcaattgccgtctgcgc

SEQ ID NO: 29032 - DNA, 260 bp, Unknown
  Description of Unknown: RightRegion for integrase B3033 sequence
aaagcactacacagaaatgtgtggtgcttttttgttgacgccaaacgagtgagggtttagctcagctgggagagcgccgtgcatggactgcaagagggtcaccgtgatttgaatcggcccggtattctccaccagaacgaaagcactacacggaaacgtgtggtgtttttttgttgctgccaaacgagtgagggtttagctcacccaggagagtgctgtgcatggactgcaagagggtcaccgtgatcagaatcggcccg

SEQ ID NO: 29033 - DNA, 260 bp, Unknown
  Description of Unknown: RightRegion for integrase B3034 sequence
ggaacagaggagttgctcgacattccaaatgataggaaacctcgtgttaaatctgaataaaaatagttgtcacgctttagcgcttgccctattgggggggcgctttttgcgttttaataacataatagacatagaaaaagactcggccagcttcttcacaacatgctaccgagtctttttaatttttagtctagttttttcaatagggtttgggtcttatcaccagtgcgatatcgcagcacctcttgcccttggtcagt

SEQ ID NO: 29034 - DNA, 260 bp, Unknown
  Description of Unknown: RightRegion for integrase B3035 sequence
aaagcactacacggaaacgtgtggtgcttttttgttgctgccaaacgagtgagggtttagctcacccaggagagtgccgtgcatggactgcaagagggtcaccgtgatcagaatcggcccggtaatctccaccagaatgaaagcactacacggaaacgtgtggtgcttttttgttttatctgccgttcaccttacatcccctttcatgaaaaaagcgtttgtcgcagcccgcaggccgtgacaaacgctttttattttac

SEQ ID NO: 29035 - DNA, 260 bp, Unknown
  Description of Unknown: RightRegion for integrase B3036 sequence
ttggctctccacaactgcaccaaaatcctcgaacgtttgttcggggattttttgttttagtgatttgtttgggatgacaagcatcgtcccctgccacgtaggggcggattccatatccgcccgcggagccttgccattactgcaaacgtcccgggtcgctggcgagcattgacctccacagcgctggcggttcgcgtttttccgctatagatacagcaacagccccggtcctgcactggaaccggggctgtacgatttta

SEQ ID NO: 29036 - DNA, 260 bp, Unknown
  Description of Unknown: RightRegion for integrase B3037 sequence
gaaaggcatcacacattgtgtggtgccttttttgttgttgccaaacgagtgagggcttagctcacccaggagagtgccgtgcatggactgcaagagggtcaccgtgatcagaatcggcccggtaatctccaccaaaaaagcactgtacttcgtaggaagtatggtgcttttctttttatacagacgcagaaaaaaggcgggagcttcccacaaaagggaaagccaccgcctttgttgatcatcggatgagccagccgtaa

SEQ ID NO: 29037 - DNA, 260 bp, Unknown
  Description of Unknown: RightRegion for integrase B3038 sequence
tttttgcaactatatatgtacaaaaatattgcatatcaaatatttactatacaacaataatatttgaatattgttgtatgaatatatatgctataataaaagacgtgtcgataaatctcaccatttcatgatgttttgattaagtctgctaaacaagcagacttttcttttttcccgtttctattaactgtttaactttttcttttgcctcgtctaaatttttacaaccgtctaatatcacagaaaacattttaagattt

SEQ ID NO: 29038 - DNA, 260 bp, Unknown
  Description of Unknown: RightRegion for integrase B3039 sequence
atgccgcagcacaatgtcccagagtgtcttcacctacctggtccgtcaggcagggcttgaagactgctttgagattgattctgcggcgaccagccgtgaggagatcggcaatccgccgcattatggaacgagaaacaagctgcgacaggtgcagattccgctgattgcacatcatgcgaggcagatgacgcggcaggattatgaaaattttgactttcttattggaatggattctgctaatataagaaacatgacacgga

SEQ ID NO: 29039 - DNA, 260 bp, Unknown
  Description of Unknown: RightRegion for integrase B3040 sequence
ttagctctccacaaccgcaccaaaatcctcgaacgtttgttcggggattttttgttttagtgatttgtttgggatgacaagcatcgccccccgcaccgtaggggcggattccgtatctgcccgcggagccttgccattactgcaaacgtcccgggtagctggcgagtattgacccctgcggcgctgtagacttgttgccctatgcaactgcgaaatgtacgcggtacaaatacacctatcccacgcacaaaaacattttt

SEQ ID NO: 29040 - DNA, 109 bp, Unknown
  Description of Unknown: RightRegion for integrase B3041 sequence
acaatacaggaaatttatctaaacgaagacaatacgattaaaggtgttgattttatttagcgcgtcttgtactaaacatctagccccatttggagccgacaaaacgatg

SEQ ID NO: 29041 - DNA, 260 bp, Unknown
  Description of Unknown: RightRegion for integrase B3042 sequence
aaagcactacacagaaatgtgtggtgcttttttgttgctgccaaacgagtgagggcctagctcagccgggagagcgccgtgcatggactgcaagagggtcaccgtgatcagaatcggcccggtaatctccaccagaaaaaagcactacacagaaatgtgtggtgcttttctttttgctgaagctggttttttgggggctgcattgcttcgcctgcaccgttttcaggcttttgcaggcggttcctatacaacccccaact

SEQ ID NO: 29042 - DNA, 260 bp, Unknown
  Description of Unknown: RightRegion for integrase B3043 sequence
ttggctctccacaactgcaccagaatcctcgaacgtttgttcggggattttttgttttagtgatttgtttgggatgacaagcatcgtcccccgcaccgtaggggcggattccgtatctgcccgcggagccttgccattactgcaaacgtcccgggtcgctggcgagcattgccctccacagcgctggcggttcgcgcttttctgctatagatacagcaacagccccggtcctgcactggaaccggggctgtacgatttta

SEQ ID NO: 29043 - DNA, 97 bp, Unknown
  Description of Unknown: RightRegion for integrase B3044 sequence
gacccctcctgtggtgaggggttcggatttggaacgcctgagtccaccattgaaggataatccgaacaccctattctttatagggacactgttcgga

SEQ ID NO: 29044 - DNA, 260 bp, Unknown
  Description of Unknown: RightRegion for integrase B3045 sequence
tatcagcagttttgtgaagaatggagcaatacggaaatcagcaaaaaaatggctatttaagttaagccagcttttgataatgggctttctccctccttattccggtttgtaacccttacactggtagagcatgcggctgttaaccgcagtgtcgttggttcgagtccaacagggggagccaaagaaaagccctaaatctctaaagatttggggcttttgtcattttcaaaaaacttggcaaaacgccctcatgcacccca

SEQ ID NO: 29045 - DNA, 260 bp, Unknown
  Description of Unknown: RightRegion for integrase B3046 sequence
gttatattctttgtttgcgggctttttggattagtacataaaatatcgggcaagaattaactcttgcccgatattttattacactttccaacgatacccgcagtcctgacaaaccgcatagctttttacctttgatcctttacgtatcagcaacggaatcagaattatcaatccacaagttaagagagtaagtattatccacagtatagacgcgaggcatcctcttttcttctgctccgctaccgcttgcactgtaacat

SEQ ID NO: 29046 - DNA, 260 bp, Unknown
  Description of Unknown: RightRegion for integrase B3047 sequence
ttagctctccacaaccgcaccaaaatcctcgaacgtttgttcggggattttttgttttagtgatttgtttgggatgacaagcatcaccccccgcaccgtaggggcggattccgtatccgcccgcggagccttgccattattgcaaacgtcccgggtcgctggcgagcattgacccctgcggcgctgtagacttgttgcactatgcagccgcaaaatgtacgcagtacaaatacacctatcccgcacacaaaaacattttt

SEQ ID NO: 29047 - DNA, 75 bp, Unknown
  Description of Unknown: RightRegion for integrase B3048 sequence
ttggctctccacaactgcaccaaaatcctcgaacgtttgttcggggattttttgttttagtgatttgtttgggat

SEQ ID NO: 29048 - DNA, 260 bp, Unknown
  Description of Unknown: RightRegion for integrase B3049 sequence
cgccgtggcgggcatttcccgtcaaggcttttttgtaagcacacaaagtcaccgctgtaataatttgtgtgtcacttttacaaattcaggggcgtgcccctgcacccgatccgctttactttatgtaaggcggtttttttatttccgctcatggatcattatttataaacccaactttgttatttcaccatggcagacgctgacataataaaaaagagtgcattaccacctcagataatgcactcttatattttacccta

SEQ ID NO: 29049 - DNA, 109 bp, Unknown
  Description of Unknown: RightRegion for integrase B3050 sequence
gattttgaaattaccatatttcccaaaattcctagtcaggactcaagacctcctgcatagtcgctgaactccttacaaaaaaccctcccattttgatgggaggtttttt

SEQ ID NO: 29050 - DNA, 260 bp, Unknown
  Description of Unknown: RightRegion for integrase B3051 sequence
tgtagattgaagtcccattcccggaagcgattctgggattatgacaccttcgtggtgtagtccagggaaatccaccctgcgccagatttcagcttaccccactttgttgcaccctgcccagtgctttcctgcacgatggtataaactccaccgttacggatagtgcctgccagagcgtagttcgtacctgcacccttacgaatattcagaaccgaagctgtgaccttcactctatacggagagaacgtaggcttgctctc

SEQ ID NO: 29051 - DNA, 260 bp, Unknown
  Description of Unknown: RightRegion for integrase B3052 sequence
aaaagtgctgtatgggacagtgataacaataatgtggaaataatatttaatacccattaaattaagtattttgataactttagcaaatccatggacagcaacttatattcaagcaaaaggtgatccagtagcagatttgcatgaagatatggctgctgaacaaaaagcgagagctacttatgagaatttaataaaattaactgatgatcaagatataaaagatgtattaaaattcttaagagaaagagaaatagtccatt

SEQ ID NO: 29052 - DNA, 260 bp, Unknown
  Description of Unknown: RightRegion for integrase B3053 sequence
tgtagattgaagtcccattcctggaagcgattctgggattatgataccttcgtggtatagtccagagaaatccaccctgcgccagatttcagtttgccccacttcgttgcgccctgtccagtgctttcctgcacgatggtataaacaccaccgttgcggatagagcctgccagggcgtaattcgtacctgcacccttacgaatgttcagtacatcagccgtaaccttcaccttatacggagagaatgcaggcttgctctc

SEQ ID NO: 29053 - DNA, 260 bp, Unknown
  Description of Unknown: RightRegion for integrase B3054 sequence
cggtttcgccgtgaaatgttcgctctgatccacaacagaaaagcgccgtcttgggagtgatcccgagacggcgcttttttgctatctgcacattcgatttccgctaatcctcctgctacaatggttgcagaaaggaacaggaggttatacaaatggagagatttgtcacagatgaacgcacagggctgaaatatgaattggttggtgactattatctgatcgccggagatgatgagccggaagaagatcagccaatcggg

SEQ ID NO: 29054 - DNA, 215 bp, Unknown
  Description of Unknown: RightRegion for integrase B3055 sequence
ggaaaaatccctagaaccgcaatggttctagggatttttcctatcattttttatctgtgaatttcgtacgattttagatgcttttttattatttttaacagtccggtgtggtacaagtgtggtacaactatttcgacggaaataaaagcagagggctgatatgatatgtaccccctttactggacacccagtagggggggtattattatgcggta

SEQ ID NO: 29055 - DNA, 260 bp, Unknown
  Description of Unknown: RightRegion for integrase B3056 sequence
aagacactgcacagtttgtgcggtgtctttcttttttgcacttttgttagtccagcctgatgcagtagatgcagtaaaataaacgaagaaaccgcctttcccgttcgggaagggcggttttgtgcttattgagtatcagaaagagggcggcgagacggcgaagatgacctgcacggtttcgtccgtggggttataccatcggtgcatggcccctccggggatgcggatgctgtcctcgtggtgcagcgtatagctgtcgc

SEQ ID NO: 29056 - DNA, 260 bp, Unknown
  Description of Unknown: RightRegion for integrase B3057 sequence
accaaaaagccatctgatttgctcagatggcttttttgttttgttttggggccggtgtgacacaaacttctgatttttttccggcgggcggggctatactgttctttgatgcaacagggcaatacagaagacaggagccatgcagaagataggagccacgcaaatgagcatttgggatgcattcggcaaaggacggtacaagggcttttcccgggaggcggggcagctgctggacaaggcggtggagctggccggagggc

SEQ ID NO: 29057 - DNA, 260 bp, Unknown
  Description of Unknown: RightRegion for integrase B3058 sequence
aaagagagcaacggaaaaaccgttgctctctttctttatattacgagatataaagagtaaattctaattcaaataatctaaactttaatccattcagagtttcctttttatcatctaagaagatttctatcattgcaacaaagtcatcattagcataaggaattatttctttgctttgagtaatttgatattcataaatctttcctattttgccatatctaacatattgcattaattcctgcatcttatcatcgtagatt

SEQ ID NO: 29058 - DNA, 260 bp, Unknown
  Description of Unknown: RightRegion for integrase B3059 sequence
cacgcatacatgatatacgcacaaggcgcgataggttgtttaataaaaatagagcggtaaatccgctctatttttatttgctcaccatccttgattcgggtcgacctcgctcggcggaacatcatcatactccatttcttcggtggttatttttatcgggtatttaagtgcgaaattgtcttcttcgtagcacgccatcatgatcccaatccatctttcatcatgccactcgtcacgcacaaccagctcgccgtgataat

SEQ ID NO: 29059 - DNA, 260 bp, Unknown
  Description of Unknown: RightRegion for integrase B3060 sequence
tgtagattgaagtcccattcccggaagcgattctgggattatgacaccttcgtggtgtagtccagggaaatccaccctgcgccagatttcagcttaccccactttgttgcaccctgcccagtgctttcctgcacgatggtataaactccaccgttacggatagtgcctgccagagcgtagttcgtacctgcacccttacgaatattcagaaccgaagctgtgaccttcactctatacggagagaacgtagacttgctctc

SEQ ID NO: 29060 - DNA, 260 bp, Unknown
  Description of Unknown: RightRegion for integrase B3061 sequence
tgtagattgaaatcccattcctggaagcgattctgggattatgataccttcgtggtgtagtccagagaaatccaccctgcgccagatttcagcttaccccactttgttgcgccctgcccagtgctttcctgcacgatggtataaactccaccgttacggatagcgcctgccagagcgtagttcgtacctgcacccttacgaatattcagaaccgaagctgtgaccttcactctatacggagagaacgtaggcttgctctc

SEQ ID NO: 29061 - DNA, 260 bp, Unknown
  Description of Unknown: RightRegion for integrase B3062 sequence
aaaactgttaagcgcaagtcccaccaacaaagtgctaaacaaaggggattgaaaagatgaattgtgttttatatatgcctaatgatacaaaaatatccatttttgagcaacataatatttgcaatgaaaaagcaaaacggtacggctattccattgcgcatagaatttttgatattcggtgcgaccgtttccatgaagcaataaacaaagtcattgcaagcagaaacattgaagccctgataatttatgataaatggacg

SEQ ID NO: 29062 - DNA, 260 bp, Unknown
  Description of Unknown: RightRegion for integrase B3063 sequence
gccgaagaagcgacagggttcgattttggggagtctgagtgtggtttaaggcttccctgaaaagctgcttggagcatacggcgctgccggtgtagcggtcaaggtacgcctgtatcatcccggccttggtgtcctccggcatgaaatcccgctggtgttctttgaggtactgtatcatttcgggggtaaaagacagcttgaaatcgccgcttttgtaggttgtcatggcttccgcccatacctgttcgatataggccctg

SEQ ID NO: 29063 - DNA, 124 bp, Unknown
  Description of Unknown: RightRegion for integrase B3064 sequence
aacttctctcttgtgatctatcctcgtcttttttcttcgcctttttacttcaataactgacgcttatatgaacttgcccatatcgaaatcgtctgcgcgattatctatcagctgacaaaaaatc

SEQ ID NO: 29064 - DNA, 260 bp, Unknown
  Description of Unknown: RightRegion for integrase B3065 sequence
atttcagacgtggttgaaatcgacactgatagtgacgaccgtgcacaaagatgtacatgaacgactttataaaataaaccctgcactgtacaaagaagcacagtcggttttggagcagaacaaggcagaacgtcacattcgtgggggtatggcaacaaaggaaaaatatttgctcgaaaaattaaaataagaaaaacggtgttcaagacgaacaccgttttaaattatacaaacatcgaaacaagaaatacggctgatat

SEQ ID NO: 29065 - DNA, 260 bp, Unknown
  Description of Unknown: RightRegion for integrase B3066 sequence
cacgcatacatgatatacgcacgaggcgcgataggttgcataataaaaatagagcggtaagtccgctctatttttatttactcaccatccttggttagggtcgacttcgctcggaggaacatcgtcatactccatctcttcagtggctattttaatcgggtatttaagcgcgaaattgtcttcttcgtagcacgccatcatgattccgatccatctttcatcatgccactcgtcacgcacaaccagctcgccgtgataat

SEQ ID NO: 29066 - DNA, 260 bp, Unknown
  Description of Unknown: RightRegion for integrase B3067 sequence
cggcttcgccgtgaagtgttcgctctgatccacaacagaaaagcgccgtcttgggagtgatcccgagacggtgctttttttgctgtccgcacattcgctttccactattcctcctgctacaatgattgcagaaaggaacaggaggatgaagccattcccccaggaggaagaaccgaaaaccaaatcggcacggctaaatgaactgaatgcgatgctcaatctcgacaaaacagagaacgagatcgttgacggtgagcgag

SEQ ID NO: 29067 - DNA, 260 bp, Unknown
  Description of Unknown: RightRegion for integrase B3068 sequence
aaaagtgcagtatgggacagtgataacaataatgtggaaataatatttaatacccattaaattaagtattttgataactttagcaaatccatggacagcaacttatattcaagcaaaaggtgatccagtagcagatttgcatgaagatatggctgctgaacaaaaagcgagagctacttatgagaatttaataaaattaactgatgatcaagatataaaagatgtattaaaattcttaagagaaagagaaatagtccatt

SEQ ID NO: 29068 - DNA, 260 bp, Unknown
  Description of Unknown: RightRegion for integrase B3069 sequence
tatctgtttgttgacaatccgagagggaactgcaaaagtattttggatttctggagctgatgaagtagtcactttgcttgaaacaaccggaacttatagtgacacaattacacttcctgatggtggaaattatgtcggcattgagtgtgaggaatttactggaaacattgaattgaatattgaataatctttagctgtgtgatggtaaaagaaaaatgtcacagtacggcagatttgttttagttaaaagtttatgcata

SEQ ID NO: 29069 - DNA, 260 bp, Unknown
  Description of Unknown: RightRegion for integrase B3070 sequence
accaagaagccatctgattcgctcagatggcttttttgctttgcttttgggccggtgtgacacaaacttctgatttttttccggcgggcggggctatactgttctttgatgcaacagggcaatacggaagacaggagccacgcagaagataggagccacgcaaatgagcatttgggatgcattcggcaaaggacggtacaagggcttttcccgggaggcggggcagctgctggacaaggcggtggagctggccggagggc

SEQ ID NO: 29070 - DNA, 260 bp, Unknown
  Description of Unknown: RightRegion for integrase B3071 sequence
tctgataaggggttcggatttgaggggttagagtccaccaagttaaaagctacattttagtctagcgattaagactgaaatgtagctttttctattgtaaaacctccgtgatatactactggtcagtggtatcatggaggttttgctatgtctggctatgtgattgagattccacaggagaaagagaacggttctatctggagtcggcaattaagagtcgctgcttattgtcgggtcagcaccccttacgaagaacaaca

SEQ ID NO: 29071 - DNA, 109 bp, Unknown
  Description of Unknown: RightRegion for integrase B3072 sequence
cgcaggcacggcggctggtctacgccgccatttgaactgcaggtgcatatgcggttttgatttttaccctttatgtataacatcatggtttgtatgagctggggcactt

SEQ ID NO: 29072 - DNA, 260 bp, Unknown
  Description of Unknown: RightRegion for integrase B3073 sequence
gttgccaatttcacgcttgatatctaccctaaaatcccgcgtaaattgcctatgtcttgaatggggctacacctatgggccgcccatggccgttgcccccattccatctgtgagacgtgttcttgaatatgcagttacagaaatccccccggaaaagatatccatgggcataccaaactacggatatgactggcctcttccttttgtccggggcgaaacagccgccagaagtataggtaaccaggaggctgtggccatcg

SEQ ID NO: 29073 - DNA, 260 bp, Unknown
  Description of Unknown: RightRegion for integrase B3074 sequence
gactctccttctggcgaggggttcggatttggggagctatcgtccaccaaagcggcataaaatgaaccccttttatttcaaaggcggctttgcgataacgtcatggttctgatatgccaaaacagaaaagacggcttcccattttgggaagtcgcctttttattttctcgcagtgcttcgcgaggggcagtttcatccgcagttcatccgcagttcatccgcagttgctttagcggatatcggggaagctcggtcagtgc

SEQ ID NO: 29074 - DNA, 260 bp, Unknown
  Description of Unknown: RightRegion for integrase B3075 sequence
agtcaacgtaaaattatgcctgtaaatggctctgctatgcggtttcggtgtctgaattgacaccccctttgacacccctagctaaataatcgttgagcttttccatgcttctattttggtgttccgaatcgagatgagtgtaaatatccatagtcacctttatgtcagaatgccccgcctgctgctttgctgtgagcacgtcaacaccggctaagtacatatttgtaatgaacgtatgccgcagccagtgagccgtaatt

SEQ ID NO: 29075 - DNA, 260 bp, Unknown
  Description of Unknown: RightRegion for integrase B3076 sequence
tgtagattgaagtcacattcctggaagcgattctgggattatgataccttcctggtgtagtccagagaaatccaccctgcgccagatttcagcttaccccactttgttgcgccctgtccagtactttcctgcacgatggtataaataccgccgttgcggatagtgcctgccagggcgtaatttgtgcctgcacccttacgaatattcagcacatccgctgtgaccttcactttgtacagagaaaatgcaggcttgctctc

SEQ ID NO: 29076 - DNA, 260 bp, Unknown
  Description of Unknown: RightRegion for integrase B3077 sequence
tgtagattgaagtcccattcctggaagcgattctgggattatgataccttcgtggtgtagtccagagaaatccaccctgcgccagatttcagcttaccccactttgttgcgccctgcccagtgctttcctgcacgatggtataaacaccaccgttgcggatggagcctgccagggcgtaattcgtacctgcacccttacgaatgttcagtacattagccgtaaccttcaccttatacggagagaatgcaggcttgctctc

SEQ ID NO: 29077 - DNA, 77 bp, Unknown
  Description of Unknown: RightRegion for integrase B3078 sequence
tatctgtttgttgacaatccgagaaggtactgcaaaagtattttggatttctggatctgatgaagcagtcacgttga

SEQ ID NO: 29078 - DNA, 260 bp, Unknown
  Description of Unknown: RightRegion for integrase B3079 sequence
gtattacacgaacctttttactttgtcggcggctttgccgtcacaatatggttcaggtagtaccgacagaaaagaacggatattctcacttgttgagagtgtccgttctttctttatgtcctgcggattgtccacggacagtccgtggacagtctgcggacagtctgcggacagtctgcggacagtcacagaatgcagctattttcacttaccgttcagtaagattttcgcaatttttaattgcggatactgactgtcct

SEQ ID NO: 29079 - DNA, 260 bp, Unknown
  Description of Unknown: RightRegion for integrase B3080 sequence
cccgccgccgaagaagcgacagggttcgattttggggagtctgagtgtaccaggatataatccacctcccggatcttcccggcagctgcctggcagaagctgcgcatgggggccgccagggcaaagactcaaataggcgaaacgatggtgacatgacggcaggccgaaaggtcaatttccacgggccggatgggcatggcccaacgatgcataccgtagcggccgcaccaccagaaacccagcgtgccctcggtccgttc

SEQ ID NO: 29080 - DNA, 260 bp, Unknown
  Description of Unknown: RightRegion for integrase B3081 sequence
atccgtgagttattttccgaatgcgtatgggacggaaagaaacttcatattaaaatttaattcatctccctttttcattatgtatccagttggattcatccgaagggacgcccgtatcagctggctcatggttatctcgccttccccttccgtattggcgtttcttgtctccaggcgcaccaggttgggcacctgggtaatctgcagttctgcggaatcctcaatggtgatgacgcgttcctggggcggtataaaggaag

SEQ ID NO: 29081 - DNA, 260 bp, Unknown
  Description of Unknown: RightRegion for integrase B3082 sequence
tacgaactcttttggttcaaaaacgtgttcggcctgacaagaaaactgccgcagaggtgattgtcctctgcggcagttttcttattcgccggtgtagctctctgtcggcaggagcttataggttttcagcgtctttccgcacctgcggcatttataccgatagatcgtatcaatgtcgcctgcgctggaaccgacagcgaaatcggaatcaagcatcacccaactgtgcgattcacaggggcataggcgctcctcaagct

SEQ ID NO: 29082 - DNA, 239 bp, Unknown
  Description of Unknown: RightRegion for integrase B3083 sequence
atttcagacgtggttgaaatcgacactaatagtaacaaccgtgcacaaagatgtacatgaacgactttataaaataaaccctgcactgtacaaagaagcacaggcggttttggagcagaacaaggcagaacgtcacattcgtgggggtatggcaacaaaggaaaaatatttgcttgaaaaattaaaataagaaaaacggtgttcaagacgaacaccgttttaaattatacaaaaatcga

SEQ ID NO: 29083 - DNA, 260 bp, Unknown; identical to SEQ ID NO: 29075
  Description of Unknown: RightRegion for integrase B3084 sequence

SEQ ID NO: 29084 - DNA, 260 bp, Unknown; identical to SEQ ID NO: 29052
  Description of Unknown: RightRegion for integrase B3085 sequence

SEQ ID NO: 29085 - DNA, 260 bp, Unknown
  Description of Unknown: RightRegion for integrase B3086 sequence
aaaactgttaagcgcaagtcccaccaacaaagtgctaaacaaaggggattgaaaagatgaattgtattttatatatgtctaataatacaaaaatatccatttttgagcaacataatatttgcaatgaaaaagcaaaacggtacggctattccattgcgcatagaatttttgatattcggtgcgaccgtttccatgaagcaataaacaaagtcattgcaagcagcaacattgaagccctgataatttatgataaatggacg

SEQ ID NO: 29086 - DNA, 260 bp, Unknown
  Description of Unknown: RightRegion for integrase B3087 sequence
tgtagattgaagtcccattcctggaagcgattctgggattatgacaccttcgtggtgtagtccagggaaatccaccctgcgccagatttcagtttaccccacttcgttgctccctgcccagtactttcctgcacgatggtataaactccaccgccacgaatagtgcctgccagagcgtagttcgtacctgcacccttacggatattcagaaccgaagctgtaaccttcactctatatggagagaacgtaggcttattctc

SEQ ID NO: 29087 - DNA, 260 bp, Unknown; identical to SEQ ID NO: 29052
  Description of Unknown: RightRegion for integrase B3088 sequence

SEQ ID NO: 29088 - DNA, 260 bp, Unknown
  Description of Unknown: RightRegion for integrase B3089 sequence
gattttgaaattaccatatttcccaaaattcctagtcaggactcaagacctcctgcatagtcgctgaactccttacaaaaaaacctcccattttgatgggaggttttttgtatccattgataccatctatgtgctaattcctcggtgcctatgtccgtaagaagccccttgcccatgttatccggcattgtgaaccgctgggaaaggtacctcagcgacgcgcttaattcgccatcggctccgccgtactgttccagtat

SEQ ID NO: 29089 - DNA, 260 bp, Unknown
  Description of Unknown: RightRegion for integrase B3090 sequence
cggcttcgccgtgaagtgttcgctctgatccacaacagaaaagcgccgtcttggaagtgattccgagacggcgcttttttgctatccgcacattcgctttctgctatttctcctgctataatgattgcagaaaggaacaggaggttatacgaatggaaagatttatcacggatgaacgcacaggactgaggtatgagctggttggcgactattatctgatcgccggagatgatgagccggagggagatccgctaatcggg

SEQ ID NO: 29090 - DNA, 260 bp, Unknown
  Description of Unknown: RightRegion for integrase B3091 sequence
atattggggcgtgcatcgatatgcctggcttcattccacgacggtgtgattcggagttaagtccgaatatttcaccaaattgaacaagacgaacacgtttttatgtgtttgtcttatttttttgtcttttgcaaggacattccaaactattgataactacttttagttatgatataatactatcggaagttctaagtgtttatattgataatgagtatttatgaaaacaaaaaagattgctttatcgacagaaaaaatga

SEQ ID NO: 29091 - DNA, 260 bp, Unknown
  Description of Unknown: RightRegion for integrase B3092 sequence
cgttttgactcttcacagctgcaccaaacgagagcaaaacgaacacaagacaaccgttaaaatggtcggtaatgtgttcgttttgttttgttctattccctcactgactcattgacaacaaaaagaggggcaatcgcaacaggtggaaaagctgcgattgcccctctttttttgttgtataaattgtgaaatttttgcgttagaatataccgtttccacgccaaattctaccatattccttacaaacccgtgaggatttg

SEQ ID NO: 29092 - DNA, 260 bp, Unknown
  Description of Unknown: RightRegion for integrase B3093 sequence
cggcttcgccgtgaagtgttcgctctgatccacagcagaaaagcgccgtcttggaagtgattccgagatggcgcttttttgctatccgcacattcgctttctgctatttctcctgctacaatggttgcaaaaaggaacaggaggttatacgaatgtccgccagcttggcaatattccacctatgccttgcggggcgtggcccatcacaaattgcccgtgacctcgaaaatgaaaagattctcacgcctacggcatattat

SEQ ID NO: 29093 - DNA, 260 bp, Unknown
  Description of Unknown: RightRegion for integrase B3094 sequence
tccactttgagccaccaagaacgagttgatgaaagtcagctcgttctttttgttttgtagtggtttggaaaatgtaagcgatacgccggtggcgtatcagagccgctctgcagcctgcgtcgagattacactttcgtcgttttaccacaaaagcaaaaatatcgagctgcccttaggctggctcgatattttctttctctctattttttcccgtccgtccttttcagggcggcgcgttttctttttctgctgcggggatc

SEQ ID NO: 29094 - DNA, 260 bp, Unknown
  Description of Unknown: RightRegion for integrase B3095 sequence
agtcaacgtaaaattatgcctgtaaatggctctgctatgcggtttcggtgtctgaattgacaccccttttgacacccctagctaaataatcgttgagcttttccatgcttctattttggtgttccgaatcgagatgagtgtaaatatccatagtcacctttatgtcagaatgccccgcctgctgctttgctgtgagcacgtcaacaccggctaagtacatatttgtaatgaacgtatgccgcagccagtgagccgtaatt

SEQ ID NO: 29095 - DNA, 260 bp, Unknown
  Description of Unknown: RightRegion for integrase B3096 sequence
aacttctctcttgtgatctatcctcgtcttttttcttcgcctttttacttcaataactgacgcttatatgaacttgcccatatcgaaatcgtctgcgcgattatctatcagctgacaaaaaatctttctgtagaagaaattaaggcttctggttttgataaatattatgttgatcatacgctcggcatctggcctcaggctgctggcggtatcccatttaatgcctgcgtttttcaggtcaagggtgaccccatcactga

SEQ ID NO: 29096 - DNA, 260 bp, Unknown
  Description of Unknown: RightRegion for integrase B3097 sequence
caggagaaatccgaacctgattccggttggaaacgggttcggatttctttatttctttgagaaggctagaactgaatagattgaccaatagcatagaaagtcaaaaggctctaaagttaaaatggaaggggtcagctacagtaatctaccgccactttccatttctttttctcactaatagtgtttgagagaggagtctttcacaatcgccctttgatccttttgttgaaagcgaattataaaataaaattcagcactac

SEQ ID NO: 29097 - DNA, 260 bp, Unknown
  Description of Unknown: RightRegion for integrase B3098 sequence
gcaccaagagttattatcacagcggccggggccttgtgcatcaagttcgcgcggacctaatggcaaaaaaagcaagccccgcaggcgttccctgcgaggctgcttttgttttttatgcgtgagcaaccagcgtccaggcaccggatacgctgccatcgttgtcgatccactcgcggttttcatcgccgcggcggcagcggaagatttcgccggtgaatacgttggccttgtaagtgtatgcgccgtggttggtggcggct

SEQ ID NO: 29098 - DNA, 260 bp, Unknown
  Description of Unknown: RightRegion for integrase B3099 sequence
gctgactctccttctggcggagggttcggatttggggagctatcgtccaccagaacatagaaaaccagcaatccattgagattgctggtttttctttatttatcaatgctgtgtggcgctctcagagggatttcgctccctgcaaacattgaaaccgcaagctatttgtgttataaaaacttccaaaactcagagtcgggcgaaccgtgtaagtttgtccgactcttaccttttcacgataacagcaaaaaatcctgcag

SEQ ID NO: 29099 - DNA, 260 bp, Unknown
  Description of Unknown: RightRegion for integrase B3100 sequence
ggataccagatcaacatctcgttcaacttcgatctcactccttacattgagggggagtgatacgtccgcctgcaaaacagtcgggcatcgaacaagcattttcaaaaacaacgaaacagcaagaattgggggttgccgtccatacgcctgcaaaatcaggcatttggctgattttcagtgtgacctccaagaaagcaaaaagaaaagcaccatacttcctacgaagtacagtgcttttttggtggagcaatcaggagtca

SEQ ID NO: 29100 - DNA, 260 bp, Unknown
  Description of Unknown: RightRegion for integrase B3101 sequence
ccgaacgcaccgcgatatatctttgtaaacggtctgttcggtatcatctgcaaaaggtgatgaataaacccgctcgcccgaaagggtgtagcgggtttattctttcttcttgcgttctgttccagcctgtatagctgcgtcgatcccgaaaaggcaaatagccatatcgtttacaatttcgttgcgccagcgcattacggtttttaatgccttgtcaactcggaagcttacttcttcccacgtcatttcctgcgcgtcct

SEQ ID NO: 29101 - DNA, 260 bp, Unknown
  Description of Unknown: RightRegion for integrase B3102 sequence
cccctgccgcgccgccctctatgcaacggcgcaccaaaccacgctcaaccgcgttgttgaaagcgcgctcgagcattatgttcccgcttattgataactgccccgcatattttccccgcctccggccaaactaccgccggaggtgttttttatgagcccgaaagaattgctttatatcgacgatgcgctcggccacgagcagtttctcatcgcccaatgtcaggaagccgaggccgcgctcagcgacccgaagctcaaac

SEQ ID NO: 29102 - DNA, 260 bp, Unknown
  Description of Unknown: RightRegion for integrase B3103 sequence
ccgaacgcaccgcgatatatctttgtaaacggtctgttcggtatcatctgcaaaaggtgatgaagaaaacccgctcgcccgaaagggtggagcgggtttattctttcttcttgcgttctgttccagcctgtatagctgcgtcgatcccgaaaaggcaaatagccatatcgtttacaatttcattgcgccagcgcattacggtttttaacaccttgtcaacttggaagcttacttcttcccacgtcatttcctgcgcgtcc

SEQ ID NO: 29103 - DNA, 260 bp, Unknown
  Description of Unknown: RightRegion for integrase B3104 sequence
ccgaaaatattcgtggtaaaaaatattttcggaattgtaaagcgctttatcgaaagataaggcgcttttcttttattcttcttgctttctttaccataatttacagctagaattcagcgctttgaatctgtacaatgtctttaaaatattgtagaaaggagttcctctgtatggatttaaagcgtgagttaaaacgcttcacaaaacctatcaagaaggatatgaaattttctaagaaacataaaagacttttttatggt

SEQ ID NO: 29104 - DNA, 260 bp, Unknown
  Description of Unknown: RightRegion for integrase B3105 sequence
cggcaaagccgccgcccaatccgttggagcggtcgtgcatgggcttcatgctttcgatgatggtctcgccggtcataagacgcccctctctggagagcaccgcggcgatggcgcagccggacggaatccggatctgcccctcgattttactcatatcaccaacccctaaataagaaaaaagaacgaggtgtgttcgcagaaaaagcgcactttttccacagaacatcctcgttcttcttttaaggtacgagaaaagccgc

SEQ ID NO: 29105 - DNA, 260 bp, Unknown
  Description of Unknown: RightRegion for integrase B3106 sequence
cgctggcatggaaatccggacgattttgaccttgtgattttcccgaaactcccgaggtaatttttttgtatctatcatatatatcatgtgtgttcgaacccattttattatgattatatgaagattcgcgatgtgggacagttttatgcggactttttcgaagatttcgacgaatctcggttcgcttccctgctgcaattcatgcagctgacaccggatctgaaagtcaaggcgttgtcctctggcatggctgcaaagct

SEQ ID NO: 29106 - DNA, 260 bp, Unknown
  Description of Unknown: RightRegion for integrase B3107 sequence
aaactagaaatacatatagatattaatggagtattatttaaagataccctatatatttaagggtatttttttaatgtagatgtattgactttgtgtgtattttcagttcaattaccatacaaagtaaggtaatgttacacgtagaacagtattggataaaaatacagtttcacgtagaacaatatataaaattaggtagtaaaaattcacatagtaggactataataatatatgaaaaaatagtattaaaaccgtaccta

SEQ ID NO: 29107 - DNA, 260 bp, Unknown
  Description of Unknown: RightRegion for integrase B3108 sequence
ggatatcagatcaacatctcgttcaacttcgatctcactccttacattgagggggagtgatacgtctgcctgcaaaacagtcgggcatcgaacaagcattttcaaaaataacgaaacagcaagaattgggggttgccgtccatgcgcctgcaaaatcaggcatttggatgattttcagtgcgacctccaagaaagcaaaaagaaaagcaccgaacttcaaacgaagtacagtgcttttttggtggagctatcaggagtca

SEQ ID NO: 29108 - DNA, 260 bp, Unknown
  Description of Unknown: RightRegion for integrase B3109 sequence
ttggcattacccaattatacattatgcaagaaaattgaccgaaagaaaatcattaaataataaaaaagcaagggcgttaaacccttgctttccttgtttgttacattgcgcccgctttgctttttgcaattgtgccgcgtatgttgcttatgcccgccgttaccgttacgggcaaggcgcttacaaggtcggtacaattaagcataccgccgccgacaaattgcattattgcgtcagtctgataaaagttcgttcttgct

SEQ ID NO: 29109 - DNA, 260 bp, Unknown; identical to SEQ ID NO: 29103
  Description of Unknown: RightRegion for integrase B3110 sequence

SEQ ID NO: 29110 - DNA, 260 bp, Unknown
  Description of Unknown: RightRegion for integrase B3111 sequence
cgcatcaccctaaaaaacgggttggaactcagggagaaaatcgaaaggacgataaggtgatggcaaagaatcgaaaacgaccatttggatatgacatgcatggcggacaaaacgtcatcaatgagggcgaggcaaatctggtaaaagagatatttgctgcatataaaaacggcagctcgtatgccaaaatcgttgagatgctgaataaccagcccatcccgtatttcaaccaggatgcgccgtgggtcaagactatggtc

SEQ ID NO: 29111 - DNA, 260 bp, Unknown
  Description of Unknown: RightRegion for integrase B3112 sequence
gggattcgttttattttagtgatgttcgttgagcgaattgtctcatacaggaataattgaggccggatatgatttcttcatgtcttcttggtataatgcatggagactggacaggaaaagtcaggtatgtgcctgagaggacaaccggcgttttttcatgtcaagggtctgcggacaaagatgtgtccattttaggaaaaacgtccgcgatcactacaagagtgggcggacgttttcttacgcaaaaagcgtcgtaaagc

SEQ ID NO: 29112 - DNA, 260 bp, Unknown
  Description of Unknown: RightRegion for integrase B3113 sequence
ggataccagatcaacatctcgttcaacttcgaccttactccgtacatcgagggggagtgatacgtccgcctgcaaaacagtcgggcatcgaacaagtattttcaaaaacaacgaaacagcaagaattgggggttgccgtccatgcgcctgcaaaatcagacttttgactgattttttccgtagcctccaagaaatcaaaaagaaaagcaccatacttcaaacgaagtacagtgcttttttggtggagctatcaggagtca

SEQ ID NO: 29113 - DNA, 260 bp, Unknown
  Description of Unknown: RightRegion for integrase B3114 sequence
ggctatcagatcaacatctcgtttaacttcgatctcactccttacattgagggggagtgatacgtccgcctgcaaaacagtcgggcatcgaacaagcattttcagaaacaacgaaacagcaagaattgggggttgccgtccatgtgcctgcaaaatcaggcatttggatgattttcagtgcgacctccaagaaagcaaaaagaaaagcaccgtacttcaaacgaagtacagtgcttttttggtggagaatagcgggatcg

SEQ ID NO: 29114 - DNA, 260 bp, Unknown; identical to SEQ ID NO: 29113
  Description of Unknown: RightRegion for integrase B3115 sequence

SEQ ID NO: 29115 - DNA, 260 bp, Unknown
  Description of Unknown: RightRegion for integrase B3116 sequence
ggcaagggatactcagtacaaatccttatggactcttcgtatgagcagtttttgatataatttaattataaaacagattacaataagactataaaaggtttagctactgcctttgacaggtatatgaatatacacagtcgagagcgcatgactgttaatcatgatgtcactggttcgagcccagttgggggagccaagagaaaagtcagtaattaagccaaaaacggcttgtttactggctttttgctttgtttataata

SEQ ID NO: 29116 - DNA, 260 bp, Unknown
  Description of Unknown: RightRegion for integrase B3117 sequence
gctgactctccttctggcgaggggttcggatttggggagctatcgtccaccagaacatagaaaaccagcaatccattgagattgctggtttttctttgtttatcaatgctttacggcgctctcaaggtgctttgcagtgcgaaaaatgtcgcggatttacgattgttttccacataatgcaagcgcattttgctaacaaaatgctaacagcgcgcaacgattatgcgtaagtcagtactcgataatgtatcttctttcgg

SEQ ID NO: 29117 - DNA, 260 bp, Unknown
  Description of Unknown: RightRegion for integrase B3118 sequence
ccgaacgcgccgcgtttcatctttgtaaacgggttgttcggtatcatctgcaaaaggtgatgaataaaacccgctcgccctttaatgggtaagcgggtttattctttctttttgcgttctgttccttgctgtatcgctgcttctatcccgaaaaggcatatagccatatcgtttacaatgttatttctccagcgggaaagcgtttttatctcttttccgatcgcttcgctcaattcctcccacgtcgcttgcggcgcgtc

SEQ ID NO: 29118 - DNA, 109 bp, Unknown
  Description of Unknown: RightRegion for integrase B3119 sequence
catccagaaccgggcctatgtttccactttccgtggaatcaaaggtggaacaatatttaaaatacagcatacgtgccccatgggccttcagccaggaaaatgcagccat

SEQ ID NO: 29119 - DNA, 260 bp, Unknown
  Description of Unknown: RightRegion for integrase B3120 sequence
tcaccgcgattcccaagaggggtcgcggcgtttttttgttttggggaaaatcgggtgtaaatatactaccaatttcagctgtattgtgctataatggaagcgaaaacggcggagggggaacggaaaatgaaaaagctgcttgctgtgtgcctgatggcgctcgtttgctgggtttgcgcggggtacgcggaagaaatgcgggtcggcgatacggtcatgttcgggcaatatgaacaggatggcaatcttgataacggcag

SEQ ID NO: 29120 - DNA, 260 bp, Unknown
  Description of Unknown: RightRegion for integrase B3121 sequence
tccaccaaaataaaacacccgccgtaccccggcgggtgtttttgttttggcgctctgtgagctgctgaggagtcgaacagggcggcagtaccgcagtaccagcccgatggccgatgcggaacgcggatgccgtgcgttcgtcatcctcggtgggatcactctcattataccagtggtttgcccggtgtttgaatgccctgcgaacagcccgcctgcccctcatacagggcaggcataaaaaaacacggtgcgtgtgcatc

SEQ ID NO: 29121 - DNA, 260 bp, Unknown
  Description of Unknown: RightRegion for integrase B3122 sequence
gcaccaagagttattatcacagcggccggggccttgtgcatcaagtttgcgcggacctaatggcaaaaaagcaagccccgcaggcgttccctgcggggctgcttttgtttttttatgcgtgagcaaccagcgtccaggcaccggaggcgctgccatcgttgtcgatccactcgcgatcctcgtcgccgcggcggcagcggaagatttcgccggtgaatacgtttgccttgtaagtgtatgcgccgtggttggtggcggct

SEQ ID NO: 29122 - DNA, 260 bp, Unknown
  Description of Unknown: RightRegion for integrase B3123 sequence
agaaagaaaagcactacacggaaacgtgtggtgcttttttcgttaaggccaaccgagtgagggttttgctcaaccgggagagcgccgtgcatggactgcaagagggtcaccgtgattacaacagcccggtaatctccaccagaaccaaagcactacacggaaacgtgtggtgcttttttgttttatctgccgttcaccttaacctcccctttcatgaaaaaagcgtttgtcgcagcccgcaggccgtgacaaacgctttt

SEQ ID NO: 29123 - DNA, 260 bp, Unknown
  Description of Unknown: RightRegion for integrase B3124 sequence
aagccggtacattcatggaagcatgatgtaccggctttttcgttgtatatatttatatgaggcagagctatttatgagcagctacagctgctgtatgctttttgaagccgtcaggcgcttttgtgatgcgaagggcaacgacaattattgcggcagcaaacagaagctgtattcccatgcatattgaaataaagccaagctccctgaccggatgaaagtcaatactttttacagcctggttgtaccagtaggcaggcaaa

SEQ ID NO: 29124 - DNA, 260 bp, Unknown
  Description of Unknown: RightRegion for integrase B3125 sequence
tccattacattcagattcagaaacggagttgaaaagacaataaaagtgaagaaatgttaaatttttttagaaaaaatcagaaaaattacctaataatatatatgaagagtcatgaatcttccgtaattgcataagttatcgttgctcgtggacagcgtagtgcctaggaccacgttaaaatgctagtgcacactcgaactgcggagacagcagtaggtcttagatctcaggccttaaaccacaggtagtggagagatctt

SEQ ID NO: 29125 - DNA, 260 bp, Unknown
  Description of Unknown: RightRegion for integrase B3126 sequence
agaaggaaaaagcactacacagaaacgtgtggtgtttttttgttgttgccaaacgagtgagggcttagctcacccaggagagcgccgtgcatggactgcaagagggtcaccgtggtcagaatcggcccggtaatctccaccaaaaaagcactgtacttcgtaggaagtatggtgcttttctttttatacagacgcagaaaaaaggcgggagcttcccacaaaagggaaagccaccgcctttgttgatcatcggatgagcc

SEQ ID NO: 29126 - DNA, 260 bp, Unknown
  Description of Unknown: RightRegion for integrase B3127 sequence
accgcctttatttgtttcggctgtttcggattattcattccccttcatcaggacggctaggccgtccttttgtttttacaggagttttttaaaaaaattagttttcccccttgacaaaacggcaaaaatcgtgtattgttgatatgcaacaaaaaacacacagaacgcagaaagggccccctatggacgacgtattatcatttcccagcgataaggcttacagcaactacccccgcatcaacatcgacggcgactgcaac

SEQ ID NO: 29127 - DNA, 260 bp, Unknown
  Description of Unknown: RightRegion for integrase B3128 sequence
gttgaatactttacttataatagtgatacaaagcaaattaaatttaagataagattataactatctttattgattctaagtaataaatggaaaataggcctatacttaaaagacctattttcttaatattatcttcaaagagtaaaatacatgttatattataagtatcaatttttcttttttatttcatttacaaatccatcaataacaattactgtaaaaatagattccataacaacagattttatatcaatccaaaa

SEQ ID NO: 29128 - DNA, 260 bp, Unknown
  Description of Unknown: RightRegion for integrase B3129 sequence
ggatatcagatcaacatctcgtttaacttcgatctcactccttacattgagggggagtgatacgtccgcctgcaaaacagtcgggcatcgaacaagcattttcagaaacaacgaaacagcaagaattgggggttgccgtccatgtgcctgcaaaatcaggcatttggatgattttcagtgcgacctccaagaaagcaaaaagaaaagcaccgtacttcaaacgaagtacagtgcttttttggtggagaatagcgggatcg

SEQ ID NO: 29129 - DNA, 260 bp, Unknown
  Description of Unknown: RightRegion for integrase B3130 sequence
aatgaattgttgtgttcgtattgcgctatattttttccaccatcaaggtatcacaattgatacaatgtaggaaatgcactcacaaaagtgggtgcatttttctatgctcaaaaccagctgatagcaaacggttactgagggtggatgcaaattttactgatttaacatcttaaaaatcaaacgattatagggtcggatgcacccatcgtttgctatcaaggaaattcccatgttttacacagaaaaataccctcgacagt

SEQ ID NO: 29130 - DNA, 260 bp, Unknown
  Description of Unknown: RightRegion for integrase B3131 sequence
ggcaggggatactcagtgcaaattcttatggactcttcatatgagcagtttttgatataattgacattgacaatttcaactgatataatttaattataaaacagattacaataagaatataaaaggtttagctactgccttaacaggtatatgaatatacacagtcgagagcgcatgactgttaatcatgatgtcactggttcgagcccagttgggggagccaaagtaaaagtcagtaaataagctaaaatcggcttgtt

SEQ ID NO: 29131 - DNA, 260 bp, Unknown
  Description of Unknown: RightRegion for integrase B3132 sequence
gttaatcactttacttataatagtgatacaaagcaaattaaatttaagatatcactataagttttgtaaattataataaaaagaaatagattgtatcaaacattctatttctttttctacctatatattgattttctattaatataactaaattattattttaataattcatatttttcctctaaaatacaaattaacatttttaagttttcctttttaattatatcaaattcatgttcttctaatacttttttaataag

SEQ ID NO: 29132 - DNA, 260 bp, Unknown
  Description of Unknown: RightRegion for integrase B3133 sequence
gtggatggcaatcaatttgagctggaagtatatccgcggctggcttcgcaggatgaatgaatttctttttgcgtgcgtgggcgatttatggcggcatatgtatatgccgccataaatcgcccatgcaaaagccccgcctttcagcggggccattttcattttctggcaatatatttgtagtagcgctccaccttatccggctccgcatccgcatcgtggatgaagtccctggccagttccgcgtaaaactccggcgtgct

SEQ ID NO: 29133 - DNA, 176 bp, Unknown
  Description of Unknown: RightRegion for integrase B3134 sequence
gccgccgaagaagcgacagggttcgattttggggagtctgagtgtaccaaaagtccttgaaatcgtctgatttcgaggacttttgcttttcataagttccgtttttggggagttactttttcctgacccaaacgctgaccccaacgggagcgggtagcggaaagcatcagacggca

SEQ ID NO: 29134 - DNA, 260 bp, Unknown
  Description of Unknown: RightRegion for integrase B3135 sequence
  modified_base (102)..(260): a, c, t, g, unknown or other
aatggtaaaggttatactgttgaaataaacttaattggtagtaaaaaaaaactaatttagaaggtatggaaacttcttctaaaaaggagaagttttacaatnnnnnnnnnnnnnnnnnnnnnnnnnnnnnnnnnnnnnnnnnnnnnnnnnnnnnnnnnnnnnnnnnnnnnnnnnnnnnnnnnnnnnnnnnnnnnnnnnnnnnnnnnnnnnnnnnnnnnnnnnnnnnnnnnnnnnnnnnnnnnnnnnnnnnnnnnnnnnnn

SEQ ID NO: 29135 - DNA, 260 bp, Unknown
  Description of Unknown: RightRegion for integrase B3136 sequence
tgggacggactcgcacttcgcgcaagcgctcgtgttcgtctcgcggggactggtcgctaaaaatggttgcgggtttgtgagcaggggtcacgattgagcgtgagcgaaagcggggagcgaacaatgtacgccgcgcgcggcgtacaaccgcacgagcggttttgcgaagcaaaatggaggccttacaggccgacaagcgaaccagactgaattcttaacgcacccactgatggtgcaccaaagaatgccttacacgaaag

SEQ ID NO: 29136 - DNA, 260 bp, Unknown
  Description of Unknown: RightRegion for integrase B3137 sequence
agaaggaaaaagcactacacagaaacgtgtggtgtttttttgttgttgccaaacgagtgagagcttagctcacccaagagagcgccgtgcatggactgcaagagggtcaccgtgatcagaatcggcccggtattctccaccagatcagaaaggcatcacacattgtgtggtgccttttttgttttgcattgcagcaggaaaacacaaaaaaatttctgcccactgccgcaacctgcgcgaaacgggctgttttgtgcgcg

SEQ ID NO: 29137 - DNA, 260 bp, Unknown
  Description of Unknown: RightRegion for integrase B3138 sequence
gtttttgacgtattttttgtatttagatgtccggccatgcgcattaaaaagcacctctgatatcagaggtgctttctttttttattttgggtcgtctcccatcgccttaaaatatgcaatctgccaaacgccctgctgctccagagtaaggcatttgtcaaaatttgccctaagcgtgtcaacgtcgatcttggcatactgctctgcaatctgtcgctcaatctcgtctgtagccttgcccattgcgtggagcttgttaa

SEQ ID NO: 29138 - DNA, 260 bp, Unknown
  Description of Unknown: RightRegion for integrase B3139 sequence
gtggatggcaatcaatttgagctggaagtatacccgcgcctggcttcgcaggatgaatgaatttctttttgcgtgcatgggcgatttatggcggcatatgtatatgccgccataaatcacccatgcaaaagccccgcttttcagcggggccattttcattttctggcaatatatttgtagtagcgctccaccttatccggctccgcatccgcatcgtggatgaagtcccgggccagctccgcgtaaaactccgggctgct

SEQ ID NO: 29139 - DNA, 109 bp, Unknown
  Description of Unknown: RightRegion for integrase B3140 sequence
agaaacaaaaagcactacacagaaatgtgtggtgcttttttgttgacgccaaacgagtgagggtttagctcagctgggagagcgccgtgcatggactgcaagagggtca

SEQ ID NO: 29140 - DNA, 260 bp, Unknown
  Description of Unknown: RightRegion for integrase B3141 sequence
gagggttctaccgcgttgcggttggtggaggcgatgggagtcgaacaatggaaaagctgaacgacacgatttgaatgctaaaaaaatctgatgatttatcgattgtaaattgcgctttatgttgctgagaattcagtgagaaactggcccgagaacagaaagtgggttacaaaaacgggtttgtttaccacttccctcacgatggcattatacagaatatccagaaacaccaagcgcccccacctcggagatcatccgga

SEQ ID NO: 29141 - DNA, 260 bp, Unknown
  Description of Unknown: RightRegion for integrase B3142 sequence
aacagttggttcgtgattgtcggattgctggaaaacaataaccaacatttctcaaaatagaacttgcgtatatataaggtctaccctataataataaatgtcagaagggaggtgattcagttggaagacagagtttgggacgtgtttcttgtggtcctcggcgtggtgctcgcaaaggttaccgatgaaacagttgagcgtctaaagaaaaagacccctcgcaagcccggaaagcacgcaaagaggtcttagcacaaggg

SEQ ID NO: 29142 - DNA, 260 bp, Unknown
  Description of Unknown: RightRegion for integrase B3143 sequence
gtttttgacgtattttttgcatttagatgttcggccatgcgcatcaaaaagcacctctgatatcagaggtgcttttctttttttattttgggtcgtttcctattgttttaaaatatgctatttgccaaacgccctgctgctctaacgtaaggcatttgtcaaaattggccctaaacgtgccaatatcaacctttgcatactgctctgcaatttggcgctcaatctcgtctgtagccttgcccaccgcgtggagcttgtta

SEQ ID NO: 29143 - DNA, 260 bp, Unknown
  Description of Unknown: RightRegion for integrase B3144 sequence
gccgccgaagaagcgacagggttcgattttggggagtctgagtgtaccaaaagtccttgaaatcgtctgatttcgaggacttttgcttttcataagttccgtttttggggagttactttttcctgacccaaacgctgaccccaacgggagctaaactgtacccaagaaaatggacacgagattttgacccatggccccgttcggcggacacgcatttgacccatagggtcagaagcgccgcacctgtgttatgatagaac

SEQ ID NO: 29144 - DNA, 260 bp, Unknown
  Description of Unknown: RightRegion for integrase B3145 sequence
aaacgcctaaagcccgacgactttgaaatcgagatatacccccgcatcccccggaaatagcaagaggagccgcttttgtggctcctcttctttgttgtatcgtgttgcgtattatttatgatacagaacacgatacaacaactttgaggcggtctgtccgggtgctcttccgggctgccgcctttgctttttacccggcgggacaccattcgcgtcacttatcaaaaatattttgggattttacttgacattgtcccttt

SEQ ID NO: 29145 - DNA, 260 bp, Unknown
  Description of Unknown: RightRegion for integrase B3146 sequence
tggagcggatcgccggatgattttgagataactatatatccgaagctaccgaaatcataaaaatgtgcgaattttctaccatatattaggcagtcgtttacatcatggcggtacagaagaactatcccacctcgaaatgataggctctatagtatcccaactcacaacaggcgagggtgcaaagagctttgaccgatacggagtaggcgcatattatatgatccacgaaattccggtttccccacccaatgccggcgttg

SEQ ID NO: 29146 - DNA, 260 bp, Unknown
  Description of Unknown: RightRegion for integrase B3147 sequence
tggagcggatcgccggatgattttgagataactatatatccgaagctgccgaaatcataaaaatgtgcgaattttctaccatatattaggcagtcgtttacatcatagcggtaccgaagaactatcccacctcgaaatgataggctctatagtatcccagctcacaacaggcgagggtgcaaagagctttgaccgatacggagtaggcgcatattatatggatcacgcaaatgcggtttacccatccaatgccggcggtg

SEQ ID NO: 29147 - DNA, 260 bp, Unknown
  Description of Unknown: RightRegion for integrase B3148 sequence
tggagcggttcgccggatgattttgagataactatatatccgaagctaccgaaatcataaaaatatgcgaattttctaccatatattaggcagtcattgacatcatagcggtacagaagaactatcccatctcgaaatgataggctctatagtatcccagctcacaacaggcgagggcgcaaagagctttgaccgatacggagtaggcgcatattatatggatcacgcaaatgcggtttacccatccaatgccggcggtg

SEQ ID NO: 29148 - DNA, 260 bp, Unknown
  Description of Unknown: RightRegion for integrase B3149 sequence
tggagcggatcgcccgatgattttgagataactatatatccgaagctgccgaaatcataaaaatgtgcgaattttctaccatatattaggcagtcgtttacatcatggtggtaccgaagaactatcccatcttgaaatgataggctctatagtatcccagctcacaacaggcgagggcgcaaagagctttgaccgatacggagtaggcgcatattatatggatcacgcaaatgcggtttacccatccaatgccggcggtg

SEQ ID NO: 29149 - DNA, 260 bp, Unknown
  Description of Unknown: RightRegion for integrase B3150 sequence
aaacgcctaaagcccgacgactttgaaattgagatatacccccgcatcccccggaaatagcaagaggagccgcttttgtggctcctcttctttgttgtatcgtgttgcgtattatttaatttcttcacatgcattcttccctgcattgtagctgcaaaaattgtatacaatgcactcttgtttcccgccacactcgcggacgttttattttttctattgagtgctcttctcggaaatatgatctttttacttctcaacac

SEQ ID NO: 29150 - DNA, 260 bp, Unknown
  Description of Unknown: RightRegion for integrase B3151 sequence
tggagcggatcgccggatgattttgagataactatatatccgaagctaccgaaatcataaaaatgtgcgaattttctaccatatattaggcactcattgacatcatagcggtaccgaagaactatcccacctcgaaatgataggctctatagtatcccaactcacaacaggcgagggtgcaaagagctttgaccgatacggagtaggcgcatattatatggatcacgcaaatgcggtttacccatccaatgccggcggtg

SEQ ID NO: 29151 - DNA, 260 bp, Unknown
  Description of Unknown: RightRegion for integrase B3152 sequence
actatccaccatcagttaaaaccccatgagtggaaaaagtttagggcaacagagcgttgaccttgctttgcacttcgctgtaattgtatccagcggcttgcagacggttcttacggtcagccccgttaccccatttgcctgcaatgacttcctttgcaacctctgtaacagattttgtgggggtgggagttgacacaaccgtgcgtccctgtaccgtacaataagacgggttaagtaaataaatccatcctgcgccagac

SEQ ID NO: 29152 - DNA, 260 bp, Unknown
  Description of Unknown: RightRegion for integrase B3153 sequence
aaaaacgttggtgaaaattcgcatttggaaacctcgcctccaccacataaaaacacgtaatcggaaaggttacgaaacccacgtaatcacgttatatagcgtggttacgtggtttttcttttgcaaattttgcctgatttttcgggagttcaaagcgaatttgaccgtgacctgattaaaatgcgtcgtattttcaggatacccctctcttgcggaaaaaatgggaaaatgggaaaaacaagcgtgtttttctaagagcc

SEQ ID NO: 29153 - DNA, 260 bp, Unknown
  Description of Unknown: RightRegion for integrase B3154 sequence
accaaaaagacactgcacagtttgtgcagtgtctttcttttttgcacttttgctgcgtgagtgaaaaacaggaagatgaacggtgccgatcggagttttgacgatttgcggcgctatcctgctgcagtaaaccgtaagataaaagcagaagacgctcttccccgatggaaagggcgtcttctgctttttcagccgttcttcacgcccgccggagccggctgggcagaggccgtgtcaaggccgacgagatattccggatc

SEQ ID NO: 29154 - DNA, 109 bp, Unknown
  Description of Unknown: RightRegion for integrase B3155 sequence
gtaggcataggtcggcatgtagagaacaaattcaacattgaagtaacattgcgtctttaatctccaacgttaatgagcaagttcttctgtaccgatatcggtcaacagt

SEQ ID NO: 29155 - DNA, 260 bp, Unknown
  Description of Unknown: RightRegion for integrase B3156 sequence
cacggcaatccggacgatttcgaggtcgtcatatacccaaaactcccgaaaatgcgttgacttttttatatacaccataggtacgcgaacgagctgagccatgtcgagatgatttctgcgatcctgtaccagctgactgacgggctgacaccggaacagatcaaggaagccggattcgacgcgtacttcgtagaccacaccctcggactgtacccccagagtgccgccggcgtaccgttcacggctgcctatttccagtc

SEQ ID NO: 29156 - DNA, 260 bp, Unknown; identical to SEQ ID NO: 29150
  Description of Unknown: RightRegion for integrase B3157 sequence

SEQ ID NO: 29157 - DNA, 260 bp, Unknown
  Description of Unknown: RightRegion for integrase B3158 sequence
tggagcggatcgcctgatgattttgagataactatatatccgaagctgccgaaatcataaaaatatgcgaattttctgccatatattaggcagtcgttgacatcatagcggtaccgaagaactatcccacctcgaaatgataggctctatagtatcccaactcacaacaggcgagggtgcaaaaagctttgaccgatacggagtaggcgcatattatatggatcacgcaaatgcggtatacccatccaatgccggcggtg

SEQ ID NO: 29158 - DNA, 260 bp, Unknown
  Description of Unknown: RightRegion for integrase B3159 sequence
ctcaatgtgcggctcatcaagatgtgtttcgtgatgacagtagaaaggcccgtaggttaaacgcctacgggccttttgctatgctcaatttgaatcgtctttgaaagtgtggcactgtatatacccgatttcacacaacgcatccgttagtgtgcaaattcgagcgtcatacccgttccagcccggtgatccagtcttaaaactgtctcgaagttcccgaatattatctatcagcttatcgaagcatgaaacaacatctg

SEQ ID NO: 29159 - DNA, 260 bp, Unknown
  Description of Unknown: RightRegion for integrase B3160 sequence
tggagcggatcgccggatgattttgagataactatatatccgaagctgccgaaatcataaaaatatgcgaattttctaccatatattaggcagtcgttgacatcatggcggtacagaagaactatcccacctcgaaatgataggctctatagtatcccaactcacaacaggcgagggtgcaaagagctttgaccgatacggagtaggcgcatattatatggatcacgcaaatgcggtttacccatccaatgccggcggtg

SEQ ID NO: 29160 - DNA, 260 bp, Unknown
  Description of Unknown: RightRegion for integrase B3161 sequence
cacggcaatccggacgatttcgaggtcgtcatatacccaaaactcccgaaaatgcattgatttttttatagacaccataggtacgcgaacgaatccgcccacacatgatatacataacaagcccacttgaagcacgtctttgagtgggcttttgtgctgtatgttcaacttgcacaagtcctatatgcttgttttgtgcatgtatacaaatgtgctctgattcagagtttttttatcaaagcctattgacaaacgctccg

SEQ ID NO: 29161 - DNA, 260 bp, Unknown
  Description of Unknown: RightRegion for integrase B3162 sequence
tggagcggttcgccggatgattttgagataactatatatccgaaactgccgaaatcataaaaatatgcgaattttctgccacatattaggcagtcattgacatcatagcggtaccgaagaactatcccacctcgaaatgataggctctatagtatcccagctcacaacaggcgagggtgcaaagagctttgaccgatacggagtaggcgcatattatatggatcacgcaaatgcggtttacccatccaatgccggcggtg

SEQ ID NO: 29162 - DNA, 260 bp, Unknown
  Description of Unknown: RightRegion for integrase B3163 sequence
tggagcggatcgccggatgattttgagataactatatatccgaagctgccgaaatcataaaaatatgcgaattttctaccatatattagacagtcgtttacatcatggcggtaccgaagaactatcccacctcgaaatgataggctctatagtatcccaactcacaacaggcgagggtgcaaagagctttgaccgatacggagtaggcgcatattatatggatcacgcaaatgcggtttacccatccaatgccggcggtg

SEQ ID NO: 29163 - DNA, 260 bp, Unknown
  Description of Unknown: RightRegion for integrase B3164 sequence
cacggcaatccggacgatttcgaggtcgtcatatatccaaaactcccgaaaatgcgttgatttttttatagacaccatgtgtacgcgaacgaactagcccatgtcgagatgatttccgcgatcctgtaccagctgaccgacgggctgacaccggaacagatcaaggaagccggattcgacgcgtacttcgtagaccacaccctcggactgtacccccagagtgccgccggcgtaccgttcacggctgcctatttccagtc

SEQ ID NO: 29164 - DNA, 260 bp, Unknown
  Description of Unknown: RightRegion for integrase B3165 sequence
aagcagtcaaccagactaaagccatctgaggaagctcaggtggcttttctgtttgtatgattccgcgcggaaaaactattatagatagagcgaacccggaaagtccgcaggactttccgggttcgccttttcacgggaaatataaatttacagaatggtgatgcggcctgcgccgtagggctgctcgtagttgagcaggtagccagggtatgcggccagcgggctgttggcgctggacaggtgcggcagacccgcagcat

SEQ ID NO: 29165 - DNA, 260 bp, Unknown
  Description of Unknown: RightRegion for integrase B3166 sequence
aaggacgagaataggacggcagtgaataccgtgccctttggcacggtagagccgtcctgaccgacgagcgtcgagcgaggagaaagagtccttctgcccctgccaaaaaggtcggttgcaaaagcagccgattttttttgctctttgcagaaggacatttttccaattccagttttttcaaaatgcgcaactaaattcagttgcatttttatctttttgtgctatactatatgagaaagggaggcatgcggcttgggaca

SEQ ID NO: 29166 - DNA, 109 bp, Unknown
  Description of Unknown: RightRegion for integrase B3167 sequence
ccgggacttggacggtatgttgataatccgtttcatctggaagttattttacgattatgatttacaacaacatggtgctattgaaattgcccattttgagatgattgca

SEQ ID NO: 29167 - DNA, 260 bp, Unknown
  Description of Unknown: RightRegion for integrase B3168 sequence
accaaaaagacactgcacagtttgtgcggtgtctttcttttttgcacttttgttgcgtgagtgaaaaacaggaagatgaacggtgccgatcggagttttgacgatttgcggcgctgtcctgatgcagtaaaccgtaagataaaagcagaagacgctcttccccgatggaaagggcgtcttctgctttttcagtcgttcttcacgcccgccggagccggctgggcagaggccgtgtcaaggccgacgagatattccggatc

SEQ ID NO: 29168 - DNA, 260 bp, Unknown
  Description of Unknown: RightRegion for integrase B3169 sequence
atggtcacatcagaatggctgtcctgtgtattatacaggacagtcattttgtcgtcatagaggtaaatcctgttgacaaaagtatccaccagtgcctgccgatatttcaggtcattcacatcgcctttgcggaactggttcaggaagaaccgcacttcattgaccgtgggcgtagggtgggaggaagtctccaaaagaatctgctgttccagctcgttgcgttcccgtttcttctgggagatacgctccgcaatacacgc

SEQ ID NO: 29169 - DNA, 260 bp, Unknown
  Description of Unknown: RightRegion for integrase B3170 sequence
cacggcaatccggacgatttcgaggtcgtcatatacccaaaactcccgaagatgcgttgatttttttatagacaccataggtacgcgaacgaatccgcctacacatgatatacataataagcccacttgaagcacgtctttgagtgggcttttgtgctgtatgttcaacttgcacaagtcctatatgcttgttttgtgtatgtatacaaatgtgctctgattcagagtttttttatcaaaacctattgacaaatgctccg

SEQ ID NO: 29170 - DNA, 260 bp, Unknown
  Description of Unknown: RightRegion for integrase B3171 sequence
tggagcggatcgccggatgattttgagataactatatatccgaagctgccgaaatcataaaaatatgcgaattttctgccatatattaggcagtcgttgacatcatggcggtaccgaagaactatcccatcttgaaatgataggctctatagtatcccagctcacaacaggcgagggcgcaaagagctttgaccgatacggaataggcgcatattatatggatcacgcaaatgcggtttccccatccaatgccggcggtg

SEQ ID NO: 29171 - DNA, 260 bp, Unknown
  Description of Unknown: RightRegion for integrase B3172 sequence
tggagcggttcgccggatgattttgagataactatatatccgaagctaccgaaatcataaaaatatgcgaattttctaccatatattaggcagtcattgacatcatagcggtaccgaagaactatcccacctcgaaatgataggctctatagtatcccaactcacaacaggcgagggtgcaaagagctttgaccgatacggagtaggcgcatattatatggatcacgcaaatgcggtttacccatccaatgccggcggtg

SEQ ID NO: 29172 - DNA, 260 bp, Unknown
  Description of Unknown: RightRegion for integrase B3173 sequence
tggagcggttcgccggatgattttgagataactatatatccgaagctaccgaaatcataaaaatatgcgaattttctaccatatattaggcagtcattgacatcatagcggtaccgaagaactatcccacctcgaaatgataggctctatagtatcccagctcacaacaggcgagggtgcaaagagctttgaccgatacggagtaggcgcatattatatggatcacgcaaatgcggtttacccatccaatgccggcggtg

SEQ ID NO: 29173 - DNA, 260 bp, Unknown
  Description of Unknown: RightRegion for integrase B3174 sequence
aagcagtcaaccagaacaaagccatctgaggaaactcaggtggcttttctgtttgtatgattccgcgcggaaaaactattatagatagagcgaacccggaaagtccgcagaactttccgggttcgccttttcatgggaaatataaatttacagaatggtgatgcggcctgcgccgtagggctgctcgtagttgagcaggtagccgggatacgcagccagcgggctgttggcgctggacagatgcggcagacccgcagcat

SEQ ID NO: 29174 - DNA, 260 bp, Unknown
  Description of Unknown: RightRegion for integrase B3175 sequence
ctcaatgtgcggctcatcaagatgtgtttcgtgatgacagtagaaaggcccgtaggttaaacgcctacgggccttttgctatgctttaacttagaactgcgagaatctgttcacgctgttctgcgggcggtttacggatgccgcgccgatagacagaaatcagaccgggattcagccctgtcagttctgccgcttcacgaacgccgtaatgcgaaagaaccgcaatcacttcatcattattcgggttagctaccgggagc

SEQ ID NO: 29175 - DNA, 260 bp, Unknown
  Description of Unknown: RightRegion for integrase B3176 sequence
aagcagtcaaccagactaaagccatctgaggaagctcaggtggcttttctgtttgtatgattccgcgcggaaaaactattatagatagagcgaacccggaaagtccgcaggactttccgggttcgccttttcacgggaaatataaatttacagaatggtgatgcggcctgcgccgtagggctgctcgtagttgagcaggtagccggggtatgcggccagcgggctgttggcgctggacaggtgcggcagacccgcagcat

SEQ ID NO: 29176 - DNA, 260 bp, Unknown
  Description of Unknown: RightRegion for integrase B3177 sequence
tggagcggttcgccggatgattttgagataactatatatccgaagctaccgaaatcataaaaatatgcgaattttctaccatatattaggcagtcattgacatcatagcggtaccgaagaactctctcacttagagatgatcggatcaatagtttctcagctgacaacgggtgagggtgcgaaaagctttgacaggtacggagtgggcgcgtattatatggatcacgctaatgcggtatatcctgcaaatgcgggcggag

SEQ ID NO: 29177 - DNA, 260 bp, Unknown
  Description of Unknown: RightRegion for integrase B3178 sequence
ctcaatgtgcggctcgtcaagatgtgtttcgtgatgacagtagaaaggcccgtaggttaaacgcctacgggccttttgctatgtctttatacatctctgccgattgaatggtatgcgaaccagtgaccgcgccgccgggtcagcttgaaccagtttgtgaacagctgacccgtgcaatcgtactggctgggcgtggcggtcatgtaccgattccacatgaaccactcctgcacttcgtcctcggtgtagctgtccagttc

SEQ ID NO: 29178 - DNA, 260 bp, Unknown
  Description of Unknown: RightRegion for integrase B3179 sequence
tggagcggttcgccggatgattttgagataactatatatccgaaactgccgaaatcataaaaatatgcgaattttctgccacatattaggtagtcattgacatcatggtggtaccgaagaactatcccatctcgaaatgataggctctatagtatcccagctcacaacaggcgagggtgcaaagagctttgaccgatacggagtaggcgcatattatatggatcacgcaaatgcggtttacccatccaatgccggcggtg

SEQ ID NO: 29179 - DNA, 260 bp, Unknown
  Description of Unknown: RightRegion for integrase B3180 sequence
actatctacatcatagatggccagctccggatgtggacaacaatagaggcgccgatctgatcggcgcccccttttttattttcgcgcgatgcactcatagtacatccgcgtcttgtcctccacagcgtccgggtcctcgacgaagcacttggccatcatcgcgtaaaactccggcctgtcgactccaaacttcttcgccgccggccagtagtcgctctgcatggcattcatcgctgcgtaaaactcgatgagcctctcct

SEQ ID NO: 29180 - DNA, 260 bp, Unknown
  Description of Unknown: RightRegion for integrase B3181 sequence
tggagcggatcgccggatgattttgagataactatatatccgaagctgccgaaatcataaaaatatgcgaattttctgccatatattaggcagtcgttgacatcatggcggtacagaagaactatcccatctcgaaatgataggctctatagtatcccagctcacaacaggcgagggtgcaaagagctttgaccgatacggagtaggcgcatattatatggatcacgcaaatgcggtatacccatccaatgccggcggtg

SEQ ID NO: 29181 - DNA, 260 bp, Unknown
  Description of Unknown: RightRegion for integrase B3182 sequence
tggagcggatcgccggatgattttgagataactatatatccgaagctgccgaaatcataaaaatgtgcgaattttctaccatatattaggcagtcgtttacatcatagcggtaccgaagaactatcccacctcgaaatgataggctctatagtatcccaactcacaacaggcgagggtgcaaagagctttgaccgatacggagtaggcgcatattatatggatcacgcaaatgcggtttacccatccaatgccggcggtg

SEQ ID NO: 29182 - DNA, 108 bp, Unknown
  Description of Unknown: RightRegion for integrase B3183 sequence
aaggacgagaataggacggcagtgaataccgtgccctttggcacggtagagccgtcctgaccgacgagcgtcgagcgaggagaaagagtccttctgcccctgccaaaa

SEQ ID NO: 29183 - DNA, 260 bp, Unknown
  Description of Unknown: RightRegion for integrase B3184 sequence
tggagcggatcgccggatgattttgagataactatatatccgaagctgccgaaatcataaaaatgtgcgaattttctaccatatattaggcagtcgtttacatcatggcggtacagaagaactatcccatctcgaaatgataggctctatagtatcccagctcacaacaggcgagggcgcaaagagctttgaccgatacggagtaggcgcatattatatggatcacgcaaatgcggtttacccatccaatgccggcggtg

SEQ ID NO: 29184 - DNA, 260 bp, Unknown
  Description of Unknown: RightRegion for integrase B3185 sequence
ccgggacttgggcggtatgttgataatccgtttcatctggaagttattttacgattatgatttacaacaacatggtgctattgaaattgcccattttgagatgattgcaaccatcgtgcaccagcttaccagagacctgactccggaggaaatcaaagcctctaactttggtccttactatattgaccacacccttgccgtatggccacaggctgccggtggtgttccacagaatgcctgtgaattccagtccaaaggcg

SEQ ID NO: 29185 - DNA, 99 bp, Unknown
  Description of Unknown: RightRegion for integrase B3186 sequence
aagcagtcaaccagaacaaagccatctgaggaagctcaggtggcttttctgtttgtatgattccgcgcggaaaaactattctagatagagcgaacccgg

SEQ ID NO: 29186 - DNA, 260 bp, Unknown
  Description of Unknown: RightRegion for integrase B3187 sequence
tggagcggttcgccggatgattttgagataactatatatccgaagctaccgaaatcataaaaatatgcgaattttctaccatatattaggcagtcattgacatcatagcggtaccgaagaactatcccatcttgaaatgataggctctatagtatcccagctcacaacaggcgagggcgcaaagagctttgaccgatacggagtaggcgcatattatatggatcacgcaaatgcggtttacccatccaatgccggcggtg

SEQ ID NO: 29187 - DNA, 109 bp, Unknown
  Description of Unknown: RightRegion for integrase B3188 sequence
atggtcacatcagaatggctgtcctgtgtattatacaggacagtcattttgtcgtcatagaggtaaatcctgttgacaaaagtatccaccagtgcctgccgatatttca

SEQ ID NO: 29188 - DNA, 109 bp, Unknown
  Description of Unknown: RightRegion for integrase B3189 sequence
ccgggacttgggcggtatgttgataatccgtttcatctggaagttattttacgattatgatttacaacaacatggtgctattgaaattgcccattttgagatgattgca

SEQ ID NO: 29189 - DNA, 260 bp, Unknown
  Description of Unknown: RightRegion for integrase B3190 sequence
aagcagtcaaccagactaaagccatctgaggaaactcaggtggcttttctgtttgtatgattccgcgcggcgcaacgattcagaatgccctccgctttgctctgggcattttcagcggaaggattattttaatatttcgcgtttgtcgcactctgcggagtgctccaaacgctattttcacaggaggggccgcaatggttaaagagcagtctaaatcacaaaatgcagttgacctctacgaccccactggtgaaaagggg

SEQ ID NO: 29190 - DNA, 73 bp, Unknown
  Description of Unknown: RightRegion for integrase B3191 sequence
aagcagtcaaccagactaaagccatctgaggaagctcaggtggcttttctgtttgtatgattccgcgcggaaa

SEQ ID NO: 29191 - DNA, 109 bp, Unknown
  Description of Unknown: RightRegion for integrase B3192 sequence
gtaggcataggtcggcatgtagagaacaaattcaacattgaagtaacattgcgtctttaatctccaacgttaatgtgcaagttcttctgtaccgatatcggtcaacagt

SEQ ID NO: 29192 - DNA, 260 bp, Unknown
  Description of Unknown: RightRegion for integrase B3193 sequence
aaggacgagaataggacggcagtgaataccgtgccctttggcacggtagagccgtcctgaccgacgagcgtcgagcgaggagaaagagtccttctgcccctgccaaaaaggtcggttgcgaaagcagccgattttttttgctctttgcagaaggacatttttccaattccagttttttcaaaatgcgcaactaaattcagttgcatttctatctttttgtgctatactatatgagaaagggaggcatgcggcttgggaca

SEQ ID NO: 29193 - DNA, 94 bp, Unknown
  Description of Unknown: RightRegion for integrase B3194 sequence
tcttcctctgataaggggttcggatttgaggggttagagtccaccaaaaagggaggctaaaaaagatattgaggacaaaacctcagtattttca

SEQ ID NO: 29194 - DNA, 260 bp, Unknown
  Description of Unknown: RightRegion for integrase B3195 sequence
ctcaatgtgcagctcatcaagatgtgtttcgtgatgacagtagaaaggcccgtaggttaaacgcctacgggccttttgctatgctcaatttgaatcgtctttgaaagtgtggcactgtatatacccgatttcacacaacgcatccgttagcgtgcaaattcgagcgtcatacccgttccagcccggtgatccagtcttaaaactgtctcgaagttcccgaatattatctatcagcttatcgaagcatgaaacaacatctg

SEQ ID NO: 29195 - DNA, 260 bp, Unknown
  Description of Unknown: RightRegion for integrase B3196 sequence
tggagcggttcgccggatgattttgagataactatatatccgaagctaccgaaatcataaaaatatgcgaattttctaccatatattaggcagtcattgacatcatagcggtacagaagaactatcccacctcgaaatgataggctctatagtatcccagctcacaacaggcgagggcgcaaagagctttgaccgatacggagtaggcgcatattatatggatcacgcaaatgcggtttacccatccaatgccggcggtg

SEQ ID NO: 29196 - DNA, 260 bp, Unknown
  Description of Unknown: RightRegion for integrase B3197 sequence
agtggttgtgtttggtataccatatggcatcatacaattccatatagtgtcaaacggtgattcacgtctataaatgggaatcgacaaatagtccgcgccgtgtggagagtcgttaagaaataatagtgttagacaattgttagacggtttgcttgctgttgttttatatagcggagtggagcagttggtagctcattaggttcatgccctaaaggtcgtgggttcaagtcccgcctccgcaaccaatatcccgtgtgcat

SEQ ID NO: 29197 - DNA, 260 bp, Unknown
  Description of Unknown: RightRegion for integrase B3198 sequence
aaaggaacattcagcacctttgcaatgatatatagctccatatcccgtacgcaccgatgaccatgctcaagcaactgaatcgcgtttttatcaacgtcaatgccgaagccctggagtttaatagccaaggtgttttgcgatatgccgcgttccctgcgaagctcggcaacgcgttttccgacccaattcttattgccatccggctttttacattttttcatatacaattctcccattttagtcatttatatttttattat

SEQ ID NO: 29198 - DNA, 260 bp, Unknown
  Description of Unknown: RightRegion for integrase B3199 sequence
tggagcggatcgccggatgattttgagataactatatatccgaagctgccgaaatcataaaaatatgcgaattttctaccatatattaggcagtcgtttacatcatggcggtaccgaagaactatcccatctcgaaatgataggctctatagtatcccagctcacaacaggcgagggtgcaaagagctttgaccgatacggagtaggcgcatattatatggatcacgcaaatgcggtttacccatccaatgccggcggtg

SEQ ID NO: 29199 - DNA, 260 bp, Unknown
  Description of Unknown: RightRegion for integrase B3200 sequence
ctcaatgtgcggctcatcaagatgtgtttcgtgatgacagtagaaaggcccgtaggttaaacgcctacgggccttttgctatgcctttatacatctctgccgattgaatggtatgcgaaccagtgaccgcgccgccgggtcagcttgaaccaatttgtgaacagctgcccggtgcaatcgtactggctgggcacggcggtcatgtaccgattccacatgaaccactcctgcacttcgtcctcggtgtagctgtccagctc

SEQ ID NO: 29200 - DNA, 260 bp, Unknown
  Description of Unknown: RightRegion for integrase B3201 sequence
ctcaatgtgcggctcatcaagatgtgtttcgtgatgacagtagaaaggcccgtaggttaaacgcctacgggccttttgctatgttttttatttcaggtattcgcgcagggctgcaagtacgatgtcagttcgattccggccacttgcggccttttctgtgtccagctttgccatgatgtccggcggaaccagaacagatacgggagtgtattcgccctcggcaatctctccgaaaatggattcatagtcatccgcatcca

SEQ ID NO: 29201 - DNA, 260 bp, Unknown
  Description of Unknown: RightRegion for integrase B3202 sequence
gtttatcggatactgccagatactgcgcgatactgtctgcttttgccgggtactttgtagtcaggatcgtagtcagaaaaagtaggtcatagcaggatttttccggggggttccccgggacaaaaagtagtcaaaaataatgaatcaggccgccgtctccgtaaaacagagacagcggcctgattcatcaaggggattatttgtccatgtcatggtacgaaccgtcgagcggccgtgctgttcgccccccccttctcccg

SEQ ID NO: 29202 - DNA, 260 bp, Unknown
  Description of Unknown: RightRegion for integrase B3203 sequence
tcttcctctgataaggggttcggatttgaggggttagagtccaccatgaagaaagcctagagccgcaacggctccaggcttttttcttgtccttttccgggctgttttccctttggttttccctttacaggttggaaaccccttttataaactgttccatgcggtccgcactggcctgtttcatctcctctgtaacatggccgtacacgtccagcgtgaaggaggcggtatagtggcccaggttgccctgcacggtctta

SEQ ID NO: 29203 - DNA, 260 bp, Unknown
  Description of Unknown: RightRegion for integrase B3204 sequence
agaagtggtactctgcacatcccgcacaaaaatccttgcggttctcgtaaagcgttttgacttcatagtctggcggggcatcagggctgactctcttggagtacataagcatactgtcccagtagaacctgacctcgtcggcctcttcctgccggctgatctgcccggaaacattgattgcgacaagcgcgatggacagcagcaccgcgatgccgatgccgaccggaatcacaattgcccagttcattctgtgtacctcc

SEQ ID NO: 29204 - DNA, 260 bp, Unknown; identical to SEQ ID NO: 29175
  Description of Unknown: RightRegion for integrase B3205 sequence

SEQ ID NO: 29205 - DNA, 260 bp, Unknown
  Description of Unknown: RightRegion for integrase B3206 sequence
tggagcggatcgccggatgattttgagataactatatatccgaagctgccgaaatcataaaaatgtgcgaattttctaccatatattaggcagtcgtttacatcatagcggtacagaagaactatcccatctcgaaatgataggctctatagtatcccagctcacaacaggcgagggcgcaaagagctttgaccgatacggagtaggcgcatattatatggatcatgcaaatgcggtttacccatccaatgccggcggtg

SEQ ID NO: 29206 - DNA, 260 bp, Unknown
  Description of Unknown: RightRegion for integrase B3207 sequence
ctcaatgtgcagttcatcaagatgtgtttcgtgatgacagtagaaaggcccgtaggttaaacgcctacgggccttttgctatgcctttatacatctctgccgattgaatggtatgcgaaccagtgaccgcgccgccgggtcagcttgaaccagtttgtgaaaagctgcccagtgcaatcgtactggctgggcacggtggtcatgtaccgattccacatgaaccactcctgcacttcatcctcggtgtaactgtccagctc

SEQ ID NO: 29207 - DNA, 260 bp, Unknown
  Description of Unknown: RightRegion for integrase B3208 sequence
aagagccctgatggcttcatcattgaaatatacccgcgcatcccaaaatccgaaaaatgaaaagagagggccgtttcggtcctctctttcttatagttatcctgtttagccatactcatagggactgcccacgatgtcacccaagattgctcctaacatggctgtttcctcccttacctatgatgccgcttctggaaatcagcttcgatttgttctttccactctgcgccgatggacgcgcagcagggtgcttcccgcat

SEQ ID NO: 29208 - DNA, 260 bp, Unknown
  Description of Unknown: RightRegion for integrase B3209 sequence
gtgccaattcccgcaaaagtaccgtgttcggattttaggacgcaacctgctccaaaataacagcacgccctgccttgattggcagggcgtgctgctcagtctgtcaaataaccctcactttcaataagcgaaagtgggggcattcttgtagatggggcaacaacggacgaatagtagcgagaacatggagtccttccaactccattgggccagttttttcagattcatggcagcaaacttgagcctgacccatctggtaa

SEQ ID NO: 29209 - DNA, 260 bp, Unknown
  Description of Unknown: RightRegion for integrase B3210 sequence
aaaagtcctgatggtttcaccattgagatatacccgcgcatcccaaaatccgaaaaatgaaaagagagggccatttcggtcctctctttcttatagttatcctgtttagccatactcatagggactgcccacgatgtcacccaagattgctcctaacatggctgtttcctcccttacctatgatgccgcttctggaaatcggcttcgatttgttctttccactctgcgccgatggacgcgcagcagggtgcttcccgcat

SEQ ID NO: 29210 - DNA, 256 bp, Unknown
  Description of Unknown: RightRegion for integrase B3211 sequence
aagagccctgacggctttaccattgagatatacccgcgcatcccaaaatccgaaaaatgaaaagagagggccgtttcggtcctctctttcttatagttatcgtgtttagccatactcatagggactgcccacgatgtcacccaaaattgctcctaacatggctgtttcctcctttacccctgatgccgcttctggaaatcaacttcgatttgttctttccactctgcgccgatggacgcgcagcagggtgcttccc

SEQ ID NO: 29211 - DNA, 260 bp, Unknown
  Description of Unknown: RightRegion for integrase B3212 sequence
aaaagtcctgatggtttcaccattgagatatacccgcgcatcccaaaatccgaaaaatgaaaagagagggccgtttcggtcctctctttcttatagttatcctgtttagccatactcatagagactgcccacgatgtcacccaagattgctcctaacatggctgtttcctcccttacctatgatgccgcttctggaaatcagcttcgatttgttctttccactctgcgccgatggacgcgcagcagggtgcttcccgcat

SEQ ID NO: 29212 - DNA, 260 bp, Unknown
  Description of Unknown: RightRegion for integrase B3213 sequence
aaaagtcctgatggtttcaccattgagatatacccgcgcatcccaaaatccgaaaaatgaaaagagagggccgtttcggtcctctctttcttatagttatcctgtttagccatactcataattccaaccagcaaaaacacggcagacaaacctgtggccaaaactcttgaagtcagtaaatatcctgccatttcttgctgtttctcatatcgcgactgaatatcaatgccagatgacagggcagtaattgattgaagttg

SEQ ID NO: 29213 - DNA, 260 bp, Unknown
  Description of Unknown: RightRegion for integrase B3214 sequence
aaaagtcctgatggtttcaccatagagatatacccgcgcatcccaaaatccgaaaaatgaaaagagagggccgtttcggtcctctctttcttatagttatcctgtttagccatactcatagggactgcccacgatatcacccaagattgctcctaacatggctgtttcctcccttacctatgatgccgcttctggaaatcagcttcgatttgttctttccactctgcgccgatggacgcgcagcagggtgcttcccgcat

SEQ ID NO: 29214 - DNA, 260 bp, Unknown
  Description of Unknown: RightRegion for integrase B3215 sequence
aaaagtcctgatggtttcaccattgagatatacccgcgcatcccaaaatccgaaaaatgaaaagagagggccgtttcggtcctctctttcttatagttatcctgtttagccatactcatagggactgcccacgatgtcacccaagattgctcctaacatggctgtttcctcccttacctatgatgccgcttctggaaatcagcttcgatttgttctttccactctgcgccgatggacgcgcagcagggtgcttcccgcat

SEQ ID NO: 29215 - DNA, 260 bp, Unknown
  Description of Unknown: RightRegion for integrase B3216 sequence
aagagccctgatggtttcaccattgagatatacccgcgcatcccaaaatccgaaaaatgaaaagagagggccgtttcggtcctctctttcttatagttatcctgtttagccatactcgatgttgttgccaacgatttgaataatcgaattgtaataaaaactcggactacaccgccatcgaagcgtacctcgtttaccagcacgacgcgttcaccggaaagcaacttctggatgagcacggcaagccgaagctgcgggat

SEQ ID NO: 29216 - DNA, 260 bp, Unknown
  Description of Unknown: RightRegion for integrase B3217 sequence
aaaagtcctgatggtttcaccatagagatatacccgcgcatcccaaaatccgaaaaatgaaaagagagggccgtttcggtcctctctttcttatagttatcctgtttagccatactcattaggacaaacatgataactatatcagcaggggcctccgggctcctgctttctttctgttctgccgtcgtttcgtgcataatgccgcaaaaagcgtcatcctcaaaaactttttgccacaaattgccagattttacttgaca

SEQ ID NO: 29217 - DNA, 260 bp, Unknown
  Description of Unknown: RightRegion for integrase B3218 sequence
aaaagtcctgatggtttcaccattgagatatacccgcgcattccaaaatccgaaaaatgaaaagagagggccgtttcggtcctctctttcttatagttatcctgtttagccatactcatagggactgcccacgatgtcacccaaaattgctcctaacatggctgtttcctcccttacccgtgatgccgcttctggaaatcggcttcaatctgctctttccactccgcaccgatggacgcacagcagggtgcctcccgcat

SEQ ID NO: 29218 - DNA, 260 bp, Unknown
  Description of Unknown: RightRegion for integrase B3219 sequence
aaaagtcctgatggtttcaccattgagatatacccgcgcatcccaaaatccgaaaaatgaaaagagaggaccgtttcggtcctctctttcttatagttatcctgtttagccatactcattaggacaaacaggataactatatcaacaggggcctccgggctcctgctttctttctgctctgctgcggtttctggcataatgccgcaaaaagcgtcattctcgaaaactttttccacaaattgccagattttgcttgacat

SEQ ID NO: 29219 - DNA, 260 bp, Unknown
  Description of Unknown: RightRegion for integrase B3220 sequence
aaaagtcctgatggtttcaccatagagatatacccgcgcatcccaaaatccgaaaaatgaaaagagagggccgtttcggtcctctctttcttatagttatcctgtttatccatactcatagggactgcccacgatgtcacccaagattgctcctaacatggctgtttcctcccttacctatgatgccgcttctggaaatcagcttcgatttcctctttccactctgcgccgatggacgcgcagcagggtgcttcccgcat

SEQ ID NO: 29220 - DNA, 260 bp, Unknown
  Description of Unknown: RightRegion for integrase B3221 sequence
aagagccctgacggctttaccattgagatatacccgcgcatcccaaaatccgaaaaatgaaaagagagggccgtttcggtcctctctttcttatagttatcctgtttagccatactcatagggactgcccacgatgtcacccaagattgctcctaacatggctgtttcctcccttacctatgatgccgcttctggaaatcagcttcgatctgctctttccactccgcaccgatagacgcgcagcagggtgcctcccgcat

SEQ ID NO: 29221 - DNA, 260 bp, Unknown
  Description of Unknown: RightRegion for integrase B3222 sequence
tccaccaaaaaagcactgtacttcgtaggaagtacagtgcttttctttttgctttcttagaggttgcatcgagaatcagccaaatgcctgattttgcaggcgcatggacggcaacccccaattcttgctatttcgttgcttttgaaaatgcttgttcgatgtccgactgttttgcaggtggacgcatcactccccctcaatgtaaggagtgaggtcgaagttgaacgagatgttgatctgatatccacgataaacatcta

SEQ ID NO: 29222 - DNA, 260 bp, Unknown
  Description of Unknown: RightRegion for integrase B3223 sequence
aagagccctgatggcttcaccattgaaatatacccgcgcatcccaaaatccgaaaaatgaaaagagagggccgtttcggtcctctctttcttatagttatcctgtttagccatactcaaaggggctgcccacgatgtcgcccaagattgctcccaacatggctgattcctcctttacccctgatgccgcttctggaaatcggcttcgatttcctctttccactctgcgccgacggatgccgggcagtctgcctgccgcat

SEQ ID NO: 29223 - DNA, 260 bp, Unknown
  Description of Unknown: RightRegion for integrase B3224 sequence
gtgcccatttccgaaaaagtaccgtgttcggattttaggacgcaacctgctccaaaatagcagcacgccccgccttgattggcagggcgtgctgctttatttattgtacatagcttgcagaactccgacacgcttagggcaacaccgcaatggggacacggttcccttacttgcggaaaggaatcgagcttccggattgtgacatatcctctcgcgaagaagatactgtcaaattacagagaaattaaggtgccttgtgt

SEQ ID NO: 29224 - DNA, 260 bp, Unknown
  Description of Unknown: RightRegion for integrase B3225 sequence
ggttcagcttttgcgccgtcaagcgcattgcaacatcgcttttgtaaaaaatggtgttgacaatttgaattaaatactgtattatacatcttgttcgcagaaatggcggaattggcagacgcgcacggttcaggtccgtgtggtagtgataccatgagggttcaagtccctctttctgcatcacatggcggtgaccgaaaggttaccgcctttgttgtattcggaatccgataagaatatcataagaaatcagggaagag

SEQ ID NO: 29225 - DNA, 260 bp, Unknown
  Description of Unknown: RightRegion for integrase B3226 sequence
aaaagtcctgatggtttcaccatagagatatacccgcgcatcccaaaatccgaaaaatgaaaagagagggccgtttcggtcctctctttcttatagttatcctgtttagccatactcattaggacaaacaggataactatatcagcaggggcctccgggctcctgctttctttctgttctgccgtcgtttcgtgcataatgccgcaaaaagcgtcattctcgaaaacttttttgccataaattgccagattttacttgac

SEQ ID NO: 29226 - DNA, 260 bp, Unknown
  Description of Unknown: RightRegion for integrase B3227 sequence
aaaagtcctgatggtttcaccattgagatatacccacgcatcccaaaatccgaaaaatgaaaagagagggccgtttcggtcctctctttcttatagttatcctgtttagccatactcaagggggcttacatcggtgatgacacgttcgtcctggggggcgggcgtggcggcgggagcctcggccagcgcggcggtgctgccggacacgcacagggccagcgtcaggcagagggaaagggcgcggaacagctttttcatgg

SEQ ID NO: 29227 - DNA, 109 bp, Unknown
  Description of Unknown: RightRegion for integrase B3228 sequence
aataacgctcccgacgattttgagattacgctatatccgaaaataccgaaatctgattaacggtcccggcggaggctttacggcttccgccgttttctcattgataacc

SEQ ID NO: 29228 - DNA, 260 bp, Unknown
  Description of Unknown: RightRegion for integrase B3229 sequence
ggccgctggcatgctgcgccggatgattttgagattacgatattcccacggctgtcttaaaaaattctctatgataacctcggtgtaccgaagaaatggcacactgggaaatgattggctccatgatccttcaatgcatgaaaaacgccagtattgaagaaataaaggccgcggggctagccgggtattataccatgcatgatcacggcgtatacccagcggatcccaatggggtccccttcacggcgtcctatatccaa

SEQ ID NO: 29229 - DNA, 260 bp, Unknown
  Description of Unknown: RightRegion for integrase B3230 sequence
aaaagtcctgatggtttcaccattgagatatacccgcgcatcccaaaatccgaaaaatgaaaagagagggccgtttcggtcctctctttcttatagttatcctgtttagccatactcatagggactgcccacgatgtcacccaagattgctcctaacatggctgtttcctcccttacctatgtgatgccgcttctgaaaatcagcttcgatttgttctttccactctgcgccgatggacgcgcataaatttaaaagcggt

SEQ ID NO: 29230 - DNA, 260 bp, Unknown
  Description of Unknown: RightRegion for integrase B3231 sequence
aaaagccctgatggtttcatcatagagatatacccgcgcatcccaaaatccgaaaaatgaaaagagaggaccgaaacggccctctctttcttatagttatcctgtttagccatactcatagggactgcccacgatgtcacccaagattgctcctaacatggctgtttcctcccttacctatgatgccgcttctgaaaatcagcttcgatttgttctttccactctgcgccgatggacgcgcagcagggtgcttcccgcat

SEQ ID NO: 29231 - DNA, 260 bp, Unknown
  Description of Unknown: RightRegion for integrase B3232 sequence
aagagccctgatggcttcaccattgaaatatacccgcgcatcccaaaatccgaaaaatgaaaagagagggccgtttcggtcctctctttcttatagttatcctgtttagccatactcataatcttttaccgatctccgctgctgtcaaaaccagaaccatcataaataccgagtttaccagtcgttccgcaccattcacaggtgaaaagaccgcccagaccagaagtattatcgcaattcagtcttccgcagctgcatat

SEQ ID NO: 29232 - DNA, 260 bp, Unknown
  Description of Unknown: RightRegion for integrase B3233 sequence
aagagccctgatggtttcaccattgagatatacccgcgcatcccaaaatccgaaaaatgaaaagagagggccgtttcggtcctctctttcttatagttatcctgtttagccatactcattgttcaaatagatatggctgccactgtcctcgttataatgaattgtgcagttaataaacttgacagtgcctttgcagttcataatggcagaggaaaagtgaatatccttattcttgtagaccgtttcaccatcattctgaa

SEQ ID NO: 29233 - DNA, 260 bp, Unknown
  Description of Unknown: RightRegion for integrase B3234 sequence
aaaagtcctgatggtttcaccattgagatatacccgcgcatcccaaaatccgaaaaatgaaaagagagggccgtttcggtcctctctttcttatagttatcctgtttagccatactcatattacttcctcctccggttgtacttagcgattttgcggccagacaactcttttcacaaaatgttaggcagttagaacagtgacagcaaagattctgtcgaatcaaaatttgcccattggactgaatggtaaatgcacccgt

SEQ ID NO: 29234 - DNA, 260 bp, Unknown
  Description of Unknown: RightRegion for integrase B3235 sequence
aagagccctgatggtttcaccattgagatatacccgcgcatcccaaaatccgaaaaatgaaaagagagggccgtttcggtcctctctttcttatagttatcctgtttagccatactcgttcagcggctttattatacggccaattgcacggttttgcaacatattttttgctttagtgcacacttttgaagcattgcacaactttgctcgttcgtttttggtacatatgcccggcatattggatacaagcaccgcctttt

SEQ ID NO: 29235 - DNA, 260 bp, Unknown
  Description of Unknown: RightRegion for integrase B3236 sequence
aaaagtcctgatggtttcaccatagagatatacccgcgcatcccaaaatccgaaaaatgaaaagagagggccgtttcggtcctctctttcttatagttatcctgtttagccatactcataaagcacctccaaaacaaaataagagccacaagaaagtttatccttgcagctcgtcatagcataaaataacaccactaagcaaaagtggcaacagcactatattgagtaagatagacatataactttcttgcaatagacac

SEQ ID NO: 29236 - DNA, 260 bp, Unknown
  Description of Unknown: RightRegion for integrase B3237 sequence
aagagccctgatggcttcaccattgaaatatacccgcgcatcccaaaatccgaaaaatgaaaagagagggccgtttcggtcctctctttcttatagttatcctgtttagccatactcgttccatctcactatttattgtagcttcaattcctccatattgctctttctggactctttccaggtttttactcgccgttttatttctttcatctaacagtactctttttcgatatgcttcattttcttgctgcatcttttca

SEQ ID NO: 29237 - DNA, 260 bp, Unknown
  Description of Unknown: RightRegion for integrase B3238 sequence
tttatcacgatgataggtaatgtgttcgttttgttttgtccgtttccgggcctgaaatagaaataaattaagtctaatttgtgaacaaatagaacatcattagagacccatttcaacaaaataagcggcgggctacccctgaaaaaggagacggcctgccgcttttattatggattatttaatttgccggtaatttgcaagtaacttgccggtcagttgcctttgccgatctgcttgataacctgatccgcaccggtagc

SEQ ID NO: 29238 - DNA, 260 bp, Unknown
  Description of Unknown: RightRegion for integrase B3239 sequence
aaaagtcccgatggtttcaccattgagatatacccgcgcatcccaaaatccgaaaaatgaaaagagagggccgtttcggtcctctctttcttatagttatcctgtttatccatactcatagggactgcccacgatgtcacccaagattgctcctaacatggctgtttcctcctttacctatgatgccgcttctgaaaatcagcttcgatttgttctttccactctgcgccgatggtgtcctgctccagcccgcccatgga

SEQ ID NO: 29239 - DNA, 260 bp, Unknown
  Description of Unknown: RightRegion for integrase B3240 sequence
aaaagtcctgatggtttcaccatcgagatatacccgcgcatcccaaaatccgaaaaatgaaaagagagggccgtttcggtcctctctttcttatagttatcctgtttagctatactcatagggactgcccacgatgtcacccaaaattgctcctaacatggctgtttcctcctttacctatgatgccgcttctggaaatcagcttcgatctgctctttccactccgcaccgatggacgcgcagcagggtgcctcccgcat

SEQ ID NO: 29240 - DNA, 260 bp, Unknown
  Description of Unknown: RightRegion for integrase B3241 sequence
gtgccaattcccgcaaaagtaccgtgttcggattttaggacgcaacctgctccaaaataacagcacgccctgccttgattggcagggcgtgctgctttatttattgtacatagcttgcagaactccgacacgcttagggcaacgccacaatggggacgcggattcctttccttattgaaaggaaccgagcttccggattgtgacatatcctctcgcgaagaagatactgtcaaattacagagaaattgaggcgccttgtg

SEQ ID NO: 29241 - DNA, 108 bp, Unknown
  Description of Unknown: RightRegion for integrase B3242 sequence
aaaagtcctgatggtttcaccattgagatatacccgcgcatcccaaaatccgaaaaatgaaaagagagggccgtttcggtcctctctttcttatagttatcctgttta

SEQ ID NO: 29242 - DNA, 260 bp, Unknown
  Description of Unknown: RightRegion for integrase B3243 sequence
aaaagtcccgatggcttcaccattgagatatacccgcgcatcccaaaatccgaaaaatgaaaagagagggccgtttcggccctctctttcttatagttatcctgtttatccatactcatagggactgcccacgatgtcacccaagattgctcctaacatggctgtttcctcccttacctatgatgccgcttctggaaatcagcttcgatttgttctttccactctgcgccgatggacgcgcagcagggtgcttcccgcat

SEQ ID NO: 29243 - DNA, 260 bp, Unknown
  Description of Unknown: RightRegion for integrase B3244 sequence
aaaagtcctgatggtttcaccatcgagatatacccgcgcatcccaaaatccgaaaaatgaaaagagagggccgtttcggtcctctctttcttatagttatcctgtttagccatactcatagggactgcccacgatgtcacccaagattgctcctaacatggctgtttcctcccttacctatgatgccgcttctgaaaatcagcttcgatttgttctttccactctgcgccgatggacgcgcagcagggtgcttcccgcat

SEQ ID NO: 29244 - DNA, 260 bp, Unknown
  Description of Unknown: RightRegion for integrase B3245 sequence
aaaagccctgatggtttcatcatagagatatacccgcgcatcccaaaatccgaaaaatgaaaagagaggaccgaaacggccctctctttcttatagttatcctgtttagccatactcttcttgcttatgtataccacgtcacagccggtcggccgtgaaacaacaaatttggaatgcagcggtcaggactcgctgcggtggaaccgatctttcaccatctggatcagatctttcaggttgaggccccacaggctcttggg

SEQ ID NO: 29245 - DNA, 119 bp, Unknown
  Description of Unknown: RightRegion for integrase B3246 sequence
aaaaatcctgatggtttcaccattgagatatacccgcgcatcccaaaatccgaaaaatgaaaagagagggccatttcggtcctctctttcttatagttatcctgtttagccatactcat

SEQ ID NO: 29246 - DNA, 260 bp, Unknown
  Description of Unknown: RightRegion for integrase B3247 sequence
aagagccctgatggcttcaccattgaaatatacccgcgcatcccaaaatccgaaaaatgaaaagagagggccgtttcggtcctctctttcttatagttatcctgtttagtcatactcgtcaacaagatcaatggttttcgcaacatcgtcgagatattctttcaaatcatccgggataacaatattcacaccgtctaaaaaatcaattatcgtttcaaatgcatcttgctgttcgtctgttgcaaccctctcattcaggt

SEQ ID NO: 29247 - DNA, 260 bp, Unknown
  Description of Unknown: RightRegion for integrase B3248 sequence
gtgccaattcccgcaaaagtaccgtgttcggattttaggacgcaacctgctccaaaatagcagcacgccccgccttgattggcagggcgtgctgctttatttattgtacatagcttgcagaactccgacacgcttagggcaacgccacaatggggacgcggattcctttccttattgaaaggaaccgagcttccggattgtgacatatcctctcgcgaagaagatactgtcaaattacagagaaattgagtgccttgtgt

SEQ ID NO: 29248 - DNA, 260 bp, Unknown
  Description of Unknown: RightRegion for integrase B3249 sequence
aaaagtcctgatggtttcaccatagagatatacccgcgcatcccaaaatccgaaaaatgaaaagagagggccgtttcggtcctctctttcttatagttatcctgtttagccatactcgtctccctattcttataataatgttaataatgtcttttatcgtccctgtctgccgggcttatgggctttatcctcgtacatccgctggtcggccaggatgcggatttcttttacctccgtgctgtccgccgggtaaagggcgc

SEQ ID NO: 29249 - DNA, 260 bp, Unknown
  Description of Unknown: RightRegion for integrase B3250 sequence
aagagccctgatggcttcaccattgagatatacccgcgcatcccaaaatccgaaaaatgaaaagagagggccgtttcggtcctctctttcttatagttatcctgtttagccatactcgtaggggctgcctaccatatcgcccaaaattgctcctaacataaaataccctccgtatctgtggtgtttcgtctttctgacaaaaggataccacaaaccggagggcaaaaggtcaacgggcagacgacaaatcacgcacccag

SEQ ID NO: 29250 - DNA, 260 bp, Unknown
  Description of Unknown: RightRegion for integrase B3251 sequence
aataacgctcccgacgattttgagattacgctatatccgaaaataccgaaatctgattgacggtcccggcggaggctttacggcttccgccgttttctcattgataacctgttgggttagacgaatacgctccaataggttatcaatgatattccgtgccgctttttgcgtcctttgccttttgtgccgactcccggcgttgtaattcggctctgcaggtccgctcgtcgtagtcgagcaaaatgttctcgtagtcattc

SEQ ID NO: 29251 - DNA, 170 bp, Unknown
  Description of Unknown: RightRegion for integrase B3252 sequence
aaaagtcctgatggtttcaccattgagatatacccgcgcatcccaaaatccgaaaaatgaaaagagagggccgtttcggtcctctctttcttatagttatcctgtttagccatactcattctatcacaccgttatgaataaatcatctcatgcaaaataatttcttccgc

SEQ ID NO: 29252 - DNA, 260 bp, Unknown
  Description of Unknown: RightRegion for integrase B3253 sequence
aaaagtcctgatggtttcaccattgagatatacccgcgcatcccaaaatccgaaaaatgaaaaaagagggccgtttcggtcctctctttcttgtagttatcctgtttagccatactcatagggactgcccacgatgtcacccaagattgctcctaacatggctgtttcctcccttacctatgatcgctttcgttggcaaaaggataccacaaaccggagggcaaaaggtcaacgggcaggcgacaaattacgcacccagc

SEQ ID NO: 29253 - DNA, 103 bp, Unknown
  Description of Unknown: RightRegion for integrase B3254 sequence
aaccccgccgccgaagaagcgacagggttcgattttggggagtctgagtgtaccaaatgaataccacccgtgtttcgaacttttttatcgaaatacgggtggt

SEQ ID NO: 29254 - DNA, 260 bp, Unknown
  Description of Unknown: RightRegion for integrase B3255 sequence
aaaagtcctgatggtttcaccattgagatatacccgcgcatcccaaaatccgaaaaatgaaaagagagggccgtttcggtcctctctttcttatagttatcctgtttagccatactcatagggactgcccacgatgtcacccaagattgctcctaacatggctgtttcctcccttacctatgatgccgcttctggaaatcagcttcgatttgttctttccactctgcgccgatgaacgcgcagcagggtgcctcccgcat

SEQ ID NO: 29255 - DNA, 260 bp, Unknown
  Description of Unknown: RightRegion for integrase B3256 sequence
aagagccctgatggcttcaccattgaaatatacccgcgcatcccaaaatccgaaaaatgaaaagagagggccttttcggtcctctctttcttatagttatcctgtttagccatactcgtacaacatcgtactcatatcctggaaaatctttgcggagcgtaatggtattcaggcaattataacccagttttcgatacagtcgaatcgcagcttcattgcgggctgctgcttcaatataaagtgaaacggaatatttcttc

SEQ ID NO: 29256 - DNA, 260 bp, Unknown
  Description of Unknown: RightRegion for integrase B3257 sequence
tcttttgaggccgggatcttgttacttcaggatctcggccttttttattctgctgtataaaccaattccccaaacagaaaaccagaaaacaaaagaatgtgaggttgttatatggcgcaacaattttttgaagaattatcccggtgcctcagaaaagagcaaattgaatcctataacaaggaggacaggcgactggagatttttctccatgggcagcctgtcctttctgtttctcctgggaacgaagtattcctgcttcc

SEQ ID NO: 29257 - DNA, 260 bp, Unknown
  Description of Unknown: RightRegion for integrase B3258 sequence
cgatggagcggaaatccagataattttgaagttgttctgttcccaaagttaccgaaatagcgttacttttttattactgatattgtgcgtgtgcctaagaattagcatgcgcatgatgtcagctatataatcgaataaaagcagcggcagggaagtgctcccgctatgccgctgctttttcttattgtttaactaaattttctttgcataatccaaacagatccacccagctttcgattttaaaaatccccatttattac

SEQ ID NO: 29258 - DNA, 260 bp, Unknown
  Description of Unknown: RightRegion for integrase B3259 sequence
aaaagtcctgatggtttcacaatcgagatatacccgcgcatcccaaaatccgaaaaatgaaaagagagggccgtttcggtcctctctttcttatagttatcctgtttagccatactcatagggactgcccacgatgtcacccaagattgctcctaacatggctgtttcctcccttacctatgatcgctttcgttggcaaaaggataccacaaaccggagggcaaaaggtcaacgggcaggcgacaaatcacgcacccagc

SEQ ID NO: 29259 - DNA, 260 bp, Unknown
  Description of Unknown: RightRegion for integrase B3260 sequence
aaaagtcctgatggtttcaccattgagatatacccgcgcatcccaaaatccgaaaaatgaaaagagagggccgtttcggtcctctctttcttatagttatcctgtttagccatactcaccagatgcacctacaacaacaatgtccatcacatcattaggatgcaccgtacgcgtaattcgtgtgatacctccatcacgaattgtaagctgttcaacaacatcttttccattcatcgagtacgaaacagaataatttgatc

SEQ ID NO: 29260 - DNA, 260 bp, Unknown
  Description of Unknown: RightRegion for integrase B3261 sequence
aaaagtcctgatggtttcacaatcgagatatacccgcgcatcccaaaatccgaaaaatgaaaagagagggccgtttcggtcctctctttcttatagttatcctgtttagccatactcatagggactgcccacgatgtcacccaagattgctcctaacatggctgtttcctcccttacctatgatgccgcttctggaaatcagcttcgatttgttctttccactctgcgccgatggacgcgcagcagggtgcttcccgcat

SEQ ID NO: 29261 - DNA, 260 bp, Unknown; identical to SEQ ID NO: 29214
  Description of Unknown: RightRegion for integrase B3262 sequence

SEQ ID NO: 29262 - DNA, 260 bp, Unknown; identical to SEQ ID NO: 29214
  Description of Unknown: RightRegion for integrase B3263 sequence

SEQ ID NO: 29263 - DNA, 260 bp, Unknown
  Description of Unknown: RightRegion for integrase B3264 sequence
aaaagtcctgatggtttcaccattgagatatacccgcgcatcccaaaatccgaaaaatgaaaagagagggccgtttcggtcctctctttcttatagttatcctgtttagccatactcatagggactgcccacgatgtcacccaaaattgctcctaacatggctgttttctcccttacctatgatgccgcttctggaaatcagcttcgatttgcgccgatggacgcgcagcagggtgcctcccgcatccgggagactgtct

SEQ ID NO: 29264 - DNA, 260 bp, Unknown
  Description of Unknown: RightRegion for integrase B3265 sequence
aagagccctgacggctttaccattgagatatacccgcgcattccaaaatccgaaaaatgaaaagagagggccgtttcggtcctctctttcttatagttatcctgtttagccatactcatagggactgcccacgatgtcacccaagattgctcctaacataaaatgccctccgttttgtggtgtatcgctttcgttggcaaaaggataccacaaaacggaggtcaaaaggtcaacgggcaggcgacaaatcacgcgcccag

SEQ ID NO: 29265 - DNA, 260 bp, Unknown
  Description of Unknown: RightRegion for integrase B3266 sequence
catacaacgcattgccacttaaaacctcaccaatggagaaaatttaatcaggaagtttaagtgtctggccgggatagatggtgttgctggtcaggttgttcagggtcttaatctccgtccagcggctaccgttacccagattggcctttgcaatgctccacagagagtcacccttcttgaccttgtaggtcacataggacggctcctgcacggtgtcagtggcaaccacagtaccaccgctctccgtggtaatatatgcg

SEQ ID NO: 29266 - DNA, 260 bp, Unknown
  Description of Unknown: RightRegion for integrase B3267 sequence
aaaagtcctgatggtttcaccattgagatatacccgcgcatcccaaaatccgaaaaatgaaaagagagggccatttcggtcctctctttcttatagttatcctgtttagccatactcatagggactgcccacgatgtcacccaagattgctcctaacatggctgtttcctcccttacctatgatgccgcttctggaaatcagcttcgatttcctctttccactctgcgccgatggtgtcctgctccagcccgcccatgga

SEQ ID NO: 29267 - DNA, 109 bp, Unknown
  Description of Unknown: RightRegion for integrase B3268 sequence
ggggataagcctaatttcaaactgcatttatatcccaaatttttttcagataattactgacaacatcatggtacagacgaactggcgcatttcgagatgatcggtgcta

SEQ ID NO: 29268 - DNA, 260 bp, Unknown
  Description of Unknown: RightRegion for integrase B3269 sequence
aagagccctgatggcttcaccattgaaatatacccgcgcatcccaaaatccgaaaaatgaaaagagagggccgtttcggtcctctctttcttatagttatcctgtttagccatactcatcacgactgtataaagatgccgttgccaaatgctttgaacaactctacgaccagcaggggatattcctcaactagttagcgacccacgccagtgcatattccaaaatcgatttattgcttcactcatagatatatttttatt

SEQ ID NO: 29269 - DNA, 260 bp, Unknown
  Description of Unknown: RightRegion for integrase B3270 sequence
aaaagtcctgatggtttcaccattgagatatacccgcgcatcccaaaatccgaaaaatgaaaagagagggccgtttcggtcctctctttcttatagttatcctgtttagccatactcatttaacttcattggtgtatcacaccttccaaccattaagtttttcttaatagttcccactgccaaacttgaaccattcgaaaatcccgaatcgttgcccctatacgcacaaaacccccgccagctcatactgacgggggttg

SEQ ID NO: 29270 - DNA, 109 bp, Unknown
  Description of Unknown: RightRegion for integrase B3271 sequence
tccaccaaaaaagcactgtacttcgtaggaagtatggtgcttttctttttgctttcttagaggttgcatcgagaatcagccaaatgcctgattttgcaggcgcatggac

SEQ ID NO: 29271 - DNA, 260 bp, Unknown
  Description of Unknown: RightRegion for integrase B3272 sequence
aagagccctgacggctttaccattgagatatacccgcgcatcccaaaatccgaaaaatgaaaagagagggccgtttcggtcctctctttcatatagttatcctgtttagccatactcatagggactgcccacgatgtcacccaaaattgctcctaacatggctgtttcctcctttacctatgatgccgcttctggaaatcagcttcgatctgctctttccactctgcgccgacggatgccgggcagtctgcctgccgcat

SEQ ID NO: 29272 - DNA, 260 bp, Unknown
  Description of Unknown: RightRegion for integrase B3273 sequence
aagagccctgatggcttcaccattgaaatatacccgcgcatcccaaaatccgaaaaatgaaaagagagggccgtttcggtcctctctttcttatagttatcctgtttagccatactcatagggactgcccacgatgtcacccaagattgctcctaacataaaatgccctccgtttttgtggtgcaggtcgcaaggtaagcaccagcacatactgacattgcatctttgcggcacgcgattcaacgctgttgccagcgatt

SEQ ID NO: 29273 - DNA, 260 bp, Unknown
  Description of Unknown: RightRegion for integrase B3274 sequence
gaggttcggacgaacacctattttttcagcggcggtttcgccgtgacgtgttcgctctgatccgcaacagaaacgcgccgtcttgaaagtgattccgagacggcgcgtttttgctatctgcatatccaattcctgtcctttgctcttctaaaatgattgcagaaagcgaaaggcgaaactattgtactttcaaaaatccggattcaaaggcatttgggaaaagaaagcgcttatcgccttgctcaaagctgacggtcaca

SEQ ID NO: 29274 - DNA, 260 bp, Unknown
  Description of Unknown: RightRegion for integrase B3275 sequence
aaaagccctgatggtttcatcatagagatatacccgcgcatcccaaaatccgaaaaatgaaaagagaggaccgaaacggccctctctttcttatagttatcctgtttagccatactcattagaataaacaggataactatatcagcaggggtctccgggctcctgctttctttctgttctgccgccgtttcgtgcataatgccgcaaaaagcgtcattctcgaaaactttttgccacaaattgccagattttacttgaca

SEQ ID NO: 29275 - DNA, 260 bp, Unknown
  Description of Unknown: RightRegion for integrase B3276 sequence
ggaagaccagatgatcacgattctgaaaaatgttcagccgggctgccagatcattattgattcggcgaacgggctgaagaactactaaattttttgctctgaaagacaaaaccggcagcggaaagatccatgtcagaaaggatccctctgctgccggtttttctcatttggagatgctatgatgataggaaaagttgatacgtagattttcggtattccgcccgtaaaacaagaaaaacaccgtccccgcagctctcagg

SEQ ID NO: 29276 - DNA, 260 bp, Unknown
  Description of Unknown: RightRegion for integrase B3277 sequence
aagagccctgatggtttcaccattgagatatacccgcgcatcccaaaatccgaaaaatgaaaagagagggccgtttcggtcctctctttcttatagttatcctgtttagccatactcgtaggggctgcctaccatatcgcccaaaattgctcctaacataaaataccctccgtatctgtggtgtttcgtctttctgacaaaaggataccacaaaccggagggcaaaaggtcaacgggcagacgacaaatcacgcacccag

SEQ ID NO: 29277 - DNA, 260 bp, Unknown
  Description of Unknown: RightRegion for integrase B3278 sequence
aagagccctgatggcttcaccattgaaatatacccgcgcatcccaaaatccgaaaaatgaaaagagagggccgtttcggtcctctctttcttatagttatcctgtttagccatactcgttgtacgaaatcattataccgattctctgcccaatttgcaaaggtacttttgcacaagaaatctgcgggtcattctgcgcatattgcacgatgcaaactttgtggaaaatcacctttgaagccgtggagttgtttgtgttat

SEQ ID NO: 29278 - DNA, 260 bp, Unknown
  Description of Unknown: RightRegion for integrase B3279 sequence
tttatcacgatgataggtaatgtgttcgttttgttttgtccgtttccgggcctgaaatagaaataaattaagtctaatttgtgaacaaatagaacatcattagagacccattacaacaaaataagcggcgggctacccctattttcaggggaaagcccgccgctttaattatggattatttaacttgccggtaatttgccggtaaattgccagtcagttgtcttttccgatctgcttaataacctgatccgcgccggtcg

SEQ ID NO: 29279 - DNA, 109 bp, Unknown
  Description of Unknown: RightRegion for integrase B3280 sequence
aaaagtcctgatggtttcaccatcgagatatacccgcgcatcccaaaatccgaaaaatgaaaagagagggccgtttcggtcctctctttcttatagttatcctgtttag

SEQ ID NO: 29280 - DNA, 260 bp, Unknown
  Description of Unknown: RightRegion for integrase B3281 sequence
aaaagtcctgatggtttcaccatcgagatatacccgcgcatcccaaaatccgaaaaatgaaaagagagggccgtttcggtcctctctttcttatagttatcctgtttagctatactcatagggactgcccacgatgtcacccaagattgctcctaacatggctgtttcctcccttacttatgatgccgcttctggaaatcagcttcgatttgttctttccactctgcgccgatggacgcgcagcagggtgcttcccgcat

SEQ ID NO: 29281 - DNA, 260 bp, Unknown
  Description of Unknown: RightRegion for integrase B3282 sequence
aagagccctgatggcttcaccattgaaatatacccgcgcatcccaaaatccgaaaaatgaaaagagagggccgtttcggtcctctctttcttatagttatcctgtttagccatactcattaggacaaacaggataactatatcagcaggggcctccgggctcctgctttctttctgctctgctgcggtttctggcataatgccgcaaaaagcgtcattctcgaaaactttttgccacaaattgccagattttacttgaca

SEQ ID NO: 29282 - DNA, 260 bp, Unknown
  Description of Unknown: RightRegion for integrase B3283 sequence
aaaagtcctgatagtttcaccattgagatatacccgcgcatcccaaaatccgaaaaatgaaaagagagggccgcttcggtcctctctttcttatagttatcctgtttatccatactcatataatcacacccctctacaaattccgattcataaaatccccgtcagaagagccaccggtgctcaaagttccgtctggcctaaccgtcagtatcttggagagcgttcccgccgctcccagaaacaccacggaaaagcccgtg

SEQ ID NO: 29283 - DNA, 97 bp, Unknown
  Description of Unknown: RightRegion for integrase B3284 sequence
aagattttaatttccatggacaaaatgcacaaagtcaaacgacaccccggaaaaaggtaaaaaatccggcatttcagcaaaaatttatctgctgtgt

SEQ ID NO: 29284 - DNA, 260 bp, Unknown
  Description of Unknown: RightRegion for integrase B3285 sequence
aagagccctgatggtttcaccattgagatatacccgcgcatcccaaaatccgaaaaatgaaaagagagggccgtttcggtcctctctttcttatagttatcctgtttagccatactcatagggactgcccacgatgtcacccaagattgctcctaacatggctgtttcctcccttacctatgatgccgcttctgaaaatcagcttcgatttgttctttccactctgcgccgacggacgcgcagcagggtgcttcccgcat

SEQ ID NO: 29285 - DNA, 196 bp, Unknown
  Description of Unknown: RightRegion for integrase B3286 sequence
aaaagccctgatggtttcatcatagagatatacccgcgcatcccaaaatccgaaaaatgaaaagagaggaccgaaacggccctctctttcttatagttatcctgtttagccatactcatagggactgcccacgatgtcacccaagattgctcctaacatggctgtttcctcccttacctatgatgccgcttctgga

SEQ ID NO: 29286 - DNA, 260 bp, Unknown
  Description of Unknown: RightRegion for integrase B3287 sequence
aagagccctgatggcttcaccattgaaatatacccgcgcatcccaaaatccgaaaaatgaaaagagagggccgtttcggtcctctctttcttatagttatcctgttcagccatactcatagggactgcccacgatgtcacccaagattgctcctaacatggctgtttcctcccttacctatgatgccgcttctggaaatcagcttcgatttgttctttccactctgcgccgatggacgcgcagcagggtgcttcccgcat

SEQ ID NO: 29287 - DNA, 260 bp, Unknown
  Description of Unknown: RightRegion for integrase B3288 sequence
cggcggatttgccgtcagatgtgttctctgatacaaaaacagaacgccgtttcagtgtaaaagctgaagcggcgtttttctgtctttaaaagattttttatccacatattcgatttttgggtaagctccgtttataatgaaatcatcaaaatgaaacggaggtagcagaatgagaaatccgagatatcacttatatttatcacccgatgaacggcgtacagtcatcaacagccttattgatttgagaaatgatctcatct

SEQ ID NO: 29288 - DNA, 260 bp, Unknown
  Description of Unknown: RightRegion for integrase B3289 sequence
aagagtcctgacggctttaccattgagatatacccgcgcatcccaaaatccgaaaaatgaaaagagagggccgtttcggtcctctctttcttatagttatcctgtttagccatactcatagggactgcccacgatgtcacccaagattgctcctaacatggctgtttcctcccttacctatgatgccgcttctggaaatcagcttcgatttgttctttccactctgcgccgatggacgcgcagcagggtgcttcccgcat

SEQ ID NO: 29289 - DNA, 260 bp, Unknown; identical to SEQ ID NO: 29287
  Description of Unknown: RightRegion for integrase B3290 sequence

SEQ ID NO: 29290 - DNA, 260 bp, Unknown
  Description of Unknown: RightRegion for integrase B3291 sequence
aaaagtcctgatggtttcaccattgagatatacccgcgcatcccaaaatccgaaaaatgaaaagagagggccgtttcggtcctctctttcttatagttatcgtgtttagccatactcatagggactgcccacgatgtcacccaagattgctcctaacatggctgtttcctcccttacctatgatgccgcttctgaaaatcagcttcgatttgttctttccactctgcgccgatggacgcgcagcagggtgcttcccgcat

SEQ ID NO: 29291 - DNA, 260 bp, Unknown
  Description of Unknown: RightRegion for integrase B3292 sequence
aaaagtcctgatggtttcaccattgagatatacccgcgcatcccaaaatccgaaaaatgaaaagagagggccgtttcggtcctctctttcttatagttatcctgtttagccatactcatagggactgcccacgatgtcacccaagattgctcctaacatggctgtttcctcccttacctatgatgccgcttctggaaatcagcttcgatttgttctttccactctgcgccgatggacgcgcagcagggtgcctcccgcat

SEQ ID NO: 29292 - DNA, 260 bp, Unknown
  Description of Unknown: RightRegion for integrase B3293 sequence
aagagccctgatggcttcaccattgaaatatacccgcgcatcccaaaatccgagaaatgaaaagagagggccgtttcggtcctctctttcttatagttatcctgtttagccatactctatttgaacaacgacaatgaaaccgttctgcgcaaggtcatccgggaacacgatttgactttcacgccgctcttcaccgcaaagccccatgtgttcgtcagtgcatctagcccgttggcgcagaaaaaggctttgacactgga

SEQ ID NO: 29293 - DNA, 260 bp, Unknown
  Description of Unknown: RightRegion for integrase B3294 sequence
aaaagtcctgatggtttcaccattgagatatacccacgcatcccaaaatccgaaaaatgaaaagagagggccgtttcggtcctctctttcttatagttatcctgtttagccatactcatagggactgcccaagatgtcacccaaaattgctcctaacatggctgtttcctcctttacctatgatgccgcttctggaaatcagcttcgatctgctctttccactccgcaccgatagacgcgcagcagtgtgcctcccgcat

SEQ ID NO: 29294 - DNA, 260 bp, Unknown
  Description of Unknown: RightRegion for integrase B3295 sequence
ggttcagcttttgcgccgtcaagcgcactggatgatgatccgaaacttaaggaaacttgagtttcggatttttttgttggaaaaatcttgacattataccaggtataagccttatgcttactgtgtaaataaagaatatttccctaagccataggggtaaggaggagtgtatatgtcacgaaccatcaaagaagcagaggaactgacaaaggtgaccagtcagaatatccggtattatgaaaagcaggggctgctggctc

SEQ ID NO: 29295 - DNA, 260 bp, Unknown
  Description of Unknown: RightRegion for integrase B3296 sequence
aagagccctgatggcttcaccattgaaatatacccgcgcatcccaaaatccgaaaaatgaaaagagagggccgtttcggtcctctctttcttatagttatcctgtttagccatactcgtataattttcggatttcacagtttcggtcatgtcaggccgattcatattcataggcagacctccgtttccttgtaaccgggtgccggggcagaaagtgccagctttctgccccaaacgttcccgatgagttcagatttccga

SEQ ID NO: 29296 - DNA, 260 bp, Unknown
  Description of Unknown: RightRegion for integrase B3297 sequence
ccggcaccaagaattcttataacacagagtttgctttgcttttgtgttccaagaaaataaaacgtgcaaagagccgggggattccccggctctccgtttcaatgctccactatacagtcatagtaggtagccagcttattctcaacggcgtcgtcgtcattgaggaaagcctcggcgaggcacgcgaagaagtccgcgttgtctacgccgaatttttttgcgacgctgccgtaatcggaatacagcatgttcatcgtcgc

SEQ ID NO: 29297 - DNA, 260 bp, Unknown
  Description of Unknown: RightRegion for integrase B3298 sequence
aagagccctgatggtttcaccattgagatatacccgcgcatcccaaaatccgaaaaatgaaaagagagggccgtttcggtcctctctttcttatagttatcctgtttagccatactcatagggactgcccacgatgtcacccaagattgctcctaacatggctgtttcctcccttacctatgatgccgcttctggaaatcagcttcgatctgctctttccactctgcgccgatggacgcgcagcagggtgcttcccgcat

SEQ ID NO: 29298 - DNA, 260 bp, Unknown
  Description of Unknown: RightRegion for integrase B3299 sequence
aagagccctgatggcttcatcattgaaatatacccgcgcatcccaaaatccgaaaaatgaaaagagagggccgtttcggtcctctctttcttatagttatcctgtttagccatactcatagggactgcccacgatgtcacccaagattgctcctaacatggctgtttccgcccttacctatgatgccgcttctggaaatcagctttgatctgctctttccactctgcaccgatggacgcgcagcagggtgcttcccgcat

SEQ ID NO: 29299 - DNA, 260 bp, Unknown
  Description of Unknown: RightRegion for integrase B3300 sequence
aagagccctgatggcttcacaattgaaatatacccgcgcatcccaaaatccgaaaaatgaaaagagagggccgtttcggtcctctctttcttatagttatcctgtttagctatactcatagggactgcccacgatgtcacccaagattgctcctaacatggctgtttcctcccttacctatgatgccgcttctggaaatcagcttcgatttcctctttccactctgcgccgatggtgtcctgctccagcccgcccatgga

SEQ ID NO: 29300 - DNA, 260 bp, Unknown
  Description of Unknown: RightRegion for integrase B3301 sequence
aataacgctcccgacgattttgagattacgctatatccgaaaataccgaaatctgattaacggtcccggcggaggctttacggcttccgccgttttctcattgataacctgttgggttagacgaatacgctccaataggttatcaatgatattccgtgccgctgtttgcgtcctttgtcttttgcgccgactctcggcgttgtaattcggctctgcaggtccgctcgtcgtagtcgagcaaaacgctctcgtagtcgtcc

SEQ ID NO: 29301 - DNA, 260 bp, Unknown
  Description of Unknown: RightRegion for integrase B3302 sequence
aaaagtcctgatggtttcaccattgagatatacccgcgcatcccaaaatccgaaaaatgaaaagagagggccgtttcggtcccctctttcttatagttatcctgtttagccatactcatagggactgcccacgatgtcacccaaaattgctcctaacatggctgtttcctcccttacctatgatgccgcttctggaaatcagcttcgatctgttctttccactctgcgccgatggacgcgcagcagggtgcttcccgcat

SEQ ID NO: 29302 - DNA, 239 bp, Unknown
  Description of Unknown: RightRegion for integrase B3303 sequence
aataatgctcccgacgattttgagattacgctatatccgaaaataccgaaatcttattaacggtcccggcggaggctttacggcttccgccgttttctcattgataacctgttgggttagaagaactatctcacttggaaatggtcggaaccatcgtatatcagttgacacgtgaccttgactctgagcttgtaaaggacagcggattcccgggcatgaaggtactggaatttgccttt

SEQ ID NO: 29303 - DNA, 109 bp, Unknown
  Description of Unknown: RightRegion for integrase B3304 sequence
catcggtcaaccagactaaagccatctgaggaagctcaggtggcttttctgtttgtatgattccgcgcggaaaaactattataatagagcgaacccggaaagtccgcag

SEQ ID NO: 29304 - DNA, 109 bp, Unknown; identical to SEQ ID NO: 29303
  Description of Unknown: RightRegion for integrase B3305 sequence

SEQ ID NO: 29305 - DNA, 260 bp, Unknown
  Description of Unknown: RightRegion for integrase B3306 sequence
aaaagtcctgatggtttcaccatcgagatatacccgcgcatcccaaaatccgaaaaatgaaaagagagggccgtttcggtcctctctttcttatagttatcctgtttagccatactcgtcaaagctggcgataaagtcggccctgtcatcggagaacatccccgtcaggcggttcaggatggtgggaaagttcgtcatcagcaccggcacatcccggtcaagcagggcgttggcgatacaaccggcgaaaaaggacttgc

SEQ ID NO: 29306 - DNA, 260 bp, Unknown
  Description of Unknown: RightRegion for integrase B3307 sequence
ggcgtaccattagtttttatcaccgcattcgggatgctcaagattcaggtgcggcgatgacaataggcccttcccattttggggagggcctattgctttactttttgtacatcccttgcaggaccccgacttcttctgcgtcgccgattgcccgcttgtggaggtattcgtagagggccttcatcccttcgggcggctcccctttttgtcgtttgtacgcctcgatgtgccgcacgacatccttgtgcaggaggttcata

SEQ ID NO: 29307 - DNA, 260 bp, Unknown
  Description of Unknown: RightRegion for integrase B3308 sequence
aagagcccggatggcttcaccattgaaatatacccgcgcatcccaaaatccgaaaaatgaaaagagagggccgtttcggtcctctctttcttatagttatcctgtttagccatactcgtaggggctgcctaccatatcgcccaaaattgctcctaacataaaataccctccgtatctgtggtgtttcgtctttctgacaaaaggataccacaaaccggagggcaaaaggtcaacgggcagacgacaaatcacgcacccag

SEQ ID NO: 29308 - DNA, 260 bp, Unknown
  Description of Unknown: RightRegion for integrase B3309 sequence
aaaagtcctgatggtttcaccattgagatatatccgcgcatcccaaaatccgaaaaatgaaaagagagggccgtttcggtcctctctttcttatagttatcctgtttagccatactcatagggactgcccacgatgtcacccaagattgctcctaacatggctgtttcctcccttacctatgatgccgcttctgaaaatcagcttcgatttgttctttccactctgcgccgatggacgcgcagcagggcgcttcccgcat

SEQ ID NO: 29309 - DNA, 260 bp, Unknown
  Description of Unknown: RightRegion for integrase B3310 sequence
aaaagtcctgatggtttcaccattgagatatacccgcgcattccaaaatccgaaaaatgaaaagagagggccgtttcggtcctctctttcttatagttatcctgtttagccatactcaatcactctgcctactgatagaaactatctttgggcacagaagaatccggacattgttaagcttgttggaaatagtggttgctctcttgttgccgtgttgaataccgctaatatctatgggcctcgtgaattcacccctaacg

SEQ ID NO: 29310 - DNA, 260 bp, Unknown
  Description of Unknown: RightRegion for integrase B3311 sequence
aagagccctgacggctttaccattgagatatacccgcgcatcccaaaatccgaaaaatgaaaagagagggccgtttcggtcctctctttcttatagttatcctgtttagccatactcgatgatcttgctaatgataggatcaatgtcctcacaagtcggattcacaatccaaatatcatcgttctggtagatgcggttctcgatttgaatatcgcgaggcttgacaccatactctaagcagaaaagcgcatcatagatga

SEQ ID NO: 29311 - DNA, 260 bp, Unknown
  Description of Unknown: RightRegion for integrase B3312 sequence
acaataaaagtaaacctaataggtatcaatccaagcaatactatagcttcagataaataggaactttaatacatttatctgaagctatttctatgtcagataaggtcgcagttttatccaaacgtcctgcatctataaaaagtatctataatatagatttaaaaatatcagaaactagaactcctataatatcaagaagtgctgaaaattttaaagactattttaatatcttgtggaaggagattgattctagtgaaaca

SEQ ID NO: 29312 - DNA, 260 bp, Unknown
  Description of Unknown: RightRegion for integrase B3313 sequence
aaaagtcctgatggtttcaccattgagatatacccgcgcatcccaaaatccgaaaaatgaaaagagagggccgtttcggtcctctctttcttatagttatcatgtttagccatactcgttcagataccgggcaatctgattgaggttgccgccgatcctgccgtactcggctgtcagcttcccgacagcggaaagcaactcgtcattgaccgacgacacatggacaaccgggcgtatggtcgcccgccgtatcgcctgcc

SEQ ID NO: 29313 - DNA, 161 bp, Unknown
  Description of Unknown: RightRegion for integrase B3314 sequence
aagagccctgatggcttcaccattgaaatatacccgcgcatcccaaaatccgaaaaatgaaaagagagggccgtttcggtcctctctttcttatagttatcctgtttagccatactcatagggactgcccacgatgtcacccaagattgctcctaacatgg

SEQ ID NO: 29314 - DNA, 260 bp, Unknown
  Description of Unknown: RightRegion for integrase B3315 sequence
aaaagtcctgatggtttcaccattgagatatacccgcgcatcccaaaatccgaaaaatgaaaagagagggccgtttcggtcctctctttcttatagttatcctgtttagccatactcatagggactgcccacgatgtcacccaagattgctcctaacatggctgtttcctcccttacctatgatgccgcttctgaaaatcagcttcgatttgttctttccactctgcgccgatggacgcgcagcagggtgcttcccgcat

SEQ ID NO: 29315 - DNA, 109 bp, Unknown
  Description of Unknown: RightRegion for integrase B3316 sequence
cgctggggtcacccggataacttctcactgaagatctatccgcgtgtcacccctgcgtgaccaacctctaaaattcattgattttccatggaatttcatcatctctacc

SEQ ID NO: 29316 - DNA, 260 bp, Unknown
  Description of Unknown: RightRegion for integrase B3317 sequence
aagagccctgatggcttcaccattgaaatatacccgcgcatcccaaaatccgaaaaatgaaaagagagggccgtttcggtcctctctttcttatagttatcctgtttagccatactcatagggactgcccacgatgtcacccaagattgctcctaacatggctgtttcctcccttacctatgatgccgcttctggaaatcagcttcgatttgttctttccactctgcgccgatggacgcgtagcagggtgcctcccgcat

SEQ ID NO: 29317 - DNA, 170 bp, Unknown
  Description of Unknown: RightRegion for integrase B3318 sequence
aaaagtcctgatggtttcaccattgagatatacccgcgcatcccaaaatccgaaaaatgaaaagagagggccgtttcggtcctctctttcttatagttatcctgtttagccatactcatagggactgcccacgatgtcacccaagattgctcctaacatggctgtttcct

SEQ ID NO: 29318 - DNA, 169 bp, Unknown
  Description of Unknown: RightRegion for integrase B3319 sequence
aagagccctgatggcttcaccattgaaatatacccgcgcatcccaaaatccgaaaaatgaaaagagagggccgtttcggccctctctttcttatagttatcctgtttagccatactaacacgtcaaccttactgcaagcctacactcagcctacaattttgtaggaatc

SEQ ID NO: 29319 - DNA, 260 bp, Unknown
  Description of Unknown: RightRegion for integrase B3320 sequence
aaaagtcctgatggtttcacaatcgagatatacccgcgcatcccaaaatccgaaaaatgaaaagagagggccgtttcggtcctctctttcttatagttatcctgtttagccatactcaatagatgttactaattatagagttgcggaagagagtgaaatcggattggagagtaagacgccgactgttgaaatagtatcgaagtaaataaccgcattatttaatacgaaatcacagtggtaggttccagtttgacagataa

SEQ ID NO: 29320 - DNA, 186 bp, Unknown
  Description of Unknown: RightRegion for integrase B3321 sequence
aaaagtcctgatggtttcaccattgagatatacccgcgcatcccaaaatccgaaaaatgaaaagagagggccgtttcggtcctctctttcttatagttatcctgtttagccatactcattaggataaacaggataactatatcagcaggggcctccgggctcctgctttctttctgttctgccgcc

SEQ ID NO: 29321 - DNA, 260 bp, Unknown
  Description of Unknown: RightRegion for integrase B3322 sequence
aagagccctgatggcttcaccattgagatatacccgcgcatcccaaaatccgaaaaatgaaaagagagggccgtttcggccctctctttcttatagttatcctgtttagccatactcatagggactgcccacgatgtcacccaagattgctcctaacatggctgtttcctcccttacctatgatgccgcttctggaaatcagcttcgatttgttctttccactctgcgccgatggacgcgcagcagggtgcttcccgcat

SEQ ID NO: 29322 - DNA, 260 bp, Unknown
  Description of Unknown: RightRegion for integrase B3323 sequence
aaaagccctgatggtttcatcatagagatatacccgcgcatcccaaaatccgaaaaatgaaaagagagggccgtttcggtcctctctttcttatagttatcctgtttagccatactcatagggactgcccacgatgtcacccaagattgctcctaacatggctgtttcctcccttacccgtgatgccgcttctggaaatcagcttcgatttgttctttccactctgcgccgatggacgcgcagcagggtgcctctcgcat

SEQ ID NO: 29323 - DNA, 260 bp, Unknown
  Description of Unknown: RightRegion for integrase B3324 sequence
cgatggagcggaaatccagataattttgaagttgttctcttcccaaagttaccgaaatagcgttactttttattactgatattgtgcgtgtgcctaagaattagcatgcgcatgatatcagttatataatcgaataaaagcagcggtagggaagtgctcccactatgccgctgctttttcttattgtttaactaaattttcttcgtgtagtctaaacagatccaacccgctttcgattttagaaacccccatttattaca

SEQ ID NO: 29324 - DNA, 260 bp, Unknown
  Description of Unknown: RightRegion for integrase B3325 sequence
aaaagtcccgatggtttcacaattgagatatatccgcgcatcccaaaatccgaaaaatgaaaagagagggccgtttcggtcctctctttcttatagttatcctgtttagccatactcatagggactgcccacgatgtcacccaaaattgctcctaacatggctgtttcctcctttacctatgatgccgcttctggaaatcagcttcgatctgctctttccactccgcaccgatagacgcgcagcagggtgcctcccgcat

SEQ ID NO: 29325 - DNA, 260 bp, Unknown
  Description of Unknown: RightRegion for integrase B3326 sequence
aagagccctgacggctttaccattgagatatacccgcgcatcccaaaatccgaaaaatgaaaagagagggccgtttcggtcctctctttcttatagttatcctgtttagccatactctataagaatttgcaatacattttagatgaaaaagtgagacactatatccagagaggcttttaggtcgatacatatgaatagtggtggttatcacggtgataaccaccaccatcaccccgtaacgatcagtgccatcagataaa

SEQ ID NO: 29326 - DNA, 260 bp, Unknown
  Description of Unknown: RightRegion for integrase B3327 sequence
aaaagtcctgatggtttcaccattgagatatacccgcgcatcccaaaatccgaaaaatgaaaagagagggccgtttcggtcctctctttcttatagttatcctgtttagccatactcgtaggggctgcctaccatatcacccaaaattgctcccaacatggtcgtttcctcctttactgctgatgccgcttctggaagtcggcttcgatctcctctttccactctgcgccgatggacgccggacagtctgcctgccgcat

SEQ ID NO: 29327 - DNA, 260 bp, Unknown
  Description of Unknown: RightRegion for integrase B3328 sequence
aagagccctgatggcttcaccattgaaatatacccgcgcatcccaaaatccgaaaaatgaaaagagagggccgtttcggccctctctttcttatagttatcctgtttagccatactccttcgtgtttccgaagatgaaaaaataaaagaactccccgccatgcagctgcacagcggggagaaagagggaggaaaatttcagattcagagggccgaatagccgaagctgttcaccagcgcgtcgatgggctggccagcctt

SEQ ID NO: 29328 - DNA, 260 bp, Unknown
  Description of Unknown: RightRegion for integrase B3329 sequence
catcggtcaaccagactaaagccatctgaggaagctcaggtggcttttctgtttgtatgattccgcgcggaaaaactattataatagagcgaacccggaaagtccgcaggactttccgggttcgccttttcacgggaaatataaatttacagaatagtaatgcggcctgcgccgtaaggctgctcatagttgagcaggtagccggggtaagctgtcagcgggctgttggcgctggacaggtgcggcagacccgcagcatc

SEQ ID NO: 29329 - DNA, 260 bp, Unknown
  Description of Unknown: RightRegion for integrase B3330 sequence
aagagccctgacggctttaccattgagatatacccgcgcatcccaaaatccgaaaaatgaaaagagagggccgtttcggtcctctctttcttatagttatcctgtttagccatactcgtaagtagcgcccacttcattgaaataccgtacatcatcatggaatgagtatttgttgaacagaaccataccatgcgccaacaatccccaaaaagtagcactgcacagtactgtttttaacaggctctcatttacctttagct

SEQ ID NO: 29330 - DNA, 260 bp, Unknown
  Description of Unknown: RightRegion for integrase B3331 sequence
cacacaacgcattgccacttaaaacctcaccaatggagaaaatttaatcaggaagtttaagtgtctggccgggatagatggtgttgctggtcaggttgttcagggtcttaatctccgtccagcggctaccgttacccagattggcctttgcaatgctccacagagagtcacccttcttgaccttgtaggtcacataggacggctcctgcacggtgtcagtggcaaccacagtaccaccgctctccgtggtaatgtatgcg

SEQ ID NO: 29331 - DNA, 260 bp, Unknown
  Description of Unknown: RightRegion for integrase B3332 sequence
tttatgtatgaatataagataaagagacagtatataaacttccctctaacaaatagttaatgattagttacctctacaaaaagtaaaatgattgttatttatttcattaattgaacagttaaaattattaatgtataattagctcaaagggagggatttataaatgaaaaaatttctaaagtggttttgtttgtttatgtgtataagtggtgcaataacgataccaattcaaatttcacagggaaatggatcaactgata

SEQ ID NO: 29332 - DNA, 237 bp, Unknown
  Description of Unknown: RightRegion for integrase B3333 sequence
aagagccctgatggcttcaccattgaaatatacccgcgcatcccaaaatccgaaaaatgaaaagagagggccgtttcggtcctctctttcttatagttatcctgtttagctatactcatagggactgcccacgatgtcacccaagattgctcctaacatggctgtttcctcccttacctatgatcgctttcgttggcaaaaggataccacaaaccggagggcaaaaggtcaacgggc

SEQ ID NO: 29333 - DNA, 109 bp, Unknown
  Description of Unknown: RightRegion for integrase B3334 sequence
catcggtcaaccagactaaagccatctgaggaagctcaggtggcttttctgtttgtatgattccgcgcggaaaaactattatagatagagtgaacccggaaagtccgca

SEQ ID NO: 29334 - DNA, 260 bp, Unknown
  Description of Unknown: RightRegion for integrase B3335 sequence
aaaagtcctgatggtttcaccattgagatatacccgcgcatcccaaaatccgaaaaatgaaaagagagggccgtttcggtcctctctttcttatagttatcctgtttagccatactcatagggactgcccacgatgtcacccaggattgctcctaacatggctgtttcctcccttacctatgatgccgcttctggaaatcagcttcgatttgttctttccactctgcgccgatggacgcgcagcagggtgcttcccgcat

SEQ ID NO: 29335 - DNA, 260 bp, Unknown
  Description of Unknown: RightRegion for integrase B3336 sequence
gcccctttgaatgcccctatccgatctgaacaaatgcatgtcattgtttggattgggtagggtcaatttatgcctgaactttttgcactgcaaggaggtcagaatttcctatagttcttgccttgagtcatctgcaaaataaagacaggacaaaatcaaaatacaaaacatgtaatcggccggattcgaacccctgatatgtcagcaaaccgctccccctcacttgctgttcatgaatgcctcttccacccgacagggta

SEQ ID NO: 29336 - DNA, 109 bp, Unknown
  Description of Unknown: RightRegion for integrase B3337 sequence
catcggtcaaccagactaaagccatctgaggaagttcaggtggcttttctgtttgtatgattccgcgcggaaaaaatattatagatagagcgaacccggaaagtccgca

SEQ ID NO: 29337 - DNA, 170 bp, Unknown; identical to SEQ ID NO: 29317
  Description of Unknown: RightRegion for integrase B3338 sequence

SEQ ID NO: 29338 - DNA, 260 bp, Unknown
  Description of Unknown: RightRegion for integrase B3339 sequence
aaaagccctgatggtttcaccattgagatatacccgcgcatcccaaaatccgaaaaatgaaaagagagggccatttcggtcctctctttcttatagttatcgtgtttagccatactcatagggactgcccacgatgtcacccaagattgctcctaacatggctgtttcctcccttacctatgatgccgcttctggaaatcagcttcgatttgttctttccactctgcgccgatggacgcgcagcagggtgcttcccgcat

SEQ ID NO: 29339 - DNA, 260 bp, Unknown
  Description of Unknown: RightRegion for integrase B3340 sequence
tgcttccgtcttctcaatggactggaggtcacagaaaaaatagaaaggacacggagataatgggaaaacgaaagcagcccttcggctataaaatgaagctcggcgagatcgtgccgcagccgcaggaggcggaaacggtgcggagcatctacctgcaataccttgctggtgtctccttcaagcagcttgccgaacagcttcagacagaggatgttccctacgatgaggacaagtcctggaacaaaaatatggtggcgcga

SEQ ID NO: 29340 - DNA, 260 bp, Unknown
  Description of Unknown: RightRegion for integrase B3341 sequence
catcggtcaaccagactaaagccatctgaggaagctcaggtggcttttctgtttgtatgattccgcgcggaaaaactattatagatagagcgaacccggaaagtccgcaggactttccgggttcgccttttcacgggaaatataaatttacagaatggtgatgcggcctgcgccgtagggctgctcgtagttgagcaggtagccggggtatgcggccagcgggctgttggcgctggacaggtgcggcagacccgcagcat

SEQ ID NO: 29341 - DNA, 260 bp, Unknown
  Description of Unknown: RightRegion for integrase B3342 sequence
aaaagtcctgacggtttcaccattgagatatacccacgcatcccaaaatccgaaaaatgaaaagagagggccatttcggtcctctctttcttatagttatcctgtttagccatactcatagggactgcccacgatgtcacccaaaattgctcctaacatggctgttttctcctttacctatgatgccgcttctggaaatcagcttcgatttgttctttccactctgcgccgatagacgcgcagcagggtgcttcccgcat

SEQ ID NO: 29342 - DNA, 260 bp, Unknown
  Description of Unknown: RightRegion for integrase B3343 sequence
aagagccctgatggcttcaccattgagatatacccgcgcatcccaaaatccgaaaaatgaaaagagagggccgtttcggccctctctttcttatagttatcctgtttagccatactcgtcaaacttgcatcactatatgtggaacccaaagttgtaatcgaatagtcccatgcatttgtgactttgttattcgtcactgtcatataaaaatatgcatgaatcaccactcccttatacgaaaccttccaagaattcgacga

SEQ ID NO: 29343 - DNA, 237 bp, Unknown
  Description of Unknown: RightRegion for integrase B3344 sequence
aagagccctgatggcttcatcattgaaatatacccgcgcatcccaaaatccgaaaaatgaaaagagagggccgtttcggtcctctctttcttatagttatcctgttcagccatactcatagggactgcccacaatgtcacccaagattgctcctaacatggctgtttcctcccttacctatgatcgctttcgttggcaaaaggataccacaaaccggagggcaaaaggtcaacgggc

SEQ ID NO: 29344 - DNA, 260 bp, Unknown
  Description of Unknown: RightRegion for integrase B3345 sequence
acaataaaggtaaacctaataggtatcaattcaagtaatactatagcttcaggtaaataggaactttaatacatttatctgaatctatttctatgtcagataaggttgcagttttatccaaacgccctgcatctataaaaaacatctataacataaatttaaaaatatcagaaactagaactcctataatatcaagaagtgctgaaaattttaaagactattttaatatcttgtggaaggagattgattctagtgaaaca

SEQ ID NO: 29345 - DNA, 260 bp, Unknown
  Description of Unknown: RightRegion for integrase B3346 sequence
aaaagtcctgatggtttcaccattgagatatatccgcgcatcccaaaatccgaaaaatgaaaagagagggccgtttcggtcctctctttcttatagttatcctgtttagccatactcataagtgcgtcccagaatatccttttcgctgccatgttcaatcattttgatgttcgtaaacaggtcaacgacttcgcccaaccgacgtttatccagttccggacgcgcaaaattctttggcagaatatcttttaggcgcgcgt

SEQ ID NO: 29346 - DNA, 144 bp, Unknown
  Description of Unknown: RightRegion for integrase B3347 sequence
aagagccctgatggcttcaccattgaaatatacccgcgcatcccaaaatccaaaaaatgaaaagagagggccgtttcggtcctctctttcttatagttatcctgtttagccatactcattaaagctggcgataacgtcgggcct

SEQ ID NO: 29347 - DNA, 260 bp, Unknown
  Description of Unknown: RightRegion for integrase B3348 sequence
aataacgctcccgacgattttgagattacactatatccgaaaataccgaaatctgattaacggtcccggcggaggctttacggcttccgccgttttctcattgataacctgttgggttagacgagctcgggcattttgagatgattggagctatggtttatcagcttacgcgtaatctttcgattgaagagataaaaaagtccggattcgataaatattttgtcgaccatacaaccggaatctatcctatagcggcaagc

SEQ ID NO: 29348 - DNA, 260 bp, Unknown; identical to SEQ ID NO: 29314
  Description of Unknown: RightRegion for integrase B3349 sequence

SEQ ID NO: 29349 - DNA, 260 bp, Unknown
  Description of Unknown: RightRegion for integrase B3350 sequence
aagagccctgatggcttcaccattgaaatatacccgcgcatcccaaaatccgaaaaatgaaaagagagggccgtttcggtcctctctttcttatagttatcctgtttagccatactcatttcacaaaatccacaacaagtttagtgttgagaaaacccaatgtatactttactatttctgctttttgagcaaataatccatttgcgccagaatcaaagattgctccctgtggcgaataccgaaatcctgtttggctagat

SEQ ID NO: 29350 - DNA, 80 bp, Unknown
  Description of Unknown: RightRegion for integrase B3351 sequence
gtttctacattatttgtagaagccgggagttcggatacggggccgaatggtccaccataggaaaaccctcgcccaaaggc

SEQ ID NO: 29351 - DNA, 105 bp, Unknown
  Description of Unknown: RightRegion for integrase B3352 sequence
atcatagatcatggtgaaagaaaaggcggaaccccgatccttgaagtgtttctaaaataagggcattttattttgccattagttagtagcatggaagttcgactt

SEQ ID NO: 29352 - DNA, 260 bp, Unknown
  Description of Unknown: RightRegion for integrase B3353 sequence
aaaagtcctgatggtttcaccattgagatatacccgcgcatcccaaaatccgaaaaatgaaaagagagggccatttcggtcctctctttcttatagttatcctgtttagccatactcatagggactgcccacgatgtcacccaagattgctcctaacatggctgtttcctcccttacctatgatgccgcttctggaaatcagcttcgatctgctctttccactccgcaccgatggacgcgcagcagggtgcctcccgcat

SEQ ID NO: 29353 - DNA, 260 bp, Unknown
  Description of Unknown: RightRegion for integrase B3354 sequence
aagagccctgatggcttcaccattgaaatatacccgcgcatcccaaaatccgaaaaatgaaaagagagggccgtttcggtcctctctttcttatagttatcctgtttagccatactcaaacggactgccgaccatatcgcccaaaatggctcctaacataaaataccctccgtttttgtggtgcaggtcgcaaggtaagcaccagcacatactgacattgcatctttgcgacacgcgattcaacgctgttgccagcgatt

SEQ ID NO: 29354 - DNA, 260 bp, Unknown
  Description of Unknown: RightRegion for integrase B3355 sequence
aagagcccggatggcttcaccattgaaatatacccgcgcatcccaaaatccgaaaaatgaaaagagagggccgtttcggtcctctctttcttatagttatcctgtttagccatactcataagacaggccatcctcaaacgctttgttgtagatcgtgtgtatcttgccggtacacgcttccacgcgagatttgcagagttttttccctgccagcgcattgataaaggaagacttgcctgcgctcatggtagctgtcacca

SEQ ID NO: 29355 - DNA, 260 bp, Unknown
  Description of Unknown: RightRegion for integrase B3356 sequence
ggccgctggcatgccgcgccggatgatttcgagattacgatattcccccggctgtcctaaaaaattctctatgataacctcggtgtaccgaagaaatggcgcactgggaaatgattggctccatgatccttcaatgcatgaaaaacgccagtattgaagaaataaaggccgcggggctagccgggtattataccatgcatgatcacggcgtatacccagcggatcccaatggggtccccttcacggcgtcctatatccaa

SEQ ID NO: 29356 - DNA, 260 bp, Unknown
  Description of Unknown: RightRegion for integrase B3357 sequence
aagagccctgatggcttcaccattgaaatatacccgcgcatcccaaaatccgaaaaatgaaaagagagggccgtttcggtcctctctttcttatagttatcctgtttagccatactcatagggactgcccacgatgtcacccaagattgctcctaacatggctgtttcctcccttacctatgatgccgcttctggaaatcagcttcgatttgttctttccactctgcgccgatggacgcgcagcagggtgcttcccgcat

SEQ ID NO: 29357 - DNA, 260 bp, Unknown
  Description of Unknown: RightRegion for integrase B3358 sequence
gaggtccaccaaacaggcattggacgaacacatatttcttcagcggcggcttcgccgtgaagtgttcgctctgatccacaacaggaaagcgccgtcttggaagtgattccgagacggcgctttttatgatgtgaaggctcaaatggcgtgactattccttttttagagtagcacttcgtactttacagattaaatggttcgccaaaactaaaagctgaaacgctcgatcttccgtatcttcccaatcactatcatgtgct

SEQ ID NO: 29358 - DNA, 260 bp, Unknown
  Description of Unknown: RightRegion for integrase B3359 sequence
aaaagtcctgatggtttcaccattgagatatacccgcgcatcccaaaatccgaaaaatgaaaagagagggccgtttcggtcctctctttcttatagttatcctgtttagccatactcatagggactgcccacgatgtcacccaagattgctcctaacatggctgtttcctcccttacctatgatgccgcttctggaaatcggcttcgatttgttctttccactctgcgccgatggacgcgcagcagggtgcttcccgcat

SEQ ID NO: 29359 - DNA, 260 bp, Unknown
  Description of Unknown: RightRegion for integrase B3360 sequence
aaaagtcctgatggtttcaccattgagatatacccgcgcatcccaaaatccgaaaaatgaaaagagagggccgtttcggtcctctctttcttatagttatcctgtttagccatactcattaaagctggcgataaagtcggccctatcctcggagaacatccctgtcaggcggttcaggatggtgggaaagttcgtcatcagcacaggcacatcccggtcaagcagggcgttggcgatgcaaccggcgaaaaaggacttgc

SEQ ID NO: 29360 - DNA, 260 bp, Unknown
  Description of Unknown: RightRegion for integrase B3361 sequence
gagattatcgtcttgcgttatggtttctggctggccctcgatttgaccgttcaggtttgacctgggcggtcttttcgtttagggcggccgaggctcctcagcaaggctcttccagtcgattctcttcccgcaatcggggcagaacgaaaagcgagtcaaatctgtgctgcgccgccgatcggcgtactgcttaagcgtaaacaccttcgcatagaggctctcgcagctacaaagcgtggggtcgtcccgcaaactgcggt

SEQ ID NO: 29361 - DNA, 260 bp, Unknown
  Description of Unknown: RightRegion for integrase B3362 sequence
aaatcctacaccaaatccggcagcgacatgcacgtcaccctctaccccctcgcggattgatggttatacatttatttggtacgcatgaatgaatcccatctaaatgtaggttctatagcaagcggaaatccctcctggtgacaggagggatttctttattttgcgatatgctcataatacgccatgagcttctgttccggccccggtccgtccttatcgagcagaaacgcctttgccagcgcggcgtagaactccgggcg

SEQ ID NO: 29362 - DNA, 260 bp, Unknown
  Description of Unknown: RightRegion for integrase B3363 sequence
gcagaaaagttcgttttagctctccacaaccgcaccaaagagcttcaagctttggcttgaggctctttttctttgtcttggcttttaagttgtttattgccctgccaaaagcagagagatgattaccgctccggtatcagtgaggaaaaaaggccatatgaaggtttaccacaagctgtcaggcgaatttccatatgcctgcgtttccctgtggccctgaatctggctctaaaccgtgttcccaataaagcaagataaaa

SEQ ID NO: 29363 - DNA, 260 bp, Unknown
  Description of Unknown: RightRegion for integrase B3364 sequence
cgctggggacgtccggataatttctcactgaagatctatccgcgcgtaccgccagcgtaaccgcggcatctgaaaagccttgatttctcaagggaaaatctcatttccaacgtgctgggactgattcctccgttccaatatccgtcagtgttgccatacactcccggtacggcatggtataacgttgtgccagataccgcatgctggcgctcagttcaccatcgggaccgcccaatggtatgtcagccaggtaatccggc

SEQ ID NO: 29364 - DNA, 109 bp, Unknown
  Description of Unknown: RightRegion for integrase B3365 sequence
gtagatccaggagacttcacaattggcatattaccgcgcttgcctaagagaggcagttaattttatgcccatgtatgatatcctttcgggtcacattcatatgtcatta

SEQ ID NO: 29365 - DNA, 260 bp, Unknown
  Description of Unknown: RightRegion for integrase B3366 sequence
aaatcctacagcaaagccggcagcgacatgcgcgtcaccctgtaccccctcacagattgattccccgccttccaagcaaaaatcaaagaacccgtgtaattgagatcctcaattacacgggtttcattcatgcgtaccggctaattgcctattttgcaatatgctcataatacgccatgagcttgcgctccggccccgggccgtccttgtcgagcaggaacgccttggccagcgacgcgtaaaactccgggcggttgagt

SEQ ID NO: 29366 - DNA, 260 bp, Unknown
  Description of Unknown: RightRegion for integrase B3367 sequence
tccggcgataactttgaattgaccttatacccaaaactcccgtattcctccgataaataaaaacgccgtcccgttcttccggggcggctttctaattcccaacgtccgcagtattatttgtcacactctccggaattgtaatgctcgtcaagccgttgcaatcgtagaatgcaccccagtcgatactcgtcacgctttttggaatcataatgctttgtaacccggtacagccggagaaagcattatcgccgatcatcgtc

SEQ ID NO: 29367 - DNA, 260 bp, Unknown
  Description of Unknown: RightRegion for integrase B3368 sequence
cggcaagaaatcgaaatctactttatcggcggttatacccaaaagattgaccttatatagagccattcactcatacacaaacgcccgcactggcaagtcgaaaacgcttgctgatgcgggtattactttttgggaaagtgagctattacacgatggatacaggatcacggatcaaactggtacgcgagcatcgcggccttacacaacaaaaattgggtgagatgctcggatacggaaagagcagcgcgaaccgcattgca

SEQ ID NO: 29368 - DNA, 260 bp, Unknown
  Description of Unknown: RightRegion for integrase B3369 sequence
actttggatgtagcttttattttttgctttgtacagtgctttcccccatgttatagttaacatgggggaatttttttgcagaaaaagatacacataattttaccaaggattgaaggcagcaagaaaaccaagcacaaaattctaaaagtggctatatattgcagagtgagtaaaaacacaccggagcagttgcgaagccttgaaatacaggaaatatattttgaaaaattggtaagcgaaaatgctgattggaaacttta

SEQ ID NO: 29369 - DNA, 105 bp, Unknown
  Description of Unknown: RightRegion for integrase B3370 sequence
aagaaccccgccgccgaagaagcgacagggttcgattttggggagtctgagtgtgagtgagttgcttgcatcgacgacgttttctctgcccaaaagcctgtcacc

SEQ ID NO: 29370 - DNA, 260 bp, Unknown
  Description of Unknown: RightRegion for integrase B3371 sequence
aaatcctacaccaaatccggcagcgacatgcacgtcaccctctaccccctcgcggattgatggttatgcatttattcggtacgcatgaatgaatcccatttaaatgtagattttatagcaagtgaaaatccctcctggtgacaggagggatttctttattttgcgatatgctcataatacgccatgagcttctgttccggccccgggccgtctttatcgagcaggaacgcctttgccagcgcggcgtagaattccgggcg

SEQ ID NO: 29371 - DNA, 260 bp, Unknown
  Description of Unknown: RightRegion for integrase B3372 sequence
gtagatccaggagacttcacaattggcatattaccgcgcttgcctaagagaggcagttaattttatgcccatgtatgatatcctttcgggtcacattcatatgtcattataataacgtaatcgactatcctgccatgctcggcataatcgtgagcctcgtacagtacgcccggctggtctgcggatatcttcggggcaagcgctgacatcacgacgaagccttcgttgtgcagacgctccgtgagccgctcaaggaacgc

SEQ ID NO: 29372 - DNA, 260 bp, Unknown
  Description of Unknown: RightRegion for integrase B3373 sequence
tccttatccgccataagaaaaccctcacgtcaaggcacgcgacctgctccgctgcgttgattagttttgtgccctgtccgcagggctttctgtttcatataacgttcgcattatttttattaagtcatcaattatatgcctatcgtcatactcttcatccagaaatgatgtgatttttaagtctcctttacgagcgagaacacgattaaaatacatcataagaaagcttgaaattcctattttatcgtcagcctctacta

SEQ ID NO: 29373 - DNA, 260 bp, Unknown
  Description of Unknown: RightRegion for integrase B3374 sequence
gcagaaaagttcgttttagctctccacaaccgcaccaaagagcttcaagctttggcttgaggctctttttctttgtcttggcttttaagttgtttattgccctgccaaaagcagagagatgattaccgctccggtatcagtgaggaaaaaaggccatatgaaggtttaccacaagctgtcaggcgaatttccatatgcctgcgtttccctgtggccctgaatctggctctaaaccgtgttcccaataaagggcagtgtat

SEQ ID NO: 29374 - DNA, 260 bp, Unknown
  Description of Unknown: RightRegion for integrase B3375 sequence
gtagatccaggagacttcacaattggcatattaccgcgcttgcctaagagaggcagttaattttatgcccatgtatgatatcatttcgggtcacattcatatgtcattataataacgtaatcgactatcctgccctgctcggcataatcgtgagcctcgtacagtacgcccggctgttctgcggatatcttcggggcaagcgctgacatcacgatgaagccttcgttgtgcagacgttccgtgagccgctcaaggaacgc

SEQ ID NO: 29375 - DNA, 260 bp, Unknown
  Description of Unknown: RightRegion for integrase B3376 sequence
gaagatttctcgttggagctattccctaaactccccaagaataaaggcatatctgattaatgacatagtcaaaccaccaacgaattggtggtttgactttatcatttataaatattctatttctctccaatagcaatttaaaattttttccaaactttttcattaaccattggctccgggcaagatttgccggttacatcaaaatctttttatcctctcacacggtttttacagatatttcttataattcgtattcttca

SEQ ID NO: 29376 - DNA, 260 bp, Unknown
  Description of Unknown: RightRegion for integrase B3377 sequence
aaatcctacaccaaatccggcagcgacatgcacgtcaccctctaccccctcgcggattgaacattatacatttattcggtacgcatgaatgaatcccatctaaatataggttctatagcaagcggaaatccctccttgtgacaggagggatttctttattttgcgatatgctcataatacgccatgagcttctgctccggccccgggccgtctttatcgagcaggaacgcctttgccagcgcagcgtagaactccgggcg

SEQ ID NO: 29377 - DNA, 260 bp, Unknown
  Description of Unknown: RightRegion for integrase B3378 sequence
aaatcctacaccaaatccggcagcgacatgcacgtcaccctctaccccctcgcggattgacggttatacatttattcggtacgcatgaatgaatcccatctaaatatagattctatagcaagcggaaatccctcctggtggcaggagggatttctttatttcgcgatatgctcatagtattccatgagcttccgctccgggccggggccgtccttgtcgagcaggaacgctttggccagggcggcgtagaattccgggcg

SEQ ID NO: 29378 - DNA, 260 bp, Unknown
  Description of Unknown: RightRegion for integrase B3379 sequence
aaatcctattccaaagcaggcagcgatatgcgcgtgacgctatatccccttaccgattgattccgtgcgttccactatacttcgctatctactattacacggtacgcatgaatgcgacccgacagtcgatcagtgcaccgattgtctgtccttcgtcaagaagtaaatccaagaaaagaccacgccgcagcaaatcgctgcggcgtggctcaaatcggcagagaaccaccattttcggcagacgaaaacggtggttctct

SEQ ID NO: 29379 - DNA, 260 bp, Unknown
  Description of Unknown: RightRegion for integrase B3380 sequence
aaatcctattccaaagcaggcagcgatatgcgcgtgacactatatccccttaccgattgattccgtgcgttccactatacttcgctatctacaattgcaaggtacgcatgaatgaatcccatctaaatatagattctatagcaagcggaaatccctcctggtgacaggagggatttctttattttgcgatatgctcataatacgccatgagcttctgttccggccccgggccgtccttgtcgagcaggaacgcctttgcc

SEQ ID NO: 29380 - DNA, 260 bp, Unknown
  Description of Unknown: RightRegion for integrase B3381 sequence
aaaaccaaaaaattagatgattttgatttggtcctttatcccaaattgccaagaacgtaaaaagagcagcggaattatccgttgctctttttggcgtcattatctactataaatattcgtcgcccaaatatccaaccctgtacatgcagtcgtgtctctcctttttggtcgcacgcatgggtaatcctatgtatagggttagatacgtgtgcgacgaatatccaccatacaaacgccatgtagttcactttatcacaaga

SEQ ID NO: 29381 - DNA, 260 bp, Unknown
  Description of Unknown: RightRegion for integrase B3382 sequence
aaatcctacaccaaatccggcagcgacatgcacgtcaccctctaccccctcgcggattgatggttatacatttattcggtacgcatgaatgaatcccatctaaatatagattctatagcaagcggaaatccctcctggttacaggagggatttctttattttgcgatatgctcataatacgccatgagcttctgttccggccccgggccgtctttatcgagcagaaacgcctttgccagggcggcgtagaattccgggcg

SEQ ID NO: 29382 - DNA, 109 bp, Unknown
  Description of Unknown: RightRegion for integrase B3383 sequence
gtagaccccggagacttcacacttggcatattaccgcgcttgcctaagaaaggcagttaattttatacccatgtgtgttatcctttcgggtcacactcatatgtcatta

SEQ ID NO: 29383 - DNA, 260 bp, Unknown
  Description of Unknown: RightRegion for integrase B3384 sequence
aaatcctacagcaaagccggcagcgacatgcgcgtcaccctgtaccccctcacagattgatcccccgccttccaaacaaaaatcaaagaacccgtgtaattgaggtcctcaattacacgggtttcattcatgcgtaccggctaattgcctattttgcaatatgctcataatacgccataagcttccgctctggccccgggccgtccttgtcgagcaggaacgccttggccagcgacgcgtaaaactccgggcggttgagc

SEQ ID NO: 29384 - DNA, 260 bp, Unknown
  Description of Unknown: RightRegion for integrase B3385 sequence
tggagcggttcacccgatgattttgagataactatatatccgaaactgccgaaatcataaaaatatgcgaaatttctgccacatattagttagtcattgacatcatggtggtactaattcttccgtaccaccctcctccccgaaatgatccctaccgtctgaaaatttctccgaaagccgccttatagccctcccctctgccgctcaccgtaaacctcgccgcaaaacctttttccacgcccttgaaataaacagccagc

SEQ ID NO: 29385 - DNA, 260 bp, Unknown
  Description of Unknown: RightRegion for integrase B3386 sequence
aaatcctacaccaaatccggcagcgacatgcacgtcaccctctaccccctcgcggattgatggttgtacatttatttggtacgcatgaatgaatcccatctaaatatagattctatagcaagctgaaatccctcctggtgacaggagggatttctttattttgcgatatgctcataatacgccatgagcttctgttccggccccgggccgtctttatcgagcagaaacgcttttgccagcgcggcgtagaactccgggcg

SEQ ID NO: 29386 - DNA, 260 bp, Unknown
  Description of Unknown: RightRegion for integrase B3387 sequence
aaatcccactccaaatccggcagcgacatgcgcgtgaccctttaccccctcaccgattgatcccctgcccctccttttcgtatctacaattaaacgggccgcattcatgaatcccatttaaatgtagattttatagcaagtgaaaatccctcctggtcgcaggagggatttttttatttcgcaatatgttcatagtattccatgagctttttctccggccctgggccgtccttatccagcagaaaagctttcgccagatc

SEQ ID NO: 29387 - DNA, 260 bp, Unknown
  Description of Unknown: RightRegion for integrase B3388 sequence
ataacgatagttgttagctgttcggtgtttgttttttcagtaaaaatgccggaggcgtaatgcctccggcatttctcatttttccacaatctctactttgacatctatccagcccagatgcgcgtgtttgatagcgacagggaatactccgtcctttgggcggtagacttgtgcgccggacggggaaacataaacgacactcaaatcctccgtcttatatatcatcgcctcgccgctttgccccacagcccgcgttgtag

SEQ ID NO: 29388 - DNA, 260 bp, Unknown
  Description of Unknown: RightRegion for integrase B3389 sequence
aaatcctacaccaaatccggcagcgacatgcacgtcaccctctaccccctcgcggattgatggttatacatttattcggtacgcatgaatgaatcccatctaaatatagattctatagcaagcggaaatccctcctggtgacaggagggatttctttattttgcgatatgatcataatacgccatgagcttctgttccggccccgggccgtctttatcgagcagaaacgcctttgccagcgcggcgtagaactccgggcg

SEQ ID NO: 29389 - DNA, 260 bp, Unknown
  Description of Unknown: RightRegion for integrase B3390 sequence
aaaaaaagtcctgatggtttcaccatagagatatacccgcgcatcccaaaatccgaataatgaaaagagagggccgtttcggtcctctctttcttatagttatcctgtttagtcatactcatagggactgcccacgatgtcacccaagattgctcctaacataaaacgccctccgttttgtggtgtatcgctttcgttggcaaaaggataccacaaaccggagggcaaaaggtcaacgggcaggcgacaaatcacgcacc

SEQ ID NO: 29390 - DNA, 245 bp, Unknown
  Description of Unknown: RightRegion for integrase B3391 sequence
aaatcctacagcaaagccggcagcgacatgcgcgtcaccctgtaccccctcacagattgattccccgccttccaaacaaaaatcaaaaaacccgtgtaattgagatcctcaattacacgggtttcattcatgcgtaccggctaattgcctattttgcgatattctcataatactccatgagctttcgctctggccccgggccgtccttgtcgagcaggaacgccttggccagagcagcgtagaac

SEQ ID NO: 29391 - DNA, 252 bp, Unknown
  Description of Unknown: RightRegion for integrase B3392 sequence
aaatcctacaccaaatctggcagcgacatgcacgtcaccctctaccccctcgcggattgatggttatacatttattcggtacgcatgaatgaatcccatctaaatatagattctatagcaagcggaaatccctcctggtggcaggagggatttctttattttgcgatatgctcataatacgccatgagcttctgttccggccccgggccgtccttgtcgagcaggaacgccttggccagagcagcgtagaac

SEQ ID NO: 29392 - DNA, 260 bp, Unknown
  Description of Unknown: RightRegion for integrase B3393 sequence
aaatcctacaccaaatccggcagcgacatgcacgtcactctataccccctcgcggattgatggttatacatttattcggtacgcatgaatgaatcccatctaaatatagattctatagcaagcggaaatccctcctggtgacaggagggatttctttattttgcgatgtgctcataatacgccatgagcttctgttccggccccgggccgtctttgtcgagcaggaacgcctttgccagcgcggcgtagaactccgggcg

SEQ ID NO: 29393 - DNA, 109 bp, Unknown; identical to SEQ ID NO: 29364
  Description of Unknown: RightRegion for integrase B3394 sequence

SEQ ID NO: 29394 - DNA, 109 bp, Unknown
  Description of Unknown: RightRegion for integrase B3395 sequence
gtagaccccggagacttcacacttggcatattaccgcgtttgcctaagaaaggcagttaattttatacccatgtgtgttatcctttcgggtcacactcatatgtcatta

SEQ ID NO: 29395 - DNA, 260 bp, Unknown
  Description of Unknown: RightRegion for integrase B3396 sequence
ataacagttgttgttagctgttcggtgtttgttttttcagtaaaaatgccggaggcgtaaagcctccggcttttcttatttctccacattctccactttgacatctatccatcctagatgtgcgtgtttgatggcgacggggaatacaccctctttcgggcggtagacctgtgcgccggatagcgaaatgtggatgagggtcaaatcctccgtcctgtatatcattgcctcaccgctttgccccacggcccgcgcagtag

SEQ ID NO: 29396 - DNA, 260 bp, Unknown
  Description of Unknown: RightRegion for integrase B3397 sequence
aaatcctacaccaaatccggcagcgacatgcacgtcaccctctaccccctcgcggattgaacattatacatttattcggtacgcatgaatgaatcccatctaaatgtagattctatagcaagcggaaatccctcctggtgacaggagggatttctttattttgcgatatactcataatacgccatgagcttctgttccggccccggtccgtctttatcgagcaggaacgcctttgccagcgcagcgtagaactccgggcg

SEQ ID NO: 29397 - DNA, 260 bp, Unknown
  Description of Unknown: RightRegion for integrase B3398 sequence
gagatcattgtcttgcgttatggtttctggctggcactcgatttgaccgttcaggcttgacctgggcggtcttttcgtttagggcggccgaggctcctcagcaatgctcttccagtcgattctcttcccgcaatcggggcaaaataaaaagcgagtcaaatctgtgctgcgccgccgatcggcgtactgcttaagcgtaaacaccttcgcgtagaggctctcgcagctacaaagcgcggggtcgtcccgcaaactgcggt

SEQ ID NO: 29398 - DNA, 260 bp, Unknown
  Description of Unknown: RightRegion for integrase B3399 sequence
aagtctgtaaaatataatgaagttgataagactttttttatagaattttatcatccctaactgtatccctatgcagttaggaaacaatagcattacctgtagcatctgtataaaatgttgcttttttatggtctacatagtgtccaccaagacctgcttcttcaagttcttttattgaagcgttttccataagctgatgtgccattgtggctattatttctacatgtgccatttcctctgttcactttacttaaaggcaa

SEQ ID NO: 29399 - DNA, 260 bp, Unknown
  Description of Unknown: RightRegion for integrase B3400 sequence
cggcaagaaatcgaaatctactttatcggcggttatacccaaaggattgaccttacatagagccattcactcatacacaaacgcccgcactggcaagccgaaaacgcttgccgatgagggcattactttttgggaaagcgagcgattacacgatggatataggatcacggatcaaactggtacgcgagcatcgcggccttacacaacaaaaattgggtgagatgctcggatacggaaagagcagcgcgaaccgcattgca

SEQ ID NO: 29400 - DNA, 260 bp, Unknown
  Description of Unknown: RightRegion for integrase B3401 sequence
gtagatccaggagacttcacaattggcatattaccgcgcttgcctaagagaggcagttaattttatgcccatgtatgatatcctttcgggtcacattcatatgtcattataataacgtaatcgactatcctgccctgctcggcataatcgtgagcctcgtacagtacgcccggctggtctgcggatatcttcggggcaagcgctgacatcacgatgaagccttcgttgtgcagacgctccgtgagccgctcgaggaacgc

SEQ ID NO: 29401 - DNA, 260 bp, Unknown
  Description of Unknown: RightRegion for integrase B3402 sequence
gtagaccccggagacttcacacttggcatattaccgcgcttgcctaagaaaggcagttaattttatacccatgtgtgttatcctttcgggtcacactcatatgtcattataataatataatcggctatcctgccctgctcggcataatcgtgagcctcgtacagtacgcccggctggtctgcggatatcttcggggcaagtgctgacatcacgatgaagccttcgttgtgcagacgctccgcgagccgctcaaggaacgc

SEQ ID NO: 29402 - DNA, 260 bp, Unknown
  Description of Unknown: RightRegion for integrase B3403 sequence
gagattatcatcttgcgttacggtttctggctggccctcgatttgaccgttcaggtttgacctggacggtcttttcgtttagggcggccgaggctcctcagcaatgctcttccagtcgattctcttcccgcaatcagggcagaatgagaaacgggtcaaatccgtgctgcgccgtcgatcggcgtactgcttaagcgtgaacacctttacataaaggctcaggcagttacggaacactgggtcagcgcgtaaactacgat

SEQ ID NO: 29403 - DNA, 260 bp, Unknown; identical to SEQ ID NO: 29367
  Description of Unknown: RightRegion for integrase B3404 sequence

SEQ ID NO: 29404 - DNA, 260 bp, Unknown
  Description of Unknown: RightRegion for integrase B3405 sequence
aaatcctattccaaagcaggcagcgatatgcgcgtgacgctatatccccttaccgattgattccgtgcgttccactatacttcgctatctactattacacggtacccatgaatgcgacccgacagtcgatcagtgcaccgattgtctgtccttcgtcaagaagtaaatccaagaaaagaccacgccgcagcaaatcgctgcggcgtggctcaaatcggcagagaaccaccattttcggcagacgaaaacggtggttctct

SEQ ID NO: 29405 - DNA, 260 bp, Unknown
  Description of Unknown: RightRegion for integrase B3406 sequence
aaatcctattccaaagcaggcagcgatatgcgcgtgacgctatatccccttaccgattgattccgtgcgttccactatacttcgctatctactattacacggtacccatgaatgcgacccgaccgttgatcagtgcacggactgcctgtccttcgtcaagaagtaaattccagcccctatgaaaatgccccgtgccgcagcactgcggcacggggattttctgtctgcgctgcatttcgcctgcagacgcttttcacgcc

SEQ ID NO: 29406 - DNA, 260 bp, Unknown
  Description of Unknown: RightRegion for integrase B3407 sequence
tatttggtactgttattttcggacagtatcggatactctcgcctttatttttgttgctgatatgattcttcaaattgatttggggtttgctgtttaagacattcatgcggtcggtaatcgttataaaaatcaatatattctgatagactttcctctaattcggagacagtttcataaaaatgaaatttgaactgttcttttttaagcgaagcaaagaaagattccgccacagcattatcaagtggattgcctatatcgga

SEQ ID NO: 29407 - DNA, 260 bp, Unknown
  Description of Unknown: RightRegion for integrase B3408 sequence
aaatcctattccaaagcaggcagcgatatgcgcgtgacgctatatccccttaccgattgattccgtgcgttccactatacttcgctatctactattacacggtacacatgaagccgatccgacggttgatcagtgcacggactgcctgtccttcgtcaagaagtaaatcccagcccctatgaaaatgccccgtgccgcagcactgcggcacggggattttctgtctgcgctgcatttcgcctgcagacgcttttcacgcc

SEQ ID NO: 29408 - DNA, 109 bp, Unknown
  Description of Unknown: RightRegion for integrase B3409 sequence
gtagaccccggagacttcacgcttggcatattaccgcgcttgcctaagaaaggcagttaattttatacccatgtgtgttatcctttcgggtcacactcataagtcatga

SEQ ID NO: 29409 - DNA, 260 bp, Unknown
  Description of Unknown: RightRegion for integrase B3410 sequence
tggagcggttcacccgatgattttgagataactatatatccgaaactgccgaaatcataaaaatatgcgaaatttctgccacatattagttagtcattgacatcatggtggtactaattcttccgtaccaccctcctccccgaaatgatccctaccgtctgaaaatttctccgaaagccgccttatagctctcccctctgccgctcaccgtaaacctcgccgcaaaacctttttccacgcccttgaaataaacagccagc

SEQ ID NO: 29410 - DNA, 260 bp, Unknown
  Description of Unknown: RightRegion for integrase B3411 sequence
aaatcctattccaaagcaggcagcgatatgtgcctaaccctttaccccctcactgattgatttgccgccttcccttttcaggtctacaattacgtgggccacatgaatgaatcccatttaaatgtagattttatagcaagtgaaaatccctcctggtcgcaggagggatttctttattttgcgatatgctcgtaatactccatcagctttcgctccgggccggggccgtctttatcgagcaggaatgcctttgccagcgc

SEQ ID NO: 29411 - DNA, 260 bp, Unknown
  Description of Unknown: RightRegion for integrase B3412 sequence
aaatcctacaccaaatccggcagcgacatgcacgtcaccctctaccccctcgcggattgatggttatacatttatttggtacgcatgaatgaatcccatctaaatatagattctatagcaagcggaaatccctcctggtgacaggagggatttctttattttgcgatatgctcataatacgccatgagcttttgttccggccccgggccgtccttgtcgagcaaaaacgcctttgccagcgcggcgtagaactccgggcg

SEQ ID NO: 29412 - DNA, 260 bp, Unknown
  Description of Unknown: RightRegion for integrase B3413 sequence
ttttttgaaatatttgtactactttcttgtagttgcggttatatctgtgctatagtgtaagctgtaatgaaagatgaaaaacaggaacggcttgggccagtatacttctaaccgtgtattgcatctttttgactttaagcaacagtcgttaaacaggcttattttttataccttctaaacggaggcattctttagcttttctataaggaaagcagacaaattctaaacggatttaaaactacaaaggaaagcagaaagac

SEQ ID NO: 29413 - DNA, 260 bp, Unknown
  Description of Unknown: RightRegion for integrase B3414 sequence
gcagaaaagttcgttttagctctccacaaccgcaccaaagagcttcaagctttggcttgaggctctttttctttgtcttggcttttaagttgtttattgccctgccaaaagcagagagaggattaccgctccggtatcagtgaggaaaaaaggccatatgaaggtttaccacaagctgtcaggcgaatttccatatgcctgcgtttccctgtggctctgaatctggctctaaaccgtgttcccaataaagcaagataaaa

SEQ ID NO: 29414 - DNA, 260 bp, Unknown
  Description of Unknown: RightRegion for integrase B3415 sequence
gagatcatcgtcttgcgttatggtttctggctggcactcgatttgaccgttcaggcttgacctgggcggtcttttcgtttagggcggccgaggctcctcagcaatgctcttccagtcgattctctttccgcaatcagggcagaatgagaaacgggtcaaatccgtgctgcgccgtcgatcggcgtactgcttgagcgtgaacacctttacataaaggctcaggcagttacggaacgctgggtcagcgcgtaaactacgat

SEQ ID NO: 29415 - DNA, 260 bp, Unknown
  Description of Unknown: RightRegion for integrase B3416 sequence
aaatcctacaccaaatccggcagcgacatgcacgtcaccctctaccccctcgcagattgacggttatacatttattcggtacgcatgaatgaatcccatctaaatatagattctatagcaagctgaaatccctcctggtgacaggagggatttctttattttgcgatatgctcataatacgccatgagcttctgttccggccccgggccgtctttatcgagcagaaacgcttttgccagcgcggcgtagaactccgggcg

SEQ ID NO: 29416 - DNA, 260 bp, Unknown
  Description of Unknown: RightRegion for integrase B3417 sequence
aaatcctacaccaaatccggcagcgacatgcacgtcaccctataccccctcgcggattgatggttatacatttatttggtacgcatgaatgaatcccatttaaatgtagattttatagcaagtgaaaatccctcctggtgacaggagggatttctttattttgcgatatgctcataatacgccatgagcttctgttccggccccgggccgtctttatcgagcagaaacgcctttgccagcgcggcgtagaactccgggcg

SEQ ID NO: 29417 - DNA, 260 bp, Unknown
  Description of Unknown: RightRegion for integrase B3418 sequence
aaatcccactccaaatccggcagcgacatgcgcgtgacgctatatccccttaccgattgattccgtgcgttccactatacttcgctatctactattacacggtacgcatgaatgcataccatttaaatgttgattgcaggcaagcgaagatccctctcctgaccggagagggatctttttattttaccacatgctcatagtattccatgagcttgcgctccgggccggggccgtctttgtcggtcaaaaacgcctttgcc

SEQ ID NO: 29418 - DNA, 260 bp, Unknown
  Description of Unknown: RightRegion for integrase B3419 sequence
aaatcctacaccaaatccggcagcgacatgcacgtcaccctctaccccctcgcagattgacggttatacatttattcggtacgcatgaatgaatcccatctaaatatagattctatagcaagcggaaatccctcctggtgacaggagggatttctttattttgcgatatgctcataatacgccatgagcttctgttccggccccgggccgtctttatcgagcagaaacgcttttgccagcgcggcgtagaactccgggcg

SEQ ID NO: 29419 - DNA, 260 bp, Unknown
  Description of Unknown: RightRegion for integrase B3420 sequence
aagtcctacagcaaagccggcagcgacatgcgcgtcaccctgtaccccctcacagattagcccccttgccttccaaccgaaaagaaggaacccgtgtaactgaggtcctcaattacacgggttccattcatgcgtaccagctaattgtctatttcgcgatatgctcataatacgccatgagctttcgctccggccccgggccgtctttatcgagcaaaaacgccttggccagcgcggcgtagaactctgggcggttaagc

SEQ ID NO: 29420 - DNA, 260 bp, Unknown; identical to SEQ ID NO: 29397
  Description of Unknown: RightRegion for integrase B3421 sequence

SEQ ID NO: 29421 - DNA, 260 bp, Unknown
  Description of Unknown: RightRegion for integrase B3422 sequence
gccggacggctctggtgctgccccaaaagttgcggaactttcggtcatattctaagctgaccgatgaccagatgatgtgattatgaacgtgcgatttgtctatgtgagtgcagaccacaaaggcatgattgcccttggtaaaccgcttggcaaattcgacacccagacggttggcttcttccggtgtgatctctccgggtttgaatgactggcgcacatggtaagcgatcacatcgtccgccccgcgcacccgcccggtg

SEQ ID NO: 29422 - DNA, 260 bp, Unknown
  Description of Unknown: RightRegion for integrase B3423 sequence
gccaaaagaccgcaaagaacattgattctttgcggtcttttggcatttgtaacccactaaataacccacttatttttcaatcctcaaaaccttttcaaaaagttcatttacactgcttgccaattcttcatcttcaccctcaagcgcatgaccataaataccgaacgtatccatatccgcagagtgccccaccaagggcttgacctctccagctggcaatcgcttgaccacactcacaaacgtgtgccgcatctcataag

SEQ ID NO: 29423 - DNA, 260 bp, Unknown
  Description of Unknown: RightRegion for integrase B3424 sequence
ataacgatagttgttagctgttcggtgtttgtttttacagtaaaaatgccggaggcgtaatgcctccggcttttcttatttctccactttgacatctatccagcccagatgcgcgtgtttgatggcgacggggaatacaccctctttcgggcggtagacctgtgcgccggatagcgaaatgtggatgagggtcaaatcctccgtcctgtatatcatcgcctcaccgctttgccccacggcccgcgcagtagaccgcttga

SEQ ID NO: 29424 - DNA, 260 bp, Unknown
  Description of Unknown: RightRegion for integrase B3425 sequence
aaatcctacaccaaatccggcagcgacatgcacgtcaccctctaccccctcgcggattgatggttatacatttattcggtacgcatgaatgaatcccatttaaatgtagattttatagcaagtgaaaatccctcctggtgacaggagggatttctttattttgcgatatgctcataatacgccatgagcttctgttccggccccgggccgtctttatcgagcagaaacgcttttgccagcgcggcgtagaactccgggcg

SEQ ID NO: 29425 - DNA, 260 bp, Unknown
  Description of Unknown: RightRegion for integrase B3426 sequence
ataacgatagttgttagttgttcggtgtttgttttttcagtaaaaatgccggaggtgtaatgtctccggcatttcttattgccagtctataatgtgatacggctcataaaccattgcaggaatcgcggtaatcgtccccgttcgtccgtgctgcttcatccagcgcttgccatgccaaattgccttgctttccgtcttgtaagcctcgccgcctcttaatccaaggtcatagccattgtttgcggcaatgtccgctgtgt

SEQ ID NO: 29426 - DNA, 260 bp, Unknown
  Description of Unknown: RightRegion for integrase B3427 sequence
cgctggggacgtccggataatttctcactgaagatctatccgcgcgtaccgccagcgtaaccgcggcatctgaaaagccttgatttctcaagggaaaatctcatttccaacgtgctgggactgattcctccgttccaatatccgtcagtgtcgccatacactcccggtacggcatggtataacgttgtgccagataccgcatgctggcgctcagttcaccatcgggaccgcccaatggtatgtcagccaggcaatccggc

SEQ ID NO: 29427 - DNA, 109 bp, Unknown
  Description of Unknown: RightRegion for integrase B3428 sequence
gtagaccccggagacttcacgcttggcatattaccgcgcttgcctaagaaaggcagttaattttatacccatgtgtgttatcatttcgggtcacactcataagtcatga

SEQ ID NO: 29428 - DNA, 260 bp, Unknown
  Description of Unknown: RightRegion for integrase B3429 sequence
gagatcattgtcttgcgttatggtttctggctggcactcgatttgaccgttcaggcttgacctgggcggtcttttcgtttagggcggccgaggctcctcagcaatgctcttccagtcgattctcttcccgcaatcggggcagaacgaaaagcgagtcaaatctgtgctgcgccgccgatcggcgtactgcttaagcgtaaaaaccttcgcatagaggctctcgcagctacaaagcgtggggtcgtcccgcaaactgcggt

SEQ ID NO: 29429 - DNA, 260 bp, Unknown
  Description of Unknown: RightRegion for integrase B3430 sequence
gcagaaaagttcgttttggctctccacaactgcaccaaagagcttcaagctttggcttgaggctctttttctttgtcttggcttttaagttgtttattgccctgccaaaagcagagagatgattaccgctccggtatcagtgaggaaaaaaggccatatgaaggtttaccacaagctgtcaggcgaatttccatatgcctgcgtttccctgtggccctgaatctggctctaaaccgtgttcccaataaagcaagataaaa

SEQ ID NO: 29430 - DNA, 260 bp, Unknown; identical to SEQ ID NO: 28685
  Description of Unknown: RightRegion for integrase B3431 sequence

SEQ ID NO: 29431 - DNA, 260 bp, Unknown
  Description of Unknown: RightRegion for integrase B3432 sequence
aaaaccaaaaaattagatgattttgatttggtcctgtatcccaaattgccaagaacataaaaagagcagcggaattatccgttgctctttttggcatcattatctactataaatattcgtcgtccacatatccaaccctgtacatgcaatcgtgtctcttccttttggtcgcacgcatgggtaatcctatgtgtaaggcgcatgagccaccagctttccaaaatgattctcctctgccagctgcccaaatgcctgcacat

SEQ ID NO: 29432 - DNA, 260 bp, Unknown
  Description of Unknown: RightRegion for integrase B3433 sequence
gagattatcatcttgcgttacggtttctggctggccctcgatttgaccgttcaggtttgacctgggcggtcttttcgtttagggcggtcgaggctcctcagcaatgctcttccagtcgattctcttcccgcaatcagggcagaatgagaaacgggtcaaatccgtgctgcgccgtcgatcggcgtactgcttaagcgtgaacacctttacataaaggctcaggcagttacggaacgctgggtcagcgcgtaaactacgat

SEQ ID NO: 29433 - DNA, 260 bp, Unknown
  Description of Unknown: RightRegion for integrase B3434 sequence
aaatcctacaccaaatccggcagcgacatgcacgtcaccctctaccccctcgcggattgatggttatacatttattcggtacgcatgaatgaatcccatctaaatatagattctatagcaagcggaaatccctcctggtgacaggagggatttctttattttgcgatgtgctcataatacgccatgagcttctgttccggccccgggccgtctttgtcgaggaggaaggcctttgccagcgcggcgtagaactccgggcg

SEQ ID NO: 29434 - DNA, 260 bp, Unknown
  Description of Unknown: RightRegion for integrase B3435 sequence
aaaaccaaaaaattagatgattttgatttggtcctgtatcccaaattgccaagaacgtaaaaagagcagcggaattatccgttgctctttttggcatcattatctactataaatattcgtcgcccacatatccaaccctgtacatgcagtcgtgtctcttccttttggtcgcacgcatgggtaatcctatgtgtaaggcgcatgagccaccagctttccaaaatgattctcctctgccagctgcccaaatgcctgcacat

SEQ ID NO: 29435 - DNA, 260 bp, Unknown
  Description of Unknown: RightRegion for integrase B3436 sequence
gagattattgtcttgcgtcatggtttctggctggccctcgatctgaccgctcaggtttaacctggacggtcttttcgtttagggcggccaaggttccgcggcaatgctcttccagtcaattcttttcccgcaatcggggcagaacgaaaagcgagtcaaatctgtgctacgccgccgatcggcatactgtttgagcgtgaacacctttacatagaggctcttgcagccgcaaaacgcagggtcggcacgcaaactacggt

SEQ ID NO: 29436 - DNA, 260 bp, Unknown
  Description of Unknown: RightRegion for integrase B3437 sequence
aaatcctattccaaagcaggcagcgatatgtgcctaaccctttaccccctcactgattgatttgccgcctttccttttcagatctacaattacgtgggccgcatgaatgtggcccacgtaattgtagataccaataagcgccgaagcgagttgttcgcttcggcgcttattttaagattcccagaatgatttgcaggatcacgcagagctgttccagtgttgcttcgtttagtaataagtcgattctttcccgtgtcttt

SEQ ID NO: 29437 - DNA, 260 bp, Unknown
  Description of Unknown: RightRegion for integrase B3438 sequence
gtagatccaggagacttcacaattggcatattaccgcgcttgcctaagaaaggcaattaattttatatccatgtatgatatcctttcgggtcacactcatatgtcattataataacgtaatcgactatcctgccctgctcggcataatcgtgagcctcgtacagtacgcccggctggtctgcggatatcttcggggcaagcgctgacatcacgatgaagccttcgttgtgcagacgctccgtgagccgctcaaggaacgc

SEQ ID NO: 29438 - DNA, 260 bp, Unknown
  Description of Unknown: RightRegion for integrase B3439 sequence
aaatcctacaccaaatccggcagcgacatgcacgtcaccctctaccccctcgcggattgatggttatacatttattcggtacgcatgaatgcgacccgaccgtcgaccagtgcaccgactgcctgtccttcgtcaagaagtaaatttcccgcaccccgcgccgcggcaaccgccgcggcgcggggatctttgttctgtgatccgctgtttacgatcgcgcaatagcctccctgttcccctatcgcaaattccgcgcagat

SEQ ID NO: 29439 - DNA, 260 bp, Unknown
  Description of Unknown: RightRegion for integrase B3440 sequence
aaatcctacaccaaatccggcagcgacatgcacgtcaccctctaccccctcgcggattgatggttatacatttattcggtacgcatgaatgaatcccatttaaatatagattctatagcaagcggaaatccctcctggttacaggagggatttctttattttgcgatatgctcataatacgccatgagcttctgttccggccccgggccgtctttatcgagcaggaacgcctttgccagggcggcgtagaattccgggcg

SEQ ID NO: 29440 - DNA, 260 bp, Unknown
  Description of Unknown: RightRegion for integrase B3441 sequence
cgcaatgaaattgaaatacggttcatcggcggctataaaaagacaatgcaactgatataaaaataaagagggcatacccaatcggagataaggcatcttcgattgggtatgccctttttcacttttatcggaaagaggtagttatgaagctgggagagaaaatcaagctggttcgtaagcagagagggatgacacagcgggaactaggagaacgactgcacttggatggcaatgcggcaaaccgtattgctcaatatgag

SEQ ID NO: 29441 - DNA, 260 bp, Unknown
  Description of Unknown: RightRegion for integrase B3442 sequence
ataacgatagttgttagttgttcggtgtttgttttttcagtaaaaatgccggaggtgtaatgcctccggcatttcttattgccagtctataatgtgatacggctcataaaccattgcaggaattgcggtaatcgtccccgttcgtccgtgctgcttcatccagcgcttgccatgccaaattgccttgctttccgtcttgtaagcctcgccgcctcttaatccaaggtcatagccattgtttgcggcaatgtccgctgtgt

SEQ ID NO: 29442 - DNA, 260 bp, Unknown
  Description of Unknown: RightRegion for integrase B3443 sequence
aaatcctacaccaaatccggcagcgacatgcacgtcaccctctatcccctcgcggattgatggttatacatttattcggtacgcatgaatgaatcccatctaaatatagattctatagcaagctgaaatccctcctggtgacaggagggatttctttattttgcgatatgctcataatacgccatgagcttctgttccggccccgggccgtctttatcgagcagaaacgcttttgccagcgcggcgtagaactccgggcg

SEQ ID NO: 29443 - DNA, 260 bp, Unknown
  Description of Unknown: RightRegion for integrase B3444 sequence
aaatcccactccaaatccggtagcgatatgcgcgtgaccctttaccccctcaccgattgatcccctgccccgccttttcgtatctacaattaaacgggccgcatgaatgcgacccggttaattgtagatttcaaacaagcgccgaagcgaattgctcgcttcggcgctcattccaaaaggcctaagatgatttgcaggatgacgcaaagctgttccagcgtcgctttgtttagtaataagttgattcttttccgtgtctg

SEQ ID NO: 29444 - DNA, 260 bp, Unknown
  Description of Unknown: RightRegion for integrase B3445 sequence
gtagaccccggagacttcacacttggcatattaccgcgcttgcctaagaaaggcagttaattttatacccatgtgtgttatcctttcgggtcacactcatatgtcattataataacgtaatcgactatcctgccctgctcggcataatcgtgagcctcgtacagtacgcccggctggtctgcggatatcttcggggcaagcgctgacatcacgatgaagccttcgttgtgcagacgctccgtgagccgctcaaggaacgc

SEQ ID NO: 29445 - DNA, 260 bp, Unknown
  Description of Unknown: RightRegion for integrase B3446 sequence
gacaagagcattacatttgtgttcaaaaatatgaaggaaataacaatagcagccaaataaaaggctgttatttttttgcctaaaataggggtgtcggaagtaatcgttctgacacttaggggtgtcgctttttaaggtaagggtgtcgtttgtattaaaatagttgttcaaatacataaaagaactagaattgtgatacgagaaatctgtcacaattttttttgggctaaaacggccaaaatagcagggctagataccgt

SEQ ID NO: 29446 - DNA, 260 bp, Unknown
  Description of Unknown: RightRegion for integrase B3447 sequence
gcagaaaagttcgttttagctctccacaaccgcaccaaagaaaagcacctagaaacgtaagtttttgggtgcttttctttttgctgtaccgcagcgtttaccgcacccccgtacaggtacgcgcctttcgcgtccagatactcaattaggcattcttctacgctgccgccgtgcttccaggcggcaaagccgctgccgggtcttcctgctgttcgcccatggttgtactgccgctgtcctccacatcaaggggcagatca

SEQ ID NO: 29447 - DNA, 260 bp, Unknown
  Description of Unknown: RightRegion for integrase B3448 sequence
aaaggttcagcttttgcgccgtcaagcgcattgtataaacctgtcagggaatttctctgacaggtttatttttttgattaataatgatatactattcttattgcagaccattgaggattggagaccggctatgattgattgtaagaagattcagaaaatgattgtgcctttttcaaaaggcgagctgacactcaaagcagaagaaatgtttgttaaacatctggaacaatgccaggactgccgggaagaatttgaaattt

SEQ ID NO: 29448 - DNA, 260 bp, Unknown
  Description of Unknown: RightRegion for integrase B3449 sequence
gagatcattgtcttgcgttatggtttctggctggcactcgatttgaccgttcaggcttgacctgggcggtcttttcgtttagggcggccgaggctcctcagcaatgctcttccagtcgattctcttcccgcaatcggggcagaacgaaaagcgagtcaaatctgtgctgcgccgccgatcggcgtactgcttaagcgtaaacaccttcgcgtagaggctctcgcagttacaaagcacggggtcgtcccgcaaactgcggt

SEQ ID NO: 29449 - DNA, 260 bp, Unknown
  Description of Unknown: RightRegion for integrase B3450 sequence
aaatcctacaccaaatccggcagcgacatgcacgtcaccctctaccccctcgcggattgatggttatacatttattcggtacgcatgaatgaatcccatctaaatatagattctatagcaagcggaaatccctcctggtgacaggagggatttctttattttgcgatatgctcataatacgccatgagcttctgttccggccccgggccgtccttgtcgagcaggaaagccttggccagagcggcgtagaactccgggcg

SEQ ID NO: 29450 - DNA, 260 bp, Unknown
  Description of Unknown: RightRegion for integrase B3451 sequence
gccgatgagcgggtggtgtttcggttcaaggatgggaaggaaatcgtaacgaggctatgaaacattacagaaacaggcccaggtcggcaggtggacttctgctggcctgggtctgttttggggatatctcgcttcagtacagtttgatgatctacttgtaaaaaagaagaaaatccaatataatattcctgcaccaagaaaggcggtgaattccatggctttagaatccaatacatattccggaatatgtaaatacaagg

SEQ ID NO: 29451 - DNA, 260 bp, Unknown
  Description of Unknown: RightRegion for integrase B3452 sequence
gacaaatcaataacattcaaattttataacgggaaagaaataactttaacatctgcttaactagtggctgttttttttgttttgcatttcgatttttgcgcctatcatgttataattgctttggaagattaaatagtataaacgaactctcttatatagatttcctaaaggagtgattattttgccaggtttagatgaaagaaaaaaagtctttaaagcaagcaataagaagcatcaaaaattatatgaccattatattg

SEQ ID NO: 29452 - DNA, 260 bp, Unknown
  Description of Unknown: RightRegion for integrase B3453 sequence
ataacgatagttgttagctgttcggtgtttgttttttcagtaaaaatgccggaggcgtaatgcctccggcttttcttatttttccacaatctctactttgacgtctatccagcccagatgcgcgtgtttgatggcgacagggaatactccgtcctttgggcggtagacctgtgcgccggacggggaaacatgaacgacactcaaatcctccgtcttatatatcatcgcctcgccgctttgccccacagcccgcgttgtag

SEQ ID NO: 29453 - DNA, 260 bp, Unknown
  Description of Unknown: RightRegion for integrase B3454 sequence
aaatcctacaccaaatccgggagcgacatgcacgtcaccctctaccccctcgcggattgaacattatacatttattcggtacgcatgaatgaatcccatctaaatatagattctatagcaagcggaaatcccccctggtgacaggagggatttctttattttgcgatatgctcataatacgccatgagcttttgttccggccccggtccgtccttgtcgagcaggaacgcctttgccagagcagcgtagaactccgggcg

SEQ ID NO: 29454 - DNA, 260 bp, Unknown
  Description of Unknown: RightRegion for integrase B3455 sequence
aagtcctacagcaaagccggcagcgacatgcgcgtcaccctgtaccccctcacagattgatccccccccaccttccaagcaaaaatcaaggaacccgtgtaattgagatcctcaattacacgggtttcattcatgcgtaccagctaattgtctatttcgcgatatgctcataatactccatgagcttgcgctccgggcccgggccgtccttgtcgagcaggaaggctttggccagcgccgcgtaaaactccgggcggttg

SEQ ID NO: 29455 - DNA, 260 bp, Unknown; identical to SEQ ID NO: 29373
  Description of Unknown: RightRegion for integrase B3456 sequence

SEQ ID NO: 29456 - DNA, 109 bp, Unknown; identical to SEQ ID NO: 29382
  Description of Unknown: RightRegion for integrase B3457 sequence

SEQ ID NO: 29457 - DNA, 260 bp, Unknown
  Description of Unknown: RightRegion for integrase B3458 sequence
cgcaatgaaattgaaatacggtttatcggcggctacaaaaagacaatgcagctgacataaaaataaagagggcatacccaatcggagataaggcatcttcgattgggtatgccctttttcacttttatcggaaagaggtagctatgaagctgggagagaaaatcaagctggttcgtaagcacagaggactaacgcagcgggaactgggagaacgactgcacttggatggaaatgcagcaaatcgcattgcccaatatgag

SEQ ID NO: 29458 - DNA, 105 bp, Unknown
  Description of Unknown: RightRegion for integrase B3459 sequence
aaatcctattccaaagcaggcagcgatatgtgcctaaccctttaccccctcactgattgatttgccgccttccctttcaggtctacaattacgtgggccgcatga

SEQ ID NO: 29459 - DNA, 260 bp, Unknown
  Description of Unknown: RightRegion for integrase B3460 sequence
acacgaaaacaatggagcggaatactgcaagagccgacctatcaaagaagaagcccttgagaaagcgtttgtaagggcattaaacgaacttataggagacaaggaacgaatactcgaaaaactgcaaagtgcgaccgtgagcgaaataacggactcctgtgcgacagcgataaatgaagtgaatgccgagatagaaaaattacaagagcagatgatggaactgctgatgaaaaggaacaacggagagattaccgataaag

SEQ ID NO: 29460 - DNA, 109 bp, Unknown; identical to SEQ ID NO: 29364
  Description of Unknown: RightRegion for integrase B3461 sequence

SEQ ID NO: 29461 - DNA, 260 bp, Unknown
  Description of Unknown: RightRegion for integrase B3462 sequence
gtagaccccggagacttcacgcttggcatattaccgcgcttgcctaagaaaggcagttaattttatacccatgtgtgttatcctttcgggtcacactcataagtcatgatgatcacataatccgcgatcctgccctgggcagcgtaatcgtgcgcttcgtagagcactccgcgctggtcggcggatatcttgggagccagagccgtaacgacgatataaccctgctcgtgaagtaggtccgcaagccgctgaaggaatgc

SEQ ID NO: 29462 - DNA, 260 bp, Unknown
  Description of Unknown: RightRegion for integrase B3463 sequence
atagcaatagttgttagttgttcggtgtttgttttttcagtaaaaatgccggaggcgtaatgcctccggcatttcttatttttccacaatctccactttgacatctatccagcccagatacgcgtgtttgatagcgacagggaatactccgtcctttgggcggtagacatatgcgccggacggtgaaacatgaataacattcagatcctccatcttatatatcatcgcctcgccgctttgccccacagcccgcgttgtag

SEQ ID NO: 29463 - DNA, 260 bp, Unknown
  Description of Unknown: RightRegion for integrase B3464 sequence
cgctggggacgtccggataatttctcactgaagatctatccgcgcgtaccgccagcgtaaccgcggcatctgaaaagccttgatttctcaaggaaaaatctcatttccaacgtgctgggactgattcctccgttccaatatccgtcagtgtcgccatacactcccggtacggcatggtataacgttgtgccagataccgcatgctggcgctcagttcaccatcgggaccgcccaatggtatgttagccaggcaatccggc

SEQ ID NO: 29464 - DNA, 260 bp, Unknown
  Description of Unknown: RightRegion for integrase B3465 sequence
gtagatccaggagacttcacaattggcatattaccgcgcttgcctaagagaggcagttaattttatgcccatgtatgatatcctttcgggtcacattcatacgacccgaaaggataacatacacatttaccttaaacaaaaaagcactcggcattttaatcaagcaccgagccttatacaatattgacaaattcctcacttcaaattaaattaaagctacaaaaataacaaaaaagcattgacatgaacaaagagatatg

SEQ ID NO: 29465 - DNA, 260 bp, Unknown
  Description of Unknown: RightRegion for integrase B3466 sequence
aaatcctacaccaaatccggcagcgacatgcacgtcaccctctaccccctcgcggattgatggttatacatttattcggtacgcatgaatgaatcccatctaaatatagattctatagcaagcggaaatccctcctggtgacaggagggatttctttattttgcgatatgctcataatacgccatgagcttctgttccggccccggtccgtccttatcgagcagaaacgcctttgccagcgcggcgtagaactccgggcg

SEQ ID NO: 29466 - DNA, 260 bp, Unknown
  Description of Unknown: RightRegion for integrase B3467 sequence
aaatcctattccaaagcaggcagcgatatgtgcctaaccctttaccccctcactgattgattttccgcctttccttttcagatctacaattacgtgggccgcatgaatgtggcccatgtaattttagataccaacaagcgccgaagcgagttgttcgcttcggcgcttattttaagattcccagaatgatttgcaggatcacgcagagctgttccagtgttgcttcgtttagtaataagtcgattctttcccgtgtcttt

SEQ ID NO: 29467 - DNA, 260 bp, Unknown
  Description of Unknown: RightRegion for integrase B3468 sequence
aaaaccaaaaaattagatgattttgatttagtcctttatcccaaattgccaagaacgtaaaaagagcagcggaattatccgttgctctttttggcgtcattatctactataaatattcgtcgcccacatatccaaccctgtacatgcagtcgtgtctctcccttttggtcgcacgcatgggtaatcctatgtgtaaggcgcatgagccaccagctttccaaaatgcttctcctctgccagctgcaaaaatgcctgcacat

SEQ ID NO: 29468 - DNA, 129 bp, Unknown
  Description of Unknown: RightRegion for integrase B3469 sequence
aaatcctacaccaaatccggcagcgacatgcacgtcaccctctaccccctcgcggattgatggttatacatttattcggtacgcatgaatgaatcccatctaaatatagattctatagcaagctgaaat

SEQ ID NO: 29469 - DNA, 260 bp, Unknown
  Description of Unknown: RightRegion for integrase B3470 sequence
gcagaaaagttcgttttagctctccacaaccgcaccaaagagcttcaagctttggcttgaggctctttttctttgtcttggcttttaagttgtttattgctctgccaaaagcagagagatgattaccgctccggtatcagtgaggaaaaaaggtcatatgaaggtttaccacaagctgtcaggcgaatttccatatgcctgcgtttccctgtggccctgaatctggctctaaaccgtgttcccaataaagcaagataaaa

SEQ ID NO: 29470 - DNA, 260 bp, Unknown
  Description of Unknown: RightRegion for integrase B3471 sequence
gctgaggttatgttcgaattaaagtgcggactgaatttgaaagaaaggctggtgaaataaatgacgcatataccctatggatatagcattgttgatggcaaggcagtaattgatgaagaacaggctgcgaaggtgcggatgattttttcggattacttaagtggaatgtcactggcggctgttgctgccaagaacggtctgaagatgctccacagcagggttggacaactacttcgcaaccgtcactaccatggggatgc

SEQ ID NO: 29471 - DNA, 260 bp, Unknown
  Description of Unknown: RightRegion for integrase B3472 sequence
aaatcctattccaaagcaggcagcgatatgtgcctaaccctttaccccctcactgattgatttgccgccttcccttttcaggtctacaattacgtgggccgcatgaatgaatcccatttaaatgtagattttatagcaagtgaaaatccctcctgcgagcaggagggatttctttattttgcgatatgctcataatactccatcagcttccgctccggccccgggccgtctttatcgatcaaaaacgccttcgccagcgc

SEQ ID NO: 29472 - DNA, 260 bp, Unknown
  Description of Unknown: RightRegion for integrase B3473 sequence
gtttttcacgacgggcgtatcgtttttacttttgtcaatggaatggaggcagaaggataaattagaagacaagccctttcaacaaaacgggaatgtcttgtcgaaagggtgattcagtcaaatatccaaagtttcctgattgtagtctatgtctgtaagcggctcaacatcaaaggtttcttcgggctcggcatattcttctaccggagttctattcttgggctttgttttatataagctgctcatacggagtggattcc

SEQ ID NO: 29473 - DNA, 260 bp, Unknown
  Description of Unknown: RightRegion for integrase B3474 sequence
gccgatggcaggatggtttacagttttctgaatggaagcgacatcaccgtgatgctgtaaagtccggcctttattttaccatcggctgtttaacgattggcggtcgtttaacgattactgaccactacagatggtagccgagagcataaaacacctccgaaaacacctcccaaacggcacatatgggaacagccgggcaggaaatgcacaacgctgtttcaaaaagccttgatatacgggcatttcggggcataaaaaaa

SEQ ID NO: 29474 - DNA, 260 bp, Unknown
  Description of Unknown: RightRegion for integrase B3475 sequence
aaatcctacaccaaatccggcagcgacatgcacgtcaccctctaccccctcgcggattgatggttatacatttattcggtacgcatgaatgaatcccatctaaatatagattctatagcaagcggaaatccctcctggtgacaggagggatttctttattttgcgatatgctcataatacgccatgagcttctgttccggccccgggccgtctttgtcgagcaggaacgcctttgccagagcagcgtagaactccgggcg

SEQ ID NO: 29475 - DNA, 86 bp, Unknown
  Description of Unknown: RightRegion for integrase B3476 sequence
gcagaaaagttcgttttagctctccacagccgcaccaaagagcttcaagctttggcttgaggctctttttctttgtcttggctttt

SEQ ID NO: 29476 - DNA, 260 bp, Unknown
  Description of Unknown: RightRegion for integrase B3477 sequence
gcagaaaagttcgttttagctctccacaaccgcaccaaagagcttcaagctttggcttgaggctctttttctttgtcttggcttttaagttgtttattgccctgccaaaagcagagagataattaccgctccggtatcagtgaggaaaaaaggccatatgaaggtttaccacaagctgtcaggcgaatttccatatgcctgcgtttccctgtggcactgaatctggctctaaaccgtgttcccaataaagcaagataaaa

SEQ ID NO: 29477 - DNA, 260 bp, Unknown
  Description of Unknown: RightRegion for integrase B3478 sequence
gagattatcgtcttgcgttatggtttctggctggccctcgatttgaccgttcaggtttgacctgggcggtcttttcgtttagggcggccggggctcctcagcaatgctcttccagtcgattctcttcccgcaatcagggcagaatgagaaacgggtcaaatccgtgctgcgccgtcgatcggcgtactgcttaagcgtgaacacctttacataaaggctcaggcagttacggaacgctgggtcagtgcgtaaactacgat

SEQ ID NO: 29478 - DNA, 260 bp, Unknown
  Description of Unknown: RightRegion for integrase B3479 sequence
aaatcccactccaaatccggcagcgacatgcgcgtgaccctttaccccctcaccgattgatcccctgccccgccttttcgtatccacaattaaacgggccacatgaatgcgacccgcgtaattatagatatcaacaagcgccgaagcgagttgttcgcttcggcgcttattttaagattcccagaatgatttgcaggatcacgcagagctgttccagtgttgcttcgtttagtaataagtcgattctttcccgtgccttt

SEQ ID NO: 29479 - DNA, 260 bp, Unknown
  Description of Unknown: RightRegion for integrase B3480 sequence
gagattatcgtcttgcgttatggtttctggctggccctcgatttgaccgttcaggcttaacctgggcggtcttttcgtttagggtggtcgagactcctcggcaatgctcttccagtcgattctctttccgcaatcggggcagaacgaaaagcgagtcaaatctgtgctgcgccgccgatcggcgtactgcttaagcgtaaaaaccttcgcatagaggctctcgcagctacaaagcgtggggtcgtcccgcaaactgcggt

SEQ ID NO: 29480 - DNA, 91 bp, Unknown
  Description of Unknown: RightRegion for integrase B3481 sequence
aaatcctacaccaaatccggcagcgacatgcacgtcaccctctaccccctcgcggattgatggttatacatttattcggtacacatgaatg

SEQ ID NO: 29481 - DNA, 260 bp, Unknown
  Description of Unknown: RightRegion for integrase B3482 sequence
gtagatccaggagacttcacaattggcatattaccgcgcttgcctaagaaaggcaattaattttatatccatgtatgatatcctttcgggtcacactcatatgtcattataataacgtaatcgactatcctgccctgctcggcataatcgtgagcctcgtacagtaagcccggctggtctgcggatatcttcggggcaatcgctgacatcacgatgaagccttcgttgtgcagacgctccgtgagccgctcaaggaacgc

SEQ ID NO: 29482 - DNA, 260 bp, Unknown
  Description of Unknown: RightRegion for integrase B3483 sequence
aaatcctacaccaaatccggcagcgacatgcacgtcaccctctaccccctcgcagattgacggttatacatttattcggtacgcatgaatgcgacccgaccgtcgaccagtgcaccgactgcctgtccttcgtcaagaagtaaatttcccgcaccccgcgccgcggccaccgccgcggcgcggggatctttgttccgtgatccgctgtttacgatcgcgcgatcgcgtcccactgttcccctatcgcaaattccgcgcag

SEQ ID NO: 29483 - DNA, 260 bp, Unknown
  Description of Unknown: RightRegion for integrase B3484 sequence
caaaatattggacacaactcacactacctagcatcaaatccacaacgaaatcacacttgaaaaaaactttacaattttaaaataggtattgacaaacttttccaaatatgccaatataagttcaggagattttcaatgaataaaaaatttaaagaaataagagtattggattactcatatccatcaacttccacatcagataattgccaaaacgaacactacagatttgaatttgtttacagtggaacaataagcaaaat

SEQ ID NO: 29484 - DNA, 260 bp, Unknown
  Description of Unknown: RightRegion for integrase B3485 sequence
gcagaaaagttcgttttagctctccacaaccgcaccaaagaaaagcacctagaaacgtaagtttttaggtgctttctttttgttgtaccgcagcgtttaccgcacccccgtacaggtacgcgcctttcgcgtccagatactcaattaggcattcttctacgctgccgccgtgcttccaggcggcaaagccgctgccgggtcttcctgctgttcgcccatggttgtactgccgctgtcctccacatcaaggggcagatcaa

SEQ ID NO: 29485 - DNA, 260 bp, Unknown
  Description of Unknown: RightRegion for integrase B3486 sequence
aagttccgcctgctgaatgggatggaactggcagaaaacatagagaggacggtgcgataaatggcgtggcaaagaaaaattcctttcggctatcaggtccggaacggcaggatcaactgccatccggaggaagcagagcttgtaagggctatcttctcccgctatctgctgggcggctcctacagtcagatcgctgacgagatgacccagcaaggtgtgcgctatcatcaacataatgcccagtggaacaaacacatggt

SEQ ID NO: 29486 - DNA, 260 bp, Unknown; identical to SEQ ID NO: 29423
  Description of Unknown: RightRegion for integrase B3487 sequence

SEQ ID NO: 29487 - DNA, 260 bp, Unknown
  Description of Unknown: RightRegion for integrase B3488 sequence
aaatcctacaccaaatccggcagcgacatgcacgtcaccctttaccccctcgcggattgatggttatacatttatttggtacgcatgaatgaatcccatctaaatatagattctatagcaagcggaaatccctcctggtgacaggagggatttctttattttgcgatatgctcataatacgccatgagcttctgttccggccccgggccgtccttgtcgagcaggaacgcctttgccagagcagcgtagaattccgggcg

SEQ ID NO: 29488 - DNA, 90 bp, Unknown
  Description of Unknown: RightRegion for integrase B3489 sequence
aaatcctacaccaaatccggcagcgacatgcacgtcaccctctaccccctcgcggattgatggttatacatttattcggtacgcatgaat

SEQ ID NO: 29489 - DNA, 260 bp, Unknown
  Description of Unknown: RightRegion for integrase B3490 sequence
aaatcctacaccaaatccggcagcgacatgcacgtcaccctctaccccctcgcggattgatggttatacatttatttggtacgcatgaatgaatcccatctaaatgtaggttctatagcaagcggaaatccctcctggtgacaggagggatttctttatttcgcgatatgctcataatacgccatgagcttctgttccggccccggtccgtccttatcgagcagaaacgcctttgccagcgcggcgtagaactccgggcg

SEQ ID NO: 29490 - DNA, 260 bp, Unknown
  Description of Unknown: RightRegion for integrase B3491 sequence
aaatcctattccaaagcaggcagcgatatgtgcctaaccctttaccccctcactgattgatttgccgccttcccttttcaggtctgcaattacgtgggccgcatgaatgaatcccatctaaatatagattctatagcaagcggaaatccctcctggtgacaggagggatttctttattttgcgatatgctcataatacgccatgagcttctgttccggccccgggccgtctttatcgagcaggaatgcctttgccagcgc

SEQ ID NO: 29491 - DNA, 260 bp, Unknown
  Description of Unknown: RightRegion for integrase B3492 sequence
gcagaaaagttcgttttagctctccacaaccgcaccaaagaaaagcacttaagaacgtaagtttttaagtgctttctttttgctgtaccgcagcgtttaccgcacccccgtaccggtacgcgcctttcgcgtccagataatggacttctgtacagcttcgactgcttcggtcaggtcgttgacagcttccacgatgtcgtacgggtcggggtcatcgtgaattcggcatttattcccacaccctgaccggggatgccgcc

SEQ ID NO: 29492 - DNA, 260 bp, Unknown
  Description of Unknown: RightRegion for integrase B3493 sequence
aaatcctacaccaaatccggcagcgacatgcacgtcaccctctaccccctcgcggattgatggttatacatttatttggtacgcatgaatgaatcccatttaaatgtagattctatagcaagcggaaatcccccctggtgacaggagggatttctttattttgcaatatgctcataatacgccatgagcttctgttccggccccgggccgtccttgtcgagcaggaacgcctttgccagcgcggcgtagaactccgggcg

SEQ ID NO: 29493 - DNA, 260 bp, Unknown
  Description of Unknown: RightRegion for integrase B3494 sequence
ataacgatagttgttagctgttcggtgtttgttttttcagtaaaaatgccggaggcgtaatgcctccggcttttcttatttttccacctttagtcataccagcaaggacaataggctgtaccgctaaagcggtacaaaaatgcatggcaaagtttgtgcagcttgcctattgaaagtgtaccgctaaagcggtacaatataatcgccgaaaggcaaacaagccacacgaaaaaggagaacaggatcatggatgaaatcag

SEQ ID NO: 29494 - DNA, 260 bp, Unknown
  Description of Unknown: RightRegion for integrase B3495 sequence
aaatcctattccaaagcaggcagcgatatgtgcctaaccctttaccccctcactgattgatttgccgccttccctttcaggtctacaattacgtgggccgcatgaatgtggcccacataattgtagatatcaataagcgccgaagcgagttgttcgcttcggcgcttattttaagattcccagaatgatttgcaggatcacgcagagctgttccagtgttgcttcgtttagtaataagtcgattctttcccgtgtctttt

SEQ ID NO: 29495 - DNA, 260 bp, Unknown
  Description of Unknown: RightRegion for integrase B3496 sequence
gcagaaaagttcgttttggctctccacaactgcaccaaagaaaagcacctagaaacgtaagtttttaggtgctttctttttgctgtaccgcagcgtttaccgccccccgtacaggtacgcgcctttcgcgtccagatactcaattcggcattcttctacgctgccgccgtgcctccaggcggcaaagccgctgccgggtcttcctgctgttcgcccatggttgtactgccgctgtcctccacatcaaggggcagatcaag

SEQ ID NO: 29496 - DNA, 260 bp, Unknown
  Description of Unknown: RightRegion for integrase B3497 sequence
atagcaatagttgttagttgttcggtgtttgttttttcagtaaaaatgccggaggcgtaatgcctccggcatttcttatttttccacaatctccactttgacatctatccagcccagatgcgcgtgtttgatagcgacagggaatactccgtcctttgggcggtagacatatgcgccggacggtgaaacatgaatgacattcagatcctccatcttatatatcatcgcctcgccgctttgccccacagcccgcgttgtag

SEQ ID NO: 29497 - DNA, 260 bp, Unknown
  Description of Unknown: RightRegion for integrase B3498 sequence
cggcaagaaatcgaaatctactttatcggcggttatacccaaaagattgaccttatatagagccattcactcatacacaaacgcccgcactggcaagtcgaaaacgcttgctgatgcgggtattactttttgggaaagtgagctattacacgatggatacaggattacggatcaaactggtacgcgagcatcgcggccttacacaacaaaaattgggtgagatgctcggatacggaaagagcagcgcgaaccgcattgca

SEQ ID NO: 29498 - DNA, 260 bp, Unknown
  Description of Unknown: RightRegion for integrase B3499 sequence
gcagaaaagttcgttttggctctccacaactgcaccaaagagcttcaagctttggcttgaggctctttttctttgtcttggcttttaagttgtttattgccctgccaaaagcagagagatgattaccgctccggtatcagtgaggaaaaaaggccatatgaaggtttaccacaagctgtcaggcgaatttccatatgcctgcgtttccctgtggccctgaatctggctctaaaccgtgttcccaataaagcaagggcaat

SEQ ID NO: 29499 - DNA, 260 bp, Unknown
  Description of Unknown: RightRegion for integrase B3500 sequence
ataccttcttcctctgataaggggttcggatttgaggggttagagtccaccaaaaaataagagacacgcgaaagcgtgtctcttattttttgggttcactcatttcattcgttcaccccaagggtaattaaaatgctcggtggaagtgaatcccacctccgccaagattttgctgcgcaaaatgcttgcacggcgcaaatgcgccggttttggtatccgtaggacatttaacagcgcacaaacaaatgaattgcttgtgc

SEQ ID NO: 29500 - DNA, 260 bp, Unknown; identical to SEQ ID NO: 29378
  Description of Unknown: RightRegion for integrase B3501 sequence

SEQ ID NO: 29501 - DNA, 260 bp, Unknown
  Description of Unknown: RightRegion for integrase B3502 sequence
aaatcctacaccaaatccggcagcgacatgcacgtcaccctctaccccctcgcggattgaacattatacatttattcggtacgcatgaatgaatcccatctaaatataggttctatagcaagcggaaatccctccttgtgacaggagggatttctttattttgcaatatgctcataatacgccatgagcttctgctccggccccgggccgtctttatcgagcaggaacgcctttgccagcgcagcgtagaactccgggcg

SEQ ID NO: 29502 - DNA, 260 bp, Unknown
  Description of Unknown: RightRegion for integrase B3503 sequence
atcttattttttgtcggttcacttttcggaatatcgtgtaaaatagcggataggcgttgacctgtccgctattttatcttgcaattataaagaatcgtgctataatgcaattaaagagcctctggctctatatcctatttcacgcggcagtctcgctccggcggggctgctgttttatattttgccgacgtcggcaaaatgttatgtgtccacttttttggcttgactatatagttatatgttgctaaaatcaaaaagaa

SEQ ID NO: 29503 - DNA, 260 bp, Unknown
  Description of Unknown: RightRegion for integrase B3504 sequence
gtagatccaggagacttcacaattggcatattaccgcgcttgcctaagagaggcagttaattttatgcccatgtatgatatcatttcgggtcacattcatatgtcattataataacgtaatcgactatcctgccctgctcggcataatcgtgagcctcgtacagtacgcccggctggtctgcggatatcttcggggcaagcgctgacatcacgatgaagccttcgttgtgcagacgctccgtgagccgctcgaggaacgc

SEQ ID NO: 29504 - DNA, 109 bp, Unknown
  Description of Unknown: RightRegion for integrase B3505 sequence
gtagatccaggagacttcacaattggcatattaccgcgcttgcctaagaaaggcagttaattttatacccgtgtatgatatcctttcgggtcacactcatatgtcatta

SEQ ID NO: 29505 - DNA, 257 bp, Unknown
  Description of Unknown: RightRegion for integrase B3506 sequence
ccaaaaagaaccagtcgaacatgttcggctggttcttttttctctttgtttcccctttgaacccctttgaacagaagtgctccgctttcaagatttacagcatctgtacagaagccgcaaatcgagacagcggagcactttattttatggttttgtgaaacgttattcaaacagcagaatcaagaccgtcctgccaatgcctctccctttgggagaggtggcattgcgaagcaatgacggagaggggcagtcgttca

SEQ ID NO: 29506 - DNA, 260 bp, Unknown
  Description of Unknown: RightRegion for integrase B3507 sequence
aagtctgtaaagtataatgaagttgataagactttttttatagaattttatcatccctaactgtatccctatgcagttaggaaacaatagcatttgcacaagtaccttaaatgcctacactattgataaatataaaataggaaatactcttggagaaaagctaagatattatagactaaatgctaacttaactcaagaagaactagcctctattgttggatattcttcaggagtatgtataaaagatatagaagcaaata

SEQ ID NO: 29507 - DNA, 260 bp, Unknown
  Description of Unknown: RightRegion for integrase B3508 sequence
aaatcctacaccaaatccggcagcgacatgcacgtcaccctctaccccctcgcggattgacggttatacatttatttggtacgcatgaatgcgacccgaccgtcgaccagtgcaccgactgcctgtccttcgtcaagaagtaaatttcccgcaccccgcgctgcggcaaccgccgcggcgcggggatctttgttccgtgatccgctgtttacgatcgcgcaatagcctccctgttcccctatcgcaaattccgcgcagat

SEQ ID NO: 29508 - DNA, 260 bp, Unknown
  Description of Unknown: RightRegion for integrase B3509 sequence
cgtaatgaaattgaaatatggttcattggtggatatgagaaagcaatgccgctagaataaggaaccttgagtgaaacacattatgaactaccgttcgcagaaaattaagaatctggagtgaaacaaaacttgataaaaagaacgctttatggtaagatggagacaaagaacaagaagtgaaaaaggggaggtgtacaccaatgggattagctgatacggtcacaaaagcctatatgaaagaaaatactgtatttgcagat

SEQ ID NO: 29509 - DNA, 260 bp, Unknown
  Description of Unknown: RightRegion for integrase B3510 sequence
gtttaccacgacgggcggatcgtattcacctttgttaacggcatggaggctgaaggctaaataagcagacaagccctttcgacaaaacgggaatgtcttgtcgaaagggtgatgcaatcaaatatccatactttcctgatcgtagtccatgtctggaagcggctcatcatcaaaggtttcttctggctcgacatattcttcgacctgagctctgttcttgggctttgttttatataagctgctcatacggagcgggttcc

SEQ ID NO: 29510 - DNA, 260 bp, Unknown
  Description of Unknown: RightRegion for integrase B3511 sequence
cctggtatcggacgattcgttgccaatccctttgaactggatatctacctgcgcctgtgatcttcgggcgcaggcattattttcactgtattaaggctttttctgcctgtaatctcctacttttatgcaaaaataatcacttccatcatgtatgagcgaatgaactggctcatatggaaatgatctgcgctatggtgcgacagctgacacaggatctgacaccggaagaaattcagaaaagtgggtttgatacctactat

SEQ ID NO: 29511 - DNA, 109 bp, Unknown; identical to SEQ ID NO: 29382
  Description of Unknown: RightRegion for integrase B3512 sequence

SEQ ID NO: 29512 - DNA, 260 bp, Unknown
  Description of Unknown: RightRegion for integrase B3513 sequence
cctggtatcggacgattcgttgccaatccctttgaactggatatctacctgcgcctgtgatctttgggcgcaggcattattttactgtatcaaggctttttctgccagtaatctcctgttttcacgcaaaaataatcacttccatcatgtatgagcgaatgaatttgctcaaagaagatggaagtgactactacatataataagaaggtttgaaaaacttgtatatgactatattacacgattactctgcctttttcaac

SEQ ID NO: 29513 - DNA, 260 bp, Unknown
  Description of Unknown: RightRegion for integrase B3514 sequence
gattttaagctagagctattcccgaaactgcccaagaacaaagggaattctagcaaatgatatagtcgaaccaccaacgaacttgggcatcttgaaatggtcggctccattgtttcccagcttgtaaaagaccttccttgtgatgatattgaccttgcaggctttgagaaatactatgtcgaccacactttgggcgtatggccacagtctgccggaggtgttcctttctcagctactaccttccaatcttgtggtgatcc

SEQ ID NO: 29514 - DNA, 109 bp, Unknown
  Description of Unknown: RightRegion for integrase B3515 sequence
gattttaagctagagctattcccgaaactgcccaagaacaaagggaattctagcgaatgatatagtcgaaccaccaacgaacttgggcatctcgaaatggtcggttcca

SEQ ID NO: 29515 - DNA, 260 bp, Unknown
  Description of Unknown: RightRegion for integrase B3516 sequence
ataattgatggaaaaagaatacaaaaaattgaaatagaatataattttattaatgattaatttggatctattttatatttaataatccaattatgtatgtcgatcctaatggacatgctcctaagtggtggcaaagcattcttattggattgggagtaatcgctattgcagctttagcaactgctgcgattgtatgctctggaggaagtgctacaccgtttttggcagttgcgggacaagcagctctaggtggattaaaa

SEQ ID NO: 29516 - DNA, 109 bp, Unknown
  Description of Unknown: RightRegion for integrase B3517 sequence
cctggtatcggacgattcgttgccaatccctttgaactggatatctacctgcgcctgtaatctttgggtgcaggcattattttcactgtattaaggctttttctgcctg

SEQ ID NO: 29517 - DNA, 109 bp, Unknown
  Description of Unknown: RightRegion for integrase B3518 sequence
gattttaagctagagctattcccgaaactgcccaagaacaaagggaattctagcgaatgatatagtcgaaccaccaacgaacttgggcatcttgaaatggtcggctcca

SEQ ID NO: 29518 - DNA, 260 bp, Unknown
  Description of Unknown: RightRegion for integrase B3519 sequence
aaggacgagaataggacggcagtgaataccgtgccctttggcacggtagagccgtcctgaccgacgagcgtcgagcgaggagaaagagtccttctgcccctgccaaaaagatcagttgcaaaagcagccgatttttttcgcttcttgcatctgccccgcatattttccacgcctccggccaaactaccgccggaggtgtttttttatgagcccgaaagaattgctttatatcgacgatgcgctcggccacgagcagtttc

SEQ ID NO: 29519 - DNA, 260 bp, Unknown
  Description of Unknown: RightRegion for integrase B3520 sequence
gattttaagctagagctattcccgaaactgcccaagaacaaagggaattctagcgaatgatatagtcgaaccaccaacgaacttgggcatctcgaaatggtcggctccattgtttcccagcttgtaaaagaccttccttgtgatgatattgaccttgcaggctttgagaaatactatgtcgaccacactttgggcgtatggccacagtctgccggaggtgttcctttctcagctactaccttccaatcttgtggtgatcc

SEQ ID NO: 29520 - DNA, 109 bp, Unknown; identical to SEQ ID NO: 29364
  Description of Unknown: RightRegion for integrase B3521 sequence

SEQ ID NO: 29521 - DNA, 260 bp, Unknown
  Description of Unknown: RightRegion for integrase B3522 sequence
gattttaagctagagctattcccgaaactgcccaagaacaaagggaattctagcgaatgatatagtcgaaccaccaacgaacttgggcatcttgaaatggtcggctccattgtttcccagcttgtaaaagaccttccttgtgatgatattgaccttgcaggctttgagaaatactatgtcgaccacactttgggcgtatggccacagtctgccggaggtgttcctttctcagctactaccttccaatcttgtggtgatcc

SEQ ID NO: 29522 - DNA, 260 bp, Unknown
  Description of Unknown: RightRegion for integrase B3523 sequence
acctccaccaacaaaaagcacctggattcgttgaaatctaggcgcttttctttttgctgaaactggtttataaagcactctatatcacagaacgatttgctattagggcggcttttgtcacaatttgtacgtatttccagcaaaacagaatgattgtataaaatttatacacctgctaaagtttgtttgttgtctgctgcggcgacgcggggtatactgttgccataaggacggcgcaaggatgccgaaaaaagcaataa

SEQ ID NO: 29523 - DNA, 260 bp, Unknown
  Description of Unknown: RightRegion for integrase B3524 sequence
cctggtatcggacgattcgttgccaatccctttgaactggatatctacctgcgcctgtgatctttgggcgcaggcattattttcactgtattaaggctttttctgcctgtaatctcctacttttgtgcaaaaataatcacttccatcatgtatgagcgaatgaattagctcatatggaaatgatctgcgccatcgtccgtcagttaacccaggatctgacaccggaagaaatccagaaaagtggctttgacacctactac

SEQ ID NO: 29524 - DNA, 260 bp, Unknown
  Description of Unknown: RightRegion for integrase B3525 sequence
cctggtatcggacgattcgttgccaatccctttgaactggatatctacctgcgcctgtgatctttgggcgcaggcattattttactgtatcaaggctttttctgccagtaatctcctgttttcacgcaaaaataatcacttccatcatgtatgagcgaatgaatttgctcaaagaagatggaagtgactactatatgtaataagaaggttttggaaacttttatatgattatattacacgattacccgccctttttcaac

SEQ ID NO: 29525 - DNA, 260 bp, Unknown
  Description of Unknown: RightRegion for integrase B3526 sequence
aaaggatttgaaagtttagataaattatttgaaggtagtatacttattaagaacttttaggagttcttatttttttaaaaataataccattcttttgtacaaatattcagttgaggtaacaatgaaggggataaatcaagtgaatttaaattataaaattggacttacctttgttgaaggtttgcgtagtctattaagacaggatcctaatgtgataatggttggagaaattagagacgaagaaactgcgaaaatggctg

SEQ ID NO: 29526 - DNA, 260 bp, Unknown
  Description of Unknown: RightRegion for integrase B3527 sequence
cctggtatcggacgattcgtttccaatccctttgaactggatatctacctgcgcctgtgatctttgggcgcaggcattattttcactgtattaaggctttttctgcctgtaatctcctacttttgtgcaaaaataatcacttccatcatgtatgagcgaatgaatttgctttgacatgatggtagtgatttttctttttaataggaagcgtttatgctctaacaacctgtccttttacaatcttgcaggtcacttctccg

SEQ ID NO: 29527 - DNA, 260 bp, Unknown
  Description of Unknown: RightRegion for integrase B3528 sequence
cgaataccctcttcctctgacaaggggttcggatttgaggggttagagtccaccaaatagtgcaaatccgaactctgtgttcttcataaaacacacttttgggtttgtttacagaatagagaacgcacgataatcgtgcgttctttttctatgccacgggagggggtttaagtagtcaaagtagttgtttttaaggttttgcgtgtaacttcctctaagtacgcgcgtattaagcgaaagtttacgcaaaaaccgatttt

SEQ ID NO: 29528 - DNA, 109 bp, Unknown
  Description of Unknown: RightRegion for integrase B3529 sequence
gattttaagctagagctattcccgaaactgcccaagaacaaagggaattctagcgaatgatatagtcgaaccaccaacgaacttgggcatctcgaaatggtcggctcca

SEQ ID NO: 29529 - DNA, 260 bp, Unknown
  Description of Unknown: RightRegion for integrase B3530 sequence
cctggtatcggacgattcgttgccaatccctttgaactggatatctacctgcgcctgtgatcttcgggcgcaggcattattttcactgtattaaggctttttctgcctgtaatctcctacttttatgcaaaaataatcacttccatcatgtatgagcgaatgaatttgctcaaagaagatggaagtgactactacatataataagaaggttttggaatcttttatagattatattacacgattacccgccctttttcaac

SEQ ID NO: 29530 - DNA, 109 bp, Unknown
  Description of Unknown: RightRegion for integrase B3531 sequence
gtccacgctgatggacggatgacattcaaattccagggtggaacagagattgatgtataaaacccataaagtgaaaagtccgccacatttgttggcgggcttttcgcta

SEQ ID NO: 29531 - DNA, 260 bp, Unknown
  Description of Unknown: RightRegion for integrase B3532 sequence
aatcaaaatccccacagttggcttaataaagctgattgtggggatttttctttttgctgaaatctgtaaaatatcttccaaaaatcacactaatcttaactttattacacctctattacaccccggacattgccttgctgagattatcgaggacgctctctgtgtcgatgtgagtgtacttcaatgtggtgtcgtagctagtgtggcgggttatatccatgatgaccgcttcgggtactccggcctttgaaagcagggta

SEQ ID NO: 29532 - DNA, 109 bp, Unknown
  Description of Unknown: RightRegion for integrase B3533 sequence
cctggtatcggacgattcgttgccaacccctttgaactggatatctacctgcgcctgtgatctttgggcgcaggcattatttttactgtattaaggctttttctgcctg

SEQ ID NO: 29533 - DNA, 109 bp, Unknown
  Description of Unknown: RightRegion for integrase B3534 sequence
gccaaggatgtgctgaaggaatgtgtgtgggatggggacacgctttttcttacgctttaattttcccttttttattttgataccctccggccgcatacgaagtgatgca

SEQ ID NO: 29534 - DNA, 260 bp, Unknown
  Description of Unknown: RightRegion for integrase B3535 sequence
cctggtatcgggcgattcgttgccaatccctttgaactggatatctacctgcgcctgtgatctttggcgcaggcattattttactgtattaaggctttttctgcctgtaatctcctagttttatgcaaaaataatcacttccatcatgtatgagcgaatgaactggctcatatggaaatgatctgcgctatggtgcgacagctgacacaggatctgacaccggaagaaatgcagaaaagtgggtttgatacctactatat

SEQ ID NO: 29535 - DNA, 260 bp, Unknown
  Description of Unknown: RightRegion for integrase B3536 sequence
gattttaagctagagctattcccgaaactgcccaagaacaaaggggattctagcgaatgatatagtcgaaccaccaacgaacttgggcatctcgaaatggtcggctccattgtttcccagcttgtaaaagaccttccttgtgatgatattgaccttgcaggctttgagaaatactatgtcgaccacactttgggcgtatggccacagtctgccggaggtgttcctttctcagctactaccttccaatcttgtggtgatcc

SEQ ID NO: 29536 - DNA, 260 bp, Unknown
  Description of Unknown: RightRegion for integrase B3537 sequence
ttcaaaagcaaaattgactttactttcaaggatggtgaagtgattacagtcaaaatgtaagttaaccattaccgcactcagctaatttggctgggtttttttgtcttcatttatcagtttttgggatgaagtagttgatttaaccgatgataccaatagcccatggaaatggtagtcgctgcaaaaagagcaacgaaaatatagtgcagccaaattaattgatgggctagtgagtagtcggttggcgcaattgtggcaat

SEQ ID NO: 29537 - DNA, 260 bp, Unknown
  Description of Unknown: RightRegion for integrase B3538 sequence
cctggtatcggacgattcgttgccaacccctttgaactggatatctacctgcgcctgtgatctttgggcgcaggcattattttactgtattaaggctttttctgcctgcaatctcctacttttatgcaaaaataatcacttccatcatgtatgagcgaatgaactggctcatatggaaatgatctgcgctatagtgcgacagctgacacaagatctgacaccggaagaaatccagaaaagcgggtttgatacctactatg

SEQ ID NO: 29538 - DNA, 260 bp, Unknown
  Description of Unknown: RightRegion for integrase B3539 sequence
cctggtatcggacgattcgttgccaacccctttgaactggatatctacctgcgcctgtgatctttgggcgcaggcattattttactgtattaaggctttttctgcctgcaatctcctacttttatgcaaaaataatcacttccatcatgtatgagcgaatgaactggctcaaagaagatagaagtgattattacatataataagaaggttttggaaacttttatatgattatattacaccattactctgcctttttcaac

SEQ ID NO: 29539 - DNA, 260 bp, Unknown
  Description of Unknown: RightRegion for integrase B3540 sequence
gattttaagctagagctattcccgaaactgcccaagaacaaagggaattctagcgaatgatatagtcgaaccaccaacgaacttggacatctcgaaatggtcggctccattgtttcccagcttgtaaaagaccttccttgtgatgatattgaccttgcaggctttgagaaatactatgtcgaccacactttgggcgtatggccacagtctgccggaggtgttcctttctcagctactaccttccaatcttgtggtgatcc

SEQ ID NO: 29540 - DNA, 260 bp, Unknown
  Description of Unknown: RightRegion for integrase B3541 sequence
tccacttttgatttcgtgcgcagtggcaagaatgccctgacgcagttattcgccaaatagcgaggtcattgtttgaatgcgtgataaattgaatttatagccttctcataatcgaaggtgtccacacccacgatgatattaagctcggaagagccttggtctatcatgcggacgttgacgtttgcgtcggcaagtgcgccgaaaagggttgcggcagtgccctgtcttgacgccatattgtgtccgacggttgcgatgag

SEQ ID NO: 29541 - DNA, 260 bp, Unknown
  Description of Unknown: RightRegion for integrase B3542 sequence
attgtgaaacgtatagaatgggatggaaaagaccttcatattgatatttttgatatataactatgtagcactttgtcagcatagcattatctatacacctagctgcataagttgccaatctggtgcctttttttttgtcataggtggatatggcttttataagtccaacggttccaatagatatgagatcatctaaatcctttccagtatttgtatacttctttacgatatgagctacaagtcttaaatttctctctatt

SEQ ID NO: 29542 - DNA, 109 bp, Unknown
  Description of Unknown: RightRegion for integrase B3543 sequence
gattttaagctagagctattcccgaaactgcccaagaacaaaggggattctagcgaatgatatagtcgaaccaccaacgaacttgggcacctcgaaatggttggctcca

SEQ ID NO: 29543 - DNA, 109 bp, Unknown
  Description of Unknown: RightRegion for integrase B3544 sequence
gattttaaactagagctattcccgaaactgcccaagaacaaagggaattctagcgaatgatatagtcgaaccaccaacgaacttgggcatcttgaaatggtcggctcca

SEQ ID NO: 29544 - DNA, 260 bp, Unknown
  Description of Unknown: RightRegion for integrase B3545 sequence
aaggacgagaataggacggcagtgaataccgtgccctttggcacggtagagccgtcctgaccgacgagcgtcgagcgaggagaaagagtccttctgcccctgccaaaaggtcggttgcaaaagcagccgattttttttgctctttgcagaagtacatttttccaattccagttttttcaaaatgcgcaactaaattcagttgcatttttatctttttgtgctatactatatgagaaagggaggcatgcggctttggacaa

SEQ ID NO: 29545 - DNA, 260 bp, Unknown
  Description of Unknown: RightRegion for integrase B3546 sequence
gtccacacgaatgggcgaatgaccttccacttccgcagcggaacagagatcgacgcataagattcataaagagaaaaagcccacaggcttacacagcctgtgggcttttctaaattgctggtgaagggagtgcaaatgagccgtagagtgtgcatttctttctagtgggtgcatcctctattaagaaccgggtcatttttcattttaatcgccggtcgaacacctgaatgcgagatcattgtcttgcgttatggtttctg

SEQ ID NO: 29546 - DNA, 260 bp, Unknown
  Description of Unknown: RightRegion for integrase B3547 sequence
aaaaagttccgaagccgttttggcttcggaactttttttgttacctgctttgtgctataatggaaagcaagcatcttgaccacaacgatcaagggggacaaagcagccgattggaaaaccagaaaggagaaggaccaatgacctgttttttctgcaagggaaacttagagaacagcaccacgacccacatgatcgagctgccgcactgcatcctcatcgtgaagaacgtcccctgccaccgctgcgaccagtgcggggag

SEQ ID NO: 29547 - DNA, 260 bp, Unknown
  Description of Unknown: RightRegion for integrase B3548 sequence
cggcttcgccgtgaagtgttcgctctgatccacaacagaaaagcgccgtcttggaagtgattccgagatggcgcttttttgccatatgaggcacacatctgctactgaatgccacaagtattaccgacctaatttcaaagcagatgacctatttatgaaccatagacggctactctctgatatcgaaaagctatcattgacgcagtcagcaaagcaaaagcaaagatgccatgttttattttgattgctttctaagtgcc

SEQ ID NO: 29548 - DNA, 260 bp, Unknown; identical to SEQ ID NO: 29519
  Description of Unknown: RightRegion for integrase B3549 sequence

SEQ ID NO: 29549 - DNA, 260 bp, Unknown
  Description of Unknown: RightRegion for integrase B3550 sequence
aaaaatggtgataatatctcattttctttggatatttatccgaaaattcaacgaaaatagtgtatggtaggatttatgtgccagcacattggcacgtatcgtgtcctccggccaggttgcgtagatctcactgctggccacgtttttgatataatccttatatcttacataataatcctgtgcagaggtatcccctattggcccgtcgtggactacgatatactccgggatcaccactttgtttaatacgatctctccgg

SEQ ID NO: 29550 - DNA, 109 bp, Unknown
  Description of Unknown: RightRegion for integrase B3551 sequence
cggaaagtacattatactttcgctctcgacctttatcccaggttgccaaaaagcccgtaaatacgggctttttgcataatgtccaacatccatgtactgacgaactggc

SEQ ID NO: 29551 - DNA, 260 bp, Unknown
  Description of Unknown: RightRegion for integrase B3552 sequence
cctggtatcggacgattcgttgccaatccctttgaactggatatctacctgcgcctgtgatctttgggtgcaggcattattttactgtatcaaggctttttctgccagtaatctcctgttttcacgcaaaaataatcacttccatcatgtatgagcgaatgaactggctcatatggaaatgatctgcgctatggtgcgacagctgacacaggatctgacaccggaagaaatccagaaaagcgggtttgatacctactatg

SEQ ID NO: 29552 - DNA, 109 bp, Unknown
  Description of Unknown: RightRegion for integrase B3553 sequence
gattttaagctagagctattcccgaaactgcccaagaacaaagggaattctagtgaatgatatagtcgaaccaccaacgaacttggtcatttggaaatggtcggctcca

SEQ ID NO: 29553 - DNA, 260 bp, Unknown
  Description of Unknown: RightRegion for integrase B3554 sequence
gagtattggcaaagcgtggtatcgaaagccacacaaaaagctatcgaaagtttgacatagggtatgtaatgacttaatctaaattctctaacaggtcttaccaaagtattgatacctcatttcgttatgtcgcaaatggggtatttttttatttgacacgcggtatcaatactggtactatgatccacttgggggcaatccccttatagtaagttcaagtttagtaccccctatcgcaaataatttggtacacacccttc

SEQ ID NO: 29554 - DNA, 109 bp, Unknown
  Description of Unknown: RightRegion for integrase B3555 sequence
gattttaagctagagctattcccgaaactgcccaagaacaaaggggattctagcgaatgatatagtcgaaccaccaacgaacttgggcatctcgaaatggtcggctcca

SEQ ID NO: 29555 - DNA, 260 bp, Unknown
  Description of Unknown: RightRegion for integrase B3556 sequence
tggaacggtgacacaacagaaattgagattgatttctggggaagtaaaaaaaaagtgtagggtccaatgactctacacctattttgaatgatatatcgcaatactataaaccttgcatgaccagtgtcaagaagtatgatgttttccgcaaattcatgaagagcatattgctgacaaacttttatatcaagtttcttttcatttctaagttctactggtaaaggtataactgcaaaaccattgtcttttaactctttttg

SEQ ID NO: 29556 - DNA, 109 bp, Unknown
  Description of Unknown: RightRegion for integrase B3557 sequence
cctggtatcggacgattcgttgccaatccctttgaactggatatctacctgcgcctgtaatctttgggtgcaggcattattttactgtatcaaggctttttctgccagt

SEQ ID NO: 29557 - DNA, 260 bp, Unknown
  Description of Unknown: RightRegion for integrase B3558 sequence
cctggtatcggacgattcgttgccaatccctttgaactggatatctacctgcgcctgtgatctttgggcgcaggcattattttcactgtattaaggcttttttctgcctgtaatctcctacttttgtgcaaaaataatcacttccatcatgtatgagcgaatgaattagctcatatggaaatgatctgcgccatcgtccgtcagttaacccaggatctgacaccggaagaaatccagaaaagtggctttgacacctacta

SEQ ID NO: 29558 - DNA, 260 bp, Unknown
  Description of Unknown: RightRegion for integrase B3559 sequence
gacttacataatataaacttcgaattgacggtatacccgaagattcctttgcgtccttaaccataagcctatatgcgcaaatgtatacccccactcgtaagtcatcagcatcacctggtccgccgcctcgcccagcagccggtaatcgacgccctcgtagagcagcccctgctggtcgctggaggtttttggggccagcgccacggagacccggtagccgaaggggctcagaatatgccgcaccagggccacaaactccg

SEQ ID NO: 29559 - DNA, 163 bp, Unknown
  Description of Unknown: RightRegion for integrase B3560 sequence
aacaatataatccgaaccttgtaccgattggtcatgggttcggatttattgtttttatagaagaagttgaagactggtaataaagaaaccgggaggactgccgatcagggcaatcctcccggtttctttatgtagatgcactgtctgaaatctccttctttgc

SEQ ID NO: 29560 - DNA, 260 bp, Unknown
  Description of Unknown: RightRegion for integrase B3561 sequence
gattttaagctagagctattcccgaaactgcccaagaacaaagggaattctagcgaatgatatagtcgaaccaccaacgaactcgtagtctaactatatcattaatataaaggggactattttagcccccttttatacttagtttcttctttattataatagatacttggctttcatataaccaactacaccattatactcaacttttgcatatcctttaccgatatacattacattaacctttgttttatttggaagct

SEQ ID NO: 29561 - DNA, 109 bp, Unknown
  Description of Unknown: RightRegion for integrase B3562 sequence
gattttaagctagagctattcccgaaactgcccaagaacaaaggggattctagcgaatgatatagtcgaagcaccaacgaacttgggcatctcgaaatggtcggctcca

SEQ ID NO: 29562 - DNA, 260 bp, Unknown
  Description of Unknown: RightRegion for integrase B3563 sequence
cggttccggctgaaaaacggcttggagctgctagagcaaatcgaaaggacaagacgctgatgggaaatcggaagctgccgttcggctatcagatgcgcatgggcgaaatcatccggaatgagccggaagcaaaagctgtgcaggacatcttcctacaatatacgctcggcgcgtcgctcaaagagattgcagagcagatgggaaaaaacggccccacctatgacgagggcaagagctggaacaagaacatgatcgcacga

SEQ ID NO: 29563 - DNA, 260 bp, Unknown
  Description of Unknown: RightRegion for integrase B3564 sequence
gattttaagctagagctattcccgaaactgcccaagaacaaaggggattctagcgaatgatatagtcgaagcaccaacgaacttgggcatctcgaaatggtcggctccattgtttcccagcttgtaaaagaccttccttgtgatgatattgaccttgcaggctttgagaaatactatgtcgaccacactttgggcgtatggccacagtctgccggaggtgttcctttctcagctacttccttccaatcttgtggtgatcc

SEQ ID NO: 29564 - DNA, 260 bp, Unknown
  Description of Unknown: RightRegion for integrase B3565 sequence
cctggtatcggacgattcgttgccaacccctttgaactggatatctacctgcgcctgtgatctttgggcgcaggcattatttttactgtattaaggctttttctgcctgcaatctcctacttttatgcaaaaataatcacttccatcatgtatgagcgaatgaactggctcatatggaaatgatctgcgctatagtgcgacagctgacacaagatctgacaccggaagaaatccagaaaagcgggtttgatacctactat

SEQ ID NO: 29565 - DNA, 183 bp, Unknown
  Description of Unknown: RightRegion for integrase B3566 sequence
gccaaggatgtgctgaaggaatgtgtgtgggatggggatacgctttttcttacgctttaattttcccttttttattttgataccctccggacgcattcggagactcgcccggatcagatcgcgcatggaaatctcctgcgaaccatcccggttttctacccgtgtttccaggctgacaagatt

SEQ ID NO: 29566 - DNA, 260 bp, Unknown
  Description of Unknown: RightRegion for integrase B3567 sequence
aagaaggtacattatgctttcaccctcgacctttatcccaaactcccaaaaagcccgtaaatacgggctttttgcataatgtccaacgtccatgtactgacgaactggcccatctggagatggtttccaccattgtccaccagcttacctgcaatctttctatggatgaaattgaaaaatctggttttgggccatattatattgaccatacagtagccgtatggccacaggcggctggtggcgtcccatttaatgcctgt

SEQ ID NO: 29567 - DNA, 260 bp, Unknown
  Description of Unknown: RightRegion for integrase B3568 sequence
gttcacaccaatgggcggatgaccttccgcttccgcagcggaacagagatcgacgtataagatccataaagcgaaaaagtccgcaggtttgagcgcctgcgggcttttctgcattgaaatgcaagagaaatatggtataatgttataaaatgaaagtgagtggggtattaagatgttatttgacgaaaaggatttaagtgtttttgataacacagattctcgcgactactttatggagatacttcaatcatattacagta

SEQ ID NO: 29568 - DNA, 260 bp, Unknown
  Description of Unknown: RightRegion for integrase B3569 sequence
cacggttatatggaaaagtatacgactgttattgaaagttgtgagattgtttctttttgaggaggcagatgatgtttattgattataataatattaatgagttaatgagaggggggtgcggacatattcttggactattttatgctgataatccaagactatgtctgtactctaccgggctcatatagccgagagatttttttattcgttttgtgttataccaatcaatatagctgttaagctcatttatgaaatcatcc

SEQ ID NO: 29569 - DNA, 109 bp, Unknown; identical to SEQ ID NO: 29528
  Description of Unknown: RightRegion for integrase B3570 sequence

SEQ ID NO: 29570 - DNA, 260 bp, Unknown
  Description of Unknown: RightRegion for integrase B3571 sequence
cgatggcatggtagcgttgatgattttgacgttgtggtctatccaaagttgccgagatagcgttatttttatttatgtatagcatgtgtgctctaacgaatccgcccgcagatgatgtacattattattccaaaataaaatagacattcggcagtgctgtatacccctaaatttaaaacgccttaaaatcgattctacagcgtgtttcggcatatgtagcaatttgcacaaatcaggctcttgaattttagccattcata

SEQ ID NO: 29571 - DNA, 260 bp, Unknown
  Description of Unknown: RightRegion for integrase B3572 sequence
tccgggaaaggtaaggatgattttgaattgattttataccccaaattgcctaagtcataaaatgagcagtggaaattactccactgctcctgtcttattatcatattttgatctacacatcagaaatcctgtacctctaactaagctctggatcacatcattgctgtgcacgttagtatccctgtgtataggactacttatgtgtaacgctaaaggtctttgccaaactctttattataatagtccaaaaagcatttttt

SEQ ID NO: 29572 - DNA, 109 bp, Unknown
  Description of Unknown: RightRegion for integrase B3573 sequence
cctggtatcggacgattcgttgccaatccctttgaactggatatctacctgcgcctgtgatctttggcgcaggcattattttactgtattaaggctttttctgcctata

SEQ ID NO: 29573 - DNA, 109 bp, Unknown
  Description of Unknown: RightRegion for integrase B3574 sequence
cctggtatcggacgattcgttgccaatctctttgaactggatatctacctgcgcctgtgatctttgggcgcaggcattattttactgtatcaaggctttttctgccagt

SEQ ID NO: 29574 - DNA, 109 bp, Unknown
  Description of Unknown: RightRegion for integrase B3575 sequence
cctggtatcggacgattcgttgccaatccctttgaactggatatctacctgcgcctgtgatctttgggcgcaggcattattttactgtatcaaggccttttctgcctgt

SEQ ID NO: 29575 - DNA, 260 bp, Unknown
  Description of Unknown: RightRegion for integrase B3576 sequence
cctggtatcggacgattcgttgccaatccctttgaactggatatctacctgcgcctgtgatctttgggcgcaggcattattttactgtatcaaggccttttctgcctgtaatctcctacttttatgcaaaaataatcacttccatcatgtatgagcgaatgaactggctcatatggaaatgatctgcgctatggtgcgacagctgacacaggatctgacaccggaagaaatccagaaaagtgggtttgatacctactatg

SEQ ID NO: 29576 - DNA, 260 bp, Unknown; identical to SEQ ID NO: 29519
  Description of Unknown: RightRegion for integrase B3577 sequence

SEQ ID NO: 29577 - DNA, 260 bp, Unknown
  Description of Unknown: RightRegion for integrase B3578 sequence
cctggtatcggacgattcgttgccaatccctttgaacttgatatctacctgcgcctgtgatctttgggcgtaggcattattttcactgtattaaggcttttttctgcctgtaatctcctacttttgtgcaaaaataatcacttccatcatgtatgagcgaatgaacttgcccacatggaaatgatctgtgccattgtccgtcaattaacccaggacctgacaccggaagaaattcagaaaagcggatttgacacctacta

SEQ ID NO: 29578 - DNA, 102 bp, Unknown
  Description of Unknown: RightRegion for integrase B3579 sequence
aaaaaggggctgtctcaaaatgatttttcaaaatcatatgaggcagtcccttttttctagtattcaccaagaaaaaagacgaattctacgtcaaaaacagta

SEQ ID NO: 29579 - DNA, 260 bp, Unknown
  Description of Unknown: RightRegion for integrase B3580 sequence
cgatggcacggtagcgttgatgattttgacgttgtggtctatccaaagttaccgagatagcgttatttttatttatgtatagcatgtgtgctccaacgagctggcacacgtggagatcatttccgccattgtctatcaattaacacaaggactgacaccggagcaaatcaaggaagcgggcttcgacacctacttcgtcgaccacaccttgggggtatatccccagtctgccgccggtgctcctttcaccgccgcctatt

SEQ ID NO: 29580 - DNA, 109 bp, Unknown
  Description of Unknown: RightRegion for integrase B3581 sequence
gattttaagctagagctattcccgaaactgcccaagaacaaagggaattctagcgaatgatatagtcgaaccaccaacgaacttggtcatttggaaatggtcggctcca

SEQ ID NO: 29581 - DNA, 260 bp, Unknown
  Description of Unknown: RightRegion for integrase B3582 sequence
gcggcggctggcgaactgtccaaaaagttcgcacaaggtcacgttgcctccaccaactgaaagggcgagggtatttggtactgttattttcggacagtatcggatactctcgcctttatttttgttgctgatatgattcttcaaattgatttggggtttgctgtttaagacattcatgcggtcggtaatcgttataaaaatcaatatattctgatagactttcctctaattcggagacagtttcataaaaatgaaatttg

SEQ ID NO: 29582 - DNA, 260 bp, Unknown
  Description of Unknown: RightRegion for integrase B3583 sequence
gattttaagctagagctattcccgaaactgcccaacaacaaaggggattctagcgaatgatatagtcgaaccaccaacgaacttgggcatctcgaaatggtcggctccattgtttcccagcttgtaaaagaccttccttgtgatgatattgaccttgcaggctttgagaaatactatgtcgaccacactttgggcgtatggccacagtctgccggaggtgttcctttctcagctactaccttccaatcttgtggtgatcc

SEQ ID NO: 29583 - DNA, 260 bp, Unknown
  Description of Unknown: RightRegion for integrase B3584 sequence
aaggacgagaataggacggcagtgaataccgtgccctttggcacggtagagccgccctgaccgacgagcgtcgagcgaggagaaagagtccttctgcccctgccaaaaggtcggttgcaaaagcagccgattttttctttgcttcttgcagaaggacgagaataggacggcagtgaataccgtgccctttggcacggtagagccgtcctgaccgacgagcgtcgagcgaggagaaagagtccttctgcccctgccaaaaa

SEQ ID NO: 29584 - DNA, 260 bp, Unknown
  Description of Unknown: RightRegion for integrase B3585 sequence
gattttaagctagagctattcccgaaactgcccaagaacaaaggggattctagcgaatgatatagtcgaaccaccaacgaacttgggcacctcgaaatggttggctccattgtttcccagcttgtaaaggatcttccttgtgacgacattgaccttgcaggctttgagaaatactatgtcgaccacactttgggcgtatggccacagtctgccggaggtgttcctttctcagctactaccttccaatcttgtggtgatcc

SEQ ID NO: 29585 - DNA, 260 bp, Unknown
  Description of Unknown: RightRegion for integrase B3586 sequence
tccacttttgatttcgtgcgcagtggcaagaatgccctgccgaagttattcgctaaatagcgcgcttaacgctttacagtttcattgcgacatcccatgcgccccagatgaccgtacggagattgccgactttcgcactgtcgccgacaacgtgaacgtgtttgccctcttgcgcgacgggtgcgggcttgtatccgacggacataatgacggattcggcaggaatctcaaactctttgcctgttttcatgtcttgaact

SEQ ID NO: 29586 - DNA, 109 bp, Unknown
  Description of Unknown: RightRegion for integrase B3587 sequence
cctggtatcggacgattcgttgccaatccctttgaactggatatctacctgcgcctgtgatctttgggcgcaggcattattttactgtatcaaggctttttctgccagt

SEQ ID NO: 29587 - DNA, 109 bp, Unknown; identical to SEQ ID NO: 29532
  Description of Unknown: RightRegion for integrase B3588 sequence

SEQ ID NO: 29588 - DNA, 109 bp, Unknown
  Description of Unknown: RightRegion for integrase B3589 sequence
cctggtatcggacgattcgttgccaatccctttgaactggatatctacctgcgcctgtaatctttgggcgcaggcattattttactgtattaaggctttttctgcctgc

SEQ ID NO: 29589 - DNA, 260 bp, Unknown
  Description of Unknown: RightRegion for integrase B3590 sequence
aaccccaattcattccagttggatatttttccagcccttctgacagatctgcggccgtgagcgccgacgaaaaaagccctccaactgcaacaacacccggaaaagctgttgcagttggaggcttttgttgttgcaccgttagatgtcgaattaaaaatacacggcgaactgcgttccacattatgaaccgttgttgcagctgttgcagtttttggacttgtcgttgcagcaaattatccgttgattccagtcttttctaa

SEQ ID NO: 29590 - DNA, 260 bp, Unknown
  Description of Unknown: RightRegion for integrase B3591 sequence
aaagcaggtgtcggacgatacgtggagaatgttttttccttagaaatccaatacatataaccatttccaacatctatgtactgatgaattagcgcatctggaaatggtcgcatccatcgtccgacagctcaccaaaggcttaagtgcagaagagcttgaagctgccggatttgcaccatattatgtcgaccataccggtggtatctggccacaggcggcgggcggtattccttttaacgcctgcgaatttcagtccaaag

SEQ ID NO: 29591 - DNA, 260 bp, Unknown
  Description of Unknown: RightRegion for integrase B3592 sequence
cctgatagctccaccagaaacgaaagcactacacagaaatgtgtagtgcttttttgttgacgccaaacgagtgagggtttagctcagccgggagagcgccgtgcatggactgcaagagggtcaccgtgatttgaatcggcccggtaatctccaccagaacgaaagcactacacagaaatgtgtggtgcttttttgttttatctgccgttcaccttacgtcccctttcatgaaaaaagcgtttgtcgcagcccgcaggccg

SEQ ID NO: 29592 - DNA, 260 bp, Unknown
  Description of Unknown: RightRegion for integrase B3593 sequence
gagtgttcgtttaagctctgctctgctccaccagaacatagaaaaccagcaatccattgagattgctggtttttctttatttatcaatgctgagtggcgctctcagagggatttcgctccctgcaaacattgaaaccgcaagctatttgtgttataaaaacttccaaaactcagagtcgggcgaaccgtgtaagtttgtccgactcttaccttttcacgataacagcaaaaaatcctgcagcccaccgcaatttccattt

SEQ ID NO: 29593 - DNA, 260 bp, Unknown
  Description of Unknown: RightRegion for integrase B3594 sequence
aaagcaggtgtcggacgatacgttgagaatgttttttccttagaaatccaatacatataaccatttccaacatctatgtgctgatgaattagcgcatctggaaatggtcgcatccatcgtccggcagctcaccaaaggtttaagtgcagaagagcttgaagctgccggatttgcaccatattatgtcgaccataccggtggtatctggccacaggcggcgggcggtattccttttaacgcctgcgaatttcagtccaagg

SEQ ID NO: 29594 - DNA, 202 bp, Unknown
  Description of Unknown: RightRegion for integrase B3595 sequence
gttcttactaaaaatgcttcgcattatggattcggtgttctcttcgggaaagaagtctagaaatagacttctttttttgttgcaatcataaccacccttcaaaagggtggtttgctctggggctataagcccatgagaaaggcgctctccttcacttatgttcaggcgcattgcccttgcctctttaacttgccccacaaag

SEQ ID NO: 29595 - DNA, 260 bp, Unknown
  Description of Unknown: RightRegion for integrase B3596 sequence
ggtcaaccaaaagacatccgaacatttcggatgtctttttttgttcttttttatttatagagaaagaaaaagagcgatgcagcaaacgctgcatcgctcttttgggttaacagtaatcagtaattcagaccgaagccgctgcggtagtagtttccgtcggcatcgcagtaggcgtagctgccgcccttgacgttggcgaggatagcgggatcgatgtactgatccttatcgtagccgggcacatcgttgggagaggcgca

SEQ ID NO: 29596 - DNA, 260 bp, Unknown
  Description of Unknown: RightRegion for integrase B3597 sequence
atgattcatacctttacagtcaccgtacacccgcagaaacggggaaggaaaaccctgtgattacaaaagtctgttgacttctttctgcacagcagcataatcatatcctgcggcagtcaacttgttcttacggtctgcaccattgccccacttgcctgcgataacttccctcgcaatctgggtcacagatttcttactggaagtgctgccctttgccagttcattgacttttgcctgaacctgagagtaattgtacccgg

SEQ ID NO: 29597 - DNA, 260 bp, Unknown
  Description of Unknown: RightRegion for integrase B3598 sequence
aaagcaggtgtcggacgatacgtggagaatgttttttccttagaaatccaatacatataaccatttccaacatctatgtactgatgaactggcgcatctggaaatggtcgcatccatcgtccggcagctcaccaaaggcttaagtgcagaagaacttgaagctgccggatttgcaccatattatgtcgaccataccggtggtatctggccacaggcggcgggcggtattccttttaacgcctgcgaatttcagtccaagg

SEQ ID NO: 29598 - DNA, 260 bp, Unknown; identical to SEQ ID NO: 29577
  Description of Unknown: RightRegion for integrase B3599 sequence

SEQ ID NO: 29599 - DNA, 260 bp, Unknown
  Description of Unknown: RightRegion for integrase B3600 sequence
ggcccatttgataattttgagctggtactttatccgaagttgccgccaaaaatcgagtaacacaaaagccgtccctttgtggggcggcttattttgcttacaaccttagaaatattatttgtgatacttctaaggttatcactaataagcctaaaaaaatgcggcccggctcctactgtcctgcgcaaaatgtccagcacaaaatcctaagatttcataggcgtatgagatttttcccgtcgccatgtcaagcgtgtttc

SEQ ID NO: 29600 - DNA, 260 bp, Unknown
  Description of Unknown: RightRegion for integrase B3601 sequence
ccacaggagtgtgaaattttgttctttttaaagaccggagatgtaaaaaaaagtcaataatcgagcgggataaaccgggctgttctgaatacttttttttgcactgatctctaatgtgttaatttttttcattgtttttcacctttgttccggttataatggaactacctttcttttgattggtgccggttgtgtgtcttggtaggattgcaaccggcttttttgttttcctttgatggttatataatacattattttta

SEQ ID NO: 29601 - DNA, 260 bp, Unknown
  Description of Unknown: RightRegion for integrase B3602 sequence
gtccacgccgacggacgaatgaccttcaaattccagggcggcacagaaatcgaggcgtgagtcccaagaaaaatgaaaagaccgcaggtttcaacgcctgcggtttattgctgtccccatgggtagagtaatgcaccccctaaagccgtggttgcacccccctataatcaaaaatgcaccccccctctaaaccgtaattgcacccccttgcacggtttctatcaaaattacggttctttgccatagaaaaaaccgcatta

SEQ ID NO: 29602 - DNA, 260 bp, Unknown
  Description of Unknown: RightRegion for integrase B3603 sequence
aatgagaatttgaatgtggcttttactctttatatgcgtactaaatccctcatgctataattggcatgggggatttttctatgcaaacaaaaatgtatgtaattcagccgcaagttataaaggttgatcaggcaaaagtaaaaaagcagcgagtggcagtttattgccgtgtcagtaaaaatacagcggagcaaatccatagccttgaaatacaagaaagctattttgaaaggattgtagaggaaaatcggattggatgc

SEQ ID NO: 29603 - DNA, 260 bp, Unknown
  Description of Unknown: RightRegion for integrase B3604 sequence
cctgattgctccaccagaaacgaaagcactacacagaaatgtgtagtgcttttttgttgacgccaaacgagtgagggtttagctcagccgggagagcgccgtgcatggactgcaagagggtcaccgtgatttgaatcggcccggtaatctccaccagaacgaaagcactacacagaaatgtgtggtgcttttttgttttatctgccgttcaccttacgtcccctttcatgaaaaaagcgtttgtcgcagcccgcaggccg

SEQ ID NO: 29604 - DNA, 109 bp, Unknown
  Description of Unknown: RightRegion for integrase B3605 sequence
tctaaagaacaaaagattgtaattaaatacaaatatataggaaagtcaattatagcataaaaacacctatccatgtgtatgggacttggatgcaacgccgccggggtgg

SEQ ID NO: 29605 - DNA, 260 bp, Unknown
  Description of Unknown: RightRegion for integrase B3606 sequence
gtttacaatgaaactgacatccgcttcactttcaaggatggaacggaatacagagtataagcgtataaaacgaactcctcactaccattacggtggtgaggagtttttcaatctattcgataaattggaatttgacggtattacaacagctttatctcattggcaatcatagccacggttttggcgttggtatcaattttaatggtacccaatgcttgatacatcggtattcttgctatgcttcgctcaattatatcttc

SEQ ID NO: 29606 - DNA, 260 bp, Unknown
  Description of Unknown: RightRegion for integrase B3607 sequence
tcatctatcaaacaagttcgtacatccccccttctcccgcaccacaaaaagcgacgctgattcgttgaaaatcagcgtcgcttttattcttgtaacccactcgccttgcaaatgcaaacacccctgaaaatcatatatctttcgggagtatttgcatcccaactttttcccagactataagcagatattgctagagataacacttcttctgtccggatgcgtcaagcatccggacttttttcgttatcgcccggcacgaa

SEQ ID NO: 29607 - DNA, 260 bp, Unknown
  Description of Unknown: RightRegion for integrase B3608 sequence
ggaacagttgataatcgcaattttaagcttagcataacgcctaaaattccgcaggtgtaaaatttaacatctgcggaatggcgtaaaatggttgtttttattacctataacaactatggttatacttgtagccccactcatatgtcataagaagcacctgatttgccgcctcaccaagtcctccataatcttttccctcatataaaagtcccggctgctctgccgatgtttttggtgctaacgccacactcacgagatac

SEQ ID NO: 29608 - DNA, 109 bp, Unknown
  Description of Unknown: RightRegion for integrase B3609 sequence
aaagcaggtgtcggacgatacgtggagaatgttttttccttagaaatccaatacatataaccatttccaacatctatgtgctgatgaattagcacatctggaaatggtc

SEQ ID NO: 29609 - DNA, 109 bp, Unknown
  Description of Unknown: RightRegion for integrase B3610 sequence
cgctgggcagaccccaccgacttccgcatcaagatatacccgcgtctaccgagaaattgaccctttatcaccgatatcatcttggtacggattcctcggtccctatatc

SEQ ID NO: 29610 - DNA, 240 bp, Unknown
  Description of Unknown: RightRegion for integrase B3611 sequence
ggcccatttgataatttcgagctggtgctttatccgaagttgccgcccaaaatcgagtaatacaaaagccgtccctctgtggggcggcttattttgcttacaaccttagaaatattatttgtttgtctatgtttttcagaacatttgttcttctatatttgttttcattcatgtgcacagatatgcgcagttttaatatgccagatattgcatgattttcccaaaaggcaattcatctca

SEQ ID NO: 29611 - DNA, 260 bp, Unknown
  Description of Unknown: RightRegion for integrase B3612 sequence
agcgcgaacacaatactgttttttacggggcgtgtgttcgggatcgttttgcgggaataaagaagccccaccagggagaaatccttggtgggattttcttgttgcaagcgaatacagcacgatttattcctccagttcaaaccctttttccagcgcatcgtgtagcagctttggcgcggacacactcaacgcctccgcgagtaggcagagctcgacatccgtcactgatcgcgttccttgctcgatttgcgagatcgcat

SEQ ID NO: 29612 - DNA, 260 bp, Unknown
  Description of Unknown: RightRegion for integrase B3613 sequence
atgattcatacctttacagtcaccgtacacccgcagaaacggggaaggaaaaccctgtaattacagaagtctgttgacttctttctgcacagcagcataatcatatcctgcggcagtcaacttgttcttacggtctgtgccgttgccccacttgcctgcgataacttccttcgcaatctgagtcacagatttcttactggaagtgctgcccttcgccagttcattgactttcgcctgaacctgagagtaattgtacccgg

SEQ ID NO: 29613 - DNA, 260 bp, Unknown
  Description of Unknown: RightRegion for integrase B3614 sequence
cctgattgctccaccagaaagaaaagcatcgcacagaaatgtgcggtgcttttttattgacgccgaacgagcgagagcttagctcacccgggagagcgccatgcacggactgtaagaggtcaccgtgattacaacagcccggtaatctccaccagaaccaaagcactacacagaaatgtgtggtgttttttgttttatctgccgttcaccttaacgccccctttcatgaaaaaagcgtttgtcgcagcccgcaggccgtg

SEQ ID NO: 29614 - DNA, 260 bp, Unknown
  Description of Unknown: RightRegion for integrase B3615 sequence
ccgcaggagtgcgaaattttgttctttttaaagaccggagatgtaaaaaaaagtcaataaccgagcgggataaaccgggctgttctgaatacttttttttaaataagttctcagaacgacacgccgtattttacaggaaaatcaactatgtggatggatgcgaaaaggaatttaactacacttacgcatttgcaatctaaataatatacaaaagatgaacggaagagcagagatgtaattttttgacatttaactaaata

SEQ ID NO: 29615 - DNA, 109 bp, Unknown
  Description of Unknown: RightRegion for integrase B3616 sequence
aaagcaggtgtcggacgatacgtggaaaatgttttttccttagaaatccaatacatataaccatttccaacatctatgtactgatgaactggcgcatctggaaatggtc

SEQ ID NO: 29616 - DNA, 260 bp, Unknown
  Description of Unknown: RightRegion for integrase B3617 sequence
tgcgtaactaatacaatgcgggtagagatttattacagatttattgggaaagtcgattagtgtgcgctttgggtatcgctctagagttttcccccacaagcaacatataaaatctagtcgtgactatcctccgaaacagtccggcggactgtttcggaagaacattacacatctaaattatagtttgtcacaatcccaactggcatgcctatcattaaggatcccacaaactacgcctgtaattttatctcacacattaa

SEQ ID NO: 29617 - DNA, 260 bp, Unknown
  Description of Unknown: RightRegion for integrase B3618 sequence
atgattcatacctttacagtcaccgtacaccctcagaaacgtggaaagaaaaccgtgtgattacagaagtctgttgacctctctctgcacagcagtataatcatatcctgcggcagtcaacttgttcttacggtctgtaccgttaccccacttacctgcgataacttccttcgcaatctgagtcacagatttcttactggaagtgctgccctttgccagttcattgactttcgcctgaacctgagagtaattgtacccgg

SEQ ID NO: 29618 - DNA, 260 bp, Unknown
  Description of Unknown: RightRegion for integrase B3619 sequence
cctgattgctccaccagaaccaaagcaccacacggaaacgtgtggtgcttttttcgttaaggccaaacgagtgagggcttagttcacccgggagagcgccgtgcatggactgcaagagggtcaccgtgattacagcagcccggcaatctccaccagaacaaaaaagcgtttgtcgcagcccgcaggccgtgacaaacgctttttattttactgtgcgcccaagcgcattttgaagtcctgatagccgaagtgcaccagtt

SEQ ID NO: 29619 - DNA, 260 bp, Unknown
  Description of Unknown: RightRegion for integrase B3620 sequence
gagtgttcgtttaagctctgctctgctccaccaaaaataccaattacccttttggggtgattggtatttttctttgcatggaagatggagtcgaagtttatccccgtcaggggaaatccatcttcccccaccaaaaataccgattacccgtttgggggtcggtattttttatgccttctcccggcgggaacggtcgggccgtgcgctgccttctcctcgaggagaaggtgctgagcgcagcgaggcggatgaggtggaaa

SEQ ID NO: 29620 - DNA, 260 bp, Unknown
  Description of Unknown: RightRegion for integrase B3621 sequence
gtctacagcaccgatgatattcgcttcaccttcaagcacgggcaggaagtacaggcataaccccatagacgcagaaacgcctcaccactggatttgattccggcggcgaggcgcttttcgcttttagtaaaaatattcttccacgtcagggtctatatcatatcctgcagctttcgctctttcgatgaccctatagcattgatccctgccgtcaacaccattggtgtaaaactcacggttgcattcctcatcatcaaatt

SEQ ID NO: 29621 - DNA, 109 bp, Unknown
  Description of Unknown: RightRegion for integrase B3622 sequence
ggcccatttgataatttcgagctggtgctttatccgaagttgccgcccaaaatcgagtaatacaaaagccgtccctttgcggggcggcttattttgcttgcaaccttag

SEQ ID NO: 29622 - DNA, 260 bp, Unknown
  Description of Unknown: RightRegion for integrase B3623 sequence
tccgaacatggaaaaattatagtcctgaacggggcgattgggtttctgttgcgcagataagtcaaacctctcccttttggggagaggtttttcatttcttgaacatcgcctgcatgatttcgattttctcagcacggtcgatgtgccgtttatgcagatgatcgtacaccgcacgcatggcctccggggcctcgccgtgggtgcgcttgtatgcgtcgatgtggttcatcacgctgttgtgcagcgcgttcatgtgcgac

SEQ ID NO: 29623 - DNA, 260 bp, Unknown
  Description of Unknown: RightRegion for integrase B3624 sequence
gactctcttgagctccaccatcaagctgcaccaaaaaagatgccgctgcgaaaagcctagaagtttcaacgacttccgggcttttttgcgcccattttttcaagcgtgacaaaaagatgccaactgccgtgtcaggcaaattcgatggacctgtacctttacccacggcgttttgaaccgcttttccgagaatttttcgggaaagcggctctttttttgctctcggcaaaacgtagaatttgagcaggcttttttgttgg

SEQ ID NO: 29624 - DNA, 260 bp, Unknown
  Description of Unknown: RightRegion for integrase B3625 sequence
aaccccctattgataaacaaatctattaaacgaaaaacgcaccaacagccactaaaataaaaggggtttgaaaagatgaattgtattttatatatgtctaataatacgaaaatatccatttttgagcaacacaatgtttgtaacgaaaaagccaaacgatacggatattccatagaacgaagaatttttgatattcggggtgatagattcaccgaagcaataaacaaggttatcgcaagcaaagaaattgaagcattgat

SEQ ID NO: 29625 - DNA, 260 bp, Unknown; identical to SEQ ID NO: 29617
  Description of Unknown: RightRegion for integrase B3626 sequence

SEQ ID NO: 29626 - DNA, 260 bp, Unknown
  Description of Unknown: RightRegion for integrase B3627 sequence
cctgattgctccaccagaacaaaaagcaccgcacagaaatgtgtggtgcttttttattagtgccaaacgagtgaggatttaactcacccgggagagcgccgtgcatggactgcaagagggtcaccgtgatttgaatcggcccggtaatctccaccagaaagaaaagcactgcacagaaatgtgtggtgcttatttattgtctgcttgccatgcaaagcagcttatgataagataaacttgtattctccttctttagagat

SEQ ID NO: 29627 - DNA, 260 bp, Unknown
  Description of Unknown: RightRegion for integrase B3628 sequence
aaagcaggtgtcggacgatacgtggagaatgttttttccttagaaatccaatacatataaccatttccaacatctatgtgctgatgaactagcgcatctggaaatggtcgcatccatcgtccggcagctcaccaaaggcttaagtgcggaagaacttgaagctgccggatttgcaccatattatgtcgaccataccggtggtatctggccacaggcggcgggcggtattccttttaacgcctgcgaatttcagtccaagg

SEQ ID NO: 29628 - DNA, 109 bp, Unknown
  Description of Unknown: RightRegion for integrase B3629 sequence
aaagcaggtgtcggacgatacgtggagaatgttttttccttagaaatccaatacatataaccatttccaacatctatgtactgatgaactggcgcatctggaaatggtc

SEQ ID NO: 29629 - DNA, 260 bp, Unknown
  Description of Unknown: RightRegion for integrase B3630 sequence
aaagcaggtgtcggacgatacgtggagaatgttttttccttagaaatccaatacatataaccatttccaacatctatgtgctgatgaattagcgcatctggaaatggtcgcatccatcgtccgacagctcaccaaaggtttaagtgcagaagagcttgaagctgccggatttgcaccatattatgtcgaccataccggtggtatctggccacaggcggcgggcggtattccttttaacgcctgcgaatttcagtccaaag

SEQ ID NO: 29630 - DNA, 260 bp, Unknown
  Description of Unknown: RightRegion for integrase B3631 sequence
aaagcaggtgtcggacgatacgtggagaatgttttttccttagaaatccaatacatataaccatttccaacatctatgtactgatgaattagcgcatctggaaatggtcgcatccatcgtccgacagctcaccaaaggcttaagtgcggaagaacttgaagctgccggatttgcaccatattatgtcgaccataccggtggtatctggccacaggcggcgggcggtattccttttaacgcctgcgaatttcagtccaaag

SEQ ID NO: 29631 - DNA, 260 bp, Unknown
  Description of Unknown: RightRegion for integrase B3632 sequence
ggcccatttgataatttcgagctggtgctttatccgaagttgccgcccaaaatcgagtaatacaaaagccgtccctctgtggggcggcttattttgcttacaaccttagaaatattatttgtaaattttgcgaagtattaaaaaaaacagtacgagaaacacgacgccgatacttctctctggctcatggtcaatctttcgattgagttcatctttttaaatctagcctcgtccataactttcgttattatttttttccc

SEQ ID NO: 29632 - DNA, 260 bp, Unknown
  Description of Unknown: RightRegion for integrase B3633 sequence
cctggtatcggacgattcgttgccaatccctttgaactggatatctacctgcgcctgtgatctttgggcgcaggcattattttcactgtattaaggctttttctgcctgtaatctcctacttttgtgcaaaaataatcacttccatcatgtatgagcgaatgaacttgcccacatggaaatgatctgtgccattgtccgtcaattaacccaggacctgacaccggaagaaattcagaaaagcggatttgacacctactac

SEQ ID NO: 29633 - DNA, 260 bp, Unknown; identical to SEQ ID NO: 29590
  Description of Unknown: RightRegion for integrase B3634 sequence

SEQ ID NO: 29634 - DNA, 260 bp, Unknown
  Description of Unknown: RightRegion for integrase B3635 sequence
atgccttgcaacacgttcatattatatcatgcctgcgcaatatttcaactggcggcgtaaaatttccccctgccgatgggcagggggatcttgttatttgcggacgatatagcgcagatagcgctcgaccttgtccggctgtgcgtccgcgtcccggatgaagtcggcggccagatcggcgtaaaactccgggctgtggatgccgtagcgtttcgccgtggcagcatagtcgctgtacatggcattggcgaccgcgtaga

SEQ ID NO: 29635 - DNA, 192 bp, Unknown
  Description of Unknown: RightRegion for integrase B3636 sequence
ggcccatttgataatttcgagctggtgctttatccgaagctgccgcccaaaatcgagtaatacaaaagccgtccctttgtggggcgacttactttgcttacaaccttagaaatattatttgttcttcttcgtgtctttttgctttacatatctttctttttttctcttcctgatgccttgctttcacaaagc

SEQ ID NO: 29636 - DNA, 109 bp, Unknown
  Description of Unknown: RightRegion for integrase B3637 sequence
cgctgggcagaccccaccgacttccgcatcaagatatacccgcgtctgccgaaaaattgaccctttatcaccgatatcctcttggtacgaattcctcggtccctatatc

SEQ ID NO: 29637 - DNA, 260 bp, Unknown
  Description of Unknown: RightRegion for integrase B3638 sequence
atacaatataaacttttaaactttactagcctaaagattgcaaaaaataaatctgattaaattagtcaggttttattatatatgtaacagaaaatttctatatttgccgtatgatagggagaaatctatcataacgtaaaagacgtttaataagtggcaaaggaaaactgacaattgaactttaaataaccacgactgttaagcgtccacgcccgatgtatatacttacgtattacataattggggtgcggactgcttat

SEQ ID NO: 29638 - DNA, 260 bp, Unknown
  Description of Unknown: RightRegion for integrase B3639 sequence
ggcccatttgataatttcgagctggtgctttatccgaagttgccgcccaaaatcgagtaatacaaaagccgtccctttgtggggcggcttattttgcttacaaccttagaaatattatttgtgatacttctaaggttatcactaataagcctaaaaaaatgcggcccggctcctactgtcctgcgcaaaatgtccagcacaaaatcctaagatttcataggcgtatgagatttttcccgtcgccatgtcaagcgtgtttc

SEQ ID NO: 29639 - DNA, 260 bp, Unknown; identical to SEQ ID NO: 29023
  Description of Unknown: RightRegion for integrase B3640 sequence

SEQ ID NO: 29640 - DNA, 260 bp, Unknown
  Description of Unknown: RightRegion for integrase B3641 sequence
aaagcaggtgtcggacgatacgttgagaatgttttttccttagaaatccaatacatataaccatttccaacatctatgtgctgatgaattagcgcatctggaaatggtcgcatccatcgtccgacagctcaccaaaggcttaagtgcggaagaacttgaagctgccggatttgcaccatattatgtcgaccataccggtggtatctggccacaggcggcgggcggtattccttttaacgcctgcgaattccagtccaagg

SEQ ID NO: 29641 - DNA, 260 bp, Unknown
  Description of Unknown: RightRegion for integrase B3642 sequence
ctgctatatcacacaactacgtgctgcatgaagcgccggaacatcaatcaggaagtttaagggtctggcctgcgtagatggtgttactggtcaggttattcagggtcttaatctccggccagcggctaccgttaccaaggttagcctttgcgatactccacagagagtcaccacgcttcaccttgtaggtgacgtagttaggctcctgcacagtatcagtggcaaccacagtaccgccgctctccgtagtgatataagcg

SEQ ID NO: 29642 - DNA, 260 bp, Unknown
  Description of Unknown: RightRegion for integrase B3643 sequence
ccatgctccacttcttcaccgcgattcccaagaggggtcgcggcattttttgttttttagggaaaacaggaagcaaatatactaccaatttcagctgctttgtgctacaatggaagcgaaaacggcagagggggacggaaaaatgaaaaagctgcttgctgtgtgcctgacggcgctcgtttgctgggtttgtgcggggtacgcggaagaaacgcgggtcggtgatacggtcatgttcgggcaatatgaacaggatggca

SEQ ID NO: 29643 - DNA, 260 bp, Unknown
  Description of Unknown: RightRegion for integrase B3644 sequence
aaagcaggtgtcggacgatacgtggagaatgttttttccttagaaatccaatacatataaccatttccaacatctatgtactgatgaattagcgcatctggaaatggtcgcatccatcgtccgacagctcaccaaaggcttaagtgcagaagaacttgaagctgccggatttgcaccatattatgtcgaccataccggtggtatctggccacaggcggcgggcggtattccttttaacgcctgcgaatttcagtccaagg

SEQ ID NO: 29644 - DNA, 109 bp, Unknown
  Description of Unknown: RightRegion for integrase B3645 sequence
gtgggaattgagggtgagctgacattcacactgcgtaacggcatggagatcgaagtataatataattataatggggctgttgctgagatatgatgtgtctcggctgcag

SEQ ID NO: 29645 - DNA, 109 bp, Unknown
  Description of Unknown: RightRegion for integrase B3646 sequence
aaagcaggtgtcggacgatacgtggagaatgttttttccttagaaatccaatacatataaccatttccaacatctatgtactgatgaattagcgcatctggaaatggtc

SEQ ID NO: 29646 - DNA, 260 bp, Unknown
  Description of Unknown: RightRegion for integrase B3647 sequence
tcggtaatctgtgtacatctttgtcagagattcatttgtctcatatcctgcatcttttaaagactgtaaaatactgatcgctgtggaagaatctgaagatccggatcctgttccaccgtataacggatttgttgaatcccatccgaacacattcagtttcttcgtgtcagaagcgagtggtaagattcctttgtttttcagaagaaccattccttcttctccgactttctgaattgtttcacggctctgctctgttgttt

SEQ ID NO: 29647 - DNA, 260 bp, Unknown; identical to SEQ ID NO: 29617
  Description of Unknown: RightRegion for integrase B3648 sequence

SEQ ID NO: 29648 - DNA, 260 bp, Unknown
  Description of Unknown: RightRegion for integrase B3649 sequence
ggcaaccttgataatttcaatatcacaatttatccaaaaattccgaaatatattacataatgaaaagctgttcactgttgagcagcttttatattatagataacctcaatgtgccaattcctccgtacctatatccgtaagcaacccctttgaaacttcatcgggcatagtatatctttgcgacaaatatctaagtgatgcgccgagttcaccgtttggaccgccgtattgagttataaccacatttgcaagacgtggat

SEQ ID NO: 29649 - DNA, 260 bp, Unknown
  Description of Unknown: RightRegion for integrase B3650 sequence
gaaccctacattgcgtggggaacggtatttgtccaaacaaaaagacactccttaccgtaatggtagggagtgttttctttgtatctaaggcacttaggtgagttaggtgagtaatcgggctaaaatccctataacttcttcttagtacgcgcgtatatagaaatagttatagggaaatgtacccgattactcacctttatcacctaaactttttaaatttaggggcaattatagtcttacttcttccccttcaccacaaa

SEQ ID NO: 29650 - DNA, 109 bp, Unknown
  Description of Unknown: RightRegion for integrase B3651 sequence
ggcaaccttgataatttcaatatcacaatttatccaaaaattccgaaatatattacataatgaaaagctgttcactgttgagcagcttttatattatagataacctcaa

SEQ ID NO: 29651 - DNA, 260 bp, Unknown
  Description of Unknown: RightRegion for integrase B3652 sequence
ggcaaccttgataatttcaatatcacaatttatccgaaaattccgaaatatattacataatgaaaagctgttcactgttgagcagcttttatattatagataacctcaatgtgccaattcttccgtacctatatccgtaagcaacccctttgaaacttcatcgggcatagtatatctttgcgacaaatatctaagtgacgcgccgagttcaccgtttggaccgccgtattgagttataaccacatttgcaagacgtggat

SEQ ID NO: 29652 - DNA, 260 bp, Unknown
  Description of Unknown: RightRegion for integrase B3653 sequence
ccgggaataggtcgatacatagagaattcttttagattagagattttcttaaaaatgtgaagccgctattttagtgcatttacaatcatatacaactgcgtggagctaatgagctggggcattttgaaatgattagcacaatggttcaccagctcacaagaaaccttacaatagaacagattaaaggaactccttttgaagcctactatgtagaccatacatcagcagtgtggcctcaggcggcaggtggtattccattt

SEQ ID NO: 29653 - DNA, 260 bp, Unknown
  Description of Unknown: RightRegion for integrase B3654 sequence
aatgtgtctgccgacaattttgaaatcatcctcttccccaaaatatcacccgaaaactaaccccaaattaccgatagatataacaccctgacgaattcgcccatttggagatgatgggcaccatcgtgcatcagctgacacaggggctaacgaaggacgaaattcttgccgccggcttagatccctattatgtgaaccatggcttaggcgtatacccctcctccgccgcgggtgttcccttcactgctgcgtatctgcaa

SEQ ID NO: 29654 - DNA, 109 bp, Unknown
  Description of Unknown: RightRegion for integrase B3655 sequence
ggcaaccttgataatttcaatatcacaatttatccgaaaattccgaaatatattacataatgaaaagctgttcactgttgagcagcttttatattatagataacctcaa

SEQ ID NO: 29655 - DNA, 260 bp, Unknown
  Description of Unknown: RightRegion for integrase B3656 sequence
acaatagtcgtcttgccttacggtttcgtacttgcagcccagattaaggataggccttaagcctgtcctttttcttttcaaaagccaatgtcgtcaaaggcgtactcgatttcgtctaagagcatacgctccgagatttcatagtcctccagcatttcgtcgataggaaaatgcgctttgaggacaagcagcaaatactcagcaagtccttcagagtcatagccttcgacttcagccgtaccgaggggctgaatcatgcc

SEQ ID NO: 29656 - DNA, 109 bp, Unknown
  Description of Unknown: RightRegion for integrase B3657 sequence
aatgtgcccgccgacaattttgaaatcatcctcttccccaaaatatcacccgaaaactaatcactaatcaatgatagatataacaccctaacgaattcgcccatttgga

SEQ ID NO: 29657 - DNA, 260 bp, Unknown
  Description of Unknown: RightRegion for integrase B3658 sequence
gcaagcgacatgaatctctatgtatttccacgtgtcgaaacggacggcgagcaattatagtcattgcagggggcttatatggttttatacctatggtccgccgatggcagtggctcccctgcccaatgtgcgccaagtggtggagtatgccctgacggaaatcccggcctccaaaatctggctgggcgtccccctctacggctacgactggccgctcccctttgtgcagggacgtaccaaggctcagtccatttcccccc

SEQ ID NO: 29658 - DNA, 109 bp, Unknown; identical to SEQ ID NO: 29654
  Description of Unknown: RightRegion for integrase B3659 sequence

SEQ ID NO: 29659 - DNA, 108 bp, Unknown
  Description of Unknown: RightRegion for integrase B3660 sequence
gtgaacagggacaaaaccatcacatttaagttcgcaaacggcaaggaaatcgcagtttaaaaaggtggcttttttgaaccttctattatttaagcagtctagaatgct

SEQ ID NO: 29660 - DNA, 260 bp, Unknown
  Description of Unknown: RightRegion for integrase B3661 sequence
tatttggtactgttattttcggacagtatcggatactctcgcctttatttttgttgctgatatgattcttcaaattgatttggggtttgctgcttaagacattcatgcggtcggtaatcgttataaaaatcaatatattctgatagattttcctctaattcggagacagtttcataaaaatgaaatttgaactgttcttttttaagcgaagcaaagaaagattccgccacagcattatcaagtggattgcctatatcgga

SEQ ID NO: 29661 - DNA, 182 bp, Unknown
  Description of Unknown: RightRegion for integrase B3662 sequence
tccccttttgttaaaggggaagccgccgagttcgactgcttccccctcggctccacttgaagaaaatccaggtgtcgaagtcgtggaggttgtttttctcgatgatgagctggatcagctcgtagcatatgatatagtggtggcttttcacatcttcccgtttttggtttttctcatagcgg

SEQ ID NO: 29662 - DNA, 260 bp, Unknown
  Description of Unknown: RightRegion for integrase B3663 sequence
aatgtgcccgcagacaattttgaaatcatcctcttccccaaaatatcacccgaaaactaatcactaatcaatgatagctataacaccctaacgaattcgcccatttggagatgatgggcaccatcgtgcatcagctgacacaagggctaacaaaggacgaaattcttgccgccggcttagatccctattatgtgaaccatggcttaggcgtatacccctcctccgccgcgggtgttcccttcactgctgcgtatctgcaa

SEQ ID NO: 29663 - DNA, 260 bp, Unknown
  Description of Unknown: RightRegion for integrase B3664 sequence
acgatagttgtcttgccttacggtttcgtacttgcgacccagattaaggataggctttgagcctgtcctttttcttttggtagtcggtagtccgttttaacgaattttccttatatatacatgtaatgcgagggagcgacgagattgcgctttgagtccttttactttttggaaaaatcttttcagtttttacgaactaccagtactaccagataaccaaaagccttgcaaatcaaggtttttcttcggtagcaggctca

SEQ ID NO: 29664 - DNA, 109 bp, Unknown
  Description of Unknown: RightRegion for integrase B3665 sequence
ggcaaccttgataatttcaatatcgcaatttatccgaaaattccgaaatatattacataatgaaaagctgttcaatgttgagcagcttttatattatagataacctcaa

SEQ ID NO: 29665 - DNA, 260 bp, Unknown
  Description of Unknown: RightRegion for integrase B3666 sequence
accaaacagcagccagaaattaacgtagttttgttaatttctggctgtttttctttgtaaaaatgtaaccggttacattttaggttacatttcgtttttgaaattgcgagtgtatttgatcctgcttctggacagtatcggatgcgcttgctcttatttttgcggcagatatacacggcgctacaaatcgacagaaagtcatagtgttctccctttgtggtttaaaatgccattatcgtcctataaaggaacgaatatgt

SEQ ID NO: 29666 - DNA, 260 bp, Unknown
  Description of Unknown: RightRegion for integrase B3667 sequence
tgttcactggacatccacttcaggatttccgcggaacagttccttggaaaagccgcgtaacgcaaatgtcgacaactcccattggaaagaatgatataatcaatcaagccaatcatccgggtgaggtggttggctcttttaatgggaggattgaatatgaaacgagtctattgtctttaccgcgtttctacagttggacaggtggatcatgacgatatccctttgcagcgaatttcgtgccggcaatatgcgcagcagaa

SEQ ID NO: 29667 - DNA, 109 bp, Unknown
  Description of Unknown: RightRegion for integrase B3668 sequence
ggcaaccttgataattttgatattgccatctatccgaaaattccgaaatatattacataatgaaaagctgttcactgttgagcagcttttatattatagataacctcaa

SEQ ID NO: 29668 - DNA, 109 bp, Unknown; identical to SEQ ID NO: 29654
  Description of Unknown: RightRegion for integrase B3669 sequence

SEQ ID NO: 29669 - DNA, 109 bp, Unknown; identical to SEQ ID NO: 29654
  Description of Unknown: RightRegion for integrase B3670 sequence

SEQ ID NO: 29670 - DNA, 260 bp, Unknown
  Description of Unknown: RightRegion for integrase B3671 sequence
attaattctaaacctatttattttacagatgactatttttatattctttgttctgcttaatttcttaatttcctaaaataaaaggacaactcatttcgagctgtcctttttgatttcattggctttttgctaccaatttttgtcggcctctacggccttgcgaagtttgcgtttagccgtgctgtctgccagcccagctaccgaaaattgtaaagtcccgagtagctgttcccggtttccgtcgtggatgtggaaaagcc

SEQ ID NO: 29671 - DNA, 260 bp, Unknown
  Description of Unknown: RightRegion for integrase B3672 sequence
gttggcagggacaaggcaatcacggtcaccttccgggacggctcggagatacaggcataacagatacatgggtaggaacggcactcggctacggtcgggtgtcttttttcgttaaggggtagaaaaattcataaatctgtgatacaataaattgtagtataagtgcaatatatgttactacagcaaaggagagtcggaatgctgaagaataacgtagaagtcgatgtaaaagtgaaatgtatagagggcgatattaccca

SEQ ID NO: 29672 - DNA, 109 bp, Unknown
  Description of Unknown: RightRegion for integrase B3673 sequence
ccgggaataggtcgatacatagagaattcttttagattagagattttcttaaaaatgtgaagccgctatttttgtgcatttacaatcatatacaactgcgtggagctaa

SEQ ID NO: 29673 - DNA, 260 bp, Unknown
  Description of Unknown: RightRegion for integrase B3674 sequence
gtccatgttatcacgcttggcggcgatgacagggcgagaggcagggataatgtacaataagttgcgcaaattggaaaatgcataaaagaagacatagcttgcaggctctggtagaatgaagttaccacacaaacattcgaaaggagcaagcaaactatgtccgagaaaattgtacagctaaacgaggaagtaatcaagggccaaatcaaggaattggttcgcggcagcgtgggggaaaccctgaacgagctgctggagaa

SEQ ID NO: 29674 - DNA, 109 bp, Unknown; identical to SEQ ID NO: 29654
  Description of Unknown: RightRegion for integrase B3675 sequence

SEQ ID NO: 29675 - DNA, 109 bp, Unknown; identical to SEQ ID NO: 29654
  Description of Unknown: RightRegion for integrase B3676 sequence

SEQ ID NO: 29676 - DNA, 260 bp, Unknown
  Description of Unknown: RightRegion for integrase B3677 sequence
ggcaaccttgataattttgatattgccatctatccgaaaattccgaaatatattacataatgaaaagctgttcactgttgagcagcttttatattatagataacctcaatgtgccaattcctccgtacctatatccgtaagcaacccctttgaaacttcatcgggcatagtatatctttgcgacaaatatctaagtgacgcgccgagttcaccgtttggaccgccgtattgagttataaccacatttgcaagacgtggat

SEQ ID NO: 29677 - DNA, 260 bp, Unknown
  Description of Unknown: RightRegion for integrase B3678 sequence
ggcaacattgataatttcaatatcacaatttatccgaaaattccgaaatatattacataatgaaaagctgttcactgttgagcagcttttatattatagataacctcaatgtgccaattcctccgtacctatatccgtaagcaacccctttgaaacttcatcgggcatagtatatctttgcgacaaatatctaagtgacgcgccgagttcaccgtttggaccgccgtattgagttataaccacatttgcaagacgtggat

SEQ ID NO: 29678 - DNA, 260 bp, Unknown
  Description of Unknown: RightRegion for integrase B3679 sequence
ggcaaccttgataatttcaatatcacaatttatccgaaaattccgaaatatattacataatgaaaagctgttcactgttgagcagcttttatattatagataacctcaatgtgccaattcaccgtcaccgaatgattttgcattgtatcttgcctgtgatattacggaatatctgctgtccaaaactccttcttcctgctgcattgtttcgcatagctttgaatatgtataaggaatttctctcaaatctacgattgaaa

SEQ ID NO: 29679 - DNA, 260 bp, Unknown
  Description of Unknown: RightRegion for integrase B3680 sequence
acgatagtcgtcttgccttacggtttcgtacttgcggcccagattaaggataggctttaagcctgtcctttttcttttggtagtcggtagtccgttttaacgaattttccttatatatacatgtaatgcgagggagcgacgagattgcgctttgagtccctttactttttggaaaaatcttttcagtttttacgaactaccagtactaccagataaccaaaagccttgtaaatcaaggactttcttcggtagcaggctca

SEQ ID NO: 29680 - DNA, 109 bp, Unknown
  Description of Unknown: RightRegion for integrase B3681 sequence
ccgggaataggtcgatacatagagaattcttttagattagagattttcttaaaaatgtgaagccgctattttagtgcatttacaatcatatacaacagcgtggagctaa

SEQ ID NO: 29681 - DNA, 260 bp, Unknown
  Description of Unknown: RightRegion for integrase B3682 sequence
acgatagtcgtcttgccttacggtttcgtacttgcgacccagattaaggataggctttgagcctgtcctttttcttttggtagtcggtagtccgttttaacgaatttttcttatatatacgtgtaatacgagggagcgacgagattgcgctttgagtccctttactttttggaaaaatcttttcagtttttacgaactaccagcactaccagatggccaaaagccttgtaaatcaaggactttcttcggtagcaggctca

SEQ ID NO: 29682 - DNA, 260 bp, Unknown
  Description of Unknown: RightRegion for integrase B3683 sequence
tccgaactcctatttgtttttgtagacggtgtgttcggagtagtaatccctagagtgtgaaattctagggatttttatctgttcaaaaagtccccttatttgaggtgacccccaaaagttaaacctaaaaatctaactttttggggggcggggcattttagggggactttaattatatagagccaattatagctttatttagtttcatcttctaatttattttcagccacaatttttaacttgctgagaattttcgtgag

SEQ ID NO: 29683 - DNA, 260 bp, Unknown
  Description of Unknown: RightRegion for integrase B3684 sequence
gcaagcgacatgaatctctatgtatttccacgtgtcgaaacggacggcgagcaattatagtcattgcagggggcttatatggttttatacttatagccaaataagttatatgtgataatttttcaagaaaaagcgggtgccatagtcaggtacccgctttttcttcccccatatctttttcgatcaaccccacgatataggcgttcaggctcatgccctcctgctgggcgcgggcctttattttctccttcgtgcctccc

SEQ ID NO: 29684 - DNA, 109 bp, Unknown; identical to SEQ ID NO: 29654
  Description of Unknown: RightRegion for integrase B3685 sequence

SEQ ID NO: 29685 - DNA, 260 bp, Unknown
  Description of Unknown: RightRegion for integrase B3686 sequence
tccattagctacggtcagcgtaggggaggaaaagctatcctggaagtgttcttgaagtagggcaaattctttttgccctatgttagtatcctgctcgttcgactttaatcgaaccagcatgatactaacaagccgaaaaagccttgataccactagagattttagcttatttccggtatcgtgtaaatatcgaaaagggagagatttaaccatggaagaagaattattgaaaaatctgataggcgaatatgtaaggcaac

SEQ ID NO: 29686 - DNA, 260 bp, Unknown
  Description of Unknown: RightRegion for integrase B3687 sequence
tataataattccgggtgtccccgttggagcaccaagaaagaagcctcttttgtccggtagacaaaagaggcttctttcaacgaaataaatccctgcgggatttgtgaaacgcccttcgggcgtgaagagcgcaattcttcacagcggttttccgctgctttatttggcgaagccatacttcatacttgtaaaaaggagactcgatatgaaaagcttgaacgattttccgcgtatacctttggccgtgctgccgacgccca

SEQ ID NO: 29687 - DNA, 109 bp, Unknown
  Description of Unknown: RightRegion for integrase B3688 sequence
ccgggaataggtcgatacatagagaattcttttagattagagattttcttaaaaatgtgaagccgctattttagtgcatttacaatcatatacaactgcgtggagctaa

SEQ ID NO: 29688 - DNA, 260 bp, Unknown
  Description of Unknown: RightRegion for integrase B3689 sequence
gttggaaacgggttcggatttctttatttcgtcaagaaggctgaaaatatgcaggggtaacttgaaccattgctacaactgagttgaagatgcaatcatgcccgctttatttcttacaataaagcgggcatgactagttggttacagagcaacatcacatgtgaggaaccagcttcccattggataactttggaattccaccatactctccatccagatatgctttgcgaattcgcttgtcgaaacgagcgccgaattca

SEQ ID NO: 29689 - DNA, 199 bp, Unknown
  Description of Unknown: RightRegion for integrase B3690 sequence
tatctgcgtaaacagtctgccgcactgcctgaattccttttccattcagatgggcaatgatgtcagatactgtggcgggatggttttcatcggtccgctcatagagaaaccggagtaattccagtatccgcatatttgttgaattctgcatacttcacctcctcgattcttaaaatggcctattttgtatggtgtccag

SEQ ID NO: 29690 - DNA, 260 bp, Unknown
  Description of Unknown: RightRegion for integrase B3691 sequence
aggaacagcgagataacctttgcattctacaatggtactaaggttaaagtgaggcaataaaacgatcgctctactaaaaatcaatgccatctcaataaaatcaaacagtaaacaccgccgcatagagaagctactctctgtgcggcggtgttccttcatattttcttatcgtacacgatatgctgcttcaccggaagcctcaattacgctcagaccaattttttctttcttatgatactgattgcaacgctcacgacatt

SEQ ID NO: 29691 - DNA, 260 bp, Unknown
  Description of Unknown: RightRegion for integrase B3692 sequence
atgataatatgcagcggtgtatttgcccttgtaaaaacaaacgccgggagcacccaataggatgcccccggctctttttttattctgctttgccgagctgcttaacgagctggttgccgtacaccgccgcgccggttacaagaatgccctgaatcaccgcgtccacggtggggcccatgatggccaaggccccgcccacaccaaatactagcaggatcagcgggataaacttatccgggatcacctcgatatgtttgaca

SEQ ID NO: 29692 - DNA, 260 bp, Unknown
  Description of Unknown: RightRegion for integrase B3693 sequence
gcaagcgacatgaatctctatgtatttccacgtgtcgaaacggacggcgagcaattatagtcattgcagggggcttatatggttttatacctatggtccgccgatggcggtggctcccctgcccaatgtgcgccaagtggtggagtatgccctgacagaaattccatcttccaaaatctggcttggcgtcccactctacggctacgactggccgctcccctttgtgcagggacgtaccaaggctcagtccatttcccccc

SEQ ID NO: 29693 - DNA, 260 bp, Unknown
  Description of Unknown: RightRegion for integrase B3694 sequence
cgagatggaaaaatcgtgtttgttttgaaagatgggacggagttggtgcagaaaatttgaggggtgtggggtgcagaacgcactccctttgcttggtgggtgtgcattgtatcatttgtgacgtgcgtttccattcatatgtacgcctacttcaaggtcacaatcgccgttggagtgggcgtatacttttaccatcgccttgcacacctgcttggtgtcggtatccagacgctccatggcattccgaaatagctgtacca

SEQ ID NO: 29694 - DNA, 260 bp, Unknown
  Description of Unknown: RightRegion for integrase B3695 sequence
gactctcttgagctccaccatcaagctgcaccaaaaaagatgccgctgcgaaaagcctagaagtttcaacgacttccgggcttttttgcgcccatttttagaggcgtgacaaaaagatgccaaaatgggctttggcaaattcgatggacctgtacctttacccaaggcattttgagccgcttttccgaggatttttcgggaaagtggctcttttttgtcctcggcaaagtgtagaattctgactggcgtttttgttggtt

SEQ ID NO: 29695 - DNA, 260 bp, Unknown
  Description of Unknown: RightRegion for integrase B3696 sequence
ggcaaccttgataatttcaatatcacaatttatccgaaaattccgaaatatattacataatgaaaagctgttcactgttgagcagcttttatattatagataacctcaatgtgccaattcctccgtacctatatccgtaagcaacccctttgaaacttcatcgggcatagtatatctttgcgacaaatatctaagtgacgcgccgagttcaccgtttggaccgccgtattgagttataaccacatttgcaagacgtggat

SEQ ID NO: 29696 - DNA, 260 bp, Unknown
  Description of Unknown: RightRegion for integrase B3697 sequence
acaatagtcgtcttgccttacggtttcgtacttgcagcccagattaaggataggctttaagcctgtcctttttcttttcaaaagccaatgtcgtcaaaggcgtactcgatttcgtctaagagcatacgctccgagatttcatagtcctccagcatttcgtcgataggaaaatgcgctttgaggacaagcagcaagtactcagcaagtccttcagagtcatagccttcgacttcatctgtaccgaggggctgaatcatgcc

SEQ ID NO: 29697 - DNA, 109 bp, Unknown
  Description of Unknown: RightRegion for integrase B3698 sequence
tcaggaattggaagatatatccaaaatgagttccgtctggatatctttcttcgtctgtaatcactatctccatcttccgtgtgcgaatgaactttcacacctcgaaatc

SEQ ID NO: 29698 - DNA, 260 bp, Unknown
  Description of Unknown: RightRegion for integrase B3699 sequence
ggcaaccttgataatttcaatatcgcaatttatccgaaaattccgaaatatattacataatgaaaagctgttcaatgttgagcagcttttatattatagataacctcaatgtgccaattcctccgtacctatatccgtaagcaacccctttgaaacttcatcgggcatagtatatctttgcgacaaatatctaagtgacgcgccgagttcaccgtttggaccgccgtattgagttataaccacatttgcaagacgtggat

SEQ ID NO: 29699 - DNA, 109 bp, Unknown; identical to SEQ ID NO: 29664
  Description of Unknown: RightRegion for integrase B3700 sequence

SEQ ID NO: 29700 - DNA, 260 bp, Unknown
  Description of Unknown: RightRegion for integrase B3701 sequence
acgatagtcgttctgccttacggtttcgtacttgcgacccagattaaggataggctttaagcctgtcctttttcttttggtagtcggtagtccgttttaacgaattttccttatatatacatgtaatgcgagggagcgacgagattgcgccttgagtccctttactttttggaaaaatctttttagtttttacgaactaccagtactaccagatagccaaaggccttgcaaatcaaggactttcttcggtagcaggctca

SEQ ID NO: 29701 - DNA, 260 bp, Unknown
  Description of Unknown: RightRegion for integrase B3702 sequence
gaaccctacattgcgtggggaacggtatttgtccaaacaaaaagacactccttaccgtaatggtagggagtgttttctttgtatctaaggcacttaggtgagttaggtgagtaatcgggctaaaatccctataacttcttcttagtacgcgcgtatatagaaatagttatagggaaatgtacccgattactcaccttcctcacctaaactttttaaatttaggggcaattatagtcttacttcttccctttcaccacgaa

SEQ ID NO: 29702 - DNA, 260 bp, Unknown
  Description of Unknown: RightRegion for integrase B3703 sequence
acgatagtcgtcttgccttatggtttcgtacttgcgacccagattaaggataggctttgagcctgtcctttttcttttggtagtcggtagttcgttttaacgaattttccttatatatacgtgtaatgcgagggagcgacgagattgcgctttgagtccctttactttttggaaaaatctttttagtttttacgaactaccagtactaccagatagccaaagaccttgcaaatcaaggactttcttcggtagcaggctca

SEQ ID NO: 29703 - DNA, 260 bp, Unknown
  Description of Unknown: RightRegion for integrase B3704 sequence
acaattgagtttagcagagaaaataactctgaattcattctcgatataaacctacactagaacgtgtgggttagtctttgccccatatatctatcgttagtgtgttacttttatatcgccctcacgatagatatggacgggatagacattaaaccgttgataccattggaggaaatataaatgagaatcgtatggaaagatagttcgcctaaaacaaaaccttggataacactacaatatcgagagtatgttgtaagtca

SEQ ID NO: 29704 - DNA, 260 bp, Unknown
  Description of Unknown: RightRegion for integrase B3705 sequence
aatgtgcccgccgacaattttgaaatcatcctcttccccaaaatatcacccgaaaactaatcactaatcaatgatagatataacaccctaacgaattcgcccatttggagatgatgggcaccatcgtgcatcagctgacacaggggctaacaaaggacgaaattcttgccgccggcttagatccctattatgtgaaccatggcttaggcgtatacccctcctccgccgcaggtgttcccttcactgccgcgtatctgcaa

SEQ ID NO: 29705 - DNA, 260 bp, Unknown
  Description of Unknown: RightRegion for integrase B3706 sequence
aatgtgtccgccgacaattttgaaatcatcctcttccccaaaatatcacccgaaaactaaccccaaattaccgatagatataacaccctgacgaattcgcccatttggagatgatgggcaccatcgtgcatcagctaacacagggactaacgaaggacgaaattcttgccgccggcttagatccctattatgtgaaccatggcttaggcgtatacccctcctccgccgcgggtgttcccttcaccgctgcgtatctgcaa

SEQ ID NO: 29706 - DNA, 164 bp, Unknown
  Description of Unknown: RightRegion for integrase B3707 sequence
ccgggaataggtcgatacatagagaattcttttagattagagattttcttaaaaatgtgaagccgctattttagtgcatttacaatcatatacaactgcgtggagctaatgaattagtcccactctgttggtagtaacttagattgacagtaatagcgttttgt

SEQ ID NO: 29707 - DNA, 260 bp, Unknown
  Description of Unknown: RightRegion for integrase B3708 sequence
cacgttgcctccaccaatttgccgcatcgttttgtacgatgcggcgttttttatgcctaaaaaactttggcagactgtgccgggttccgaaccctgaagtcggatgcgaaccgggcggggtcataaatgtactttttgaaaatccatcggtttcacgcttctttctttgaattttacacagtgctgcgggcaagcgcatcgcttttatgccccctttgcggaaatttcttcaaaaatttccgcaccatcgtaggttgata

SEQ ID NO: 29708 - DNA, 260 bp, Unknown
  Description of Unknown: RightRegion for integrase B3709 sequence
acgatagtcgttctgccttacggtttcgtacttgcgacccagattaaggataggctttaagcctgtcctttttcttttggtagtcagtagtccgttttaacgaattttccttatatatacatgtaatgcgagggagcgacgagattgcgccttgagtccctttactttttggaaaaatctttttagtttttacgaactaccagtactaccagatagccaaaggccttgcaaatcaaggactttcttcggtagcaggctta

SEQ ID NO: 29709 - DNA, 109 bp, Unknown; identical to SEQ ID NO: 29654
  Description of Unknown: RightRegion for integrase B3710 sequence

SEQ ID NO: 29710 - DNA, 146 bp, Unknown
  Description of Unknown: RightRegion for integrase B3711 sequence
aatgtgtctgccgacaattttgaaatcatcctcttccccaaaatatcacccgaaaactaatcactaatcaatgatagatataacaccctaacgaatatgtgtgttatatctatcaattattccattcatacagcagaatcataaaa

SEQ ID NO: 29711 - DNA, 109 bp, Unknown; identical to SEQ ID NO: 29654
  Description of Unknown: RightRegion for integrase B3712 sequence

SEQ ID NO: 29712 - DNA, 109 bp, Unknown
  Description of Unknown: RightRegion for integrase B3713 sequence
aatgtgtctgccgacaattttgaaatcatcctcttccccaaaatatcacccgaaaactaaccccaaattaccgatagatataacaccctgacgaattcgcccatttgga

SEQ ID NO: 29713 - DNA, 260 bp, Unknown
  Description of Unknown: RightRegion for integrase B3714 sequence
gccttatccgaacgcactgtttttgtgaacggtgttattgggataatcgtgcatcgatgaagaaccccatctccaaaattggagagggggttctttatttacaatatacccatagtattccgcgaacttgcgcgtcagctgatgcgcaattgtgccggcaatatttacaatatcatttcccgcgcagcacaatcccatgataatacccggccattttttcttccggccctccggcgtccttatccatgaggaacgctttg

SEQ ID NO: 29714 - DNA, 109 bp, Unknown; identical to SEQ ID NO: 29667
  Description of Unknown: RightRegion for integrase B3715 sequence

SEQ ID NO: 29715 - DNA, 260 bp, Unknown
  Description of Unknown: RightRegion for integrase B3716 sequence
gcaagcgacatgaatctctatgtatttccacgtgtcgaaacggacggcgagcaattatagtcattgcagggggcttatatggttttatacctatggtccgccgatggcggtggctcccctgcccaatgtgcgccaagtggtggagtatgccctgacggaaattccggcctccaaaatctggctgggcgtccccctctacggctacgactggccgctcccctttgtgcagggacgtaccaaggctcagtccatttcccccc

SEQ ID NO: 29716 - DNA, 260 bp, Unknown
  Description of Unknown: RightRegion for integrase B3717 sequence
gggaatcgaaagtcaggcggaatggataaattcacgttgaaaatcttcccaaggctttagcgcgcccagtatgtatagagtttgtgtactgacgaactggcgcatctcgaaatcgtcgccaccatcgttcaccagctcacccgcaatctgacggccgagcagttggtggaacagggcttcggcccctattacattgaccacgggaccggcatctggccccaggccgccggaggaatccccttcaacgcctgcgaattcca

SEQ ID NO: 29717 - DNA, 260 bp, Unknown
  Description of Unknown: RightRegion for integrase B3718 sequence
ggtcaatccccggcggacgccatcacgctcgaaattttcccgctgcttccgtcggagtaattttatgtatccacatccctagttttatgtattaaactatggatgtggatacataatttgttcggacgcgatacctcccgatgggcgcggattttattgcggtttagtatttgaacatccgggcgatgttctgcacgttgcaaacggggtactggtttccggcggcgatgaattcccgggtcaggattttcttcgcggcg

SEQ ID NO: 29718 - DNA, 260 bp, Unknown
  Description of Unknown: RightRegion for integrase B3719 sequence
gccttatccgaacgcactgtttttgtgaacggtgttattgggataatcgtgcatcgatgaagaaccccatctccaaaattggagagggggttctttatttacgatatacccatagtattccgcgaacttgcgcgtcagctgatgcgcaattgtgccggcaatatttacaatatcatttcccgcgcagcacaaccccatgataatacccagccattttttcttccggccctccggcgtccttatccatcaagaacgctttg

SEQ ID NO: 29719 - DNA, 260 bp, Unknown; identical to SEQ ID NO: 29698
  Description of Unknown: RightRegion for integrase B3720 sequence

SEQ ID NO: 29720 - DNA, 260 bp, Unknown
  Description of Unknown: RightRegion for integrase B3721 sequence
ggctctcttgagctccaccataaaaggactcttattttgatagaatggctatcaagataagagccctttttgttgcattccccgcgaaaacaagtgaatatcagaacttttaagcatctttgcccataccggcttttctgccggggcgggcttttttgttttcggggaaaacgcttttggggtgcgtctcactttatggggattcgtgttactttatgggcgtttgtttcgctttatctccactggaatcacatgtgtga

SEQ ID NO: 29721 - DNA, 260 bp, Unknown
  Description of Unknown: RightRegion for integrase B3722 sequence
tataataattccgggtgtccccgttggagcaccaagaaagaagcctcttttgtccggtagacaaaagaggcttctttcaacgaaataaatccctgcgggatttgtgaaatgcccttcgggcgtgaagagcgcaattcttcacagcggttttccgctgctttatttggcgaagccataattcatacttgtaaaaaggagactcgatatgaaaagcttgaacgattttccgcggataccgttggccgtgctgccgacgccga

SEQ ID NO: 29722 - DNA, 260 bp, Unknown
  Description of Unknown: RightRegion for integrase B3723 sequence
gccagggatgtactgaaggaatgcaagtgggatggggaaactctttttattatgctctgattttcccttttttattttgatgccctcacccctcagaataattcagagaaaatatactagacaaattcaccggccaggtatgtaatacttgaccggttttttgtctagtccatcatttatgctctgatgtagagtgcaattcccttctgtgatgcctctgtgatgagcttatccgcctcttcctggctcttttctgtctg

SEQ ID NO: 29723 - DNA, 260 bp, Unknown
  Description of Unknown: RightRegion for integrase B3724 sequence
gccagggatgtattgaaggaatgcaagtgggatggagaaactctttttattatgctctgattttctcttttttattttgataccatcaggtctcattcttaggcttgaccttataagatctcttattgagacttcattatcacattccatattggactttcttacttcaagtcttacaagattgccaaccccctggatctgcaattcagccgaatcttcaattgtaataactcgctcatctttgggaataaaattagaca

SEQ ID NO: 29724 - DNA, 260 bp, Unknown
  Description of Unknown: RightRegion for integrase B3725 sequence
tccattagctacggtcagcgtaggggaggaaaagctatcctggaagtgttcttgaagtagggcaaatactttttgccctatgttagtatcctgctcgttcgactttgttggaacggaggcatctggtacaagcgtacacatggcacggagtcccgttgacaatggccttcacccgcttcacattgggcttccagacacggttggaacggcggtgggagtgggagacctggatgccaaaggtgacgcccttgtcgcagaat

SEQ ID NO: 29725 - DNA, 260 bp, Unknown
  Description of Unknown: RightRegion for integrase B3726 sequence
gtaaataaggacggaagtataacttttaaattcaagaatggaatggaatataaaaactaaatttaaaacaacccatccaggcttattgcttgggtgggctttttgtctttctttcaaaatgttctataggcttccatcttacaaaattctcggtaattagtcctttattaagaaaatgaaaagttaatgtattttgagtaatttctgcataatcaaccagtactggccatgatgtcttttcatattcactaattataaaa

SEQ ID NO: 29726 - DNA, 260 bp, Unknown
  Description of Unknown: RightRegion for integrase B3727 sequence
aacggtcaaccagtctggccatccggtaataatcgggtggtttttttgtttgtcttgtaaaagccccctgccctgtcgtataataaaagaaaaacaaaaagggagaacccactatggcaaaacgaatgctggattgctgcgcttcggattttgcgcagttcaccaaggctgacctgctggagtccatccagaagagcgagggccgggtcattgcctgtgagaccatcggttcggtgcagccgctgctgggcaatgtgacc

SEQ ID NO: 29727 - DNA, 109 bp, Unknown; identical to SEQ ID NO: 29656
  Description of Unknown: RightRegion for integrase B3728 sequence

SEQ ID NO: 29728 - DNA, 109 bp, Unknown; identical to SEQ ID NO: 29667
  Description of Unknown: RightRegion for integrase B3729 sequence

SEQ ID NO: 29729 - DNA, 137 bp, Unknown
  Description of Unknown: RightRegion for integrase B3730 sequence
cccggaataggcagatatgtggagaatgtcttcaccattgatgtatttttacggttatgatttccaacacacatgtgcgaatgaattggcacaccttgaaatggtggctgccattgtacaccagcttacaagaaacc

SEQ ID NO: 29730 - DNA, 260 bp, Unknown
  Description of Unknown: RightRegion for integrase B3731 sequence
gttgtgatacagatgtatcgaaaaactgctgtgttttttgtttgcggttcgattcgttaaaatccgaagggtttcaaggagaataagttggagaaaattatcgtaatggcacccggccatgaactgtgggatgggatcatcgcttttacagcaggctgcccatggaaagcagcatttttggggcagagaagatggagccaaacgattttgaaaataacgaaagagctcttgtggccttgcgcgatgatgacgcggcggct

SEQ ID NO: 29731 - DNA, 260 bp, Unknown
  Description of Unknown: RightRegion for integrase B3732 sequence
acttgcatcgttagagtatcgaaaaactggtttgttgtcgttggaacgtgccagaaatagcaatttccggtgtttgcaaaacaccagatgggcggcttgctgtaagcccgtctaacgccagaaagcggggcaccccttgtcagggtaccccgcttgaacactaataagaaagcttctggccggggtagatcgtataaggtgccccaatgccgttcttgcttgcgatggtgcgccagtcgataccgagcgaagcgccaatc

SEQ ID NO: 29732 - DNA, 260 bp, Unknown
  Description of Unknown: RightRegion for integrase B3733 sequence
attacccgcgatgggaagtggcaattcaaattcaaaaacgaaagagtgatagaagtctaaaccgttaaaaagagaaaggcgcctggggcaagaacctcaggtgccttatttttttgtttagctttaatagcaaaaccataattttaacgcaatggcataaatttaacggaaaaatatgtatagcccacaccgatagagtagaaaggggaaaattgccttaatatatgaggtatatccacaaaaataagcagaattagggc

SEQ ID NO: 29733 - DNA, 260 bp, Unknown
  Description of Unknown: RightRegion for integrase B3734 sequence
aaccttctgtttcacactacattccagcagtatatcccctacaagagatatgggaaatagttactccgggattttaagtttctgcccagcatagatgattgtgtccttgatgccgttcagttcggcaatcgtaggccactcgttgtcgttgcccagcagtttctttgcaatcttccaaaggctatcaccatcctgcacaacgtaggtggtgtaggcaggcttttcctccggggacgtggcaaccaccgtaccaccgcttt

SEQ ID NO: 29734 - DNA, 109 bp, Unknown
  Description of Unknown: RightRegion for integrase B3735 sequence
aagggcggcccgttggataacttcgagcttactcttttcccgaaaattccgcgctcatagaaaaaagccaccctttcgccgggtggcttttaatgtgaacctctgtggc

SEQ ID NO: 29735 - DNA, 260 bp, Unknown
  Description of Unknown: RightRegion for integrase B3736 sequence
acttgcattgtaagggtatcgaaaaactggtttgttgtcgttggaacctaccagaaatagccatttctggtatttacaaaacaccagatggacggcttgctgtaagaccgtataacggcagaaagcggggcaccccttgtcagggtaccccgcttgaacgctatttgatgatgattcgctgaccctgataaatcttgtccgggtctgcgatgccatttgccgaagcaagcctatcgacggttgttccgtacttgcttgcg

SEQ ID NO: 29736 - DNA, 260 bp, Unknown
  Description of Unknown: RightRegion for integrase B3737 sequence
atctgtgaaaagggagaattgcaatttcggtttaaaaacggtactgaaataacagtttgattctgaatcgcagcattattaatttttcacataaaacgaaaagcagatttgtaacattacacaaatctgcttttttgtcttgactttgcgagaaaaatagtgtaatatagattacaagcaaaacgaatgaatccggtgttccgggtttgtcaaaggcagtggttactcactgcacaccctttcggtactgtttgcacacc

SEQ ID NO: 29737 - DNA, 260 bp, Unknown
  Description of Unknown: RightRegion for integrase B3738 sequence
acttgcgttgtaagagtatcgaaaaactggtttgttgtcgttgggacgtgccagaaatagccatttctggtgtttgcaaaacaccagatagacggcttgctgtaatcccgtataacggcagaaagcggggcaccccttgtcaggggcaccgcttgaacgctaataagaaagtttctggccggggtagatcgtatatggtgccccaatgccgttcttgcttgcgatggtgtgccagtcgatgccgagcgaagcaccaatct

SEQ ID NO: 29738 - DNA, 260 bp, Unknown
  Description of Unknown: RightRegion for integrase B3739 sequence
gaggcgtcatgtgttcgtcttagctccactttgagccaccaaaatcaaaaatcctgttgacgaatgtcaatgggatttttaattttgtactattcattcttcatcattaattattaatcattcatttcaggatttttgtaatgaatagtgaataatgaagtcgctttgctgatgaataatgaataattgcaattattcggcgtttctgatataatctaacatggtgatgcctgtgaaagacaacattcttatagataagt

SEQ ID NO: 29739 - DNA, 260 bp, Unknown
  Description of Unknown: RightRegion for integrase B3740 sequence
ggcaacgagattggtttccagctagacattttcccaaaaatccagaagaataatcaatgatatcttctatgagctgacgaactggatcattgatgttatcagtaattataaaaagaaagtcccggggaattaaccccgggatattttttactgtttcttaatatattttgcagatacaaagccataatactttcctgcaatacgaatataataccatttgctgccgtttttatctttctgtgtataattcataacttcta

SEQ ID NO: 29740 - DNA, 260 bp, Unknown; identical to SEQ ID NO: 29623
  Description of Unknown: RightRegion for integrase B3741 sequence

SEQ ID NO: 29741 - DNA, 260 bp, Unknown
  Description of Unknown: RightRegion for integrase B3742 sequence
tacgaactcttttggtttaggaatgtgttcggcctgacaagaaaactgccgcagaggtaattgtcctctgcggcagttttctatttgccggtgtagctctctgtcggcaagagcttataggttttcagcgtcttcccacatctgcggcacttataccggtagatcgtgtcgatgtcgcctgcgctggaaccgacagtgaaatcggaatcaagcatcacccaactgtgcgattcacaggggcataggcgctcctcaagctc

SEQ ID NO: 29742 - DNA, 260 bp, Unknown
  Description of Unknown: RightRegion for integrase B3743 sequence
attacccgcgatgggaagtggcaattcaaattcaaaaatgaaagagtgatagaagtctaaaccgttaaaaagagaaaggcgcctgggacaagaacctcaggtgccttatttttttgtttagctttaatagcaaaaccataattttaacgcaatggcataaatttaacggaaaaatatgtatagcccacaccgatagagtagaaaggggaaaattgccttaatatatgaggtatattcacaaaaataagcagaattagggc

SEQ ID NO: 29743 - DNA, 260 bp, Unknown
  Description of Unknown: RightRegion for integrase B3744 sequence
tccgaacacgggaaactcataattctgaatggagcaatcggatttctattgcgaagataagtcaagccccctccgtaagcagcggagggggctttttcctgtgaaaattgccgaggatacgaaaccctggcaattcatggtaggatgctcaaatgtattagacagtatttcaatccacacccttcgcgaggaagggtgactgcgggagcgcgcccattgagctgtttcaagcatatcatgttccgccggaaactgcaagc

SEQ ID NO: 29744 - DNA, 260 bp, Unknown
  Description of Unknown: RightRegion for integrase B3745 sequence
tacgaactcttttggtttcggaacgtgtttggcctgacaataaaactgccgcagaggtaattgtcctctgcggcagttttatttactttgcatccggaatacgatcaagaaacgcggcggcagtatctaagtcccagcccagcgccaccaaagcgctgtgaacgtcaccggcgtatttaaccctcttgacgagagtgattttcatgtccggcagccgccgagcctcgaagcgccatttcttcgcgtcgtcaccgatcttc

SEQ ID NO: 29745 - DNA, 260 bp, Unknown
  Description of Unknown: RightRegion for integrase B3746 sequence
gactctcttgagctccaccatcaagctgcaccaaaaaagatgccgctgcgaaaagcctagaagtttcaactgtttcaccccataggtacacaatgtgtcacgggggtagcagtcggtacgggcaagaagcaggacgtaaacgcatgaatttgtgtttacgtcctgcttctgctatcttgatagatgtcaacagcaactatgcaagctgtcggggttttcaggcgcagtctgataaaatgccatgttttcaaggctttgca

SEQ ID NO: 29746 - DNA, 260 bp, Unknown
  Description of Unknown: RightRegion for integrase B3747 sequence
aagaccgaaatattggtgattttcaagggcggatacgaagttagaacggaaattgaataacgattaaatttacggcttgcggagaaatctgcaggctgtttttgttgggaggcggttatttggcaggcaattttgatgggataaagacaagaaattttggcattgagatagaaatgacaggcttaactcgctgtcaggcggcaaaagcgctttcaggtgttctgggaggagaggttgtccatgagggtggcacttatgat

SEQ ID NO: 29747 - DNA, 260 bp, Unknown
  Description of Unknown: RightRegion for integrase B3748 sequence
tcctcacaggatgcagaaaagttcgttttggctctccacaactgcaccataagcctgtgacaaaaaaagatgtcacaggcttttttctttgctgtaccgtcaaaaaatggcgatttcgccaaccgatttttggacgcggttttacagtgttgtccaatcatttcagggcggttttcccaacttgatgcccacttttcctgccgttttccggaatttggcaggggagggggcaatttttttgagaaaaaacagaataaatc

SEQ ID NO: 29748 - DNA, 260 bp, Unknown; identical to SEQ ID NO: 29649
  Description of Unknown: RightRegion for integrase B3749 sequence

SEQ ID NO: 29749 - DNA, 126 bp, Unknown
  Description of Unknown: RightRegion for integrase B3750 sequence
attacccgcgatgggaagtggcaattcaaattcaaaaacgaaagagtgatagaagtctaaaccgttaaaaagagaaaggcgcctggggcaagaacctcaggtgccttattttttgtttagctttaa

SEQ ID NO: 29750 - DNA, 260 bp, Unknown
  Description of Unknown: RightRegion for integrase B3751 sequence
ttggtctttttcctttgtggtacgtttggaatttgcgtcgccaggggttcccactggtagctttgcagtcaaatgcaaagcagggaacaagcaaaagcccccgcaggtacgctttggcgcacttgcgggggcttttgttaaatctcggttgttacctcaacggcggcaattttttccgccagctgtttgaggggcgtgtcttcggtgtattcgacttccaggccgtcggccagtttgtgcaaggcttccaggctcatggt

SEQ ID NO: 29751 - DNA, 260 bp, Unknown
  Description of Unknown: RightRegion for integrase B3752 sequence
ggaaaccgtcagaacggcggtatggaccagtttacgcttaaattgtttccacgtctttaatttttccctttacgtatagagattgtgtacacattcctccgtaccgatatcggtcaaggttcccttacactctttatatggcatggcgtagcgctgggaaagataacgcatggaggcgcccatttcgccgtccggcccaccatactgactcattataaactgagccatctgggcattgggctctttgatattaactggaa

SEQ ID NO: 29752 - DNA, 260 bp, Unknown
  Description of Unknown: RightRegion for integrase B3753 sequence
gataaccgccgatttggaaacccagagccactggagttggagtttcaattcaaggtctgatctctcccctgcccgctctgggtattgtgttgctgccatatctatcatggtggatataatgaactggggcatttggaaatgatcggcgcgatcgtccaccagttgacgcggaatctgaaggattctcagatgaaggattcggcgtttgcgccctattttgtggaccacactgcgggggtctaccctactgccgcttccgg

SEQ ID NO: 29753 - DNA, 260 bp, Unknown
  Description of Unknown: RightRegion for integrase B3754 sequence
ggcaacgagattggttttcagctcgacattttcccaaaaatccaaaaggaaaatcaatgatatcttctatgtgctgacgaactagctcattgatgttgtcggtaattaaaaaaagaaattcccggggaattagccccgggataatttttactgtttcttaatatattttgcggatacaaagccataatactttccagcaatgcggatataataccatttgctgccgtttttatctttctgggtaaaattcattacctcta

SEQ ID NO: 29754 - DNA, 260 bp, Unknown
  Description of Unknown: RightRegion for integrase B3755 sequence
cgcggccattcccctttggaaagcctcaccctcgaaatctacccgcgtctgccaaagtaattatttgagacaacttgcgctgaagaatgtgttcttgggcgcaagttgtctcatccgtttttacttccagccatcgatcatcgccttgacctctgcggtcttggcgattaggtcattgtggatggcttcccacgcgacgatcataccgtcggcgtaggcggggttgcgcttgtactcctcggaggccttgtatccctcga

SEQ ID NO: 29755 - DNA, 260 bp, Unknown
  Description of Unknown: RightRegion for integrase B3756 sequence
gtatactccaaagaggacatgcgatatacattcaaggacggaaccgagatcaagctataacccgaacatgaaaaaacatcctgtggcagctgctgcaggatgttttattgcgcccagatgcgtccattctcaaacgaatctgaaaaatgcgtccatttgcgtccattccccaatattactacaggttgtatcaaagtcgaaaaggttttttcataaacgcgcccattaaacggctgcaaaacttcaacaagggttcgcac

SEQ ID NO: 29756 - DNA, 260 bp, Unknown
  Description of Unknown: RightRegion for integrase B3757 sequence
atctgtgaaaagggagaattgcaatttcggtttaaaaacggtactgaaataacagtttgattctgaatcgcagcattattaatttttcacataaaacgaaaagcagatttgtaacattacacaaatctgcttttttgtcttgactttgcgagaaaaatagtgtaatatagattacaagcaaaacgaatgaatccggtgttccgggtttgtcaaaggcagtggttacccactgcacaccctttcggtactgtttgcacacc

SEQ ID NO: 29757 - DNA, 138 bp, Unknown
  Description of Unknown: RightRegion for integrase B3758 sequence
gataaccgccgatttggaaacccagagccactggagttggagtttcaattcaaggtctgatctctcccctgcctgctctggggatagtgttgcagccatatctatcatggcggatataatgaactggggcatttggaa

SEQ ID NO: 29758 - DNA, 260 bp, Unknown
  Description of Unknown: RightRegion for integrase B3759 sequence
tccgaacttgattccgatagggaatgggttcggatttcttgtttttatcaaggacattgaagtttagtttcgggatagaataacatcaaattcaggaggatatacccatgaaaaaactcataagctgcgcgttcaatatggataccgcctgtgtggagcttcgcttcacggacgggagcatttgctccatcgactgcaccgccgtggagaacgaggtggcggacaaccgcttccagcgggcggagctggactatctcatc

SEQ ID NO: 29759 - DNA, 260 bp, Unknown
  Description of Unknown: RightRegion for integrase B3760 sequence
ggaaaccgtcagaacggcggtatggaccagtttacgcttaaattgtttccacgtctttaattttttccctttacgtatagagattgtgtacgcattcctccgtaccaatgtcggtcagggttcccttgcactctttatatggcatggcgtagcgctgggaaagataacgcatggaggcgcccatttcgccatccggcccgccggatgtcaataacatatgattagattaagcccctggaatcatggttccggaggctttt

SEQ ID NO: 29760 - DNA, 260 bp, Unknown
  Description of Unknown: RightRegion for integrase B3761 sequence
tctccacaggatgcagaaaagttcgttttagctctccacaaccgcaccataagactgtgatgaaaaagatgtcacagtcttttttctttgttgtagcgtcgaaaatcggcgatttcgccaaccgatttttgaacacggttttacagtgttgtccaaccatttttgggcggtttgcccaccctgaagcccactttctctgccactttttggaatttggcaggggagtgggcaatttttttgagaaaaaacagaataaatcc

SEQ ID NO: 29761 - DNA, 260 bp, Unknown
  Description of Unknown: RightRegion for integrase B3762 sequence
gtgaatagagatgaaacaataacatttaaatttattaatggtaaagaaatcaccttataagaggagtctatcagttagtgtccgctgatagacttttttgtcactatatggtaaaatatacgcaagtaaatgcatgtacttcgtaggtgcttcctaagtattcgtggagccgagttgagcgtagtgccttgggctcgttaaaaggaagtgcacattcggtcacggaatcagtgattggtctagagttctgatgccacaaa

SEQ ID NO: 29762 - DNA, 260 bp, Unknown
  Description of Unknown: RightRegion for integrase B3763 sequence
cgcggccattcccctttggaaagcctcaccctcgaaatctacccgcgtctgccaaagtaattttttgagacaacttgcgctgaagaatgtgttcttaggcgcaagttgtctcatccgtttttacttccacccatcgatcatcgccttgacctctgcggtcttggcgatgaggtcgttgtggatggcttcccatgcgacgatcatgccgtcggcgtaagatgggttgcgcttgtactcctcggaggccttgtagccctcga

SEQ ID NO: 29763 - DNA, 109 bp, Unknown
  Description of Unknown: RightRegion for integrase B3764 sequence
aaagaaatactttatgatggcaataaaattcatgtaaaatttaatctaaaaaaaaactagatagtgtagaaaatatactatctaggctattcaataaatatagtacatg

SEQ ID NO: 29764 - DNA, 260 bp, Unknown
  Description of Unknown: RightRegion for integrase B3765 sequence
tcctcacaggatgcagaaaagttcgttttggctctccacaactgcaccataagcctgtgacaaaaaagatgtcacaggcttttttctttgctgtaccgtcaaaaaatggcgatttcgccaaccgatttttggacgcggttttacagtgttgtccaaccattttagggcggtttgcccaccttgattcccacttttctgccgatttctggaatttggcaggggagggggcaatttttttgagaaaaaacagaataaatcct

SEQ ID NO: 29765 - DNA, 109 bp, Unknown
  Description of Unknown: RightRegion for integrase B3766 sequence
gcaatatccgaacttttgttcggatatttttttgttatggtcttttttcccatttcataagcattttgcattgtcctgctttgctttatacatctatcgttaattacca

SEQ ID NO: 29766 - DNA, 260 bp, Unknown
  Description of Unknown: RightRegion for integrase B3767 sequence
gacgatataccgtcaaattccgagggctctaccgcgttgcggttggtggaggcgacgtgaccttgtgcgaactttttggacagttcgccagccgccgcctccgcgtccatgacgaggtcgaagtcggcctcggcgttagaaccccccgaatagttgaaagcaatccgcaggtgatcatcggacagatagaccaccgacacaaaggcatcaatgaccttgcgccggaactcttggctctgcaagctgccgccccggaagcg

SEQ ID NO: 29767 - DNA, 260 bp, Unknown
  Description of Unknown: RightRegion for integrase B3768 sequence
ggcaacgagattggttttcagctcgacattttcccgaaaatccagaagaataatcaatgatatcttctatgtactgacgaactggctcattgatgttgtcggtaattaaaaaaagaaattcccgggggtaattccccgggatatttttactgcttcttaatatattttgcagatacaaagccataatactttcctgcaatacggatataataccacttactaccgtttttatctttctgggtaaaattcattacttccac

SEQ ID NO: 29768 - DNA, 260 bp, Unknown
  Description of Unknown: RightRegion for integrase B3769 sequence
gataaccgccgatttggaaacccagagccactggagttagagtttcaattcaaggtctgatctctcccctgcctgctctggggatagtgttgcagccatatctatcatggtggatataatgagctgggacacctcgagatgattggcgcaatcgtccaccagctgacgcggaatttgaaggattctcagatgaaggattccgcatttgcgccctatttcgtggatcacactgcaggggtttaccctaccgccgcttccgg

SEQ ID NO: 29769 - DNA, 260 bp, Unknown
  Description of Unknown: RightRegion for integrase B3770 sequence
tctcttacgggtcaccaaatcatccgaacactttggatcaatgggccaaaagcccagtgatttcaaggtgttcgggattttttatgaccggaaattttcaaagtattccatggatcaatggaagcggttcagaggttcaaacaggatttgaacctctgcttttccattttcaaggggatttttgcagccagcgccctttttcagagggctgcggcggcgagatttcggaaaaattgaagaaaaatctttcacaaagttat

SEQ ID NO: 29770 - DNA, 260 bp, Unknown
  Description of Unknown: RightRegion for integrase B3771 sequence
agaatagagtttagtagagagaataactcagagtttatactagatatagacttatgctaaatggtggctttgctgcctgtaagacctgcactaaaatggtgtaggtaactttttccccgacatatatatcatggttgtgtttcttttatatcgccaccatgatatatatcacagggaaactattctaaacgttgatatatcaaggaggagatatacatgagaatagtatggaaagacagtgcgcctaaaacaaaaccttg

SEQ ID NO: 29771 - DNA, 260 bp, Unknown
  Description of Unknown: RightRegion for integrase B3772 sequence
tacgaactcttttggtttaggaatgtgttcggcctgacaagaaaactaccgcagaggtaattgtcctctgcggcagttttctatttgccggtgtagctctctgtcggcaggagcttgtaggttttcagcgtctttccacacctgcggcacttataccggtagatcgtgtcaatgtcgcctgcgctggaaccgacagtgaaatcggaatcaaccaccacccaactgtgtgattcacaggggcacaggcgctccgccaactc

SEQ ID NO: 29772 - DNA, 260 bp, Unknown
  Description of Unknown: RightRegion for integrase B3773 sequence
tttgatacaaagcgtatcttaattgcggttcattttttatctcttaaaaacggtttgtaatcagtatttacggcatttttgccgattagtaaagtgtcagattgaataaaaaatacggctgttttgtaataaaaaaggcagcctttgagtgcgtttttagagccgattttttattctgacacaaaactttttgaccgtttcatttttaaaaataagcgttttatttttcaaaatcagaatttataacggatgtcctgttt

SEQ ID NO: 29773 - DNA, 109 bp, Unknown
  Description of Unknown: RightRegion for integrase B3774 sequence
cctgtgttcgacttttgtggcgtcaactccaccaaaatcaacaataattttttaacataaaaaaccagtatactaaacagtaatactggtttttatttattttaaggag

SEQ ID NO: 29774 - DNA, 109 bp, Unknown
  Description of Unknown: RightRegion for integrase B3775 sequence
gataaccgccgatttggaaacccagagccactggagttggagtttcaattcaaggtctgatctctcccctgcctgctctggggatagtgttgcagccatatctatcatg

SEQ ID NO: 29775 - DNA, 260 bp, Unknown
  Description of Unknown: RightRegion for integrase B3776 sequence
ggcaacgagattggttttcagctcgacattttcccaaaaatccaaaaggaaaatcaatgatatcttctatgtgccaacgaactggcacatctggagatggtttccaccatggttcaccagcttacccgtgacctcactatggaagaaattgagaattccgggctgggaccatattatattgaccacacagttggcgtgtggccacaggcagcagggggtgttccatttaatgcctgcgaattccagagtaaaggtgatcc

SEQ ID NO: 29776 - DNA, 260 bp, Unknown
  Description of Unknown: RightRegion for integrase B3777 sequence
gacgggatccggttcgtgttccgcaccggtgaacaggtgaggattgccctgaaagggtgatgctcatatcagttgacgtgcacggttaggtacacctcccagaaataaagtaaggttacccttatctaataaggatggtgtttgcgtggacgatattgtaatggatcaggttgttgaaggcgagtatgggtcggcgaaggaaaaatctgtcgctggccagaacgcgatccgtcagctatcgcagccagtgaaaggcaaac

SEQ ID NO: 29777 - DNA, 260 bp, Unknown
  Description of Unknown: RightRegion for integrase B3778 sequence
acttgcatagttagagtatcgaaaaactggtttgttgtcgttggcacgtgccaaaaatagcaatttctggtgtttgcaaaacaccagatgggcggcttgctgtaagcccgtctaacgccagaaagcggggcaccccttgtcagggtaccccgcttgaacactaataagaaagcttctggccggggtagatcgtataaggtgccccaatgccgttcttgcttgcgatggtgtgccagtcgataccgagcgaagcgccaatc

SEQ ID NO: 29778 - DNA, 109 bp, Unknown
  Description of Unknown: RightRegion for integrase B3779 sequence
gataaccgccgatttggaaacccagagccactggagttggagcttcaattcaaggtctgatctctcccctgcctgctctggggatagtgttgcagccatatctatcatg

SEQ ID NO: 29779 - DNA, 260 bp, Unknown
  Description of Unknown: RightRegion for integrase B3780 sequence
taccatctggatatccacttccgcataacggcacagcagtatttggggaaggcgtcgtaaggtttctctctgttcgttcgatatattcacaacatatttgcccgctgctttttcttgaaaagcgttggagtataagatatcatggagcaaagaaacatttctttctccatgatattcttgtgtatccatcattgatctgtactcgttgttttcattggaattggtggggctttgatagttggttaatctaaccacatggg

SEQ ID NO: 29780 - DNA, 260 bp, Unknown
  Description of Unknown: RightRegion for integrase B3781 sequence
aacccccttttgataaacaaatctgtcaaacggaaaacgcaccaacaaccaacaaattaaaagggatttgataatatgagtattgttatatatgttcgacaaactaaggatatttccctttacgaacaatttaataaatgtgctgaatatgccaaacggtacggctattctatcgaatataaagttttagattttgagggcaatatattttatgaagcaataaataaggtgattgtggaccacgacattaccgcattgat

SEQ ID NO: 29781 - DNA, 260 bp, Unknown
  Description of Unknown: RightRegion for integrase B3782 sequence
gaaccctacattgcgtggggaacggtatttgtccaaacaaaaagacactccttaccgtaatggtagggagtgttttctttgtatctaaggcacttaggtgagttaggtgagtaatcgggctaaaatccctataacttcttcttagtacgcgcgtatatagaaaaagttatagggaaatgtacccgattactcaccttcctcacctaaactttttaaatttaggggcaattatagtcttacttcttccccttcaccacgaa

SEQ ID NO: 29782 - DNA, 260 bp, Unknown
  Description of Unknown: RightRegion for integrase B3783 sequence
gataaccgccgatttggaaacccagagccactggagttggagtttcaattcaaggtctgatctctcccctgcctgctctgggaatcgtgttgcagccatatctatcatggtggatataatgaactggggcatttggaaatgatcggcgcgatcgtccaccagttgacgcggaatctgaaggattctcagatgaaggattcggcgtttgcgccctattttgtggaccacactgcgggggtctaccctactgccgcttccgg

SEQ ID NO: 29783 - DNA, 260 bp, Unknown
  Description of Unknown: RightRegion for integrase B3784 sequence
accgaaacaaaacagattattattaaattccgcttccccgagctggaagcgatttcttaaagcactttatttacaatagatgtggcggtatacataggaacgggagataccgagccgtccggcgatttcctgctgtgtcagttcctcctgtccccacagaccatagcggaaaatgacaacaatctgctctcgtttactgagatgttcccgtactgcgtgcagcattttttccgattcgatggcaagatgcagctgttccg

SEQ ID NO: 29784 - DNA, 260 bp, Unknown
  Description of Unknown: RightRegion for integrase B3785 sequence
tacgaactcttttggttcaaaaacgtgttcggcctgacaagaaaactgccgcagaggtaattgtcctctgcggcagttttctcattcgccggtgtagctctcacaccgcgcggtgctcataagtagccgtggtttttctttttcgcctcaatgttcgacagtacgtcccggatttcaaaggcacctatcgcacagttccagtgatcgcacccaaacgagcggaagatgcagttttggcacccgtcctgctgcttgcagta

SEQ ID NO: 29785 - DNA, 260 bp, Unknown
  Description of Unknown: RightRegion for integrase B3786 sequence
gacgggatccggttcgtgttccgcaccggtgaacaggtgaggattgccctgaaagggtgatgctcatatcagttgacgtgcacggttaggtacacctcccagaaataaagtaaggttacccttatctaataaggatggtgtttgcgtgaacgatagtgtaatggatcaggttgttgaaggcgagtatgagtcggcgaaggaaaaatctgtcgctggccagaacgcgatccgtcagctatcgcagccggtgaaaggcaaac

SEQ ID NO: 29786 - DNA, 260 bp, Unknown
  Description of Unknown: RightRegion for integrase B3787 sequence
acggcggacagggagatcattgtcaactttcgatttgcagagcttcagcagacgggataaatctagtcatatcaatggtttgcgccgttatgagcggcgcgattttcaagacgaaatcacttacaatagttcccgcgctatgtctcccgcatcgaaaagcgcgcgctgcaaaagctggaggaggccatggggaaacgggaataaaaaaacgcggggcgcacaagcgccccgcgcccgctcagggggagaagcgggatagg

SEQ ID NO: 29787 - DNA, 260 bp, Unknown
  Description of Unknown: RightRegion for integrase B3788 sequence
cctggtatcggacgattcgtttccaatccctttgaactggatatctacctgcgcctgtgatcttgggcgcaggcattattttcactgtattaaggctttttctgcctgtaatctcctacttttgtgcaaaaataatcacttccatcatgtatgagcgaatgaattagctcatatggaaatgatctgcgccatcgtccgtcagttaacccaggatctgacaccggaagaaatccagaaaagtggctttgacacctactacg

SEQ ID NO: 29788 - DNA, 260 bp, Unknown
  Description of Unknown: RightRegion for integrase B3789 sequence
cggttccggctgaataatggtatggaattgccggagcatatcgaaaggatggtcaggtgatgggaacaaacaggaaactgccttttggctatcgaatggaatttggaaggatcacaatccatttggaggaagccagctgggtgcagtacatctttacgcagtacaatcaaggcgtgtcatttcaggggattaccgataaaatgcgaaactccggaatgccatatgacggggacaagcaatggaataagaatatgattgca

SEQ ID NO: 29789 - DNA, 66 bp, Unknown
  Description of Unknown: RightRegion for integrase B3790 sequence
agccacttagagtgcgggagaagggggtcgaaccctcactccgttggaactggtgcctaaaaccag

SEQ ID NO: 29790 - DNA, 260 bp, Unknown
  Description of Unknown: RightRegion for integrase B3791 sequence
acccttatgtttcatactacttttcagcagtattctccttataccaggtacagagggtgacttaatcaggaattttcaacttctgcccagcatagatgatagtacccttgatgccattcaggttggcaatctcaggccagcggttaccgttgcccagcagtttctttgcgataagccagagggtatcaccatccttcacaacataggttgtgtaggtgggttcgctctcctgcggagaggttgccacaacggttccactg

SEQ ID NO: 29791 - DNA, 260 bp, Unknown
  Description of Unknown: RightRegion for integrase B3792 sequence
tcctcacaggatgcagaaaagttcgttttggctctccacaactgcaccaaaagcctgtgacagaaaagatgtcacaggcttttttctttgctgtatcgttgaaaattggcggtttcgacagctaattttcgagttgctttttataaagatgtccagcggttttcagactgttggacatttttattgcctcatcttcccgcaaaattctgaattgcggcaggggagagggcaattttttttgagaaaaacagaataaatcc

SEQ ID NO: 29792 - DNA, 260 bp, Unknown
  Description of Unknown: RightRegion for integrase B3793 sequence
ttaatcccggttggggatgggttcggatttcttctttttatctcaagtattgtggtgtgatagaatcaaacgacgaaaggagatcagtagaaacaaacagtcagcggttgcagcagtcacattatgaccgacgccacaagaaagcgaggaaccaccatgaatacgctctcctccagagtccacgacagccaaaacggactgaactacaccctcgtcggggattactacctccccgatcttgaaattgaaagcagtcagcc

SEQ ID NO: 29793 - DNA, 260 bp, Unknown
  Description of Unknown: RightRegion for integrase B3794 sequence
attaaagataaggatgtcatagtatttagatttaaagatggaacagaaataaatggataaaattatttaataaatttttagggcaaatgtgaaaatttgctctttttgtgttataatatgcttacagataaatagtaatttgtgttgcagttgtaaattttactttaatatggtattacataaatatgttttattagaaacccagtttaaaatgcttttttaatggaggttaatatgttattagtaagttatattatttt

SEQ ID NO: 29794 - DNA, 260 bp, Unknown
  Description of Unknown: RightRegion for integrase B3795 sequence
attttgacaggttcacacgagccagactggacaattgataaattgtatacatttttataaaggaaattatggcaacactggaagaattaatagaaactttaaaagaaatattgactcttgataaggaaaactataatgcaaatgtttatatcggtgggaaatatttatttatccgcaaattagatcaagatgatgcatattttatagaactttaaaatataacaccaaaattgacgtactttaaatttaaaatataaaaa

SEQ ID NO: 29795 - DNA, 260 bp, Unknown
  Description of Unknown: RightRegion for integrase B3796 sequence
gactctcttgagctccaccatcaagctgcaccaaaaaagatgccgctgcgaaaagcctagaagtttcaacgacttccgggcttttttgcgcccatttttagaggcgtgacaaaatgtatgctattttctgaccgatatacagttgagacaacggagcattttgaaaaagaatttaagcgattggaccgatatacgcagcggacaatggcgctatcggatggaggattgtcgtttgatctgcctgatccaagacaatgagc

SEQ ID NO: 29796 - DNA, 109 bp, Unknown; identical to SEQ ID NO: 29774
  Description of Unknown: RightRegion for integrase B3797 sequence

SEQ ID NO: 29797 - DNA, 260 bp, Unknown
  Description of Unknown: RightRegion for integrase B3798 sequence
ctcttatccgaacccatcatcatgattgatggtgttattgggctggttttgcgaaggtaaggcaatccctctcctatgcgggagagggatttttttatttcgcaatgtgctcatagtattccatgagctttttctccggccctgggccgtccttatccagcagaaaagctttcgccagatctgcataaaactccgggcggtttacgccgtacctgacagctacgtcgtagtagtccgagtacatcatgttcatggtcacg

SEQ ID NO: 29798 - DNA, 260 bp, Unknown
  Description of Unknown: RightRegion for integrase B3799 sequence
agaaacaaaaagcactacacagaaatgtgtggtgcttttttgttgacgccaaacgagtgagggtttagctcagctgggagagcgccgtgcatggactgcaagagggtcaccgtgatcagaatcggcccggtaatctccaccagaatgaaagcactacacggaaacgtgtggtgcttttttgttttatctgccgttcaccttacgtcccctttcatgaaaaaagcgtttgtcgcagcccgcaggccgtgacaaacgctttt

SEQ ID NO: 29799 - DNA, 260 bp, Unknown
  Description of Unknown: RightRegion for integrase B3800 sequence
gattcagatgaagaaactataaaagtaaatcttataggtataaattcaaaccgtaattaaagatatagcttctgctatttggaaatttaggaacttttttccatatagcagaagctatatccatgtcagataaaatagcagtcctttcaaagcgtcctgcaacgattaaaagtatctatactatagacttgaaaatatctggagaaagaacccctattatatcacgtagtgctgaaaactttaaagattattttaacatc

SEQ ID NO: 29800 - DNA, 260 bp, Unknown
  Description of Unknown: RightRegion for integrase B3801 sequence
gaaagtccaccaaaaaagcactgtacttcgttggaagtacggtgcttttctttttgctgaagttggtttttgggggctgcattgcttctcctgcaccgtttttaggcttttgcaggcggttcctatacaacccccaacttttgactttacaccgttttcaaaaaggaatgtttgcaggccggtttttcagcaggctgctgcatcatccccttcaatgtacggcgtaaggtcgaagttgaaggtaatgttgagctgatacc

SEQ ID NO: 29801 - DNA, 260 bp, Unknown
  Description of Unknown: RightRegion for integrase B3802 sequence
gttgtgatacagatgtatcgaaaaactgctgtgctttttgtttgcggttcgattcgttaaaatccgaagggtttcaaggagaataagttggagaaaattatcgtaatggcacccggccatgaactgtgggatgggaccatcgcttttgcagcaggctgcccatggaaagcagcagcatttttggggcagagaagatggagccaaacgattttgaaaataacgaaagagctcttgtgggccttgcgcgatgatgacgcggc

SEQ ID NO: 29802 - DNA, 260 bp, Unknown
  Description of Unknown: RightRegion for integrase B3803 sequence
gatttggctttcttttgttcttttctatttagtttcaccagaatattatatccatattgaccattttttcttgtgcggttttggggtgcatttttctcgcacattttttcgatataaaatgtatgtaacccgccaagtgcgggttcgtcttttgtctgagacggattcaggaggttggtggggacattgttcagatggatttccacataatcggggtagacaagaaccttgtccagatacaggttgatgatctgctccat

SEQ ID NO: 29803 - DNA, 260 bp, Unknown
  Description of Unknown: RightRegion for integrase B3804 sequence
gttgtgatacagatgtatcgaaaaactgctgtgctttttgtttgcggttcgattcgttaaaatccgaagggtttcaaggaaaataagttggagaaaattatcgtaatggcacccggccatgaactgtgggatgggaccatcgcttttgcagcaggctgcccatggaaagcggcagcatttttggggcagcgaagatggagccaaacgattttgaaaataacgaaagagctcttgtggccttgcgcgatgatgacgcggcg

SEQ ID NO: 29804 - DNA, 260 bp, Unknown
  Description of Unknown: RightRegion for integrase B3805 sequence
acttgcatagttagagtatcgaaaaactggtttgttgtcgttggcacgtgtcaaaaatagcaatttccggtgtttacaaaacaccagatgggcggcttgctgtaagcccgtctaacgccagaaagcggggcaccccttgtcagggtaccccgcttgaacactaataagaaagcttctggccggggtagatcgtataaggtgccccaatgccgttcttgcttgcgatggtgtgccagtcgataccgagcgaagcgccaatc

SEQ ID NO: 29805 - DNA, 109 bp, Unknown
  Description of Unknown: RightRegion for integrase B3806 sequence
gattttctgttatatgtacacaatactatgtcgttctccaatggcagaatttatatttaaggacatggtcaataaccgtggggttagtgaccagttctacgtcgcctct

SEQ ID NO: 29806 - DNA, 260 bp, Unknown
  Description of Unknown: RightRegion for integrase B3807 sequence
acttgcatagttagagtatcgaaaaactggtttgttgtcgttggcacgtgccaaaaatagcaatttccggtgtttgcaaaacaccagatgggcggcttgctgtaagcccgtctaacgccagaaagcggggcaccccttgtcagggtaccccgcttgaacactaataagaaagcttctggccggggtagatcgtataaggtgccccaatgccgttcttgcttgcgatggtgtgccagtcgataccgagcgaagcgccaatc

SEQ ID NO: 29807 - DNA, 260 bp, Unknown
  Description of Unknown: RightRegion for integrase B3808 sequence
acccccctttcgataaacaaatctgtcaaacggaaaacgcaccaacaaccaacaaattaaaagggatttgataatatgagtattgttatatatgttcgacaaactaaggatatttccctttacgaacaatttaataaatgtgctgaatttgctaaacggtacggctattctatcgaatataaagttttagattttgagggcaatatattttatgaagcaataaataaggtaattgtggaacacgacattaccgcattgat

SEQ ID NO: 29808 - DNA, 260 bp, Unknown
  Description of Unknown: RightRegion for integrase B3809 sequence
gactctcttgagctccaccatcaagttgcaccaaaaaagatgccgctgcgaaaagcctagaagtttcaacgacttccgggcttttttgcgcccatttttagaggcgtgacaaaaagatgccaaaatggactttgccaaattcgatagacctgtacctttacccaaggcattttgagccgcttttccgaggatttttcgggaaagcggctcttttttgtcttaggcaaaacgtagaatttaagtaggctcttttgttggta

SEQ ID NO: 29809 - DNA, 260 bp, Unknown
  Description of Unknown: RightRegion for integrase B3810 sequence
tacgaactcttttggtttaggaatgtgttcggcctgacaagaaaactgccgcagaggtaattgtcctctgcggcagttttctatttgccggtgtagctctctgtcggcaagagcttataggttttcagcgtcttcccgcacctacggcatttataccgatagatcgtatcaatgtcgcctgcgctggaaccgatagtgaaatcggaatcgagcatcacccaactgtgcgattcacaggggcataggcgctcctcaagctc

SEQ ID NO: 29810 - DNA, 260 bp, Unknown
  Description of Unknown: RightRegion for integrase B3811 sequence
aaagaaatactttatgatggcaataaaattcatgtaaagtttaatctaaaaaaaaactagatagtgtagaaaatatactatctaggctattcaagaaatatagtacatgtcaaattaacacaacacgcttctgtatggccaacaaataaaccacttttttcacctgcacagaataaattatctactccttctactttcatatcattagtccttggtgctacagaaagatatcttattgaattacctttactacctgcata

SEQ ID NO: 29811 - DNA, 260 bp, Unknown
  Description of Unknown: RightRegion for integrase B3812 sequence
atcggtaaaaagggagaattgcaatttcggtttaaaaacggtactgaaataacagtttgattctgaatcgcagcattatcagtttttcacataaaacgaaaagcagatttgtaacattacacaaatctgcttttttgtcttgactttgcgagaaaaatagtgtaatatagattacaagcaaaacgaatgaatccggtgttccgggtttgtcaaaggcagtggttacccactgcacaccctttcggtactgtttgcacacc

SEQ ID NO: 29812 - DNA, 109 bp, Unknown
  Description of Unknown: RightRegion for integrase B3813 sequence
ggtgacggttgcaaaggttcagcttttgcgccgtcaagcgcactaaaagcaccgaggtaacctcggtgctttttttgtgcatgcagcgatgagagaaaacatggaaagc

SEQ ID NO: 29813 - DNA, 260 bp, Unknown
  Description of Unknown: RightRegion for integrase B3814 sequence
cactgcttgtcgccttctgtcggaatgaggcgagctattgacacattttgcttccactaataggctgattaataatatggataatctctcttttttcatacttctgtcccgattacgtcccagttttaggcgtaaaaaggtctagcctttaattctatcataattacaatattatttattcattaaaacttgaattattttctctcttaacctatagtgttacaatattatattcatatcttttaaattctttaatattt

SEQ ID NO: 29814 - DNA, 109 bp, Unknown
  Description of Unknown: RightRegion for integrase B3815 sequence
cttaaagaaactctgacagaatgtgtttatgatggtgaagtactccatataaaattataatatggttttttatttttaccttacctctcttttttatcctgataccttc

SEQ ID NO: 29815 - DNA, 260 bp, Unknown
  Description of Unknown: RightRegion for integrase B3816 sequence
aagttagagtccagttttttatttattcttgcagattcagcccctaaaaaggcttgttaggccgctttcttgcagtttggacgtgaaacccacccgcttttacaaaacgccacgtgcagcctttgtaggccgaacgtggcgtttcctgtttttcgggctgtaatttaacgatactcccgtacggtttcatttttcagcacccgggttcacttttttgcacccggtttcaaatttcaggtgcagggttcaatttgccccta

SEQ ID NO: 29816 - DNA, 260 bp, Unknown
  Description of Unknown: RightRegion for integrase B3817 sequence
tcctcgcaggatgcagaaaagttcgttttggctctccacaactgcaccaaaagcctgtgacataaagaatgtcgcaggctcttttctttgttgtatcgcacaaaatcagcgaagtcgatggccgattttccaggtgcgttttatagagatgtccaaccattttaagtcggttgggcttttttgttgggcggcttggtgtgcgttttcccgcccctgccgacccgttttgcagtttttcagcggaattttcaactttttcc

SEQ ID NO: 29817 - DNA, 260 bp, Unknown
  Description of Unknown: RightRegion for integrase B3818 sequence
tccgaacacgggaaactcataattctgaatggagcaatcggatttctattgcgaagataagtcaagccccctccgctgcttacggagggggctttttcctgtgaaaattgccgaggatacgaaaccatggcaattcatggtaggatgctcaaatgtattagacagtatttcaatccacacccttctcgaggaagggtgactgcgggagcgcgcccattgagctgtttcaagcatatcatgttccgccggaaactgcaagc

SEQ ID NO: 29818 - DNA, 260 bp, Unknown
  Description of Unknown: RightRegion for integrase B3819 sequence
gttgtgatacagatgtatcgaaaaactgctgtgctttttgtttgcggttcgattcgttaaaatccgaagggtttcaaggagaatgagttggagaaaattatcgtaatggcacccggccatgaactgtgggatggaaccatcgcttttgcagcaggctgcccatggaaagcagcagcatttttggggcagagaagatggagccaaacgattttgaaaataacgaaagagctcttgtggccttgtgcgatgatgacgcggcg

SEQ ID NO: 29819 - DNA, 96 bp, Unknown
  Description of Unknown: RightRegion for integrase B3820 sequence
ctaaaagagctttttaaagagtgtgtgtgggatggtgcggtacttcatgttaagctataattttttctccttttcattctgatactttccggtcgc

SEQ ID NO: 29820 - DNA, 260 bp, Unknown
  Description of Unknown: RightRegion for integrase B3821 sequence
aagaccgaaatactggtgattttcaagggcggatatgaggtcagggctgaaattgaataacgattaaaatttacggcttgcggagaaatctgcaagctgtttttgttgggagcgaggtgagataaaatgtcaaagaattttgacggtatcaaaacgcaaaagttcggtgtggaaatagagtgtacaggcttaacaagatcggcagcggcaaaggcggtcgcaaaggtcataggcggttcaccggagcatttcggtggcag

SEQ ID NO: 29821 - DNA, 260 bp, Unknown
  Description of Unknown: RightRegion for integrase B3822 sequence
tacgaactcttttggtttaggaatgtgttcggcctgacaagaaaactgccgcagaggtaattgtcctctgcggcagttttctatttgccggtgtagctctctgtcggcaggagcttgtaggttttcagcgtctttccgcacctgcggcacttataccggtagatcgtgtcaatgtcgcctgcgctggaaccgacagtgaaatcggaatcaaccaccacccaactgtgtgattcacaggggcacaggcgctcctccaactc

SEQ ID NO: 29822 - DNA, 260 bp, Unknown
  Description of Unknown: RightRegion for integrase B3823 sequence
gataaccgccgatttggaaacccagagccactggagttggagtttcaattcaaggtctgatctctcccctgcctgctctggggatagtgttgccgccatatctatcatggcggatataatgaactggggcatttggaaatgatcggcgcgatcgtccaccagttgacgcggaatctgaaggatactcagatgaaggattcggcgtttgcgccctattttgtggaccacactgcgggggtctaccctaccgccgcttccgg

SEQ ID NO: 29823 - DNA, 260 bp, Unknown
  Description of Unknown: RightRegion for integrase B3824 sequence
gttaatagagatggaactataacctttaaattcattgtaggtatagacattacgttataaataaatagagatttgcattgattttcattaagttcactaggtttagacttagtgagcttttttactttagcgtctattttatggacatgaaataaggtataatttaattggtaggtgattaagttgcaaaggcgaaataaacatgaaccaatacgtcaacattatattccgcaatttatactaaggaatttttgctttga

SEQ ID NO: 29824 - DNA, 109 bp, Unknown
  Description of Unknown: RightRegion for integrase B3825 sequence
gactctcttgagctccaccatcaagctgcaccaaaaaagatgccgctgcgaaaagcctagaagtttcaacgacttccgggcttttttgcacccatttttagaggcgtga

SEQ ID NO: 29825 - DNA, 260 bp, Unknown
  Description of Unknown: RightRegion for integrase B3826 sequence
aaaggcaacgagattggtttccagctagatattttcccaaaaatccagaagaataattaatgatatcttctatgaactgacgaactggctcattgatgttgtcggtaattaaaaaaagaaattcccggggaaattaaccccgggatatttttactgcttcttaatatattttgcagatacaaagccataatactttcctgcaatacggatataataccacttactaccgtttttatctttctgggtaaaattcattactt

SEQ ID NO: 29826 - DNA, 260 bp, Unknown
  Description of Unknown: RightRegion for integrase B3827 sequence
aagggcgatgagattagttttcggctcgacattttcccgcgaatccagaaaaaaagttaatgacaacatctatgtgctgaagaactggctcattgatgttatcagtaattaaataaaagaaattcccggggctaattccccgggatattttttactgtttcttaatatattttgcagatacgaagccataatattttcctgcaatacggatataataccacttactaccgtttttatctttctgggtaaaattcattacc

SEQ ID NO: 29827 - DNA, 260 bp, Unknown
  Description of Unknown: RightRegion for integrase B3828 sequence
aaaggtaacgagattaattttgagctagacattttcccaaaaattcaaaaaaatgattaatgacatcttctatgtgccagttcgctggcgcaatgatgctatcattaattttaaaaagaaactcccggggaattaaccccgggatattttatacttttttgatgtattttgcagaaacaaatccaaaatattttccggcaatgcggatatagtaccagtcggttttgtcttttgttcctatcagcgacaaaaaggtggca

SEQ ID NO: 29828 - DNA, 260 bp, Unknown
  Description of Unknown: RightRegion for integrase B3829 sequence
aaaggcaacgagattggttttcagctagacattttcccaaaaattcaaaagaataattaatgatatcttctatgtgccaacgaactggctcattgatgttgtcggtaattaaaaaaaagaaagtcccggggaattaaccccgggatattttttactgtttcttaatatattttgcagatacaaagccataatactttcctgcaatacggatataataccacttactaccgtttttatctttctgggtaaaattcattact

SEQ ID NO: 29829 - DNA, 260 bp, Unknown
  Description of Unknown: RightRegion for integrase B3830 sequence
aagggcgatgagattagttttcagctcgacattttcccaaaaatccagaagaataattaatgatatcttctatgtgctggcgaactggctcattaatgttatcagtaattaaaaaaagaaagtcccggggaattaaccccgggatatttttactgtttcttaatatattttgcagatacgaagccataatattttcctgcaatacggatataataccacttactaccgtttttatctttctgggtaaaattcattacttc

SEQ ID NO: 29830 - DNA, 260 bp, Unknown
  Description of Unknown: RightRegion for integrase B3831 sequence
aaaggcaacgagattggtttccagctcgacattttcccgaaaatccagaagaataattaatgatatcttctatgcgctgacgaactggctcattgatgttgtcggtaattaaaaaaagaaattcccggggataattccccgggatatttttactgcttcttaatatattttgcagatacaaagccataatactttcctgcaatacggacataataccacttactaccatttttatctttctgtgtataattcataacttc

SEQ ID NO: 29831 - DNA, 260 bp, Unknown
  Description of Unknown: RightRegion for integrase B3832 sequence
aagggcgatgagattagttttcggctcgacattttcccgcgaatccagaaaaaaagttaatgacaacatctatgtgctgacgaactggcgcattgatgttatcattgatttcaaaaagagattcccggggaattagccccgggatatttttactgtttcttaatatattttgcagatacaaatccataatactttcccgcaatacggatataataccatttgcttccgtttttatctttctgggtaaaattcattacctc

SEQ ID NO: 29832 - DNA, 260 bp, Unknown
  Description of Unknown: RightRegion for integrase B3833 sequence
atgagccacttagagtgctggaaatcttggtcgaacatcccgatcttgcagagcggataacgatcacgattaaacccaacagaatcattcagagcaacgagacccccacggataacaagtaatccgtaagagcagggcggcgggtaggagccgccgccctcgctttttaattataaccacccaccgatgaaaaatcaaggagaacatatatgaacaaagagcgcagaaaggccctgcagaccatcgttgaccagcttgca

SEQ ID NO: 29833 - DNA, 260 bp, Unknown
  Description of Unknown: RightRegion for integrase B3834 sequence
tctaaatatgagttaacctttaaattctatattggtgaagaaattaaaattaaattgtaaaaagctgcttcaattgagtaatatataattgagaggttcatgaactctccctagatagcactaagttatggtgatgctcggcattcaagtacctatgggccgtaatagatagaagtacgcagattaaggcagttaatcgggtttgactccaacctacataaatggagtctttttatttgctaaaactagccaagattatc

SEQ ID NO: 29834 - DNA, 260 bp, Unknown
  Description of Unknown: RightRegion for integrase B3835 sequence
aaaggcaacgagattggttttcagctcgacattttcccgaaaatccagaagaataattaatgatatcttctatgtgctggcgaactggcacattgatgttatcagtaattaaataaaagaaattcccggggctaattccccgggatattttttactgtttcttaatatattttgcagatacgaagccataatattttcctgcaatacggatataataccacttactaccgtttttatctttctgtgtaaaattcattact

SEQ ID NO: 29835 - DNA, 260 bp, Unknown
  Description of Unknown: RightRegion for integrase B3836 sequence
aaaggaaacgagattggttttcaactcgacattttcccaaaaatccagaagaataattaatgatatcttatatgagctgacgaactggcgcattgatgttatcagcaattaaataaaagaaattcccggggttaattccccgggatatttttactgcttcttaacatattttgcagaaacaaatccaaaatattttccggcaatgcggatatagtaccaagatgctccatctttggctttaatggtatcgcatacatcaa

SEQ ID NO: 29836 - DNA, 260 bp, Unknown
  Description of Unknown: RightRegion for integrase B3837 sequence
gaagacagcagtgcaggggggagcggttcgtttttagtcacggatgctccaccaagataatccgaaccttagaccaatcggtcatgggttcggatttcttgtttttatcaaggatattgaagtttagtttcgggatagaataacatcaaattcaggaggatatacccatggaaaagctcgtaaactgtgcgttcaatatagataccgcctgcgtggaacttcacttcacggatgggagtatttattccataaattgcacc

SEQ ID NO: 29837 - DNA, 260 bp, Unknown
  Description of Unknown: RightRegion for integrase B3838 sequence
aaaggcaacgagattggtttccagctagacattttcccaaaaatccagaagaataattaatgatatcttctatgtgctgacgaattggctcattgatgttatcagtaattataaaaaagtgtcttcgacacttcaactcccctgcccctcaatcttgaggggataggggtttctttttttcaacttttcattcataataggcttatgaatatcttacaaagaatctttactgactactatgaagaaattaaatatacact

SEQ ID NO: 29838 - DNA, 260 bp, Unknown
  Description of Unknown: RightRegion for integrase B3839 sequence
gctcgatctgtgatccgtgattgtagatgggatggtgaaaagctttttcttacgctttaaaactcatctttttgtcaataggagatcaccacgcatgacaaaaagatgagttttgaaagtccacgctgtacagttattttttctgcacagcgtgggctttttcgattactgcttattgcaccatttttgcagagccttgaccatagcagaaggattactgatcacaccgtcaaccggcgtgccgatcttgcgctggagtg

SEQ ID NO: 29839 - DNA, 260 bp, Unknown
  Description of Unknown: RightRegion for integrase B3840 sequence
aagggcaatgagattaattttcagctcgatattttcccaaaaatccagaagaataattaatgatatcttctatgtgctgacgaactggcgcattgatgttatcagcaattaaataaaagaaattcccggggctaattccccgggatatttttactgcttcttaatatattttgcagatacaaagccataatactttcctgcaatacggatataataccatttgctgccgtttttatctttctgggtaaaattcattacct

SEQ ID NO: 29840 - DNA, 176 bp, Unknown
  Description of Unknown: RightRegion for integrase B3841 sequence
acaatagaatatagtcgcgaacgtccaggtgaatttatactagatatagagcttctctgatacctactaccacatatagtaggtattctttaacatatacatatccatcataagtatcttcctttcgacagatgacagggaacgttcgctgtgtaaccaaattccgaagtattcca

SEQ ID NO: 29841 - DNA, 260 bp, Unknown
  Description of Unknown: RightRegion for integrase B3842 sequence
acgatagaatatagtcgcgaacgtccaggtgaatttatactagatatagagcttctctgatacctactaccacatatagtaggtattctttaacacatacatatccatcataagtatcttcctttcgacagatgacagggaacgttcgctgtgtaaccaaattccgaagtattccacggcacaacagttattcccgtttcccgggatgctccatgccagttgttgtacgtactggaagtatcgtttacaaaattatccgg

SEQ ID NO: 29842 - DNA, 260 bp, Unknown
  Description of Unknown: RightRegion for integrase B3843 sequence
catgggaacgaggctaattttgagctagacattttccccaaaattcaagaaaataattaattgtggcgtaacattctatcgacaacatctatgagcagattcgccagtacatagatgctgtcagtaaataaaaaagaaattcccggggaattaaccccgggatatttttatacttttttgatatcttttgcagccacaaatccgtagtacttgcctgcaacgcggacataataccatgaagcaccgtttgttgctttctg

SEQ ID NO: 29843 - DNA, 260 bp, Unknown
  Description of Unknown: RightRegion for integrase B3844 sequence
tccttatccgaacactttgtttttataaacggtgttattgggatggtcgtgcatcgataaaggaatccctctcctgttttggagagggatttttttattttgcaatatgctcataatacgccatgagcttgcgttccggccccggtccgtctttatcgagcagaaacgcctttgccagagcagcgtagaactccgggcggttgaggccgaactccacggcgacggggtagtagtccgagtacatcatgttcattgtcacg

SEQ ID NO: 29844 - DNA, 161 bp, Unknown
  Description of Unknown: RightRegion for integrase B3845 sequence
ccgggtgttggcaggtacgtggagaatgtatttgaattaaatatgcttctcaatatgtaaagacttattttgaagtagtctttactatatccaacatcaatgtaccgatgaattggcgcatcttgagatagtcggtgccatggttcaccagctcacacgcg

SEQ ID NO: 29845 - DNA, 160 bp, Unknown
  Description of Unknown: RightRegion for integrase B3846 sequence
ccgggagtcggcagatatgttgagaatgtatttgagctaaatatgctccttaacatataaagctctttttaaaagcctttctattatctccaacatcaatgtaccaatgaattggcgcatcttgagatagtcggtgccatggttcaccagctcacacgcg

SEQ ID NO: 29846 - DNA, 260 bp, Unknown
  Description of Unknown: RightRegion for integrase B3847 sequence
aaaggtaacgagattaattttgagctagacattttcccaaaaattcaaaaaaatgattaatgacatcttctatgtgccagttcgttagcgcaatgatgctatcattaattttaaaaagaaactcccggggaattaaccccgggatattttatacttttttgatgtattttgcagaaacaaaaccgaagtactttccggcaatgcggatgtagtaccagtcggctttgtcttttgctttaatgatatcgcatacatcaact

SEQ ID NO: 29847 - DNA, 260 bp, Unknown
  Description of Unknown: RightRegion for integrase B3848 sequence
tccttatccgaacacctcatctttataaatggtgttattgggatggttgtgcatcgataaaatatccctcccatatgggagggatattttttatgcttttttaagccgcggctctacaatgccgtgataatacccggcgatcttcgcctcgggcccaccgccgtcctcgtcaaaaaggaacgcctttgcgaggtctgcgtagtattccggccggtcgaggccgtatttctgcgcaacctcgaagttgtccgagtactcca

SEQ ID NO: 29848 - DNA, 260 bp, Unknown
  Description of Unknown: RightRegion for integrase B3849 sequence
attccgggaacgatgcaggtacagaagaatcggtgccgccatgatgtcaatgataaataaacaaaaaaggaagcacacctgaagaattccaggtgtgctttaaagttatttgccggttgttctgctctttgtgcgtggcgggtcattcggcacgcactctataatttcagacggttggcaatgtaacgcctcgcatatcaagtcaagatgctcaaggctgatgcgctcggcaatgccatgataatactcgttgatagtat

SEQ ID NO: 29849 - DNA, 260 bp, Unknown
  Description of Unknown: RightRegion for integrase B3850 sequence
aaaggcaacgagattggttttcagctagacattttcccaaaaattcaaaagaataattaatgatatcttctatgtgccaacgaactggctcattgatgttgtcggtaattaaaaaaaagaaagtcccggggaattaaccccgggatattttttactgtttcttaatatattttgcagatacaaagccataatactttcctgcaatacgaatataataccatttgctgccgtttttatctttctgtgtataattcataact

SEQ ID NO: 29850 - DNA, 260 bp, Unknown
  Description of Unknown: RightRegion for integrase B3851 sequence
aaaagtaatgagatcaattttgaactagacatttttccgaaaatccaaaaaaatgattaatgacatcttctatgtgccagttcgcctgctcatagatgttatcagcaaataaaaaaaagaattcccggggcgattccccgggatatttttatacttttttgatgtattttgcagaaacaaatccgaagtattttccagcaattctgatgtagtaccaagagttaccgtcacttgctttctgagtgaagttcataacgtca

SEQ ID NO: 29851 - DNA, 109 bp, Unknown
  Description of Unknown: RightRegion for integrase B3852 sequence
ttaaaggatctctttaaggaatgtgtttacgacggtcaaactctgcatattaaaatttagtttttctctcttttttattctgatacgttctggtctcatacgaagagcc

SEQ ID NO: 29852 - DNA, 260 bp, Unknown
  Description of Unknown: RightRegion for integrase B3853 sequence
tttgatgagaagattgtggtagagatgaaatccgggcttcatatagaggtgaaagagtaaagaaaaatgtacataaaacgaaacccggagccgacggcgtgtcagtcccgggtgctatttcaatctatcgggatttgtctgataaaatgcgatcagaatagaacatgtttatatcttggttttctattactaaaagatcctttccccattctttgttatcgtgaccgagtaatcttttaagcgatcgatagtctattctt

SEQ ID NO: 29853 - DNA, 260 bp, Unknown
  Description of Unknown: RightRegion for integrase B3854 sequence
ttgaaagacctttttaaagaatgcgtttatgatggcgaaacactccacatcaagctttaatatttctctcttttttattttgatactatcaggtcgcatgcgtaatgacgattttaacaaatcccttatcgtcactgcatttttgccttcaatatttgcatttctaacctccagtcttacaagatttggtatatttcttatctgaagttctgccgcatcctcaattgtaattattctctcgtcctgcggtatgtaatcag

SEQ ID NO: 29854 - DNA, 260 bp, Unknown
  Description of Unknown: RightRegion for integrase B3855 sequence
tccttatccgaacaaattctgtttatcaacggtataatcggtatgcttgttcgccgataaggcgcagcccctctccgatttggagaggggttgctttttatttcacaatgcacctgtaatacgcacaaagcttttcctccgggcctgggccgtccttgtccatcaagaacgcccgcgccagctccgcgtagaactccggcacgttgacaccgaacttccgcgccacatcgtagtagtccgagtacatcatgttcatggtc

SEQ ID NO: 29855 - DNA, 260 bp, Unknown
  Description of Unknown: RightRegion for integrase B3856 sequence
aaaggcaacgagattggttttcagctagacattttcccaaaaattcaaaagaataattaatgatatcttctatgtgccaacgaactggctcattgatgttgtcggtaattaaataaaagaaattcccggggttaattccccgggatatttttactgcttcttaacatattttgcagaaacaaatccaaaatattttccggcaatgcggatatagtaccaagatgctccatctttggctttaatggtatcgcatacatcaa

SEQ ID NO: 29856 - DNA, 260 bp, Unknown
  Description of Unknown: RightRegion for integrase B3857 sequence
aaaagtaatgagatcaattttgaactagacatttttccgaaaatccaaaaaaatgattaatgacatcttctatgtgccagttcgcctgctcatagatgttatcagcaaataaaaaaaagaattcccgggggcgattccccgggatatttttatacttttttgatgtacttcgcagaaacaaatccaaaatactttccggctatgcggatgtaataccagtctgacttgtcttttgctttaatggtatcacatacatcaac

SEQ ID NO: 29857 - DNA, 260 bp, Unknown
  Description of Unknown: RightRegion for integrase B3858 sequence
ttcgaacctatcaaaatgtatttgataggtcggttactgttctgtatgaaacaaatgtaattttaaaacaacggattttgtccgttgtttttttgttgcaaaatttttttaattttttttgaaaaaactattgacataccacccaatgggtgatataataaagacaagaaatgaggaaaacctcaaaataataaacaaaaaggataaattttaggaggaaaagaaaatgaagagatttaaggtaacaaacgaaatgtaca

SEQ ID NO: 29858 - DNA, 260 bp, Unknown
  Description of Unknown: RightRegion for integrase B3859 sequence
attccgggaacaatgcaggtacagaagaattggttccgccatgatgtcaatgataaataagcaaaaaaggaagcacacctgaagaattccaggtgtgctttaaagttatttgccggttgttctgctttttgtacgtggcgggtcattcggcacccactctataatttcagacggttggcaatgtaacgcctcgcatatcaagtcaagatgctcaaggctgatgcgctcggcaatgccatgataatactcgttgatagtat

SEQ ID NO: 29859 - DNA, 260 bp, Unknown
  Description of Unknown: RightRegion for integrase B3860 sequence
aagggcaataagattggtttccagctagacattttcccgaaaatccagaagaataattaatgatatcttctatgtgctgacgaactggctcattgatgttatcagtaattaaataaaagaaattcccggggttaattccccgggatatttttactgcttcttaatatattttgcagatacaaagccataatactttcctgcaatacggatataataccacttactaccgtttttatctttctgggtaaaattcattacct

SEQ ID NO: 29860 - DNA, 260 bp, Unknown
  Description of Unknown: RightRegion for integrase B3861 sequence
aaaggcaacgagattggttttcagctagacattttcccaaaaattcaaaagaataattaatgatatcttctatgtgctgacgaactggctcattgatgttgtcggtaattaaaaaaaagaaagtcccggggaattaaccccgggatatttttttactgtttcttaatatattttgcagatacaaagccataatactttcctgcaatacggatataataccacttactaccgtttttatctttctgtgtataattcataac

SEQ ID NO: 29861 - DNA, 260 bp, Unknown
  Description of Unknown: RightRegion for integrase B3862 sequence
gcaggtcttggaagatatatcaagaacgaatttactcttgatatctttcttaatgtgtgaactacccatcacctaaaggtagtgggttttacgctccagcttataaaataatcatttctaacattgatgttctgatgaacttgcacatagatgatggatatgataattaaaaaaagagaaagaacctttcgaccaatagaggatccggacagactcgatgaagatggcgaggtcatacaatggaatataatcggttatga

SEQ ID NO: 29862 - DNA, 260 bp, Unknown
  Description of Unknown: RightRegion for integrase B3863 sequence
caaggtcacgttgcctccaccatccgcaacgcggacgaaccctcgaaagaaaacgagtgatcgtttcctttcgggggctttctttttggcaaaaatgttccaagagaaatatttgtgatccaatatgagaaaaatcggagaggtacgatgctgatttatacggcggcaacgcttctgtcctgccttttgacatggcacagacaaaaaagactacaggctcagatggtgcaggaaacagcacttcaggcgttttttcaaaa

SEQ ID NO: 29863 - DNA, 260 bp, Unknown
  Description of Unknown: RightRegion for integrase B3864 sequence
tggggcgacggctccgatctctctctaaccctcttcccgctcgtgccggattctgactgataattccgtggagcggattcattcgcgccacggaattatcaatgttgcatatgttacaattaagcaccggagccatgcagttggctccggtgctgtctcttttactctcctccggccacacatcggtaatatgccgctgtcttgcgctccggcccgcccgcgtccttgtcaaacaaaaacgcctttgcgagatcggtgta

SEQ ID NO: 29864 - DNA, 260 bp, Unknown
  Description of Unknown: RightRegion for integrase B3865 sequence
aaaggcaacgagattggttttcagctcgacattttcccaaaaatccaaaagaataattaatgatatcttatatgtgctgacgaactggcacatagatgttgtcggtaattaaaaaaagaaattcccggggctaattccccgggatatttttactgtttcttaatatattttgcagatacaaatccataatactttcctgcaatacggatataataccatttgctgccatttttatctttctgggtaaaattcattacctc

SEQ ID NO: 29865 - DNA, 260 bp, Unknown
  Description of Unknown: RightRegion for integrase B3866 sequence
cacttatccgaacacatcatatttgtaaatggtgttattgggatgatcgtgcagagatgaaaataccctctccggattggagagggtatttttttattttgcgatatgctcataatactccatcagctttcgctccgggccggggccgtctttgtcgagcaggaatgcctttgccagggcggcgtagaattccgggcggttgaggccgaactctaccgcgacggggtagtagtccgagtacatcatgttcatggtcacgc

SEQ ID NO: 29866 - DNA, 260 bp, Unknown
  Description of Unknown: RightRegion for integrase B3867 sequence
aaaggcaacgagattggttttcagctagacattttcccaaaaattcaaaagaataattaatgatatcttctatgtgctgacgaactggctcattgatgttatcagtaattataaaaagaaagtcccggggaattaaccccgggatattttttactgtttcttaatatattttgcagatacaaagccataatactttcctgcaatacggatataataccatttgctgccgtttttatctttctgtgtataattcataactt

SEQ ID NO: 29867 - DNA, 260 bp, Unknown
  Description of Unknown: RightRegion for integrase B3868 sequence
aaaggaaacgagattggtttccagctagacattttcccaaaaatccagaagaataattaatgatatcttctatgagctgacgaactggcacattaatgttatcagtaattataaaaagaaagtcccggggaattaaccccgggatattttttactgtttcttaatatattttgcagatacaaagccataatactttcctgcaatacgaatataataccatttgctgccgtttttatctttctgtgtataattcataactt

SEQ ID NO: 29868 - DNA, 260 bp, Unknown; identical to SEQ ID NO: 29825
  Description of Unknown: RightRegion for integrase B3869 sequence

SEQ ID NO: 29869 - DNA, 260 bp, Unknown
  Description of Unknown: RightRegion for integrase B3870 sequence
gccttatccgaacaaatcctgtttattaacggtataatcgggatgcttgttcgccgataaggcgcagcccctctccagatcggagaggggttgctttttatttcacaatgcacctgtaatacgcacaaagcttttcctccgggccggggccgtccttgtccatcaagaacgcccgcgccagctccgcgtagaactccggcacgttgactccgaacttccgcgccacatcgtagtagtccgagtacatcatgttcatggtc

SEQ ID NO: 29870 - DNA, 260 bp, Unknown
  Description of Unknown: RightRegion for integrase B3871 sequence
aaaggtaacgagattaattttgagctagacattttcccaaaaattcaaaaaaatgattaatgacatcttctatgtgccagttcgctggcacaatgatgttatcattaatttcaaaaagaagccccaaggaataaatttccaaggggcttaagttttatgctttttagattgcaatcaaatctttccaggtgttctcgccacactctccgtctaccaccagtactccatttctggacttctggtactgttttaatgcataa

SEQ ID NO: 29871 - DNA, 260 bp, Unknown
  Description of Unknown: RightRegion for integrase B3872 sequence
gtgaaagacgtaattaaaaaatgtgtatgggacggggagtccctttctattatgctttgaagctcacttttttactatgcgtctttcaccccgcgttataaaaaagtgaaatacaaaaaaatggaaggaggcattgtttatgttagctatttaccatgtattcggatccggcgatttcttttttgaaaccagaagccaacgcgaagcgacactgaccgcccaggacgttgcaaacgaaaccggacagcctgcatcggtga

SEQ ID NO: 29872 - DNA, 260 bp, Unknown
  Description of Unknown: RightRegion for integrase B3873 sequence
aagggcaacgagattggtttccagctagacattttcccaaaaatccagaagaataattaatgatatcttctatgtgctgacgaactggctcattaatgttatcagtaattaaataaaagaaattcccggggttaattccccgggatatttttactgcttcttaatatattttgcagatacaaagccataatactttcctgcaatacggatataataccatttgctgccgtttttatctttctgggtaaaattcattacct

SEQ ID NO: 29873 - DNA, 260 bp, Unknown
  Description of Unknown: RightRegion for integrase B3874 sequence
cccggtgttggccggtatgtagacaatattttcgatcttaagatttctttacgcctttaacccccatgatggatgttataatgaacttggtcacctcgaaatgattggtgcgattgttcgccagctgacacgtggactttccgccaaagaactggaagcttccggatttgcaccatattatattgatcacaccgcaggtgtctggccgcaggctgcgggtggagttccattttccgctaccgaatttcagtcaagcggtg

SEQ ID NO: 29874 - DNA, 260 bp, Unknown
  Description of Unknown: RightRegion for integrase B3875 sequence
aaaggtaacgagatcaattttgatctagacatttttccgaaaatccaaaaaaatgattaatgacatcttctatgtgccagttcgctggcgcaatgatgttatcattaatttcaaaaagaaactcccggggaattaaccccgggatattttatgcttttttgatgtattttgcagaagcaaatccgaaatattttccggcaatgcggatatagtaccaagatgctccatctttggctttaatgatatcgcatacatcaacc

SEQ ID NO: 29875 - DNA, 260 bp, Unknown
  Description of Unknown: RightRegion for integrase B3876 sequence
aaaggtaacgagattaattttgagctagacattttcccaaaaattcaaaaaaatgattaatgacatcttctatgtgccagttcgctggcgcaatgatgctatcattaattttaaaaagaaactcccggggaattaaccccgggatattttatacttttttgatgtattttgcagaaacaaatccaaaatattttccggcaatgcggatatagtaccaagatgctccatttttggctttaatggtatcgcatacatcaact

SEQ ID NO: 29876 - DNA, 260 bp, Unknown
  Description of Unknown: RightRegion for integrase B3877 sequence
aaaggcaacgagattggtttccagctagatattttcccaaaaatccagaagaataattaatgatatcttctatgtgctgacgaattggctcattgatgttatcagtaattaaataaaagaaattcccggggctaattccccgggatatttttactgtttcttaacatattttgcagatacaaagccataatactttcctgcgatacggatataataccatttgctgccgtttttatctttctgggtaaaattcattactt

SEQ ID NO: 29877 - DNA, 260 bp, Unknown
  Description of Unknown: RightRegion for integrase B3878 sequence
attccgggaacaatgcaggtacagaagaatcggtgccgccatgatgtcaatgataaataaacaaaaaaggaagcacacctgaagaattccaggtgtgctttaaagttatttgccggttgttctgctctttgtgcgtggcgggtcattcggcacccactctataatttcagacggttggcaatgtaacgcctcgcatatcaagtcaagatgctcaaggctgatgcgctcggcaatgccatgataatactcgttgatagtat

SEQ ID NO: 29878 - DNA, 158 bp, Unknown
  Description of Unknown: RightRegion for integrase B3879 sequence
gttatcgactatggcagaagcaaaggcggcaagcccgtgttagaaatcattttcaaataagggctaatttttttagccctcattagtagcttgataagtctattttcgtcggcttgcccttgatgttcgaaaccgtgtagccgaaaaacttctgcagc

SEQ ID NO: 29879 - DNA, 260 bp, Unknown
  Description of Unknown: RightRegion for integrase B3880 sequence
ggggtatttttttattgctatttcccgggacattgcggaacggagcggctaaaaaaataagacttgttgccataaaaagagaaatcccccaatacctttcgtatacgatgcctgcaaacggcagatactgaaagggattgggggattgctatgaagatcgtcttttatggggcgcgggagtatgaccattattactttgatgtgctggcggctgacccggaatatggctgtgagatcaggtttttaacggcaaatcttga

SEQ ID NO: 29880 - DNA, 260 bp, Unknown
  Description of Unknown: RightRegion for integrase B3881 sequence
ggaaaccttgtcattcatacctttgtatgctcgcagattaagcgttatcagcggttttagaccttttcggtatagttgtcataggcaagacaaatccagcctgcgccgcttttcagcttgccccagagacccttgttacctgcgctgtcaatctgtccctgcgcttcctcaacaatggtgaatacacccttgccagtataagagccagtagccgcatagttcgtgcctgcgcccttacgaatacgcaaatcagaaacctt

SEQ ID NO: 29881 - DNA, 260 bp, Unknown
  Description of Unknown: RightRegion for integrase B3882 sequence
aaaagtaatgagatcaattttgaactagacatttttccgaaaatccaaaaaaatgattaatgacatcttctatgtgccagttcgcctgctcatagatgttatcagcaaataaaaaaagaattcccggggcgattccccgggatatttttatacttttttgatgtctttcgcggccacaaatccgtagtactttcctgcaatgcagacataataccatgaagcgccgtttgttgctttttgagtgaaattcatcacgtcaa

SEQ ID NO: 29882 - DNA, 260 bp, Unknown
  Description of Unknown: RightRegion for integrase B3883 sequence
gcccgggaagtaataaagaagtgtgtctgggacggggagaccctttatgttgagctctaaacctctcttttttatattgcgtccttcaagtctgaatgttaccatggactacatcatctatggatacgaagacaccgaaccaaagactccggaacagcttttggaaatggaagccgtcgaagaactccttgggcactgcagcgaaaaaaagcgctcctatgccatggagcttctccggctctttttaaaggcctgcgacg

SEQ ID NO: 29883 - DNA, 260 bp, Unknown
  Description of Unknown: RightRegion for integrase B3884 sequence
aaaggcaatgagattggttttcagctcgacattttccccaaaatccagaaaaataattaatgatatcttctatgcgctgacgaactggcgcattgatgttatcagcaattaaataaaagaaattcccggggctaattccccgggatatttttactgtttcttaatatattttgcagatacaaatccataatactttcctgcaatacggatataataccacttactaccgtttttatctttctgggtaaaattcattactt

SEQ ID NO: 29884 - DNA, 260 bp, Unknown
  Description of Unknown: RightRegion for integrase B3885 sequence
cggatggggaacgaagccacctttgtcctggatattttccccagaattcaatcaaattaattaatgataacatctatgtacaaacgaactcagtcatctggaaatggtatccactattgtacatcagcttacccgggacctttccatggaggaaattgagaaatccggatttggaccatattatatcgatcacacagtgggagtctggccacaggcagcaggtggcgtaccatttaatgcatgtgaatttcagagtaaag

SEQ ID NO: 29885 - DNA, 260 bp, Unknown
  Description of Unknown: RightRegion for integrase B3886 sequence
aaaggaaacgagattagctttcagctagacattttcccaaaaatccagaagaacaattaatgatatcttctatgtgctggcgaactggctcattgatgctatcattaatttggaaaagaaactcccggggaattgcccccgggatattttttatacttttttgatgtatttcgcagaaacaaatccgaaatactttccggcaatgcggatgtaataccagtctgacttgtcttttgctttaatggtattacacacatcaa

SEQ ID NO: 29886 - DNA, 143 bp, Unknown
  Description of Unknown: RightRegion for integrase B3887 sequence
caaggtcacgttgcctccaccatccgcaatgcggacgaaccctcaaaagaaaacgagtgatcgtttcctttcgggggctttctttttggaaaaatgttccaagagaaatatttgtgatccaatatgagaaaaatcggagaggt

SEQ ID NO: 29887 - DNA, 260 bp, Unknown
  Description of Unknown: RightRegion for integrase B3888 sequence
gtcatcgactatggcagaagcaaaggcggcaagcccgtgttagaaatcattttcaaataagggctaatttttttagcccttattagtagcttgataagtctattttcgtcggcttgcccttgatgttcgaaactgtgtagccgaaaaacttctgcagcgtctccagatcgccgcgatcccacgcgacctcgatcgcgtggcgtatcgcacgctcaacgcgcgagggcgtggtgttgaatttgcgcgcgacctcggggtag

SEQ ID NO: 29888 - DNA, 260 bp, Unknown
  Description of Unknown: RightRegion for integrase B3889 sequence
aaaggcaacgagattggtttccagctagacattttcccaaaaatccagaagaataattaatgatatcttctatgtgctgacgaactggcacattgatgttatcagcaattaaataaaagaaattcccggggttaattccccgggatatttttactgcttcttaacatattttgcagacacaaatccataatattttccagcaatgcgaatgtaataccacttactaccgtttttatctttctgggtaaaattcattacct

SEQ ID NO: 29889 - DNA, 260 bp, Unknown
  Description of Unknown: RightRegion for integrase B3890 sequence
aaaggcaacgagattggtttccagctagatattttcccaaaaatccagaagaataattaatgatatcttctatgaactgacgaactggcgcattgatgttatcagcaattaaataaaagaaattcccggggttaattccccgggatatttttactgcttcttaacatattttgcagacacaaatccataatattttccagcaatgcgaatgtaataccacttactaccgtttttatctttctgggtaaaattcattacct

SEQ ID NO: 29890 - DNA, 260 bp, Unknown
  Description of Unknown: RightRegion for integrase B3891 sequence
aagggcaacgagattggtttccagctcgacattttcccgaaaattcagaagaataattaatgatatcttctatgtgctgacgaactggctcattgatgttatcagtaattaaaaaagaaattcccggggctaattcccccgggatatttttactgctttttaatatattttgcagatacaaagccataatactttcctgcaatacggatataataccacttactaccgtttttatctttttgggtaaaattcattacctc

SEQ ID NO: 29891 - DNA, 260 bp, Unknown
  Description of Unknown: RightRegion for integrase B3892 sequence
aaaggcaacgagattggtttccagctcgacattttcccgaaaatccagaagaataattaatgatatcttctatgcactgacgaactggcccattgatgttatcattaattttgaaaagaaattcccggggggggggattaaccccgggataatttttactgctttttgatatattttgcagatacaaagccataatactttcctgcaatacggatataataccacttactaccgtttttatctttctgggtaaaattcat

SEQ ID NO: 29892 - DNA, 260 bp, Unknown
  Description of Unknown: RightRegion for integrase B3893 sequence
aaaggaaaagagattggttttcaactcgacattttcccaaaaatccagaagaataattaatgatatcttatatgagctgacgaactggcgcattgatgttatcagcaattaaataaaagaaattcccggggttaattccccgggatatttttactgcttcttaacatattttgcagacacaaatccataatattttccagcaatgcgaatgtaataccacttactaccgtttttatctttctgggtaaaattcattacct

SEQ ID NO: 29893 - DNA, 260 bp, Unknown
  Description of Unknown: RightRegion for integrase B3894 sequence
aaaggaaacgagattggttttcagctagacattttcccaaaaattcaaaaaaatgattaatgacatcttctatgtgccagttcgctagcgcaatgatgctatcattaattttaaaaagaaactcccggggaattaaccccgggatattttatacttttttgatgtattttgcagaaacaaatccgaaatactttccggcaatgcggatgtagtaccagtcggttttgtcttttgttcctatcagcgacaaaaaggtggca

SEQ ID NO: 29894 - DNA, 260 bp, Unknown
  Description of Unknown: RightRegion for integrase B3895 sequence
ccgggtgtcggcagatatgtggagaatgtatttgaactgaacatgcttctcaatatttaagtaattgttctttaagcatcatctacaacatcaatgtactgattcctccgtgcctatatcagtaagcacacctgccacgcgtctgtccttcatggagtagcgctgtgagaggtatctgaatgatgctcccgcttcgccgtccggaccgccatactggcttatgatgagctgcgcaagcttcgggttggtctccttgatgt

SEQ ID NO: 29895 - DNA, 260 bp, Unknown
  Description of Unknown: RightRegion for integrase B3896 sequence
aaaggtaacgagattaattttgagctagacattttcccaaaaattcaaaaaaatgattaatgacatcttctatgtgccagttcgctggcgcaatgatgctatcattaattttaaaaagaaactcccggggaattaaccccgggatattttatgcttttttgatgtattttgcagaaacaaatccaaaatattttccggcaatgcggatatagtaccaagatgctccatctttggctttaatggtatcgcatacatcaact

SEQ ID NO: 29896 - DNA, 260 bp, Unknown
  Description of Unknown: RightRegion for integrase B3897 sequence
aaaatagagttcagtcgcgaaaacaataaagaatttatattggacataatcctgaagtaaccgcataacgacgggcttcgggtacatttttaactaaaatgtctatcatgcgtgtgatgttttgatagcgcatcgatgatatacattaagtaaaaggaggaaatataaatgagagtagtgtggaaagatagcgcccaactggcgaataaacaagtgaagaaagagattaagaaagtcactaagaaaaataacaaaacagc

SEQ ID NO: 29897 - DNA, 260 bp, Unknown
  Description of Unknown: RightRegion for integrase B3898 sequence
gttattgactatggcagaagcaaaggcggcaagcccgtgttagaaatcattttcaaataagggctaatttttttagcccttattagtagcttgataagtctattttagtaggcttatcatgctactaataacaccaaaccgctgatattactgattatatcaaccataaaagaaatggggaatagaaatgaatggcaacatagtattaggccatcttgaaaagcggcttatggccggggaaataagtgaagcagaatata

SEQ ID NO: 29898 - DNA, 260 bp, Unknown; identical to SEQ ID NO: 29830
  Description of Unknown: RightRegion for integrase B3899 sequence

SEQ ID NO: 29899 - DNA, 260 bp, Unknown; identical to SEQ ID NO: 29849
  Description of Unknown: RightRegion for integrase B3900 sequence

SEQ ID NO: 29900 - DNA, 77 bp, Unknown
  Description of Unknown: RightRegion for integrase B3901 sequence
aaaagttcgaccgagacgcgtctggtccgagtggcgagaatcgaactcacggcctcttgaaccccattgtgcttctc

SEQ ID NO: 29901 - DNA, 260 bp, Unknown
  Description of Unknown: RightRegion for integrase B3902 sequence
aaaggcaacgagattggtttccagctagatattttcccaaaaatccagaagaataattaatgatatcttctatgtgctgacgaactggcgcatctggagatggtttccaccatggttcaccagcttacccgtgacctcactatggaagaaattgagaattccgggctgggaccatattatattgaccacacagttggcgtgtggccacaggcagcagggggtgttccatttaatgcctgcgaattccagagtaaaggtga

SEQ ID NO: 29902 - DNA, 260 bp, Unknown; identical to SEQ ID NO: 29835
  Description of Unknown: RightRegion for integrase B3903 sequence

SEQ ID NO: 29903 - DNA, 260 bp, Unknown
  Description of Unknown: RightRegion for integrase B3904 sequence
cacttatccgaacacatcatatttgtaaatggtgttattgggatgatcgtgcaaagataaaaagattcctctccaagtcggagagggatctttttattattttaccacatgctcatagtatttcatgagcttgcgcaccgggccggggccgtctttatcgatcaaaaacgcctttgccagagcagcgtagaactccgggcggttgaggccgaattctaccgcgacggggtagtagtccgagtacatcatgttcatggtca

SEQ ID NO: 29904 - DNA, 260 bp, Unknown
  Description of Unknown: RightRegion for integrase B3905 sequence
tccgaacacgccgagctatatgttatttcagggcttttggcttgtgtcgtgaaaagataggcgtttctcttgtttatatagaaaatcgtgctataatgtcaaatatagagcttccggctctatcctatttcattcggcagtttcgctccggcggggctgctgttttacattttgccgacgtcggcaaaatgctatcgtggcttgactataaaaatcaaaatgaaaaaagtgttgacatacttataagagtatgatataat

SEQ ID NO: 29905 - DNA, 260 bp, Unknown
  Description of Unknown: RightRegion for integrase B3906 sequence
aaaagtaatgagatcaattttgaactagacatttttccgaaaatccaaaaaaatgattaatgacatcttctatgtgccagttcgcctgctcatagatgttatcagcaaataaaaaaaagaattcccggggcgattccccgggatatttttatacttttttgatgtacttcgcagaaacaaatccgaagtattttccagcaattctgatgtagtaccaagagttaccgtcacttgctttctgagtgaagttcataacgtca

SEQ ID NO: 29906 - DNA, 260 bp, Unknown
  Description of Unknown: RightRegion for integrase B3907 sequence
attccgggaacaatgcaggtacagaagaattggttccgccatgatgtcaatgataaataagcaaaaaaggaagcacacctgaagaattccaggtgtgctttaaagttatttgccggttgttctgctttttgtacgcggtgggtcattcggtacccactctataatttcagacggttggcaatgtaacgcctcacagatcagatcaagatgctcaaggctgatgcgatcattaaagccatgataatactcgttgatagtat

SEQ ID NO: 29907 - DNA, 260 bp, Unknown
  Description of Unknown: RightRegion for integrase B3908 sequence
aagggcgatgagattagtttccagctagacattttcccaaaaatccagaagaataattaatgatattttctatgtgctgacgaactggcgcattgatgttatcaataattaaataaaagaaattcccggggttaattccccgggatatttttactgtttcttaacatatttcgcagatacaaagccataatattttcctgcaatacggatataataccatttgctgccgtttttatctttctgtgtaaaattcattacct

SEQ ID NO: 29908 - DNA, 260 bp, Unknown
  Description of Unknown: RightRegion for integrase B3909 sequence
aaaggtaacgagatcaattttgagctagacatttttccgaaaatccaaaaaaatgattaatgacatcttccatgtaccagttcgctggcgcattgacgttatcattaatttcaaaaagaaactcccggggaattaaccccgggatattttatacttttttaatgtattttgcagaaacaaatccaaaatattttccggcaatgcggatatagtaccaagatgcgccgtctttggctttaatggtatcgcatacatcaacc

SEQ ID NO: 29909 - DNA, 260 bp, Unknown
  Description of Unknown: RightRegion for integrase B3910 sequence
aaaggcaacgagattggttttcagctcgacattttcccgaaaatccagaagaataattaatgatatcttctatgtactgacgaactggctcattgatgttgtcggtaattaaaaaaagaaattcccgggggtaattccccgggatatttttactgcttcttaatatattttgcagatacaaagccataatactttcctgcaatacggatataataccacttactaccgtttttatctttctgggtaaaattcattacttc

SEQ ID NO: 29910 - DNA, 260 bp, Unknown; identical to SEQ ID NO: 29892
  Description of Unknown: RightRegion for integrase B3911 sequence

SEQ ID NO: 29911 - DNA, 260 bp, Unknown
  Description of Unknown: RightRegion for integrase B3912 sequence
cgcaaggggaatgaagccacctttgttttggatattttccccagaattcagtcaaattaattaatgataacatctatgtacaaacgaactcagtcatctggaaatggtatccactattgtacatcagcttacccgggacctttccatggaggaaattgagaaatccggattcggaccgtattatatcgatcacacagtgggagtctggccacaggcagcaggtggcgtaccatttaatgcatgtgaatttcagagtaaag

SEQ ID NO: 29912 - DNA, 109 bp, Unknown
  Description of Unknown: RightRegion for integrase B3913 sequence
gaaataaataatttgaatattggttcaaatttgggtaaggatgtcctgccatatttttaaggggttagcaataaaaacaatagctttttattactaacttttttatata

SEQ ID NO: 29913 - DNA, 260 bp, Unknown
  Description of Unknown: RightRegion for integrase B3914 sequence
aagggcaacgagattggtttccagctagacattttcccaaaaattcagaagaataattgatgatatcttctatgaactgacgaactggctcattgatgttatcagtaattaaataaaagaatttcccggggttaattccccgggatatttttactgcttcttaacatattttgcagatacaaagccataatactttccagaaatacggacataataccacttactaccgtttttatctttctgggtaaaattcattacct

SEQ ID NO: 29914 - DNA, 260 bp, Unknown
  Description of Unknown: RightRegion for integrase B3915 sequence
ctaaaagagctttttaaagagtgtgtgtgggatggggaggtacttcatgttaagctataatttttttctcttttttattctgcgaccggttggccgcattcgcaaagcacttcggatcaggtctcggatcgtcacctgattcttcccttccacattggcattgcgcgcttccattcttacaatattttccacatttcgaatctgaagttccgccgaatcttcaatcgtaataattctttccgatgcagggatgtaattcg

SEQ ID NO: 29915 - DNA, 260 bp, Unknown
  Description of Unknown: RightRegion for integrase B3916 sequence
gcatcctcgcaggatgcagaaaagttcgttttggctctccacaactgcaccaaagaatgaaaatccggacattttctcgataggagaaaggttcggatttttatttttttcaagaatgacaattccggatcgttccaaacggctgtgtgtccgaaaccttatcagaaaaacgtataacaaacgtcacaactgtataggtgccgtaaggtagaaaggccacgaacatgaagtacgatgaaagagcctgccattttaacatg

SEQ ID NO: 29916 - DNA, 186 bp, Unknown
  Description of Unknown: RightRegion for integrase B3917 sequence
ctgcaggaaaccttaaaggaatgtatgtatgatggagaagttttgcatattaagctatagcaggtggccttttatttttaaccaccttctcatttttatattgatgccatccggccgcatcctcaaagaggttttaatcagatctctgatagtaatgggctggcagccttccacattggcatttct

SEQ ID NO: 29917 - DNA, 260 bp, Unknown
  Description of Unknown: RightRegion for integrase B3918 sequence
gccttatccgaacaaatcctgtttatcaacggtataatcgggatgcttgttcgccgataaggcgcagcccctctccgatttggagaggggctgctttttatttcacaatgcacctgtaatacgcgcaaagcttttcctccggctccggcccgtccttgtccatcaagaacgcccgcgccagttccgcgtagaactccggcacgttggctccgaacttccgcgctacatcgtagtagtccgagtacatcatgttcatggtc

SEQ ID NO: 29918 - DNA, 260 bp, Unknown
  Description of Unknown: RightRegion for integrase B3919 sequence
aaaggcaacgagattggttttcagctagacattttcccaaaaattcaaaagaataattaatgatatcttctatgtgccaacgaactggctcattgatgttgtcggtaattaaaaaaaaagaaagtcccggggaattaaccccgggatattttttactgtttcttaatatattttgcagatacaaagccataatactttcctgcaatacgaatataataccatttgctgccgtttttatctttctgtgtataattcataac

SEQ ID NO: 29919 - DNA, 260 bp, Unknown
  Description of Unknown: RightRegion for integrase B3920 sequence
cacggtaacgagattaatttcgaactggatattttcccaaaaatccaaaaaaataattaatgacatcttctatgtgccagttcgtcagcgcatagaagatatcatcaattccaaaaaataagttcccggggaattaaccccgggatatttttatactttttcgatatttttcgcagccacaaatccgtagtacttgcctgcgatgcggacataataccatgaagcaccgtttgttgctttctgagtgaaattcatcacgt

SEQ ID NO: 29920 - DNA, 260 bp, Unknown; identical to SEQ ID NO: 29835
  Description of Unknown: RightRegion for integrase B3921 sequence

SEQ ID NO: 29921 - DNA, 260 bp, Unknown
  Description of Unknown: RightRegion for integrase B3922 sequence
cggatggggaacgaagccacctttgtcctggatattttccccagaattcaatcaaattaattaatgataacatctatgtacaaacgaatcagctcatagctgttatcattttaattatgcaataaagctttgacaataccgtacaatgtgtggtattgtttcaatatgaaggaggtaacaattgtgaatattacagaaatgagaaattatataggagtctccagagcagagttctccaggcgctataacattccgctccg

SEQ ID NO: 29922 - DNA, 260 bp, Unknown
  Description of Unknown: RightRegion for integrase B3923 sequence
aaaggcaacgagattggttttcagctcgacattttcccaaaaatccagaagaataattaatgatatcttctatgagctgacgaactggcacattgatgttatcagtaattaaataaaagaaattcccggggctaattccccgggatattttttactgtttcttaatatattttgcagatacgaagccataatattttcctgcaatacggatataataccacttactaccgtttttatctttctgggtaaaattcattact

SEQ ID NO: 29923 - DNA, 260 bp, Unknown
  Description of Unknown: RightRegion for integrase B3924 sequence
aagggcaatgagattaattttcagctcgatattttcccaaaaatccagaagaataattaatgatatcttctatgtgctgacgaattagctcattgatgttatcagtaattaaaaaaagaaattcccggggctaattccccgggatatttttactgcttcttaatatattttgcagatgcaaagccataatactttcctgcaatacggatataataccatttgctaccgtttttatctttctgtgtataattcataacttc

SEQ ID NO: 29924 - DNA, 260 bp, Unknown
  Description of Unknown: RightRegion for integrase B3925 sequence
ggaaaccttgtcattcatacctttgtatgcccgcagattaagcgttatcagcgattttagaccttttcggtatagctgtcataagcaaggcaaatccagcctgcgccgcttttcagcttgccccagagacccttgttacctgcgctgtcaatctgcccctgcgcttcctcaacaatggtgaatacacccttacccgtataagagccagtagccgcatagttcgtgcctgcgcccttacgaatacgcaaatcagaaacctt

SEQ ID NO: 29925 - DNA, 260 bp, Unknown
  Description of Unknown: RightRegion for integrase B3926 sequence
aaaggcaacgagattggttttcagctcgacattttcccgaaaatccagaagaataattaatgatatcttctatgtactgacgaactagctcattgatgttatcagtaattaaataaaagaaattcccggggttaattccccgggatatttttactgcttcttaatatattttgcagatacaaagccgtaatactttcctgcaatacggatataataccacttactaccgtttttatctttctgggtaaaattcattacct

SEQ ID NO: 29926 - DNA, 260 bp, Unknown
  Description of Unknown: RightRegion for integrase B3927 sequence
cgcaaggggaatgaagccacctttgttttggatattttccccagaattcagtcaaattaattaatgataacatctatgtacaaacgaatcagctcatagctgttgtcattttaattatgcaataaagctttgacaataccgcacaatgtgtggtattgtttcaatatgaaggaggtaacaattgtgaatattacagaaatgagaaattatataggagtctccagagcagagttctccaggcgctataacattccgctccg

SEQ ID NO: 29927 - DNA, 260 bp, Unknown
  Description of Unknown: RightRegion for integrase B3928 sequence
tgttatggaaagaaaaataatccagaaaactttgaattgatgatttatacaaaattttaaacttgtatgtgtatatgaagtaaaacattgtaaagtttgtgtagaaagcaaacatgaaggtaaatgtttaaaaggcgtaaaattagattgtccaccatgtagaccagataagccatgtagacctgaacttccttgtaagcctgaaaaaccatgctaaattaataaacgcaaaaaaataacgaataattaataagacatat

SEQ ID NO: 29928 - DNA, 260 bp, Unknown; identical to SEQ ID NO: 29877
  Description of Unknown: RightRegion for integrase B3929 sequence

SEQ ID NO: 29929 - DNA, 260 bp, Unknown
  Description of Unknown: RightRegion for integrase B3930 sequence
aagggcgatgagattagttttcagctcgacattttcccgagaatccagaaaaatagttaatgacatcatctatgtgctgacgaactagctcattgatgttgtcggtaatttttaaaaaaaagaaattcccggggaattagccccgggatatttttactgcttcttaacatattttgcagatacaaatccataatactttcctgcaatacggatatagtaccatttgctgccgtttttatctttctgggtaaaattcatta

SEQ ID NO: 29930 - DNA, 260 bp, Unknown
  Description of Unknown: RightRegion for integrase B3931 sequence
gtgaaagacgtaattaaaaaatgtgtatgggacggggagtccctttctattatgctttgaagctcacttttttactatgcgtctttccggtctcatacgaagtgcagacttaataagatctcttatacttactcccggtgctccgtttatggtcgctgcccgggcttcaaggcgcaccagatttgcaatcccttgaagcttcagttctgcattgtcctcaatagtgataatccgttcatcttttggtatgtactctgaca

SEQ ID NO: 29931 - DNA, 140 bp, Unknown
  Description of Unknown: RightRegion for integrase B3932 sequence
cgcaaggggaatgaagccacctttgttttagatattttccctagaattcagtcaaattaattaatgataacatctatgtacaaacgaactcagtcatctggaaatggtatccactattgtacatcagcttacccgggacc

SEQ ID NO: 29932 - DNA, 260 bp, Unknown
  Description of Unknown: RightRegion for integrase B3933 sequence
aaaggcaatgagatcaattttgagctagacattttcccgaaaattcaaaaaaataattaatgataacatcgatgtaccagttcgccagcacatagaagatatcattaatttcaaaaagaaaactcccggggaattaaccccgggatatttttatgccttttagatagcaatcaaatctttccaggtgtttgtgccgcactcgccatctactttaagaactccgtttctggatttctgataagctttcagtgcatagatgg

SEQ ID NO: 29933 - DNA, 260 bp, Unknown
  Description of Unknown: RightRegion for integrase B3934 sequence
aaacactacgtttacgggcttttactttttcaaaaaaacatttcgaacgaggttttatagttcatatgcctgaaaagcaggcgtgtgagcgataacctaaaactatgtcacggatgcattgcacattgttcttttctcaaagaaaaacctttgaaaccttctgcatattttgcggaaggttttttatttatctaacatactactttagaggtgataaaaatgatcagcgaaaatatgtatcgaaaaaatattaagccagg

SEQ ID NO: 29934 - DNA, 260 bp, Unknown
  Description of Unknown: RightRegion for integrase B3935 sequence
aaaggaaaagagattggttttcaactcgacattttcccaaaaatccagaagaataattaatgatatcttatatgagctgacgaactggcgcattgatgttgtcggtaattaaaaaaagaaattcccgggggtaattccccgggatatttttactgcttcttaatatattttgcagatacaaagccataatactttcctgcaatacggatataataccacttactaccgtttttatctttctgggtaaaattcattacttc

SEQ ID NO: 29935 - DNA, 260 bp, Unknown
  Description of Unknown: RightRegion for integrase B3936 sequence
gccttatccgaacaaatcctgtttattaacggtataatcgggatgcttgttcgccgataaggcgcagcccctctccagatcggagaggggctgctttttatttcacaatgcacctgtaatacgcacaaagcttttcttccgggccggggccgtccttgtccatcaagaacgcccgcgccagctccgcgtagaactccggaacgttgactccgaacttccgcgccacatcgtagtaatccgagtacatcatgttcatggtc

SEQ ID NO: 29936 - DNA, 260 bp, Unknown
  Description of Unknown: RightRegion for integrase B3937 sequence
aaaggcaacgagattggttttcagctcgacattttcccgaaaatccagaagaataattaatgatatcttctatgtgctgacgaactggctcattgatgttatcagtaattaaataaaagaaattcccggggttaattccccgggatatttttactgcttcttaatatattttgcagatacaaagccataatactttcctgcaatacggatataataccacttactaccgtttttatctttctgggtaaaattcattacct

SEQ ID NO: 29937 - DNA, 260 bp, Unknown
  Description of Unknown: RightRegion for integrase B3938 sequence
aaaggtaatgagatcaattttgagttagacattttcccaaaaattcaaaaaaatgattaatgataacatcaatgagccagttcacaagcacatagaagatatcattaattccaaaaaaaataagctcccggggaattaaccccgggatatttttatacttttttgatgtatttcgcaaaaataaatccgaaatactttccagcgattctgatgtaataccagtcatttccgctcttggatttgatcgtatcgcatacatc

SEQ ID NO: 29938 - DNA, 260 bp, Unknown; identical to SEQ ID NO: 29835
  Description of Unknown: RightRegion for integrase B3939 sequence

SEQ ID NO: 29939 - DNA, 260 bp, Unknown
  Description of Unknown: RightRegion for integrase B3940 sequence
caaggtcacgtcacctccaccatccgcagcgcggacgaaccctcgaaagaaaacgagtgatcgtttcctttcgggggctttctttttggcaaaaatgttccaagagaaatatttgtgatccaatatgagaaaaatcggagaggtacgatgctgatttatacggcggcaacgcttctgtcctgccttttgacatggcacagacaaaaaagactacaggctcagatggtgcaggaaacagcacttcaggcgttttttcaaaa

SEQ ID NO: 29940 - DNA, 260 bp, Unknown; identical to SEQ ID NO: 29849
  Description of Unknown: RightRegion for integrase B3941 sequence

SEQ ID NO: 29941 - DNA, 260 bp, Unknown
  Description of Unknown: RightRegion for integrase B3942 sequence
cggatggggaacgaagccacctttgtcctggatattttccccagaattcaatcaaattaattaatgataacatctatgtacaaacgaactcagtcatctggaaatggtatccactattgtacatcagcttacccgggacctttccatggaggaaattgagaaatccggattcggaccgtattatatcgatcacacagtgggagtctggccacaggcagcaggtggcgtaccatttaatgcatgtgaatttcagagtaaag

SEQ ID NO: 29942 - DNA, 260 bp, Unknown
  Description of Unknown: RightRegion for integrase B3943 sequence
aaaggcaacgagattggtttccagctagatattttcccaaaaatccagaagaataattaatgatatcttctatgtgctgacgaactggcgcatctggagatggtttccaccatggttcaccagcttacccgtgacctcactatggaagaaattgagaattccgggctgggaccatattatattgaccacacagttggcgtgtggccgcaggcagcaggaggcgttccctttaatgcctgcgaattccagagtaaaggtga

SEQ ID NO: 29943 - DNA, 260 bp, Unknown
  Description of Unknown: RightRegion for integrase B3944 sequence
aaaggcgatgagattagttttcggctcgacattttcccgcgaatccagaaaaaaagttaatgacaacatctatgtgctgacgaactggcgcattgatgttatcattaattttgaaaagaaattcccgggggaattaaccccgggataatttttactgcttcttaatatattttgcagatacaaagccataatactttcctgcgatacggatataataccacttactaccgtttttatctttctgggtaaaattcattact

SEQ ID NO: 29944 - DNA, 109 bp, Unknown
  Description of Unknown: RightRegion for integrase B3945 sequence
aaaggtaacgagattaattttgagctagacattttcccaaaaattcaaaaaaatgattaatgacatcttctatgtgccagttcctcagtgccaatatcattcagcactg

SEQ ID NO: 29945 - DNA, 260 bp, Unknown; identical to SEQ ID NO: 29906
  Description of Unknown: RightRegion for integrase B3946 sequence

SEQ ID NO: 29946 - DNA, 260 bp, Unknown
  Description of Unknown: RightRegion for integrase B3947 sequence
aagggcaatgagattaattttcagctcgatattttcccaaaaatccagaagaataattaatgatatcttctatgtgctgacgaactggctcattgatgttatcagtaattataaaaagaaagtcccggggaattaaccccgggatattttttactgtttcttaatatattttgcagatacaaagccataatactttcctgcaatacgaatataataccatttgctgccgtttttatctttctgtgtataattcataactt

SEQ ID NO: 29947 - DNA, 260 bp, Unknown
  Description of Unknown: RightRegion for integrase B3948 sequence
cggatggggaacgaagccacctttgtcctggatattttcccaagaattcagtcaaattaattaatgataacatctatgtgcaagcgaactcagtcatctggaaatggtatccactattgtacatcagcttacccgggacctttccatggaggaaattgagaaatccggatttggaccgtattatatcgatcacacagtgggagtctggccacaggcagcaggtggcgtaccatttaatgcatgtgaatttcagagtaaag

SEQ ID NO: 29948 - DNA, 260 bp, Unknown
  Description of Unknown: RightRegion for integrase B3949 sequence
gcttttttcataatgattgccgctttgtgtgagtgctttcattttgccgctgacttctgaccgagtcagcggcttttttgttttgtaggggagtaggggaaaaattcatccatcctcccggggatgcaacaacagccgcaaacggctcgggagggtcattcttgttgccatgcaccgcggcaatatgctatactaaagaaaaaatagaaggggaggcactgcggatgacccgcattgcaatcgtagaggatgaggccgcc

SEQ ID NO: 29949 - DNA, 260 bp, Unknown
  Description of Unknown: RightRegion for integrase B3950 sequence
attccgggaatgatgcaggtacagaagaattggttccgccatgatgtcaatgataaataagcaaaaaaggaagcacacctgaagaattccaggtgtgctttaaagttatttgccggttgttctgctttttgtacgcggtgggtcattcggtacccactctataatttcagacggttggcaatgtaacgcctcacagatcagatcaagatgctcaaggctgatgcgatcattaaagccatgataatactcgttgatagtat

SEQ ID NO: 29950 - DNA, 260 bp, Unknown
  Description of Unknown: RightRegion for integrase B3951 sequence
acgatagaatatagtcgcgaacgtccaggtgaatttatactagatatagagcttctctgatacctactaccacatatagtaggtattctttaacacatacatatccatcataagtatcttcctttgataagacattaatgatggtaacttaagataggagataagtcaatgcgcatcataggaaaagatagctatatcccagaatacaaaacgagaacatacagaggtatcaaagtaaaaagggatggcaatggatggtg

SEQ ID NO: 29951 - DNA, 260 bp, Unknown
  Description of Unknown: RightRegion for integrase B3952 sequence
aaaggcaacgagattggtttccagctagatattttcccaaaaatccagaagaataattaatgatatcttctatgtgctgacgaattggctcattgatgttatcagtaattaaataaaagaaattcccggggctaattccccgggatatttttactgtttcttaacatattttgcagatacaaagccataatactttcctgcgatacagatataataccatttgctgccgtttttatctttctgggtaaaattcattacct

SEQ ID NO: 29952 - DNA, 260 bp, Unknown
  Description of Unknown: RightRegion for integrase B3953 sequence
aagggtaatgaagttagttttcagctcgatattttcccaaaaatccaaaaggaaaattaatgatatcttctatgtgctgaagaatctgtacattgatgttatcaataataaaaagaatcccccaggctgtgactcctgggggtatttttttacagttttttcaataatgttgcaaagcctgctgccttcagcttctttaccaccttattggcagctttctttgttctgtaggtgccaacccggacacggtatgggacgga

SEQ ID NO: 29953 - DNA, 260 bp, Unknown
  Description of Unknown: RightRegion for integrase B3954 sequence
aagggcaacgagattggttttcagcttgacattttcccaaaaatccagaagaataattaatgatatcttctatgagctgacgaattagctcattgatgttatcagtaattaaaaaaagaaattcccggggctaattccccgggatatttttactgcttcttaatatattttgcagatgcaaagccataatactttcctgcaatacggatataataccatttgctaccgtttttatctttctgtgtataattcataacttc

SEQ ID NO: 29954 - DNA, 260 bp, Unknown
  Description of Unknown: RightRegion for integrase B3955 sequence
attccggtaacgatgcaggtacagaagaattggttccgccatgatgtcaatgataaataagcaaaaaaggaagcacacctgaagaattccaggtgtgctttaaagttatttgccggttgttctgctttttgtacgcggtgggtcattcggtacccactctataatttcagacggttggcaatgtaacgcctcacagatcagatcaagatgctcaaggctgatgcgatcattaaagccatgataatactcgttgatagtat

SEQ ID NO: 29955 - DNA, 260 bp, Unknown; identical to SEQ ID NO: 29876
  Description of Unknown: RightRegion for integrase B3956 sequence

SEQ ID NO: 29956 - DNA, 260 bp, Unknown
  Description of Unknown: RightRegion for integrase B3957 sequence
aaaggcaacgagattggttttcagctagacattttccccaaaattcaaaagaataattaatgatatcttctatgtgctgacgaactggcgcattgatgttatcagtaattataaaaagaaagtcccggggaattaaccccgggataatttttactgctttttgatatattttgcagatacaaagccataatattttcctgcaatacggatataataccatttgctgccgtttttatctttctgtgtataattcataactt

SEQ ID NO: 29957 - DNA, 260 bp, Unknown
  Description of Unknown: RightRegion for integrase B3958 sequence
cacagtaacgagattaatttcgaactggatattttcccaaaaatccaaaaaaataattaatgacatcttatatgtgccagttcgccagtacatagatgctgtcagtaaataaaaaagaaattcccggggaattaaccccgggatattttatatttttttgatgtattttgcagaaacaaatccgaaatactttccgtcaatgcggatatagtaccaagatgctccatctttggctttctgagtaaagttcatgacatcga

SEQ ID NO: 29958 - DNA, 260 bp, Unknown; identical to SEQ ID NO: 29849
  Description of Unknown: RightRegion for integrase B3959 sequence

SEQ ID NO: 29959 - DNA, 260 bp, Unknown
  Description of Unknown: RightRegion for integrase B3960 sequence
tccgaacatattttgattgtatcgtcatgtgtgtttggattggtgatgacaaaagaataacgctattcttttgcacaagaaaaagcctcggcatttgcccgaggctttttcttattttcgtttctccagtgccctgtaaagcatcacggcgacctcggcgcgggtggcggtctgctccggcttgaaggtgccgtcgggatagccgttgaggataccccgcgcggcgagctcgttcacggcctctgcgtaccacgccgacg

SEQ ID NO: 29960 - DNA, 260 bp, Unknown
  Description of Unknown: RightRegion for integrase B3961 sequence
attccgggaacgatgcaggtacagaagaattggttccgccatgatgtcaatgataaataagcaaaaaaggaagcacacctgaagaattccaggtgtgctttaaagttatttgccggttgttctgctttttgtacgcggtgggtcattcggtacccactctataatttcagacggttggcaatgtaacgcctcacagatcagatcaagatgctcaaggctgatgcgatcattaaagccatgataatactcgttgatagtat

SEQ ID NO: 29961 - DNA, 260 bp, Unknown
  Description of Unknown: RightRegion for integrase B3962 sequence
aaaggcaacgagattggttttcagctagacattttcccaaaaatccaaaagaataattaatgatatcttatatgtgctgacgaactggcgcatagatgttgtcaataattaaataaaagaaattcccggggaattagccccgggatatttttactgcttcttaacatattttgcagatacaaatccataatactttcctgcaatacggatataataccatttgctgccatttttatctttctgggcaaaattcattatct

SEQ ID NO: 29962 - DNA, 260 bp, Unknown
  Description of Unknown: RightRegion for integrase B3963 sequence
attccgggaacgatgcaggtacagaagaatcggtgccgccatgatgtcaatgataaataaacaaaaaaggaagcacacctgaagaattccaggtgtgctttaaagttatttgccggttgttctgctctttgtgcgtggcgggtcattcggcacccactctataatttcagacggttggcaatgtaacgcctcgcatatcaagtcaagatgctcaaggctgatgcgctcggcaatgccatgataatactcgttgatagtat

SEQ ID NO: 29963 - DNA, 260 bp, Unknown
  Description of Unknown: RightRegion for integrase B3964 sequence
ccgggtgttggcaggtacgtggagaatgtatttgaattaaatatgcttctcaatatgtaaagatttattttgaagtagtctttactatatccaacatcaatgtaccgatgaattggcgcatcttgagatagtcggtgccatggttcaccagctcacacgcgacctcacacctgaggagatagagaaatcaggttttgcaccatactatgtcgaccatacgcttggtgtctggccgcaggcagcgggcggaatccccttca

SEQ ID NO: 29964 - DNA, 260 bp, Unknown
  Description of Unknown: RightRegion for integrase B3965 sequence
catggcgatgaggttaattttgaactagatatttttccaaaaatccaagaaaataattaatgatatcttctatgtaccgacgaactggctcattgatgttatcatcaatttagaaaagaaactcccggggaattaaccccgggatatttttatacttttttgatgtatttcgcagaaacaaatccgaagtattttccggctatgcggatgtagtaccaagatgtaccgtctttggctttttgcgtaaagttcattacatc

SEQ ID NO: 29965 - DNA, 260 bp, Unknown
  Description of Unknown: RightRegion for integrase B3966 sequence
cggatggggaacgaagccacctttgtcctggatattttccccagaattcaatcaaattaattaatgataacatctatgtacaaacgaactcagtcatctggaaatggtatccactattgtacatcagcttacccgggacctttccatggaggaaattgagaaatccggatttggaccgtattatatcgatcacacagtgggagtctggccacaggcagcaggtggcgtaccatttaatgcatgtgaatttcagagtaaag

SEQ ID NO: 29966 - DNA, 260 bp, Unknown; identical to SEQ ID NO: 29849
  Description of Unknown: RightRegion for integrase B3967 sequence

SEQ ID NO: 29967 - DNA, 260 bp, Unknown
  Description of Unknown: RightRegion for integrase B3968 sequence
cggatggggaacgaagccacctttgtcctggatattttccccagaattcaatcaaattaattaatgataacatctatgtgcaaacgaactcagtcatctggaaatggtatccactattgtacatcagcttacccgggacctttccatggaggaaattgagaaatccggattcggaccgtattatatcgatcacacagtgggagtctggccacaggcagcaggtggcgtaccatttaatgcatgtgaatttcagagtaaag

SEQ ID NO: 29968 - DNA, 260 bp, Unknown; identical to SEQ ID NO: 29825
  Description of Unknown: RightRegion for integrase B3969 sequence

SEQ ID NO: 29969 - DNA, 260 bp, Unknown
  Description of Unknown: RightRegion for integrase B3970 sequence
ttcttatccgaacactttgtttttataaacggtgttattgggatggtcgtgcatcgataaaggaatccctctcctgttttggagagggatttttttattttgcgatatgctcataatacgccatgagcttctgttccggccccgggccgtccttgtcgagcaggaacgccttggccagcgacgcgtaaaactccgggcggttgaggccgaactccacggcgacggggtagtagtccgagtacatcatgttcattgtcacg

SEQ ID NO: 29970 - DNA, 260 bp, Unknown
  Description of Unknown: RightRegion for integrase B3971 sequence
gccttatccgaacaaatcctgtttattaacggtataatcgggatgcttgttcgccgataaggcgcagcccctctccagatcggagaggggctgctttttatttcacaatgcacctgtaatacgcacaaagcttttcctccgggccggggccgtccttgtccatcaagaacgcccgcgccagctccgcgtagaactccggcacgttgattccgaacttccgcgccacatcgtagtagtccgagtgcatcatgttcatggtc

SEQ ID NO: 29971 - DNA, 260 bp, Unknown
  Description of Unknown: RightRegion for integrase B3972 sequence
aaaggcaacgagattggttttcagctagacattttcccaaaaattcaaaagaataattaatgatatcttctatgtgctgacgaactggcgcattgatgttatcagtaataaaaaagaaattcccggggaattaaccccgggatatttttttactgtttcttaatgtattttgcagatacgaagccataatacctttctgcaatacggacataataccacttactaccgtttttatctttctgggtaaaattcattacctc

SEQ ID NO: 29972 - DNA, 260 bp, Unknown
  Description of Unknown: RightRegion for integrase B3973 sequence
aaaggaaacgagattggtttccagctagacattttcccaaaaatccagaagaataattaatgatatcttctatgaactgacgaactggcacattgatgttatcagtaattaaataaaagaaattcccggggctaattccccgggatattttttactgtttcttaatatattttgcagatacgaagccataatattttcctgcaatacggatataataccacttactaccgtttttatctttctgggtaaaattcattact

SEQ ID NO: 29973 - DNA, 260 bp, Unknown
  Description of Unknown: RightRegion for integrase B3974 sequence
tatcatctggatatccacttccgcatcacggcgcaacagtatttgggaaaagcatcgtgagggagtcaatatcatttgcaccataatatgcgctgcttgacgatgatcgctttgcgtcggagccgcatttcgccaacgaggaaaaaacgctcgctctgcctacgggtctccaagctgggcattccactcatatctccttctctcttgcttttcaccgtgcttttcgtcaatgtgcaggcctcattgatgactcggacggc

SEQ ID NO: 29974 - DNA, 260 bp, Unknown; identical to SEQ ID NO: 29909
  Description of Unknown: RightRegion for integrase B3975 sequence

SEQ ID NO: 29975 - DNA, 260 bp, Unknown
  Description of Unknown: RightRegion for integrase B3976 sequence
aagggcgatgagattagttttcggctcgacattttcccgcgaatccagaaaaaaagttaatgatatcatctatgtgctggcgaactggctcattgatgttgtcattaatcaaaaaagaaattcccggggttaattccccgggatatttttactgcttcttaatatattttgcagatacaaagccataatactttcctgcaatacggatataataccatttgctgccgtttttatctttctgggtaaaattcattacctcc

SEQ ID NO: 29976 - DNA, 260 bp, Unknown
  Description of Unknown: RightRegion for integrase B3977 sequence
tccgaacatattttgattgtatcgtcatgtgtgtttggattggtgatgacaaaagaataacgctattcttttgcacaagaaaaagcctcggcatttgcccgaggctttttcttattttcgtttctccagtgccctgtaaagcatcacggcgacctcggcgcgggtggcggtctgctccggcttgaagctgccgtcgggatagccgttgacgataccccgcgcggcgagctcattcacggcctccgcgtaccacgccgacg

SEQ ID NO: 29977 - DNA, 260 bp, Unknown; identical to SEQ ID NO: 29835
  Description of Unknown: RightRegion for integrase B3978 sequence

SEQ ID NO: 29978 - DNA, 260 bp, Unknown
  Description of Unknown: RightRegion for integrase B3979 sequence
cgcaaggggaatgaagccacctttgttttggatattttccccagaattcagtcaaattaattaatgataacatctatgtacaaacgaactcagtcatctggaaatggtatccactattgtacatcagcttacccgggacctttccatggaggaaattgagaaatccggatttggaccgtattatatcgatcacacagtgggagtctggccacaggcagcaggtggcgtaccatttaatgcatgtgaatttcagagtaaag

SEQ ID NO: 29979 - DNA, 260 bp, Unknown
  Description of Unknown: RightRegion for integrase B3980 sequence
cacttatccgaacacatcatatttataaatggtgttattgggatgatcgtgcaaagataaaaagattcctctccaagtcggagaggaatctttttattgtataaagaaaaccaccggcaatgccggtggttccaaaaagctttagctatgcccagaaaaaatatccgagcgaagcgaggaacaagtctggaaagcgggcgataaggtgtgattcaaaaagacggataaccagggagaaacgaaaagcaaaatgcgccaag

SEQ ID NO: 29980 - DNA, 109 bp, Unknown
  Description of Unknown: RightRegion for integrase B3981 sequence
gcccgggaagtaataaagaagtgtgtctgggacggggagaccctttatgttgagctctaaacctctcttttttatattgcgtccttccggtctcatacgcaaagccgcc

SEQ ID NO: 29981 - DNA, 260 bp, Unknown; identical to SEQ ID NO: 29941
  Description of Unknown: RightRegion for integrase B3982 sequence

SEQ ID NO: 29982 - DNA, 260 bp, Unknown; identical to SEQ ID NO: 29835
  Description of Unknown: RightRegion for integrase B3983 sequence

SEQ ID NO: 29983 - DNA, 260 bp, Unknown
  Description of Unknown: RightRegion for integrase B3984 sequence
aaaggcaacgagattggtttccagctagatattttcccaaaaatccagaagaataattaatgatatcttctatgtgctgacgaactggcgcatctggagatggtttccaccatggttcaccagcttacccgtgacctcactatggaagaaattgagaattccgggctgggaccatattatattgaccacacagttggcgtgtggccacaggcagcaggaggcgttccctttaatgcctgcgaattccagagtaaaggtga

SEQ ID NO: 29984 - DNA, 260 bp, Unknown
  Description of Unknown: RightRegion for integrase B3985 sequence
gcccgggaagtaataaagaagtgtgtctgggatggggagaccctttatgttgagctctaaaactctcttttttatattgcgtccttccggtctcatacgcaaagccgcccgtatcagcattccgatcccgatggctccctggccctccccgttggcgtttcttgtttccagccgtaccaggttctcaatgtgggccagctttagttccgctgaatcctcaatggtgatcacccgctcttctggagggataaactccgaaa

SEQ ID NO: 29985 - DNA, 260 bp, Unknown; identical to SEQ ID NO: 29960
  Description of Unknown: RightRegion for integrase B3986 sequence

SEQ ID NO: 29986 - DNA, 260 bp, Unknown
  Description of Unknown: RightRegion for integrase B3987 sequence
caaggtcacgtcgcctccaccatccgcaacgcggacgaaccctcgaaagaaaacgagtgatcgtttcctttcgggggctttctttttggcaaaaatgttccaagagaagtatttgtgatccaatatgagaaaaatcggagaggtacgatgctgatttatacggcggcaacgcttctgtcctgccttttgacatggcacagacaaaaaagactacaggctcagatggtgcaggaaacagcacttcaggcgttttttcaaaa

SEQ ID NO: 29987 - DNA, 260 bp, Unknown
  Description of Unknown: RightRegion for integrase B3988 sequence
attccgggaacgatgcaggtaccgaagaatcggtgccgccatgatgtcaatgataaataaacaaaaaaggaagcacacctgaagaattccaggtgtgctttaaagttatttgccggttgttctgctctttgtgcgtggcgggtcattcggcacccactctataatttcagacggttggcaatgtaacgcctcgcatatcaagtcaagatgctcaaggctgatgcgctcggcaatgccatgataatactcgttgatagtat

SEQ ID NO: 29988 - DNA, 260 bp, Unknown
  Description of Unknown: RightRegion for integrase B3989 sequence
tcctcagcggattgtgctccctctgcgctggggagccaagcaaattttaaggcgaactaaaatcgaggacagagagtaatgtttgtgttacttcttttccttggcgttaggtcgccttaaatcgttatttagagccatttatcgcctttacaatcagagtagtttatatatgtatggaagcagggctttcgtatgcttacgtttatgtaagtgtacggaagccctttttttgttgcccgattattcttgataaggtgtaa

SEQ ID NO: 29989 - DNA, 260 bp, Unknown
  Description of Unknown: RightRegion for integrase B3990 sequence
tttgattccaaagtaaaggagcaaagaatatgtttgaaaaatcaaaaggcagatacctgacacgaggcgtggatgcggaaataccgctgtacttgcaaatgtttctttggaatgcagtggacaatatgccccatccgaaagactacctgcaggtgtttcggcttagcgaggagaacggtttgcagatcgtgcaccatacctcggagcagccgcagtttgaaatgacgtacattgcggaggcagaaaagccggtcacagca

SEQ ID NO: 29990 - DNA, 109 bp, Unknown
  Description of Unknown: RightRegion for integrase B3991 sequence
cgcaaggggaatgaagccacctttgttttggatattttccccagaattcagtcaaattaattaatgataacatctatgtacaaacgaactcagtcatctggaaatggta

SEQ ID NO: 29991 - DNA, 260 bp, Unknown
  Description of Unknown: RightRegion for integrase B3992 sequence
aaaggtaatgaaatcaattttgagctagacattttcccaaaaattcaaaaaaatgattaatgataacatcaatgagccagttcgtcagtacatagaagatatcattaatttcaaaaagaaactcccggggaattaaccccgggatattttttatacttttttaatgtatttggaagatacgaaaccatagtatttatttttcattctaatgtagtaccatggagttccatcttttgctttctgagtatagttcatgactt

SEQ ID NO: 29992 - DNA, 260 bp, Unknown; identical to SEQ ID NO: 29866
  Description of Unknown: RightRegion for integrase B3993 sequence

SEQ ID NO: 29993 - DNA, 237 bp, Unknown
  Description of Unknown: RightRegion for integrase B3994 sequence
gcatacatcttcgtcaatggcgtgttcggctgcatcttccctcggaacgatgtagaatgaccgggtgatttcacccggttttttcatttttcggtgtgaaattgaaaataaggctcatttcactttcaactttgcaaggcagatcgtcgcgtgatggtctgcctttttcgtatttcttctaaagcacgcgcgcgggcgcgggcgcgtgagccaccccctcacgcaaccccttcaaaa

SEQ ID NO: 29994 - DNA, 260 bp, Unknown
  Description of Unknown: RightRegion for integrase B3995 sequence
aaaggaaacgagattggttttcagctcgacattttcccgaaaatccagaagaataattaatgatatcttctatgatctgacgaactggctcattgatgttatcagtaattaaataaaagaaattcccggggctaattccccgggatatttttactgcttcttaatatattttgcagatacaaagccataatactttcctgcaatacggatataataccacttactaccgtttttatctttctgggtaaaattcattactt

SEQ ID NO: 29995 - DNA, 260 bp, Unknown
  Description of Unknown: RightRegion for integrase B3996 sequence
gtctgcacagatggcaaaatgatctttgcttttaaagatggttcaaaaatcaaggtttaatgcatataaatttgaaagtctgctgtcgggtatattccgattggcagacttttttctgtaaagaaacgcttttttgaccaaagaaacggcaaatctaaaaaaatgcaaccatagcaaaaaaatgcaaccttttgacatccgtttcgttgctctcactcattcgtttctttgcttattttctgctctccaaagaaacggaa

SEQ ID NO: 29996 - DNA, 260 bp, Unknown
  Description of Unknown: RightRegion for integrase B3997 sequence
aaaggcaacgagattggttttcagctcgacattttcccaaaaatccagaagaataattaatgatattttctatgagctgacgaactggctcattgatgttatcagtaattaaataaaagaaattcccggggttaattccccgggatatttttactgcttcttaatatattttgcagatacaaagccataatactttcctgcgatacggatataataccacttactaccgtttttatctttctgggtaaaattcattactt

SEQ ID NO: 29997 - DNA, 260 bp, Unknown
  Description of Unknown: RightRegion for integrase B3998 sequence
gcccgggaagtaataaagaagtgtgtctgggacggggagaccctttatgttgagctctaaaactctcttttttatattgcgcccttccggtctcatacgcaaagccgcccgtatcagcatcccgatcccgatggctccctggccctccccgttggcgtttcttgtttccagccgtaccaggttctcaatgtgggccagctttagttccgctgaatcctcaatggtgatcacccgctcttctggagggataaactccgaaa

SEQ ID NO: 29998 - DNA, 260 bp, Unknown
  Description of Unknown: RightRegion for integrase B3999 sequence
gcccgggaagtaataaagaagtgtgtctgggacggggagaccctttatgttgagctctaaacctctcttttttatattgcgtccttccggtctcatacgcaaagccgcccgtatcagcatcccgatcccgatggctccctggccctccccgttggcgtttcttgtttccagccgtaccaggttctcaatgtgggccagcttcaattccgctgaatcctcaatggtgatcacccgctcttctggagggataaactccgaaa

SEQ ID NO: 29999 - DNA, 260 bp, Unknown; identical to SEQ ID NO: 29835
  Description of Unknown: RightRegion for integrase B4000 sequence

SEQ ID NO: 30000 - DNA, 109 bp, Unknown
  Description of Unknown: RightRegion for integrase B4001 sequence
gcccgggaagtgataaggaaatgtgtctgggacggggagaccctttatgttgagctctaaacctctcttttttatattgcgtccttccggtctcatacgcaaagccgcc

SEQ ID NO: 30001 - DNA, 260 bp, Unknown
  Description of Unknown: RightRegion for integrase B4002 sequence
aagggtaatgaagttagttttcagcttgacatttttccgaaaatccagaagaataattaatgatatcttctatgtgctgacgaactggcgcattgatgttatcattaattaaaaaaagaaattcccggggaattaaccccgggataatttttactgctttttaatatattttgcagatacaaagccataatactttccagcaatgcgaatgtaataccacttactaccgtcttttgctttctgagtataattcattactt

SEQ ID NO: 30002 - DNA, 260 bp, Unknown
  Description of Unknown: RightRegion for integrase B4003 sequence
ttaaaggatctctttaaagaatgcgtttatgacggtcaaaccctgcatattaaaatttagtttttctctcttttttattttgatacgttcacgtcgcaggataaaaaatagaaaaagaatagccccgggatattcccggggcgcctttgttctgttcgcctaagattcgatcttggcgtcattaaatcccgcctttttgatcgcgtctaagttcgctttagcgatctgctcggtatcgtatgtaccaaacagtaatacga

SEQ ID NO: 30003 - DNA, 260 bp, Unknown
  Description of Unknown: RightRegion for integrase B4004 sequence
aagggtaatgaagttagttttcagctcgatattttcccaaaaatccaaaaggaaaattaatgatatcttatatgtgctgacgaactggcgcatagatgttgtcagtaattaaataaaagaaattcccggggttaattccccgggatatttttactgtttcttaacatattttgcagatacaaaaccataatactttcctgcaatacggacataataccatttgctgccacttttatctttctgggtaaaattcattactt

SEQ ID NO: 30004 - DNA, 260 bp, Unknown; identical to SEQ ID NO: 29962
  Description of Unknown: RightRegion for integrase B4005 sequence

SEQ ID NO: 30005 - DNA, 260 bp, Unknown
  Description of Unknown: RightRegion for integrase B4006 sequence
aagggcgatgagattagttttcggctcgacattttcccgcgaatccagaaaaaaagttaatgatatcatctatgtgctggcgaaccggctcattgatgttgtcattaatcaaaaaagaaattcccggggttaattccccgggatatttttactgcttcttaatatattttgcagatacaaagccataatactttcctgcaatacggatataataccatttgctgccgtttttatctttctgggtaaaattcattacctcc

SEQ ID NO: 30006 - DNA, 260 bp, Unknown
  Description of Unknown: RightRegion for integrase B4007 sequence
catgggaatgaagctaattttgagctagacattttccccaaaattcaagaaaataattaattgcggcgcaacattctattgatatcctctatgaacggatgagttagtacatagaggatataggcaagttataagaactcccggggaatcgaccccgggatatttttatactctattgatatactccgcacatacaaatccgtagtacttgttcacgatgcgaacataataccagtctgcaccgtcggcggctttaatcg

SEQ ID NO: 30007 - DNA, 260 bp, Unknown
  Description of Unknown: RightRegion for integrase B4008 sequence
tccttatccgaacactttgtttttataaacggtgttattgggatggtcgtgcatcgataaaggaatccctctcctgttttggagagggattttttattttgcgatatgctcataatacgccatgagcttctgttccggccccgggccgtccttgtcgagcaggaacgccttggccagcgacgcgtaaaactccgggcggttgaggccgaactctacggcgacggggtagtagtccgagtacatcatgttcatggtcacgc

SEQ ID NO: 30008 - DNA, 260 bp, Unknown
  Description of Unknown: RightRegion for integrase B4009 sequence
catgggaatgaggctaattttgagctagacatttttccaaaaattcaaaaaaatgattaatgataacatcaatgtgccagttcgccagcacatagaagatatcattaatttcaaaaagaaaactcccggggttaatccccgggatatttttagattgcaatcaaatctttccaggtcttctctccgcactctccgtctaccaccagtactccatttctggacttctgataccgctttaatgcatagatggtgttctcatc

SEQ ID NO: 30009 - DNA, 260 bp, Unknown
  Description of Unknown: RightRegion for integrase B4010 sequence
aaaggtaacgagattaattttgagctagacattttcccaaaaattcaaaaaaatgattaatgacatcttctatgtgccagttcgctggcgcaatgatgctatcattaattttaaaaagaaactcccggggaattaaccccgggatattttatacttttttgatgtattttgcagaaacaaaaccgaagtactttccggcaatgcggatgtagtaccagtcggttttgtcttttgttcctatcagcgacaaaaaggtggca

SEQ ID NO: 30010 - DNA, 260 bp, Unknown; identical to SEQ ID NO: 29975
  Description of Unknown: RightRegion for integrase B4011 sequence

SEQ ID NO: 30011 - DNA, 260 bp, Unknown; identical to SEQ ID NO: 29877
  Description of Unknown: RightRegion for integrase B4012 sequence

SEQ ID NO: 30012 - DNA, 260 bp, Unknown
  Description of Unknown: RightRegion for integrase B4013 sequence
aacctgttcttggtggaaaacgggttcggattatttttgttcctaggactcgaacaataaaatgcaaatgtccggtggatattattttttcgagaattcaaccataatctgactcagcagcttttgctgatgctcggtaagaccgggatatggggaatgatcgttcgtaaattcgtaaatcagggaatgaatgatcgccttttgcgtgtcgttcagcccatctaccgagaccatctccgccttatctatcccaacgagaa

SEQ ID NO: 30013 - DNA, 260 bp, Unknown
  Description of Unknown: RightRegion for integrase B4014 sequence
aaaggcaacgagattggtttccagctagacattttcccaaaaatccagaagaataattaatgatatcttctatgaaccgacgaactggctcattgatgctatcagtaattaaataaaagaaattcccggggttaattccccgggatattttttatacttttttaatgtatttggaagatacgaaaccatagtatttatttttcattctaatgtagtaccatggagttccatcttttgctttctgagtatagttcatgact

SEQ ID NO: 30014 - DNA, 260 bp, Unknown
  Description of Unknown: RightRegion for integrase B4015 sequence
cacttatccgaacacatcatatttataaatggtgttatcgggatgattgtgcaaagatgaaaattccctctccaatccggagagggaattttttattttaccacatgctcatagtatttcatgagcttgcgctccgggccggggccgtctttgtcgagcaaaaacgctttggctagggctgcgtagaattccgggcggttgaggccgaattctaccgcgacggggtagtagtccgagtacatcatgttcatggttacgcc

SEQ ID NO: 30015 - DNA, 260 bp, Unknown; identical to SEQ ID NO: 29995
  Description of Unknown: RightRegion for integrase B4016 sequence

SEQ ID NO: 30016 - DNA, 260 bp, Unknown
  Description of Unknown: RightRegion for integrase B4017 sequence
tatgatgataaattaatcttcgaatttaaatccggcatgactattgaactcaaaagataattgaataggaactattacatcaacaccttgcagcaatgcagggtgttttcccgttcatagaaaatttacagggcaaaatcgtgccgggattgagtttatcaaccaaatggtttataatatagtaagtgaggtgtgttttagacatggaggataacgatgaagacatccgatatgattaaagaattatgtaataaaaagaa

SEQ ID NO: 30017 - DNA, 260 bp, Unknown
  Description of Unknown: RightRegion for integrase B4018 sequence
cgcaaggggaatgaagccacctttgttttggatattttccccagaattcagtcaaattaattaatgataacatctatgtacaaacgaatcagctcatagctgttgtcattttaattatgcaataaagctttgacaataccgtacaatgtgtggtattgtttcaatatgaaggaggtaacaattgtgaatattgcagaaatgagaaattatataggagtctccagagcagagttctccaggcgctataacattccgctccg

SEQ ID NO: 30018 - DNA, 260 bp, Unknown; identical to SEQ ID NO: 29905
  Description of Unknown: RightRegion for integrase B4019 sequence

SEQ ID NO: 30019 - DNA, 260 bp, Unknown
  Description of Unknown: RightRegion for integrase B4020 sequence
gttatcgactatggcagaagcaaaggcggcaagcccgtgttagaaatcattttcaaataagggctaatttttttagcccttattagtagcttgataagtctattttcgtcggcttgcccttgatgttcgaaactgtgtagccgaaaaacttctgcagcgtctccagatcgccgcgatcccacgcgacctcgatcgcgtggcgtatcgcacgctcaacgcgcgagggcgtggtgttgaacttgcgcgcgacctcggggtag

SEQ ID NO: 30020 - DNA, 260 bp, Unknown
  Description of Unknown: RightRegion for integrase B4021 sequence
aagggcaataagattggtttccagctagacattttcccaaaaatccagaagaataattaatgatatcttctatgagctgacgaattggctcattgatgttatcagtaattaaaaaaagaaattcccggggctaattccccgggatatttttactgcttcttaatatattttgcagatacaaagccataatattttccagcaatacggacataataccatttgctgccgtttttatctttctgggtaaaattcattacttc

SEQ ID NO: 30021 - DNA, 85 bp, Unknown
  Description of Unknown: RightRegion for integrase B4022 sequence
cccggtgttggccggcatgtagacaatattttcgatcttaagatttctttacgcctttaacccccatgatgaatgttataatgaa

SEQ ID NO: 30022 - DNA, 260 bp, Unknown
  Description of Unknown: RightRegion for integrase B4023 sequence
gggaaaggaaacgagattggttttcagctagacattttcccaaaaattcaagaaaaatgattaatgatatcttctatgtgctgacgaactggctcattgatgttatcattaattcagaaaagaaactcccggggaattaaccccgggatatttttatactttcttgatatattttgcagacacgaatccaaaatactttccggcaatacggatgtaatgccaatcaataccgtctttggcttttattgtatcacatacat

SEQ ID NO: 30023 - DNA, 109 bp, Unknown
  Description of Unknown: RightRegion for integrase B4024 sequence
atgagagatatcttgaaggaatgtgtttgggatggctcagaactttctattgtcctttaaatctcacttttttattatgatggcttctggattcatcctcagcgaagcc

SEQ ID NO: 30024 - DNA, 260 bp, Unknown
  Description of Unknown: RightRegion for integrase B4025 sequence
gggaaaggcaacgagattggtttccagctagacattttcccaaaaattcaagaaaaatgattaatgatatcttctatgagctgacgaactggctcattgatgttatcagtaattataaaaagaaagtcccggggaattaaccccgggatattttttactgtttcttaatatattttgcagatacaaagccataatactttccagcaatgcgaatgtaataccacttactaccgtttttatctttctgggtaaaattcatt

SEQ ID NO: 30025 - DNA, 109 bp, Unknown
  Description of Unknown: RightRegion for integrase B4026 sequence
ccaggaataggaagatatatagagaattctttcagattggagattttcttaaagctgtgaacccgctgtttatgggcatttactatcatatccaatggttaggagctaa

SEQ ID NO: 30026 - DNA, 260 bp, Unknown
  Description of Unknown: RightRegion for integrase B4027 sequence
ttaatagatcatatcgtttttgttaaaaacgagcgaaagctcgtaattacttataaataaaaaaagtacctaatgccattaggttcataaaagggatgaatactttcaaattgatagtggattattgctaattttattaatgggtctacttcatcacttatattaatgtaatctaaaagattatttaaataatcaagtatttcttcttttgattgcggtggagtataaattatttcatctgttttactattttttataac

SEQ ID NO: 30027 - DNA, 260 bp, Unknown
  Description of Unknown: RightRegion for integrase B4028 sequence
gctcgcgctgtaattcaggagtgtacttgggacggggagcggctttttattaagctctaaacctcactatttcataatggtggggttccacccgcaatataaaaaagtgaatgtaaaataaaggaggtctttttatgattttgtgttttgaattatcaatgccgcacgcggcaagctggaatggtaaatggtccggagcggatcaaggacactacattttcaaaacgtcccaggctgcctctatgcagaagctgtttgcc

SEQ ID NO: 30028 - DNA, 260 bp, Unknown
  Description of Unknown: RightRegion for integrase B4029 sequence
gctcgcgctgtaattcaggagtgtacttgggacggggaacggctttttattacgctctgaacctcactatttcataatggtggggttccgcccgcaatataaaaaagtgaatgtaaaataaaggaggtctttttatgattttgtgttttgaattatcaatgccgcacgcggcaagctggaatggtaaatggtccggagcggatcagggacactacattttcaaaacgtcccaggctgcctctatgcagaagctgtttgcc

SEQ ID NO: 30029 - DNA, 85 bp, Unknown
  Description of Unknown: RightRegion for integrase B4030 sequence
ttaatagatcatatcgtttttgttaaaaacgagcgaaagctcgtaattacttataaataaaaaaagtacctaatgccattaggtt

SEQ ID NO: 30030 - DNA, 109 bp, Unknown
  Description of Unknown: RightRegion for integrase B4031 sequence
atgagagatatcttgaaggaatgtgtttgggacggctcagaactttctattgtcctttaaatctcacttttttattatgatggcttccggattcatcctcagcgaagcc

SEQ ID NO: 30031 - DNA, 260 bp, Unknown
  Description of Unknown: RightRegion for integrase B4032 sequence
gctcgcgctgtgattcaggagtgtacttgggacggggagcggctttttattacgctctaaacctcactatttcataatggtgtggttcaggacgcattcgaagagatgatttaattaagtctcttattgtaatctgcccggcacctgaagcatttgcatttctagtctccagactaaccagattatcaattcctgcaatctgaagctctgctgaatcctcaattgtaataattctttcatccttaggaataaaattggaa

SEQ ID NO: 30032 - DNA, 109 bp, Unknown
  Description of Unknown: RightRegion for integrase B4033 sequence
aaagcggggatcgggcgatacatagagaatgttttttctctggaaatccaatataaatagccatatccaacgtatctgtacctatgaattagcccacctcgaaatgatt

SEQ ID NO: 30033 - DNA, 109 bp, Unknown
  Description of Unknown: RightRegion for integrase B4034 sequence
cggatggggaacgaagccacctttgtcctggatattttccccagaattcagtcaaattaattaatgataacatctatgtacaaacgaactcagtcatctggaaatggta

SEQ ID NO: 30034 - DNA, 260 bp, Unknown
  Description of Unknown: RightRegion for integrase B4035 sequence
gctcgcgctgtaattcaggagtgtacttgggacggggagcggctttttattacgctctaaacctcactatttcataatggtggggctccgccagcaacataaaaaagtgaaagtaaatttacggaggtgtctttatgaatgtgatctatcgtgtacacggtgctggtggattctatatggaaacgcagagccaggaccaggctttccgagctgcccggcaggaagctgcggcatccggccagatggctctggtatctttt

SEQ ID NO: 30035 - DNA, 109 bp, Unknown
  Description of Unknown: RightRegion for integrase B4036 sequence
gctcgcgctgtgattcaggagtgtacttgggacggagagcggctttttattacgctctaaacctcactatttcataatggtggggttccggtctcatacgaagagccgt

SEQ ID NO: 30036 - DNA, 140 bp, Unknown
  Description of Unknown: RightRegion for integrase B4037 sequence
gctcgcgctgtaattcaggagtgtacttgggacggggagcggctttttattacgctctaaacctcactattttataatggtgtggttccggtctcatacgaagtgctgacttaatcaaatctctgatggttacagcccct

SEQ ID NO: 30037 - DNA, 260 bp, Unknown
  Description of Unknown: RightRegion for integrase B4038 sequence
atcactctaactgatgataaatttatagtagactttaatattaaaaaaaaaactagataatgctataaaaaaattatctagtctattcgcaaaatataaatcatcgcaattaagacatccatgcagaagctatatgtacaggcaccctagctggccataattcagtaagacttgcactaggattgccacttcttatccttccaagttcaattgctattggagatataatttcatatgaaaatgaacaatctaaaactaga

SEQ ID NO: 30038 - DNA, 260 bp, Unknown
  Description of Unknown: RightRegion for integrase B4039 sequence
gtgaaggacgttataaaaaaatgtgtatgggacggggagtccctttctattatgctttgatgctcacttttttatcttgcgtccttcaccccgcattgcaaaaaagtgaaatactaaaaaatggaaggaggcgttgtttatgctaactatttatcatgtgttcggatccggcgatttctttctggaaaccagcagccagcgtgaagctgcactggccgctcaggacgtcgcaaacgaaaccggacagcccgcgtcggtga

SEQ ID NO: 30039 - DNA, 260 bp, Unknown
  Description of Unknown: RightRegion for integrase B4040 sequence
gctcgcgctgtaattcaggagtgtacttgggacggggagcggctttttattaagctctaaacctcactatttcataatggtggggttccggtctcatacgtaaggcatttttaactaagtcccttattgtaattgctcctgttccctccagatttgccggtctgctttccaaagatacaacatgatcctgcatcagtttcaattctgctgcatcttctatagtaacaatacgttcgtcatgaggaataaatgctgacaga

SEQ ID NO: 30040 - DNA, 140 bp, Unknown
  Description of Unknown: RightRegion for integrase B4041 sequence
gctcgcgctgtaattcaggagtgtatttgggacggggagcggctttttattacgctctaaacctcactatttcataatggtggggttccccacgcatggtaaggaacagggacagcatatccatgtgattgtgaccggag

SEQ ID NO: 30041 - DNA, 260 bp, Unknown
  Description of Unknown: RightRegion for integrase B4042 sequence
gctcgcgctgtaattcaggagtgtacttgggacggggagcggctttttattacgctctaaacctcactatttcataatggtggggttccggacgcattcggagactcgcccggatcagatcgcgcatggaaatctcctgcgagccatcccggttttctacccttgtttccaggctgacaagattcgtcacatggcggatttgaagttctgccgaatcctcgatcgtaatgacgcggtcctcctgtggaatatagccggac

SEQ ID NO: 30042 - DNA, 145 bp, Unknown
  Description of Unknown: RightRegion for integrase B4043 sequence
gtgaaagacgtaataaaaaaatgtgtatgggacggggagtccctttctattatgctttgaggctcacttttttatcatgcgtctttcaggacgcatccttaaagccgtcttgatcagatcccggatggtcactgccccggctccg

SEQ ID NO: 30043 - DNA, 260 bp, Unknown
  Description of Unknown: RightRegion for integrase B4044 sequence
gctcgcgctgtgattcaggagtgtacttgggacggggagcggctttttattaagctctaaacctcactatttcataatggtggggctccggtctcatacgaagagccgtcctgataagatctcttattgtaattggagtaaccccatcggtatttgcatttctgttctcaagccttactatatttttagctcccagaagctgcagctccgctgagtcttcaattgtaataattctctcatcatcaggaatatattgtgac

SEQ ID NO: 30044 - DNA, 260 bp, Unknown
  Description of Unknown: RightRegion for integrase B4045 sequence
gttcacaataaaaaagacatccgggtgaccttcaaggatggcacggaaatcgaaacctgacccgcaagaaaaaaggaatgcctccgaaccatatcggctcggaggctttttcgttagtcatcttcccagataaagtttacgtggccgcagtgcggacatttcacatacccgtctggattgttgccgttttcccacggggctgtatatgatccgccggtcattttttggccacagttctcgcaggttctctcgttcttcct

SEQ ID NO: 30045 - DNA, 109 bp, Unknown
  Description of Unknown: RightRegion for integrase B4046 sequence
ccgggaataggaagatatatagaaaattctttcagattggagattttcttaaagctgtgaacccgctgtttatgggcatttactatcatatccaattgttaggagctaa

SEQ ID NO: 30046 - DNA, 260 bp, Unknown
  Description of Unknown: RightRegion for integrase B4047 sequence
gctcgcgctgtgattcaggagtgtacttgggacggggagcggctttttattaagctctaaacctcactatttcataatggtggggttccggacggactcgtaatgatgctttaattaaatcccttatggaaataacattctccccctgactgtttgcctgtcttgtttccattcggacaatattatcaacagaatcaagttttagttctgctgaatcttcaattgtgactattctttcgtctttaggaataaaattagat

SEQ ID NO: 30047 - DNA, 260 bp, Unknown
  Description of Unknown: RightRegion for integrase B4048 sequence
ccgggaataggaagatatatagagaattctttcagattggagattttcttaaagctgtgaacccgctgtttatgggcatttactatcatatccaaggattaggagctaatgaattaggacactttgaaatgatcagcacaatggttcatcagcttacaagaaatctttcaatggaacagattaagggaactccttttgaagcctactatgtagatcatacagcagccgtatggcctcaggccgctggtggaattccattc

SEQ ID NO: 30048 - DNA, 260 bp, Unknown
  Description of Unknown: RightRegion for integrase B4049 sequence
ccgggaataggaagatatatagagaattctttcagattggagattttcttaaagctgtgaacccgctgtttatgggcatttactatcatatccaaggattaggagctaatgaattaggacattttgaaatgatcagcacaatggttcatcagcttacaagaaatctttcaatggaacagattaagggaactccttttgaagcctactatgtagatcatacagcagccgtatggcctcaggccgctggtggaattccattc

SEQ ID NO: 30049 - DNA, 260 bp, Unknown
  Description of Unknown: RightRegion for integrase B4050 sequence
gtaataataaatcgcgatggaaacataaaatttgaatttaagaatggaaaaataatttaagtaaatgaagccagccaatagcaaagagaagacatatgctattggctggctttttaatttttattttagaaatagcttgacttatttctcatttagagttgttatgtaacaaggaaaatcaaaaataaaaaatgtcatgatggactggtataactccaaccataccagcccagcaaaaggtaacagaactacccgttaca

SEQ ID NO: 30050 - DNA, 260 bp, Unknown
  Description of Unknown: RightRegion for integrase B4051 sequence
gctcgcgctgtgattcaggagtgtacttgggacggggagcggctttttattaagctctaaacctcactatttcataatggtggggctccggtctcatacgcagagaagacttgatcagatcccgaatcgtcacggcaccgtttccggacgcattggcattgcgggtttccagacttaccaggttatcaattccttcaatctgtaactccgcggaatcctcgatggtaatgacacgctcatcatgtggaataaagttcgat

SEQ ID NO: 30051 - DNA, 260 bp, Unknown
  Description of Unknown: RightRegion for integrase B4052 sequence
gtcagtggtgacggttgcaaaggttcagcttttgcgccgtcaagcgcattaaccttttaagaaaaagccttgaattttcaaggcttttttcttttgtccttatgaaatttttttgttacactttgttacattgcttttgaaccgaaaaccctggcgaatacatccgctttttctgtaagtggagtaacagagtgaatataatatttctgcgttgtagaaatatctttgtgacctgcaaagtcagaaatcattctgtctgg

SEQ ID NO: 30052 - DNA, 139 bp, Unknown
  Description of Unknown: RightRegion for integrase B4053 sequence
cggatggggaacgaagccacctttgtcctggatattttccccagaattcaatcaaattaattaatgataacatctatgtgcaaacgaactcagtcatctggaaatggtatccactattgtacatcagcttacccgggac

SEQ ID NO: 30053 - DNA, 260 bp, Unknown
  Description of Unknown: RightRegion for integrase B4054 sequence
gctcgcgctgtgattcaggagtgtacttgggacggggagcggctttttattacgctctaaacctcactattttataatggtggggttccggcctcatacgaagcgccgatttgatcagatctctgatcgtgacctccccggttccttctacgttcgcgttccttgcctccagtcttacaatattctttatattctgaatctgcaattctgcattgtcttcaattgtgatgatgcgttcattttttggaatgtactgcgat

SEQ ID NO: 30054 - DNA, 260 bp, Unknown
  Description of Unknown: RightRegion for integrase B4055 sequence
gacttatccgaactcttttgctttatcaatggcgtcattggtatcgtcgtccggcgttaagtcaaaaaaagaacctcctttttgggaggttctttttttatttacttgcgcccgcgacatacctgtaatacgcgcagagcttctcttccgggccgcccgcgtccttgtctctcaggaacgcctccgcctgccgtgcgtaatactgcggctggtctacgccgaagtcccgggcgacgcgccatccgtcagaccactccata

SEQ ID NO: 30055 - DNA, 260 bp, Unknown
  Description of Unknown: RightRegion for integrase B4056 sequence
ggcaaaggtaacgagattaattttgagctagacattttcccgaaaattcaagaaaaatgattaatgacatcttctatgtgccagttcgctggcacattgacgttatcattgatttcaaaaagaaattcccggggttaatccccgggatattttatacttttttaatatattttgcggaagcgaatccgaaatactttccggcaattctgatgtagtaccaagatgttccatctttggctttctgagtaaagttcataaca

SEQ ID NO: 30056 - DNA, 260 bp, Unknown; identical to SEQ ID NO: 29941
  Description of Unknown: RightRegion for integrase B4057 sequence

SEQ ID NO: 30057 - DNA, 87 bp, Unknown
  Description of Unknown: RightRegion for integrase B4058 sequence
gctcgcgctgtaattcaggagtgtacttgggacggggagcggctttttattacgctctaaacctcactatttcataatggtggggtt

SEQ ID NO: 30058 - DNA, 109 bp, Unknown
  Description of Unknown: RightRegion for integrase B4059 sequence
aaagcagggatcgggcgatacatagagaatgttttttctctggaaatccaatataaatagccatatccaacatatctgtacctatgaattagcccatctcgaaatgatt

SEQ ID NO: 30059 - DNA, 109 bp, Unknown
  Description of Unknown: RightRegion for integrase B4060 sequence
ccgggaataggaagatatatagagaattctttcagattggagattttcttaaagctgtgaacccgctgtttatgggcatttactatcatatccaagggttaggagctaa

SEQ ID NO: 30060 - DNA, 109 bp, Unknown
  Description of Unknown: RightRegion for integrase B4061 sequence
ccgggaataggaagatatatagagaattctttcagattggagattttcttaaagctgtgaacccgctgtttataggcatttactatcatatccaagggttaggagctaa

SEQ ID NO: 30061 - DNA, 260 bp, Unknown
  Description of Unknown: RightRegion for integrase B4062 sequence
aaagcggggatcgggcgatacatagagaatgttttttccctggaaatccaatataaatagccatatccaacgtatctgtacctatgaattagcgcacctcgaaatgattgccgccatcgtccgccagctcaccaaaggcttaagtgctgaagaacttgaggccgccggtttcgctccttactatgtcgatcacacggccgggatctggccgcaggcagccggcggtattccgtttaatgcctgtgaattccagagcaaag

SEQ ID NO: 30062 - DNA, 260 bp, Unknown
  Description of Unknown: RightRegion for integrase B4063 sequence
gctcgcgctgtgattcaggagtgtacttgggacggggagcggctttttattaagctctaaacctcactatttcataatggtggggttccgcccgcaatataaaaaagtgaaagtaaatttacggaggtgtctttatgaatgtgatctatcgtgtacacggtgctggtggtttctacatggaaacgcagagccaggaccaggctttccgagctgcccggcaggaagctgcggcatccggccagatggctctggtatctttt

SEQ ID NO: 30063 - DNA, 109 bp, Unknown
  Description of Unknown: RightRegion for integrase B4064 sequence
atgagagatatcttgaaggaatgtgtttgggatggctcagaactttctattgtcctttaaatctcacttttttattatgatggcttccggattcatcctcagcgaagcc

SEQ ID NO: 30064 - DNA, 260 bp, Unknown
  Description of Unknown: RightRegion for integrase B4065 sequence
gacttatccgaactcttttactttatcaatggcgtcattggtatcgtcgtccggcgttaagtcaaaaaaagaacctcctttttgggaggttctttttttatttacttgcgcccgcgacatacctgtaatacgcgcagatcttctcctccggaccgcccgcatccttgtctctcagaaacgcctccgcctgccgtgcgtaatactgaggctggtctacgccgaagtcccgcgcgacgcgccatccgtcggaccactccatg

SEQ ID NO: 30065 - DNA, 117 bp, Unknown
  Description of Unknown: RightRegion for integrase B4066 sequence
tatgaagataaatttacagtttgctttaaagctggtgtggatttggatatagaacgataagaatacaaaaatagcggcaggggtttggggttgccgcctttgtcgtttttaattctc

SEQ ID NO: 30066 - DNA, 260 bp, Unknown
  Description of Unknown: RightRegion for integrase B4067 sequence
gctcgcgctgtaattcaggagtgtatttgggacggggagcggctttttattacgctctaaacctcactatttcataatggtggggttccgcccgcaatataaaaaagtgaatataaaataaaggaggtgattcagcgtggcttgtaaaattaaaacgctcctgcagtgcaagcactgcaggcatgatcttgagtttgcgacggtgtgtggtaatcgtcgtgtgccgcttctctggtgtccggactgcgatattttgtatc

SEQ ID NO: 30067 - DNA, 109 bp, Unknown
  Description of Unknown: RightRegion for integrase B4068 sequence
gctcgcgctgtgattcaggagtgtacttgggacggggagcggctttttattacgctctaaacctcactattttataatggtggggttcggccgcatacgcaaagctgcg

SEQ ID NO: 30068 - DNA, 260 bp, Unknown; identical to SEQ ID NO: 30055
  Description of Unknown: RightRegion for integrase B4069 sequence

SEQ ID NO: 30069 - DNA, 260 bp, Unknown
  Description of Unknown: RightRegion for integrase B4070 sequence
ggcaaaggtaatgagatcaattttgagctagacattttcccaagaattcaaaaaaaatgattaatgataacgtcaatgagccagttcgtcagcgcatagaagatatcatcaattccaaaaaataagttcccggggaattaaccccgggatatttttatactttttcgatatttttcgcagccacaaatccgtagtacttgcctgcaatgcggacatagtgccatgaaacaccgtttgttgctttctgagtgaaattcatc

SEQ ID NO: 30070 - DNA, 260 bp, Unknown
  Description of Unknown: RightRegion for integrase B4071 sequence
gctcgcgctgtgattcaggagtgtacttgggacggagaacggctttttattacgctctaaacctcactatttcataatggtggggctccggacgcatacgcaatgctgtgcgtatcagatcccggattgttaccggctggacgccctccatatttgcattccgtgtttctaaacgtaccagatttttgattccctgtatttgaagttccgcggaatcctcaatcgttataactctctcatcctccgggatatactgtgat

SEQ ID NO: 30071 - DNA, 260 bp, Unknown
  Description of Unknown: RightRegion for integrase B4072 sequence
gctcgcgctgtgattcaggagtgtacttgggacggggagcggctttttattaagctctaaacctcactatttcataatggtggggttccggtcgcattcgcaacgcactccgtatcaggtctcgaatcgtcaccggcataacgccttccatattcgcgtttcgggtctccagacgcacaaggttatgaattccctgtatctgcaactctgcggaatcttcaattgtaattactctttcatcctctgggatatattgcgat

SEQ ID NO: 30072 - DNA, 92 bp, Unknown
  Description of Unknown: RightRegion for integrase B4073 sequence
aaagcagggatcgggcgatacatagagaacgttttttccctggaaattcaatataaataaccatatccaacatatctgaaccgatgaattgg

SEQ ID NO: 30073 - DNA, 260 bp, Unknown
  Description of Unknown: RightRegion for integrase B4074 sequence
ccaggaataggaagatatatagagaattctttcagattggagattttcttaaagctgtgaacccgctgtttatgggcatttactatcatatccaatggttaggagctaatgaattaggacattttgaaatgatcagcacaatggttcatcagcttacaagaaatctttcaatggaacagattaagggaactccttttgaagcctactatgtagatcatacagcagccgtatggcctcaggccgctggtggaattccattc

SEQ ID NO: 30074 - DNA, 260 bp, Unknown
  Description of Unknown: RightRegion for integrase B4075 sequence
gtattacacgaacctttttactttgtcggcggctttgccgtcacaatatggttcaggtaataccgacagaaaagaacggatattctcacttgttgagagtgtccgttctttctttatgtcctgcggattgtccacggactgtccgtggacaatctgcggacagtcacagaatgcagctattttcacttaccgttcagtaagattttcgcaatttttaatcgcgcgttctcatttgcgcaagaatccacacaaacacaact

SEQ ID NO: 30075 - DNA, 260 bp, Unknown
  Description of Unknown: RightRegion for integrase B4076 sequence
gctcgcgctgtgattcaggagtgtacttgggacggggagcggctttttattatgctctaaacctcactatttcataattgtggggttccggccgcattcgcaaagatgccttaatcaagtcctgcatagtaatctcattctctccctccatgtttgcattcctcgtttctagtcgaacaagattctctacatgaaaaagctggagttctgctgaatcctctatcgtaatcactctttccctcttccctatatattctgca

SEQ ID NO: 30076 - DNA, 260 bp, Unknown
  Description of Unknown: RightRegion for integrase B4077 sequence
gctcgcgctgtgattcaggagtgtacttgggacggggagcggctttttattaagctctaaacctcactatttcataatgatggggttccggtctcatacgaagtgctgacttaatcaaatctctgatggttacagccccttctccttctgcattcggtccgcgtgcttctaagcgcaccagattttgaactccctgaatctgtaactctgcattatcctcgatcgtgatcaggcgttctccttttggtatatagttcgac

SEQ ID NO: 30077 - DNA, 109 bp, Unknown
  Description of Unknown: RightRegion for integrase B4078 sequence
aaagcggggatcgggcgatacatagagaatgttttttccctggaaatccaatataaatagccatatccaacgtatctgtacctatgaattagcccaccttgaaatgatt

SEQ ID NO: 30078 - DNA, 260 bp, Unknown
  Description of Unknown: RightRegion for integrase B4079 sequence
gtgaaggacgttataaaaaaatgtgtatgggacggggagtccctttctattatgctttgatgctcacttttttatcttgcgtccttccggacgcattcgtaatgcagatttgatcagatctctgatcgtaacggaaactgctccttccatgtttgccatctttgcttccagccggaccagattgtcaattcccctgatgcgaagttctgcattatcttctattgtgatcagtctttcgtccctggggatatattccgaca

SEQ ID NO: 30079 - DNA, 109 bp, Unknown
  Description of Unknown: RightRegion for integrase B4080 sequence
gctcgcgctgtgatccaggagtgtacttgggacggggagcggctttttattacgctgtaaacctcactatttcataatggtggggtccggtcgcattcgcagagatgct

SEQ ID NO: 30080 - DNA, 260 bp, Unknown
  Description of Unknown: RightRegion for integrase B4081 sequence
tatgatgaccactatagtgttgagtttaagtctggtattagcgtggacatccacaagtaaatacagtttataataactacacttttattgtgtaggagtcagaatgtaattgaattgtttgatgattataaagatgcggccgaaataactaatgttatttcggccgcgcttatcttttaattgtcaaatttgttcttatcaaagaagtttttgcttttaagttttctctttttatccatgtatagttctttttctaacaa

SEQ ID NO: 30081 - DNA, 260 bp, Unknown
  Description of Unknown: RightRegion for integrase B4082 sequence
tacggaagacgctggggtcaatcgcatcccatatcactgttggcggaactcaaggtctgaactaatgtgcatcatcatggtgcaatttcttcagtgccatgatgatgcacataaataaaacaatagccgccgaacgcgaagctcatgcggctattgcagttagtgtatgtgttttagaaatcaaattgtgctatgcactgcatcgatgtaatcgatggttgaggcgctggagtttcattcttttccttttcacctgacag

SEQ ID NO: 30082 - DNA, 260 bp, Unknown
  Description of Unknown: RightRegion for integrase B4083 sequence
gctcgcgctgtgattcaggagtgtacttgggacggggagcggctttttattacgctctaaacctcactatttcataatggtggggttcggacagcaatattaagcggtgaataccatggttgatcccgcgaaacagttcccagtcccgctctccggtaatcaacagctccgttccctgtcctatcaaaaatttgcgcaggctctcttcacttgtaaacaaccggacatcaaacaaattcttttgatgctgacaaaagtag

SEQ ID NO: 30083 - DNA, 260 bp, Unknown
  Description of Unknown: RightRegion for integrase B4084 sequence
ttcgttttgactcctgatagctccaccattggctcaaataagagttacaaacaccgttgatttcaaatcgaagtcaacggtgtttttgtgtttgtcagcaagcaagttcatcgctattctccaaatactgtgcaagatcaaagttgaagtccacatggatttggtatccgcgataaacttctaccctgcggataagctggctgacgatcatcttttttgcttcaaagctggcactatcgtacaggtctgcgtaagagatc

SEQ ID NO: 30084 - DNA, 260 bp, Unknown
  Description of Unknown: RightRegion for integrase B4085 sequence
gctcgcgctgtgattcaggagtgtacttgggatggggagcggctttttattaagctctaaacctcactatttcataatggtggggttccggccgcattctcaaggccgatttgatcagatcacgtattgttacagaagctgctcctgccatattggccattttcgcttccagacacaccaggttatcaattcctctgattttcagttcagcattatcctcgatcgttatcagccgttcatcttttggaatatattctgca

SEQ ID NO: 30085 - DNA, 260 bp, Unknown
  Description of Unknown: RightRegion for integrase B4086 sequence
ttcgttttgactcctgatagctccaccatacagttcgtactcgaacccgattctttgtgaaaaagggttcgggtgcgttttttgtttatcagaagtttgcgtttgcgacagcaacaaacaccccagtggggtgtttgagcaacagaataggctaccaggaaatcccaagtcgtatgacgtggaattttttgtttcgatcaaggactcgaatggcatctacgtaaaaaatccatagcaaatgagccggaagccttctgtag

SEQ ID NO: 30086 - DNA, 260 bp, Unknown
  Description of Unknown: RightRegion for integrase B4087 sequence
tataaaggcgtatctgtcgatgattttaatctgacagtgttcccgaaaatgcctttgtagtaatgaatgttatagtgcgtgtatagatgaaatagcgcacgcactataacatacaaaaaatcccccgacagagcctttttgctccgccgggggataaatgtttattaaaccttctttaaatcttttgcctttaccgccgcagtgacctgcccgccctgaccgatgacgatataatcctctctgtcacccgagcctgcctg

SEQ ID NO: 30087 - DNA, 109 bp, Unknown
  Description of Unknown: RightRegion for integrase B4088 sequence
gctcgcgctgtgattcaggagtgtacttgggacggggagcggctttttattaagctctaaacctcactatttcataatggtggggttccggtctcatacgaagagccgt

SEQ ID NO: 30088 - DNA, 109 bp, Unknown
  Description of Unknown: RightRegion for integrase B4089 sequence
cggatggggaacgaagccacctttgtcctggatattttccccagaattcaatcaaattaattaatgataacatctatgtgcaaacgaactcagtcatctggaaatggta

SEQ ID NO: 30089 - DNA, 260 bp, Unknown
  Description of Unknown: RightRegion for integrase B4090 sequence
gcttttcgaaagggcaatgatatcacattttcccttgatatctaccctaaaatccagtaatatcataacaaaattataacttttaaaccactgataacctttatgtactgacgaactggcacatcttgagatggtctccactatcgtccatcagcttacccggaatctttccatggaggaaattgaaaattccggacttggaccatactatattgatcatacagtaggcgtatggccccaggctgccggaggtattcctt

SEQ ID NO: 30090 - DNA, 260 bp, Unknown
  Description of Unknown: RightRegion for integrase B4091 sequence
ggaggggctatactcacaggaaaagacttttatctgtttgttgacaatccgagaaaataatgcaaaacttcagcgctgcagaacgtgaattactgcgtcacagatttttatatcttagacaagtacttcctatgatagaccacagggaagggaaaggcaggaaagaaaaaaatagacaatggatattacaactgtcttgtcacataacaaaagttgtggtatactaagcgctaaagtgttaaaaaaatatcacgattcag

SEQ ID NO: 30091 - DNA, 260 bp, Unknown
  Description of Unknown: RightRegion for integrase B4092 sequence
gctcgcgctgtgattcaggagtgtacttgggacggggagcggctttttattacgctctaaacctcactattttataatggtggggttccggtctcatacgaagtgctgacttaatcaaatctctgatggttacagccccttctccttctgcattcggtccgcgtgcttctaagcgcaccagattctgaactccttgaatctgtaactctgcattatcctcgatcgtgatcaggcgttctccttttggtatatagttcgac

SEQ ID NO: 30092 - DNA, 260 bp, Unknown
  Description of Unknown: RightRegion for integrase B4093 sequence
gaaaatgttctaatccgaacatttcagatatctatacctcatcacaaaatagtcaagtaagtcaaacgaaaaggaaggtggttttccaccttccttcttgttatctaataacataatcaagactaatccatcctgcacctgatttaagttttccccacttcgatgctcccgcgcctatagcttcgtctacgatagttacagacatagtttcagtgatcttgcctgtgactaatgatgctgtagttggctgctctcgaatg

SEQ ID NO: 30093 - DNA, 260 bp, Unknown
  Description of Unknown: RightRegion for integrase B4094 sequence
ccgggaataggtcgatacatagagaattcatttagattagagattttcttgaaaatgtgaagccgctattttagtgcatttgcaatcatatccaactgcgtggagctaatgagctggggcattttgaaatgattagcacaatggttcaccagctcacaagaaaccttacaatggaacagattaaaggaactccttttgaagcctactatgtagaccatacatcagcagtgtggcctcaggcggcaggtggtattccattt

SEQ ID NO: 30094 - DNA, 260 bp, Unknown
  Description of Unknown: RightRegion for integrase B4095 sequence
tacgatgaccattttgtagtggagttcaagtccgggattgagattacgataaacgaataagatgaaaataacagtgtgacgctcaggctttggtctgggcgtttttgtcgttcatagaaagttattaaatggatacacctttaatcattgacaaggaatgtcgaaatctgtataatttgggcagtaagattaaatggatatccgaaaaggagcaaggcatggctggaaaaggtagaccaactgtagatgataaacgtgac

SEQ ID NO: 30095 - DNA, 260 bp, Unknown
  Description of Unknown: RightRegion for integrase B4096 sequence
gctcgcgctgtgattcaggagtgtacttgggacggggagcggctttttattaagctctaaacctcactatttcataatggtggggttccggtctcattcgaagggctgaccggatcagatctcggatcgttactgacaccgcgcccgccatattggccatttttgcctccagacataccaggttatcaattccccggatcttaagctccgcattatcttcaatggtgatcaggcgctcatcttttggaatatattctgta

SEQ ID NO: 30096 - DNA, 260 bp, Unknown
  Description of Unknown: RightRegion for integrase B4097 sequence
gctcgcgctgtaattcaggagtgtacttgggacggggagcggctttttattacgctctaaacctcactatttcataatggtggggtccggtctcatacgaagagccgtcctgataagatctcttattgtaattggagtaaccccatcggtatttgcatttctggtctcaagccttactatatttttagctcccagaagctgcagctccgctgagtcttcaattgtaataattctctcatcatcaggaatatattgtgaca

SEQ ID NO: 30097 - DNA, 260 bp, Unknown; identical to SEQ ID NO: 29777
  Description of Unknown: RightRegion for integrase B4098 sequence

SEQ ID NO: 30098 - DNA, 260 bp, Unknown
  Description of Unknown: RightRegion for integrase B4099 sequence
gctcgcgctgtaattcaggagtgtacttgggacggggagcggctttttattacgctctaaacctcactatttcataatggtggggttccggtctcatacgaagtgccgacttgatcagatccctgatggtaacttctcctgttccttctacatttgcatttcttgcttccagtcttaccagattctttacattttgaatctgaagttctgcgttgtcttcgatcgttatgatgcgttcatttttgggtatatattgcgat

SEQ ID NO: 30099 - DNA, 260 bp, Unknown
  Description of Unknown: RightRegion for integrase B4100 sequence
agtgttgatgaatttattcttgacatcaaatttaaagataacatcattgtaaatgaataataaatgttataaatatctatatatgtatgataagcgtccatcttccaatggctgtctgagtgcttcgatacattctgttttaaattccataaattcgtccagaaataaaatgccatgatgtgctaatgtgatctctcctgccgtcggcgtcttgccgcctccaaggaatgcagctttcgggatcattggatgtggctggc
